United States Patent Application Publication US 2020/0163878 A1 - sequence listing, part 16

SEQ ID NO: 59541 - RNA, 1755 nt, Artificial Sequence
  derived and/or modified CDS sequence (wt) from hemagglutinin__InfluenzaB__AGX21831
augaaggcaauaauuguacuacucaugguaguaacauccaaugcagaucgaaucugcacugggauaacaucuucaaacucaccucauguggucaaaacagcuacucaaggggaggucaaugugacuggugugauaccacugacaacaacaccaacaaaaucuuauuuugcaaaucucaaaggaacaaggaccagagggaaacuaugcccagacugucucaacuguacagaucuggauguggccuugggcaggccaauguguguggggaccacaccuucugcgaaagcuucaauacuccacgaagucagaccuguuacauccgggugcuuuccuauaaugcacgacagaacaaaaaucaggcaacuacccaaucuucucagaggauaugaaaauaucagguuaucaacccaaaacguuaucgaugcagaaaaggcaccaggaggacccuacagacuuggaaccucaggaucuugcccuaacgcuaccaguaaaagcggauuuuucgcaacaauggcuugggcugucccaaaggacaacaacaaaaaugcaacgaacccacuaacaguagaaguaccauacauuuguacagaaggggaagaccaaauuacuguuuggggguuccauucagauaacaaaacccaaaugaagaaccucuauggagacucaaauccucaaaaguucaccucaucugcuaauggaguaaccacacauuauguuucucagauuggcggcuucccagaucaaacagaagacggaggacuaccacaaagcggcagaauuguuguugauuacaugaugcaaaaaccugggaaaacaggaacaauugucuaucaaagagguguuuuguugccucaaaagguguggugcgcgaguggcaggagcaaaguaauaaaaggguccuugccuuuaauuggugaagcagauugccuucaugaaaaauacgguggauuaaacaaaagcaagccuuacuacacaggagaacaugcaaaagccauaggaaauugcccaauaugggugaaaacaccuuugaagcuugccaauggaaccaaauauagaccuccugcaaaacuauuaaaggaaagggguuucuucggagcuauugcugguuuccuagaaggaggaugggaaggaaugauugcagguuggcacggauacacaucucacggagcacauggaguggcaguggcggcagaccuuaagaguacacaagaagcuauaaacaagauaacaaaaaaucucaauucuuugagugagcuagaaguaaagaaucuucaaagacuaaguggugccauggaugaacuccacaacgaaauacucgagcuggaugagaaaguggaugaucucagagcugacacuauaagcucacaaauagaacuugcagucuugcuuuccaacgaaggaauaauaaacagugaagacgagcaucuauuggcacuugagagaaaacuaaagaaaaugcugggucccucugcuguagacauaggaaauggaugcuucgaaaccaaacacaaaugcaaccagaccugcuuagacaggauagcugcuggcaccuuuaaugcaggagaauuuucucuccccacuuuugauucauugaacauuacugcugcaucuuuaaaugaugauggauuggauaaccauacuauacugcucuauuacucaacugcugcuucuaguuuggcuguaacauugaugcuagcuauuuuuauuguuuauauggucuccagagacaacguuucaugcuccaucugucuauaa

SEQ ID NO: 59542 - RNA, 1755 nt, Artificial Sequence
  derived and/or modified CDS sequence (wt) from hemagglutinin__InfluenzaB__AGX21842
augaaggcaauaauuguacuacucaugguaguaacauccaaugcagaucgaaucugcacugggauaacaucuucaaacucaccucauguggucaaaacagcuacucaaggggaggucaaugugacugguguaauaccacugacaacaacaccaacaaaaucuuauuuugcaaaucucaaaggaacaaggaccagagggaaacuauguccagacugucucaacuguacagaucuagauguggccuugggcagaccaaugugugugggaaccacaccuucggcaaaagcuucaauacuccacgaagucagaccuguuacauccgggugcuuuccuauaaugcacgacagaacaaaaaucagacaacuacccaaucuucucagaggauaugaaaauaucagauuaucaacccaaaacguuaucgaugcagaaaaugcaccaggaggacccuacagacuuggaaccucaggaucuugcccuaacgcuaccaguaaaagcggauucuucgcaacaauggcuugggcugucccaaaggacaacaacaaaaaugcaacgaacccacuaacaguagaaguaccauacguuuguacggaaggggaagaccaaauuacuguuuggggguuccauucagauaacaaaacccaaaugaagaaccucuauggagacucaaauccucaaaaguucaccucaucugcuaauggaguaaccacacauuauguuucucagauuggcggcuucccagcucaaacagaagacggaggacuaccacaaagcggcagaauuguuguugauuacauggugcaaaaaccuaggaaaacaggaacaauugucuaucaaagagguguuuuguugccucaaaagguguggugcgcgaguggcaggagcaaaguaauaaaaggguccuugccuuuaauuggugaagcagauugccuucaugaaaaauacgguggauuaaacaaaagcaagccuuacuacacaggagaacaugcaaaagccauaggaaauugcccaauaugggugaaaacaccuuugaagcuugccaauggaaccaaauauagaccuccugcaaaacuauuaaaggaaagggguuucuucggagcuauugcugguuuccuagaaggaggaugggaaggaaugauugcagguuggcacggauacacaucucacggagcacauggaguggcaguggcggcagaccuuaagaguacgcaagaagcuauaaacaagauaacaaaaaaucucaauucuuugagugagcuagaaauaaagaaucuucaaagacuaaguggugccauggaugaacuccacaacgaaauacucgagcuggaugagaaaguggaugaucucagagcugacacuauaagcucgcaaauagaacuugcagucuugcuuuccaaugaaggaauaauaaacagugaagaugagcaucuauuggcacuugagagaaaacuaaagaaaaugcugggucccucugcuguagacauaggaaauggaugcuucgaaaccaaacacaagugcaaccagaccugcuuagacaggauagcugcuggcaccuuuaaugcaggagaauuuucucuccccacuuuugauucacugaacauuacugcugcaucuuuaaaugaugauggauuggauaaccauacuauacugcucuauuacucaacugcugcuucuaguuuggcuguaacauugaugcuagcuauuuuuauuguuuauauggucuccagagacaacguuucaugcuccaucugucuauaa

SEQ ID NO: 59543 - RNA, 1755 nt, Artificial Sequence
  derived and/or modified CDS sequence (wt) from hemagglutinin__InfluenzaB__AGX21853
augaaggcaauaauuguacuacucaugguaguaacauccaaugcagaucgaaucugcacugggauaacaucuucaaacucaccucauguggucaaaacagcuacucaaggggaggucaaugugacugguguaauaccacugacaacaacaccaacaaaaucuuauuuugcaaaucucaaaggaacaaggaccagagggaaacuauguccagacugucucaacuguacagaucuagauguggccuugggcagaccaaugugugugggaaccacaccuucggcaaaagcuucaauacuccacgaagucagaccuguuacauccgggugcuuuccuauaaugcacgacagaacaaaaaucagacaacuacccaaucuucucagaggauaugaaaauaucagauuaucaacccaaaacguuaucgaugcagaaaaugcaccaggaggacccuacagacuuggaaccucaggaucuugcccuaacgcuaccaguaaaagcggauucuucgcaacaauggcuugggcugucccaaaggacaacaacaaaaaugcaacgaacccacuaacaguagaaguaccauacguuuguacagaaggggaagaccaaauuacuguuuggggguuccauucagauaacaaaacccaaaugaagaaccucuauggagacucaaauccucaaaaguucaccucaucugcuaauggaguaaccacacauuauguuucucagauuggcggcuucccagcucaaacagaagacggaggacuaccacaaagcggcagaauuguuguugauuacauggugcaaaaaccuaggaaaacaggaacaauugucuaucaaagagguguuuuguugccucaaaagguguggugcgcgaguggcaggagcaaaguaauaaaaggguccuugccuuuaauuggugaagcagauugccuucaugaaaaauacgguggauuaaacaaaagcaagccuuacuacacaggagaacaugcaaaagccauaggaaauugcccaauaugggugaaaacaccuuugaagcuugccaauggaaccaaauauagaccuccugcaaaacuauuaaaggaaagggguuucuucggagcuauugcugguuuccuagaaggaggaugggaaggaaugauugcagguuggcacggauacacaucucacggagcacauggaguggcaguggcggcagaccuuaagaguacgcaagaagcuauaaacaagauaacaaaaaaucucaauucuuugagugagcuagaaauaaagaaucuucaaagacuaaguggugccauggaugaacuccacaacgaaauacucgagcuggaugagaaaguggaugaucucagagcugacacuauaagcucgcaaauagaacuugcagucuugcuuuccaaugaaggaauaauaaacagugaagaugagcaucuauuggcacuugagagaaaacuaaagaaaaugcugggucccucugcuguagacauaggaaauggaugcuucgaaaccaaacacaagugcaaccagaccugcuuagacaggauagcugcuggcaccuuuaaugcaggagaauuuucucuccccacuuuugauucacugaacauuacugcugcaucuuuaaaugaugauggauuggauaaccauacuauacugcucuauuacucaacugcugcuucuaguuuggcuguaacauugaugcuagcuauuuuuauuguuuauauggucuccagagacaacguuucaugcuccaucugucuauaa

SEQ ID NO: 59544 - RNA, 1755 nt, Artificial Sequence
  derived and/or modified CDS sequence (wt) from hemagglutinin__InfluenzaB__AGX21864
augaaggcaauaauuguacuacucaugguaguaacauccaaugcagaucgaaucugcacugggauaacaucuucaaacucaccucauguggucaaaacagcuacucaaggggaggucaaugugacuggugugauaccacugacaacaacaccaacaaaaucuuauuuugcaaaucucaaaggaacaaggaccagagggaaacuaugcccagacugucucaacuguacagaucuggauguggccuugggcaggccaauguguguggggaccacaccuucugcgaaagcuucaauacuccacgaagucagaccuguuacauccgggugcuuuccuauaaugcacgacagaacaaaaaucaggcaacuacccaaucuucucagaggauaugaaaauaucagguuaucaaaccaaaacguuaucgaugcagaaaaggcaccaggaggacccuacagacuuggaaccucaggaucuugcccuaacgcuaccaguaaaagcggauuuuucgcaacaauggcuugggcugucccaaaggacaacaacaaaaaugcaacgaacccacuaacaguagaaguaccauacauuuguacagaaggggaagaccaaauuacuguuuggggguuccauucagauaacaaaacccaaaugaagaaccucuauggagacucaaauccucaaaaguucaccucaucugcuaauggaguaaccacacauuauguuucucagauuggcggcuucccagaucaaacagaagacggaggacuaccacaaagcggcagaauuguuguugauuacaugaugcaaaaaccugggaaaacaggaacaauugucuaucaaagagguguuuuguugccucaaaagguguggugcgcgaguggcaggagcaaaguaauaaaaggguccuugccuuuaauuggugaagcagauugccuucaugagaaauacgguggauuaaacaaaagcaagccuuacuacacaggagaacaugcaaaagccauaggaaauugcccaauaugggugaaaacaccuuugaagcuugccaauggaacaaaauauagaccuccugcaaaacuauuaaaggaaagggguuucuucggagcuauugcugguuuccuagaaggaggaugggaaggaaugauugcagguuggcacggauacacaucucacggagcacauggaguggcaguggcagcagaccuuaagaguacacaagaagcuauaaacaagauaacaaaaaaucucaauucuuugagugagcuagaaguaaagaaucuucaaagacuaaguggugccauggaugaacuccacaacgaaauacucgagcuggaugagaaaguggaugaucucagagcugacacuauaagcucacaaauagaacuugcagucuugcuuuccaacgaaggaauaauaaacagugaagacgagcaucuauuggcacuugagagaaaacuaaagaaaaugcugggucccucugcuguagacauaggaaauggaugcuucgaaaccaaacacaaaugcaaccagaccugcuuagacaggauagcugcuggcaccuuuaaugcaggagaauuuucucuccccacuuuugauucauugaacauuacugcugcaucuuuaaaugaugauggauuggauaaccauacuauacugcucuauuacucaacugcugcuucuaguuuggcuguaacauugaugcuagcuauuuuuauuguuuauauggucuccagagacaacguuucaugcuccaucugucuauaa

SEQ ID NO: 59545 - RNA, 1755 nt, Artificial Sequence; identical to SEQ ID NO: 59036
  derived and/or modified CDS sequence (wt) from hemagglutinin__InfluenzaB__AGX21875

SEQ ID NO: 59546 - RNA, 1755 nt, Artificial Sequence
  derived and/or modified CDS sequence (wt) from hemagglutinin__InfluenzaB__AGX21886
augaaggcaauaauuguacuacucaugguaguaacauccaaugcagaucgaaucugcacugggauaacaucuucaaacucaccucauguggucaaaacagccacucaaggggaggucaaugugacuggugugauaccacugacaacaacaccaacaaaaucuuauuuugcaaaucucaaaggaacaaggaccagagggaaacuaugcccagacugucucaacuguacagaucuggauguggccuugggcagaccaauguguguggggaccacaccuucugcgaaagcuucaauacuccacgaagucagaccuguuacaucugggugcuuuccuauaaugcacgacagaacaaaaaucaggcaacuacccaaucuucucagaggauaugaaaauaucagguuaucaacccaaaacguuaucgaugcagaaaaggcaccaggaggacccuacagacuuggaaccucaggaucuugcccuaacgcuaccaguaaaagcggauuuuucgcaacaauggcuugggcugucccaaaggacaacaacaaaaaugcaacgaacccacuaacaguagaaguaccauacauuuguacagaaggggaagaccaaauuacuguuuggggguuccauucagauaacaaaacccaaaugaagaaccucuauggggacucaaauccucaaaaguucaccucaucugcuaauggaguaaccacacauuauguuucucagauuggcggcuucccagaucaaacagaagacggaggacuaccacaaagcggcagaauuguuguugauuacaugaugcaaaaaccugggaaaacaggaacaauugucuaucaaagagguguuuuguugccucaaaagguguggugcgcgaguggcaggagcaaaguaauaaaaggguccuugcccuuaauuggugaagcagauugccuucaugaaaaauacgguggauuaaacaaaagcaagccuuacuacacaggagaacaugcaaaagccauaggaaauugcccaauaugggugaaaacaccuuugaagcuugccaauggaaccaaauauagacccccugcaaaacuauuaaaggaaagggguuucuucggagcuauugcugguuuccuagaaggaggaugggaaggaaugauugcagguuggcacggauacacaucucacggagcacauggaguggcaguggcggcagaccuuaagaguacacaagaagcuauaaacaagauaacaaaaaaucucaauucuuugagugagcuagaaguaaagaaucuucaaagacuaaguggugccauggaugaacuccacaacgaaauacucgagcuggaugagaaaguggaugaucucagagcugacacuauaagcucacaaauagaacuugcagucuugcuuuccaacgaaggaauaauaaacagugaagaugagcaucuauuggcacuugagagaaaacuaaagaaaaugcugggucccucugcuguagacauaggaaauggauguuucgaaaccaaacacaagugcaaccagaccugcuuagacaggauagcugcuggcaccuuuaaugcaggagaauuuucucuccccacuuuugauucacugaacauuacugcugcaucuuuaaaugaugauggauuggauaaccauacuauacugcucuauuacucaacugcugcuucuaguuuggcuguaacauugaugcuagcuauuuuuauuguuuauauggucuccagagacaacguuucaugcuccaucugucuauaa

SEQ ID NO: 59547 - RNA, 1755 nt, Artificial Sequence; identical to SEQ ID NO: 59041
  derived and/or modified CDS sequence (wt) from hemagglutinin__InfluenzaB__AGX21897

SEQ ID NO: 59548 - RNA, 1755 nt, Artificial Sequence
  derived and/or modified CDS sequence (wt) from hemagglutinin__InfluenzaB__AGX21908
augaaggcaauaauuguacuacucaugguaguaacauccaaugcagaucgaaucugcacugggauaacaucuucaaacucaccucauguggucaaaacagcuacucaaggggaggucaaugugacuggugugauaccacugacaacaacaccaacaaaaucuuauuuugcaaaucucaaaggaacaaggaccagagggaaacuaugcccagacugucucaacuguacagaucuggauguggccuugggcaggccaauguguguggggaccacaccuucugcgaaagcuucaauacuccacgaagucagaccuguuacauccgggugcuuuccuauaaugcacgacagaacaaaaaucaggcaacuacccaaucuucucagaggauaugaaaauaucagguuaucaacccaaaacguuaucgaugcagaaaaggcaccaggaggacccuacagacuuggaaccucaggaucuugcccuaacgcuaccaguaaaagcggauuuuucgcaacaauggcuugggcugucccaaaggacaacaacaaaaaugcaacgaacccacuaacaguagaaguaccauacauuuguacagaaggggaagaccaaauuacuguuuggggguuccauucagauaacaaaacccaaaugaagaaccucuauggagacucaaauccucaaaaguucaccucaucugcuaauggaguaaccacacauuauguuucucagauuggcggcuucccagaucaaacagaagacggaggacuaccacaaagcggcagaauuguuguugauuacaugaugcaaaaaccugggaaaacaggaacaauugucuaucaaagagguguuuuguugccucaaaagguguggugcgcgaguggcaggagcaaaguaauaaaaggguccuugccuuuaauuggugaagcagauugccuucaugaaaaauacgguggauuaaacaaaagcaagccuuacuacacaggagaacaugcaaaagccauaggaaauugcccaauaugggugaaaacaccuuugaagcuugccaauggaaccaaauauagaccuccugcaaaacuauuaaaggaaagggguuucuuuggagcuauugcugguuuccuagaaggaggaugggaaggaaugauugcagguuggcacggauacacaucucacggagcacauggaguggcaguggcggcagaccuuaagaguacacaagaagcuauaaacaagauaacaaaaaaucucaauucuuugagugagcuagaaguaaagaaucuucaaagacuaaguggugccauggaugaacuccacaacgaaauacucgagcuggaugagaaaguggaugaucucagagcugacacuauaagcucacagauagaacuugcagucuugcuuuccaacgaaggaauaauaaacagugaagacgagcaucuauuggcacuugagagaaaacuaaagaaaaugcugggucccucugcuguagacauaggaaauggaugcuucgaaaccaaacacaaaugcaaccagaccugcuuagacaggauagcugcuggcaccuuuaaugcaggagaauuuucucuccccacuuuugauucauugaacauuacugcugcaucuuuaaaugaugauggauuggauaaccauacuauacugcucuauuacucaacugcugcuucuaguuuggcuguaacauugaugcuagcuauuuuuauuguuuauauggucuccagagacaacguuucaugcuccaucugucuauaa

SEQ ID NO: 59549 - RNA, 1755 nt, Artificial Sequence
  derived and/or modified CDS sequence (wt) from hemagglutinin__InfluenzaB__AGX21919
augaaggcaauaauuguacuacucaugguaguaacauccaaugcagaucgaaucugcacugggauaacaucuucaaacucaccucauguggucaaaacagcuacucaaggggaggucaaugugacuggugugauaccacugacaacaacaccaacaaaaucuuauuuugcaaaucucaaaggaacaaggaccagagggaaacuaugcccagacugucucaacuguacagaucuggauguggccuugggcaggccaauguguguggggaccacaccuucugcgaaagcuucaauacuccacgaagucagaccuguuacauccgggugcuuuccuauaaugcacgacagaacaaaaaucaggcaacuacccaaucuucucagaggauaugaaaauaucagguuaucaacccaaaacguuaucgaugcagaaaaggcaccaggaggacccuacagacuuggaacaucaggaucuugcccuaacgcuaccaguaaaagcggauuuuucgcaacaauggcuugggcugucccaaaggacaacaacaaaaaugcaacgaacccacuaacaguagaaguaccauacauuuguacagaaggggaagaucaaauuacuguuuggggguuccauucagauaacaaaacccaaaugaagaaccucuauggagacucaaauccucaaaaguucaccucaucugcuaauggaguaaccacacauuauguuucucagauuggcggcuucccagaucaaacagaagacggaggacuaccacaaagcggcagaauuguuguugauuacaugaugcaaaaaccugggaaagcaggaacaauugucuaucaaagagguguuuuguugccucaaaagguguggugcgcuaguggcaggagcaaaguaauaaaaggguccuugccuuuaauuggugaagcagauugccuucaugaaaaauacgguggauuaaacaaaagcaagccuuacuacacaggagaacaugcaaaagccauaggaaauugcccaauaugggugaaaacaccuuugaagcuugccaauggaaccaaauauagaccuccugcaaaacuauuaaaggaaagggguuucuucggagcuauugcugguuuccuagaaggaggaugggaaggaaugauugcagguuggcacggauacacaucucacggagcacauggaguggcaguggcggcagaccuuaagaguacacaagaagcuauaaacaagauaacaaaaaaucucaauucuuugagugagcuagaaguaaagaaucuucaaagacuaaguggugccauggaugaacuccacaacgaaauacucgagcuggaugagaaaguggaugaucucagagcugacacuauaagcucacaaauagaacuugcagucuugcuuuccaacgaaggaauaauaaacagugaagacgagcaucuauuggcacuugagagaaaacuaaagaaaaugcugggucccucugcuguagacauaggaaauggaugcuucgaaaccaaacacaaaugcaaccagaccugcuuagacaggauagcugcuggcaccuuuaaugcaggagaauuuucucucccuacuuuugauucauugaacauuacugcugcaucuuuaaaugaugauggauuggauaaccauacuauacugcucuauuacucaacugcugcuucuaguuuggcuguaacauugaugcuagcuauuuuuauuguuuauauggucuccagagacaacguuucaugcucaaucugucuauaa

SEQ ID NO: 59550 - RNA, 1755 nt, Artificial Sequence; identical to SEQ ID NO: 59542
  derived and/or modified CDS sequence (wt) from hemagglutinin__InfluenzaB__AGX21941

SEQ ID NO: 59551 - RNA, 1755 nt, Artificial Sequence
  derived and/or modified CDS sequence (wt) from hemagglutinin__InfluenzaB__AGX21952
augaaggcaauaauuguacuacucaugguaguaacauccaaugcagaucgaaucugcacugggauaacaucuucaaacucaccucauguggucaaaacagcuacucaaggggaggucaaugugacuggugugauaccacugacaacaacaccaacaaaaucuuauuuugcaaaucucaaaggaacaaggaccagagggaaacuaugcccagacugucucaacuguacagaucuggauguggccuugggcaggccaauguguguggggaccacaccuucugcgaaagcuucaauacuccacgaagucagaccuguuacauccgggugcuuuccuauaaugcacgacagaacaaaaaucaggcagcuacccaaucuucucagaggauaugaaaauaucagguuaucaacccaaaacguuaucgaugcagaaaaggcaccaggagggcccuacagacuuggaaccucaggaucuugcccuaacgcuaccaguaaaagcggauuuuucgcaacaauggcuugggcugucccaaaggacaacaacaaaaaugcaacgaacccacuaacaguagaaguaccauacauuuguacagaaggggaagaccaaauuacuguuuggggguuccauucagauaacaaaacccaaaugaagaaccucuauggagacucaaauccucaaaaguucaccucaucugcuaauggaguaaccacacauuauguuucucagauuggcggcuucccagaucaaacagaagacggaggacuaccacaaagcggcagaauuguuguugauuacaugaugcaaaaaccugggaaaacaggaacaauugucuaucaaagagguguuuuguugccucaaaagguguggugcgcgaguggcaggagcaaaguaauaaaaggguccuugccuuuaauuggugaagcagauugccuucaugaaaaauacgguggauuaaacaaaagcaagccuuacuacacaggagaacaugcaaaagccauaggaaauugcccaauaugggugaaaacaccuuugaagcuugccaauggaaccaaauauagacccccugcaaaacuauuaaaggaaagggguuucuucggagcuauugcugguuuccuagaaggaggaugggaaggaaugauugcagguuggcacggauacacaucucacggagcacauggaguggcaguggcggcagaccuuaagaguacacaagaagcuauaaacaagauaacaaaaaaucucaauucuuugagugagcuagaaguaaagaaucuucaaagacuaaguggugccauggaugaacuccacaacgaaauacucgagcuggaugagaaaguggaugaucucagagcugacacuauaagcucacaaauagaacuugcagucuugcuuuccaacgaaggaauaauaaacagugaagacgagcaucuauuggcacuugagagaaaacuaaagaaaaugcugggucccucugcuguagacauaggaaauggaugcuucgaaaccaaacacaaaugcaaccagaccugcuuagacaggauagcugcuggcaccuuuaaugcaggagaauuuucucuccccacuuuugauucauugaacauuacugcugcaucuuuaaaugaugauggguuggauaaccauacuauacugcucuauuacucaacugcugcuucuaguuuggcuguaacauugaugcuagcuauuuuuauuguuuauauggucuccagagacaacguuucaugcuccaucugucuauaa

SEQ ID NO: 59552 - RNA, 1755 nt, Artificial Sequence; identical to SEQ ID NO: 59542
  derived and/or modified CDS sequence (wt) from hemagglutinin__InfluenzaB__AGX21963

SEQ ID NO: 59553 - RNA, 1755 nt, Artificial Sequence
  derived and/or modified CDS sequence (wt) from hemagglutinin__InfluenzaB__AGX21974
augaaggcaauaauuguacuacucaugguaguaacauccaaugcagaucgaaucugcacugggauaacaucuucaaacucaccucauguggucaaaacagcuacucaaggggaggucaaugugacuggugugauaccacugacaacaacaccaacaaaaucuuauuuugcaaaucucaaaggaacaaggaccagagggaaacuaugcccagacugucucaacuguacagaucuggauguggccuugggcaggccaauguguguggggaccacaccuucugcgaaagcuucaauacuccacgaagucagaccuguuacauccgggugcuuuccuauaaugcacgacagaacaaaaaucaggcaacuacccaaucuucucagaggauaugaaaauaucagguuaucaacucaaaacguuaucgaugcagaaaaggcaccaggaggacccuacagacuuggaaccucaggaucuugcccuaacgcuaccaguaaaagcggauuuuucgcaacaauggcuugggcugucccaaaggucaacaacaaaaaugcaacgaacccacuaacaguagaaguaccauacauuuguacagaaggggaagaccaaauuacuguuuggggguuccauucagauaacaaaacccaaaugaagaaccucuauggagacucaaauccucaaaaguucaccucaucugcuaauggaguaaccacacauuauguuucucagauuggcagcuucccagaucaaacagaagacggaggacuaccacaaagcggcagaauuguuguugauuacaugaugcaaaaaccugggaaaacaggaacaauugucuaucaaagagguguuuuguugccucaaaagguguggugcgcgaguggcaggagcaaaguaauaaaaggguccuugccuuuaauuggugaagcagauugccuucaugaaaaauacgguggauuaaacaaaagcaagccuuacuacacaggagaacaugcaaaagccauaggaaauugcccaauaugggugaaaacaccuuugaagcuugccaauggaaccaaauauagaccuccugcaaaacuauuaaaggaaagggguuucuucggagcuauugcugguuuccuagaaggaggaugggaaggaaugauugcagguuggcacggauacacaucucacggagcacauggaguggcaguggcggcagaccuuaagaguacacaagaagcuauaaacaagauaacaaaaaaucucaauucuuugagugagcuagaaguaaagaaucuucaaagacuaaguggugccauggaugaacuccacaacgaaauacucgagcuggaugagaaaguggaugaucucagagcugacacuauaagcucacaaauagaacuugcagucuugcuuuccaacgaaggaauaauaaacagugaagacgagcaucuauuggcacuugagagaaaacuaaagaaaaugcugggucccucugcuguagacauaggaaauggaugcuucgaaaccaaacacaaaugcaaccagaccugcuuagacaggauagcugcuggcaccuuuaaugcaggagaauuuucucuccccacuuuugauucauugaacauuacugcugcaucuuuaaaugaugauggauuggauaaccauacuauacugcucuauuacucaacugcugcuucuaguuuggcuguaacauugaugcuagcuauuuuuauuguuuauaugaucuccagagacaacguuucaugcuccaucugucuauaa

SEQ ID NO: 59554 - RNA, 1755 nt, Artificial Sequence; identical to SEQ ID NO: 59542
  derived and/or modified CDS sequence (wt) from hemagglutinin__InfluenzaB__AGX21985

SEQ ID NO: 59555 - RNA, 1755 nt, Artificial Sequence; identical to SEQ ID NO: 59036
  derived and/or modified CDS sequence (wt) from hemagglutinin__InfluenzaB__AGX21996

SEQ ID NO: 59556 - RNA, 1755 nt, Artificial Sequence; identical to SEQ ID NO: 59036
  derived and/or modified CDS sequence (wt) from hemagglutinin__InfluenzaB__AGX22007

SEQ ID NO: 59557 - RNA, 1755 nt, Artificial Sequence
  derived and/or modified CDS sequence (wt) from hemagglutinin__InfluenzaB__AGX22018
augaaggcaauaauuguacuacucaugguaguaacauccaaugcagaucgaaucugcacugggauaacaucuucaaacucaccucacguggucaaaacagcuacucaaggggaggucaaugugacuggugugauaccacugacaacaacaccaacaaaaucuuauuuugcaaaucucaaaggaacaaggaccagagggaaacuaugcccagacugucucaacuguacagaucuggauguggccuuaggcagaccaauguguguggggaccacaccuucugcgaaagcuucaauacuccacgaagucagaccuguuacaucugggugcuuuccuauaaugcacgacagaacaaaaaucaggcaacuacccaaucuucucagaggauaugaaaauaucagguuaucaacccaaaacguuaucgaugcagaaaaggcaccaggaggacccuacagacuuggaaccucaggaucuugcccuaacgcuaccaguaaaagcggauuuuucgcaacaauggcuugggcugucccaaaggacaacaacaaaaaugcaacgaacccacuaacaguagaaguaccauacauuuguacagaaggggaagaccaaauuacuguuuggggguuccauucagauaacaaaacccaaaugaagaaccucuauggggacucaaauccucaaaaguucaccucaucugcuaauggaguaaccacacauuauguuucucagauuggcggcuucccagaucaaacagaagacggaggacuaccacaaaguggcagaauuguuguugauuacaugaugcaaaaaccugggaaaacaggaacaauugucuaucaaagagguguuuuguugccucaaaagguguggugcgcgaguggcaggagcaaaguaauaaaaggguccuugccuuuaauuggugaagcagauugccuucaugaaaaauacgguggauuaaacaaaagcaagccuuacuacacaggagaacaugcaaaagccauaggaaauugcccaauaugggugaaaacaccuuugaagcuugccaauggaaccaaauauagaccuccugcaaaacuauuaaaggaaagggguuucuucggagcuauugcugguuuccuagaaggaggaugggaaggaaugauugcagguuggcacggauacacaucucacggagcacauggaguggcaguggcggcagaccuuaagaguacacaagaagcuauaaacaagauaacaaaaaaucucaauucuuugagugagcuagaaguaaagaaucuucaaagacuaaguggugccauggaugaacuccacaacgaaauacucgagcuggaugagaaaguggaugaucucagagcugacacuauaagcucacaaauagaacuugcagucuuacuuuccaacgaaggaauaauaaacagugaagaugagcaucuauuggcacuugagagaaaacuaaagaaaaugcugggccccucugcuguagacauaggaaauggaugcuucgaaaccaaacacaagugcaaccagaccugcuuagacaggauagcugcuggcaccuuuaaugcaggagaauuuucucuccccacuuuugauucacugaacauuacugcugcaucuuuaaaugaugauggauuggauaaccauacuauacugcucuauuacucaacugcugcuucuaguuuggcuguaacauugaugcuagcuaucuuuauuguuuauauggucuccagagacaacguuucaugcuccaucugucuauaa

SEQ ID NO: 59558 - RNA, 1755 nt, Artificial Sequence; identical to SEQ ID NO: 59041
  derived and/or modified CDS sequence (wt) from hemagglutinin__InfluenzaB__AGX22029

SEQ ID NO: 59559 - RNA, 1755 nt, Artificial Sequence; identical to SEQ ID NO: 59041
  derived and/or modified CDS sequence (wt) from hemagglutinin__InfluenzaB__AGX22040

SEQ ID NO: 59560 - RNA, 1755 nt, Artificial Sequence
  derived and/or modified CDS sequence (wt) from hemagglutinin__InfluenzaB__AGX22051
augaaggcaauaauuguacuacucaugguaguaacauccaaugcagaucgaaucugcacugggauaacaucuucaaacucaccucauguggucaaaacagcuacucaaggggaggucaaugugacuggugugauaccacuaacaacaacaccaacaaaaucuuauuuugcaaaucucaaaggaacaaggaccagagggaaacuaugcccagacugucucaacuguacagaucuggauguggccuugggcagaccaauguguguggggaccacaccuucggcgaaagcuucaauacuccacgaagucagaccuguuacauccgggugcuuuccuauaaugcacgacagaacaaaaaucaggcaacuacccaaucuucucagaggauaugaaaauaucagguuaucaacccaaaacgucaucgaugcagaaaaggcaccaggaggacccuacagacuuggaaccucaggaucuugcccuaacgcuaccaguaaaagcggauuuuucgcaacaauggcuugggcugucccaaaggacaacaacaaaaaugcaacgaacccacuaacaguagaaguaccauacauuuguacagaaggggaagaccaaaucacuguuuggggguuccauucagauaacaaaacccaaaugaagaaccucuauggagacucaaauccucaaaaguucaccucaucugcuaauggaguaaccacacacuauguuucucagauuggcggcuucccagaucaaauagaagacggaggacuaccacaaagcggcaggauuguuguugauuacaugaugcaaaaaccugggaaaacaggaacaauugucuaccaaagagguguuuuguugccucaaaagguguggugcgcgaguggcaggagcaaaguaauaaaaggguccuugccuuuaauuggugaagcagauugccuucaugaaaaauacgguggauuaaacaaaagcaagccuuacuacacaggagaacaugcaaaagccauaggaaauugcccaauaugggugaaaacaccuuugaagcuugccaauggaaccaaauauagaccuccugcaaaacuauuaaaggaaagggguuucuucggagcuauugcugguuuccuagaaggaggaugggaaggaaugauugcaggcuggcacggauacacaucucacggagcacauggaguggcaguggcggcggaccuuaagaguacgcaagaagcuauaaacaagauaacaaaaaaucucaauucuuugagugagcuagaaguaaagaaucuucaaagacuaaguggugccauggaugcacuccacaacgaaauacucgagcuggaugagaaaguggaugaucucagagcugacacuauaagcucgcaaauagaacuugcagucuugcuuuccaacgaaggaauaauaaacagugaagaugagcaucuauuggcacuugagagaaaacuaaagaaaaugcugggucccucugcuguagagauaggaaauggaugcuucgaaaccaaacacaagugcaaccagaccugcuuagacaggauagcugcuggcaccuuuaaugcaggagaauuuucucuccccacuuuugauucacugaacauuacugcugcaucuuuaaaugaugauggauuggauaaccauacuauacugcucuauuacucaacugcugcuucuaguuuggcuguaacauugaugcuagcuauuuuuauuguuuauauggucuccagagacaacguuucaugcuccaucugucuauaa

SEQ ID NO: 59561 - RNA, 1755 nt, Artificial Sequence; identical to SEQ ID NO: 59041
  derived and/or modified CDS sequence (wt) from hemagglutinin__InfluenzaB__AGX22062

SEQ ID NO: 59562 - RNA, 1755 nt, Artificial Sequence
  derived and/or modified CDS sequence (wt) from hemagglutinin__InfluenzaB__AGX22073
augaaggcaauaauuguacuacucaugguaguaacauccaaugcagaucgaaucugcacugggauaacaucuucaaacucaccucauguggucaaaacagccacucaaggggaggucaaugugacuggugugauaccacugacaacaacaccaacaaaaucuuauuuugcaaaucucaaaggaacaaggaccagagggaaacuaugcccagacugucucaacuguacagaucuggauguggccuugggcagaccaauguguguggggaccacaccuucugcgaaagcuucaauacuccacgaagucagaccuguuacaucugggugcuuuccuauaaugcacgacagaacaaaaaucaggcaacuacccaaucuucucagaggauaugaaaauaucagguuaucaacccaaaacguuaucgaugcagaaaaggcaccaggaggacccuacagacuuggaaccucaggaucuugcccuaacgcuaccaguaaaagcggauuuuucgcaacaauggcuugggcugucccaaaggacaacaacaaaaaugcaacgaacccacuaacaguagaaguaccauacauuuguacagaaggggaagaccaaauuacuguuuggggguuccauucagauaacaaaacccaaaugaagaaccucuauggggacucaaauccucaaaaguucaccucaucugcuaauggaguaaccacacauuauguuucucagauuggcggcuucccagaucaaacagaagacggaggacuaccacaaagcggcagaauuguuguugauuacaugaugcaaaaaccugggaaaacaggaacaauugucuaucaaagagguguuuuguugccucaaaagguguggugcgcgaguggcaggagcaaaguaauaaaaggguccuugcccuuaauuggugaagcagauugccuucaugaaaaauacgguggauuaaacaaaagcaagccuuacuacacaggagaacaugcaaaagccauaggaaauugcccaauaugggugaaaacaccuuugaagcuugccaauggaaccaaauauagacccccugcaaaacuauuaaaggaaagggguuucuucggagcuauugcugguuucauagaaggaggaugggaaggaaugauugcagguuggcacggauacacaucucacggagcacauggaguggcaguggcggcagaccuuaagaguacacaagaagcuauaaacaagauaacaaaaaaucucaauucuuugagugagcuagaaguaaagaaucuucaaagacuaaguggugccauggaugaacuccacaacgaaauacucgagcuggaugagaaaguggaugaucucagagcugacacuauaagcucacaaauagaacuugcagucuugcuuuccaacgaaggaauaauaaacagugaagaugagcaucuauuggcacuugagagaaaacuaaagaaaaugcugggucccucugcuguagacauaggaaauggauguuucgaaaccaaacacaagugcaaccagaccugcuuagacaggauagcugcuggcaccuucaaugcaggagauuuuucucuccccacuuuugauucacugaacauuacugcugcaucuuuaaaugaugauggauuggauaaccauacuauacugcucuauuacucaacugcugcuucuaguuuggcuguaacauugaugcuagcuauuuuuauuguuuauauggucuccagagacaacguuucaugcuccaucugucuauaa

SEQ ID NO: 59563 - RNA, 1755 nt, Artificial Sequence; identical to SEQ ID NO: 59542
  derived and/or modified CDS sequence (wt) from hemagglutinin__InfluenzaB__AGX22095

SEQ ID NO: 59564 - RNA, 1755 nt, Artificial Sequence; identical to SEQ ID NO: 59036
  derived and/or modified CDS sequence (wt) from hemagglutinin__InfluenzaB__AGX22106

SEQ ID NO: 59565 - RNA, 1755 nt, Artificial Sequence
  derived and/or modified CDS sequence (wt) from hemagglutinin__InfluenzaB__AGX22128
augaaggcaauaauuguacuacucaugguaguaacauccaaugcagaucgaaucugcacugggauaacaucuucaaacucaccucauguggucaaaacagcuacucaaggggaggucaaugugacugguguaauaccacugacaacaacaccaacaaaaucuuauuuugcaaaucucaaaggaacaaggaccagagggaaacuauguccagacugucucaacuguacagaucuagauguggccuugggcagaccaaugugugugggaaccacaccuucggcaaaagcuucaauacuccacgaagucagaccuguuacauccgggugcuuuccuauaaugcacgacagaacaaaaaucagacaacuacccaaucuucucagaggauaugaaaauaucagauuaucaacccaaaacguuaucgaugcagaaaaugcaccaggaggacccuacagacuuggaaccucaggaucuugcccuaacgcuaccaguaaaagcggauucuucgcaacaauggcuugggcugucccaaaggacaacaacaaaaaugcaacgaacccacuaacaguagaaguaccauacguuuguacggaaggggaagaccaaauuacuguuuggggguuccauucagauaacaaaacccaaaugaagaaccucuauggagacucaaauccucaaaaguucaccucaucugcuaauggaguaaccacacauuauguuucucagauuggcggcuucccagcucaaacagaagacggaggacuaccacaaagcggcagaauuguuguugauuacauggugcaaaaaccuaggaaaacaggaacaauugucuaucaaagagguguuuuguugccucaaaagguguggugcgcgaguggcaggagcaaaguaauaaaaggguccuugccuuuaauuggugaagcagauugccuucaugaaaaauacgguggauuaaacaaaagcaagccuuacuacacaggagaacaugcaaaagccauaggaaauugcccaauaugggugaaaacaccuuugaagcuugccaauggaaccaaauauagaccuccugcaaaacuauuaaaggaaagggguuucuucggagcuauugcugguuuccuagaaggaggaugggaaggaaugauugcagguuggcacggauacacaucucacggagcacauggaguggcaguggcggcagaccuuaagaguacgcaagaagcuauaaacaagauaacaaaaaaucucaauucuuugagugagcuagaaauaaagaaucuucaaagacuaaguggugccaugaaugaacuccacaacgaaauacucgagcuggaugagaaaguggaugaucucagagcugacacuauaagcucgcaaauagaacuugcagucuugcuuuccaaugaaggaauaauaaacagugaagaugagcaucuauuggcacuugagagaaaacuaaagaaaaugcugggucccucugcuguagacauaggaaauggaugcuucgaaaccaaacacaagugcaaccagaccugcuuagacaggauagcugcuggcaccuuuaaugcaggagaauuuucucuccccacuuuugauucacugaacauuacugcugcaucuuuaaaugaugauggauuggauaaccauacuauacugcucuauuacucaacugcugcuucuaguuuggcuguaacauugaugcuagcuauuuuuauuguuuauauggucuccagagacaacguuucaugcuccaucugucuauaa

SEQ ID NO: 59566 - RNA, 1755 nt, Artificial Sequence
  derived and/or modified CDS sequence (wt) from hemagglutinin__InfluenzaB__AGX22139
augaaggcaauaauuguacuacucaugguaguaacauccaaugcagaucgaaucugcacugggauaacaucuucaaacucaccucauguggucaaaacagcuacucaaggggaggucaaugugacuggugugauaccacugacaacaacaccaacaaaaucuuauuuugcaaaucucaaaggaacaaggaccagagggaaacuaugcccagacugucucaacuguacagaucuggauguggccuugggcaggccaauguguguggggaccacaccuucugcggaagcuucaauacuccacgaagucagaccuguuacauccgggugcuuuccuauaaugcacgacagaacaaaaauuaggcaacuacccaaucuucucagaggauaugaaaauaucagguuaucaacccaaaacguuaucgaugcagaaaaggcaccaggaggacccuacagacuuggaaccucaggaucuugcccuaacgcuaccaguaaaagcggauuuuucgcaacaauggcuugggcugucccaaaggacaacaacaaaaaugcaacgaacccacuaacaguagaaguaccauacauuuguacagaaggggaagaccaaauuacuguuuggggguuccauucagauaacaaaacccaaaugaagaaccucuauggagacucaaauccucaaaaguucaccucaucugcuaauggaguaaccacacauuauguuucucagauuggcggcuucccagaucaaacagaagacggaggacuaccacaaagcggcagaauuguuguugauuacaugaugcaaaaaccugggaaaacaggaacaauugucuaucaaagagguguuuuguugccucaaaagguguggugcgcgaguggcaggagcaaaguaauaaaaggguccuugccuuuaauuggugaagcagauugccuucaugaaaaauacgguggauuaaacaaaagcaagccuuacuacacaggagaacaugcaaaagccauaggaaauugcccaauaugggugaaaacaccuuugaagcuugccaauggaaccaaauauagaccuccugcaaaacuauuaaaggaaagggguuucuucggagcuauugcugguuuccuagaaggaggaugggaaggaaugauugcagguuggcacggauacacaucucacggagcacauggaguggcaguggcggcagaccuuaagaguacacaagaagcuauaaacaagauaacaaaaaaucucaauucuuuaagugagcuagaaguaaagaaucuucaaagacuaaguggugccauggaugaacuccacaacgaaauacucgagcuggaugagaaaguggaugaucucagagcugacacuauaagcucacaaauagaacuugcagucuugcuuuccaaugaaggaauaauaaacagugaagacgaacaucuauuggcacuugagagaaaacuaaagaaaaugcugggucccucugcuguagacauaggaaauggaugcuucgaaaccaaacacaaaugcaaccagaccugcuuagacaggauagcugcuggcaccuuuaaugcaggagaauuuucucuccccacuuuugauucauugaacauuacugcugcaucuuuaaaugaugauggauuggauaaccauacuauacugcucuauuacucaacugcugcuucuagcuuggcuguaacauugaugcuagcuauuuuuauuguuuauauggucuccagagacaacguuucaugcuccaucugucuauaa

SEQ ID NO: 59567 - RNA, 1755 nt, Artificial Sequence; identical to SEQ ID NO: 59566
  derived and/or modified CDS sequence (wt) from hemagglutinin__InfluenzaB__AGX22150

SEQ ID NO: 59568 - RNA, 1755 nt, Artificial Sequence; identical to SEQ ID NO: 59566
  derived and/or modified CDS sequence (wt) from hemagglutinin__InfluenzaB__AGX22161

SEQ ID NO: 59569 - RNA, 1755 nt, Artificial Sequence; identical to SEQ ID NO: 59546
  derived and/or modified CDS sequence (wt) from hemagglutinin__InfluenzaB__AGX22172

SEQ ID NO: 59570 - RNA, 1755 nt, Artificial Sequence
  derived and/or modified CDS sequence (wt) from hemagglutinin__InfluenzaB__AGX22183
augaaggcaauaauuguacuacucaugguaguaacauccaaugcagaucgaaucugcacugggauaacaucuucaaacucaccucauguggucaaaacagcuacucaaggggaggucaaugugacuggugugauaccacugacaacaacaccaacaaaaucuuauuuugcaaaucucaaaggaacaaggaccagagggaaacuaugcccagacugucucaacuguacagaucuggauguggccuugggcaggccaauguguguggggaccacaccuucugcggaagcuucaauacuccacgaagucagaccuguuacauccgggugcuuuccuauaaugcacgacagaacaaaaauuaggcaacuacccaaucuucucagaggauaugaaaauaucagguuaucaacccaaaacguuaucgaugcagaaaaggcaccaggaggacccuacagacuuggaaccucaggaucuugcccuaacgcuaccaguaaaagcggauuuuucgcaacaauggcuugggcugucccaaaggacaacaacaaaaaugcaacgaacccacuaacaguagaaguaccauacauuuguacagaaggggaagaccaaauuacuguuuggggguuccauucagauaacaaaacccaaaugaagaaccucuauggagacucaaauccucaaaaguucaccucaucugcuaauggaguaaccacacauuauguuucucagauuggcggcuucccagaucaaacagaagacggaggacuaccacaaagcggcagaauuguuguugauuacaugaugcaaaaaccugggaaaacaggaacaauugucuaucaaagagguguuuuguugccucaaaagguguggugcgcgaguggcaggagcaaaguaauaaaaggguccuugccuuuaauuggugaagcagauugccuucaugaaaaauacgguggauuaaacaaaagcaagccuuacuacacaggagaacaugcaaaagccauaggaaauugcccaauaugggugaaaacaccuuugaagcuugccaauggaaccaaauauagaccuccugcaaaacuauuaaaggaaagggguuucuucggagcuauugcugguuuccuagaaggaggaugggaaggaaugauugcagguuggcacggauacacaucucacggagcacauggaguggcaguggcggcagaccuuaagaguacacaagaagcuauaaacaagauaacaaaaaaucucaauucuuuaagugagcuagaaguaaagaaucuucaaagacuaaguggugccauggaugaacuccacaacgaaauacucgagcuggaugagaaaguggaugaucucagagcugacacuauaagcucacaaauagaacuugcagucuugcuuuccaaugaaggaauaauaaacagugaagacgaacaucuauuggcacuugagagaaaacuaaagaaaaugcugggucccucugcuguagacauaggaaauggaugcuucgaaaccaaacacaaaugcaaccagaccugcuuagacaggauagcugcuggcaccuuuaaugcaggagaauuuucucuccccacuuuugauucauugaacauuacugcugcaucuuuaaaugaugauggauuggauaaccauacuauacugcucuacuacucaacugcugcuucuagcuuggcuguaacauugaugcuagcuauuuuuauuguuuauauggucuccagagacaacguuucaugcuccaucugucuauaa

SEQ ID NO: 59571 - RNA, 1755 nt, Artificial Sequence; identical to SEQ ID NO: 59566
  derived and/or modified CDS sequence (wt) from hemagglutinin__InfluenzaB__AGX22194

SEQ ID NO: 59572 - RNA, 1755 nt, Artificial Sequence; identical to SEQ ID NO: 59566
  derived and/or modified CDS sequence (wt) from hemagglutinin__InfluenzaB__AGX22205

SEQ ID NO: 59573 - RNA, 1755 nt, Artificial Sequence
  derived and/or modified CDS sequence (wt) from hemagglutinin__InfluenzaB__AGX22216
augaaggcaauaauuguacuacucaugguaguaacauccaaugcagaucgaaucugcacugggauaacaucuucaaacucaccucauguggucaaaacagcuacucaaggggaggucaaugugacuggugugauaccacuaacaacaacaccaacaaaaucuuauuuugcaaaucucaaaggaacaaggaccagagggaaacuaugcccagacugucucaacuguacagaucuggauguggccuugggcagaccaauguguguggggaccacaccuucggcgaaagcuucaauacuccacgaagucagaccuguuacauccgggugcuuuccuauaaugcacgacagaacaaaaaucaggcaacuacccaaucuucucagaggauaugaaaauaucagguuaucaacccaaaacgucaucgaugcagaaaaggcaccaggaggacccuacagacuuggaaccucaggaucuugcccuaacgcuaccaguaaaagcggauuuuucgcaacaauggcuugggcugucccaaaggacaacaacaaaaaugcaacgaacccacuaacaguagaaguaccauacauuuguacagaaggggaagaccaaaucacuguuuggggguuccauucagauaacaaaacccaaaugaagaaccucuauggagacucaaauccucaaaaguucaccucaucugcuaauggaguaaccacacacuauguuucucagauuggcggcuucccagaucaaacagaagacggaggacuaccacaaagcggcaggauuguuguugauuacaugaugcaaaaaccugggaaaacaggaacaauugucuaccaaagagguguuuuguugccucaaaagguguggugcgcgaguggcaggagcaaaguaauaaaaggguccuugccuuuaauuggugaagcagauugccuucaugaaaaauacgguggauuaaacaaaagcaagccuuacuacacaggagaacaugcaaaagccauaggaaauugcccaauaugggugaaaacaccuuugaagcuugccaauggaaccaaauauagaccuccugcaaaacuauuaaaggaaagggguuucuucggagcuauugcugguuuccuagaaggaggaugggaaggaaugauugcaggcuggcacggauacacaucucacggagcacauggaguggcaguggcggcagaccuuaagaguacgcaagaagcuauaaacaagauaacaaaaaaucucaauucuuugagugagcuagaaguaaagaaucuucaaagacuaaguggugccauggaugaacuccacaacgaaauacucgagcuggaugagaaaguggaugaucucagagcugacacuauaagcucgcaaauagaacuugcagucuugcuuuccaacgaaggaauaauaaacagugaagaugagcaucuauuggcacuugagagaaaacuaaagaaaaugcugggucccucugcuguagagauaggaaauggaugcuucgaaaccaaacacaagugcaaccagaccugcuuagacaggauagcugcuggcaccuuuaaugcaggagaauuuucucuccccacuuuugauucacugaacauuacugcugcaucuuuaaaugaugauggauuggauaaccauacuauacugcucuauuacucaacugcugcuucuaguuuggcuguaacauugaugcuagcuauuuuuauuguuuauauggucuccagagacaacguuucaugcuccaucugucuauaa

SEQ ID NO: 59574 - RNA, 1755 nt, Artificial Sequence; identical to SEQ ID NO: 59542
  derived and/or modified CDS sequence (wt) from hemagglutinin__InfluenzaB__AGX22227

SEQ ID NO: 59575 - RNA, 1755 nt, Artificial Sequence
  derived and/or modified CDS sequence (wt) from hemagglutinin__InfluenzaB__AGX22238
augaaggcaauaauuguacuacucaugguaguaacauccaaugcagaucgaaucugcacugggauaacaucuucaaacucaccucauauggucaaaacagccacucaaggggaggucaaugugacuggugugauaccacugacaacaacaccaacaaaaucuuauuuugcaaaucucaaaggaacaaggaccagagggaaacuaugcccagacugucucaacuguacagaucuggauguggccuugggcagaccaauguguguggggaccacaccuucugcgaaagcuucaauacuccacgaagucagaccuguuacaucugggugcuuuccuauaaugcacgacagaacaaaaaucaggcaacuacccaaucuucucagaggauaugaaaauaucagguuaucaacccaaaacguuaucgaugcagaaaaggcaccaggaggacccuacagacuuggaaccucaggaucuugcccuaacgcuaccaguaaaagcggauuuuucgcaacaauggcuugggcugucccaaaggacaacaacaaaaaugcaacgaacccacuaacaguagaaguaccauacauuuguacagaaggggaagaccaaauuacuguuuggggguuccauucagauaacaaaacccaaaugaagaaccucuauggggacucaaauccucaaaaguucaccucaucugcuaauggaguaaccacacauuauguuucucagauuggcggcuucccagaucaaacagaagacggaggacuaccacaaagcggcagaauuguuguugauuacaugaugcaaaaaccugggaaaacaggaacaauugucuaucaaagagguguuuuguugccucaaaagguguggugcgcgaguggcaggagcaaaguaauaaaaggguccuugcccuuaauuggugaagcagauugccuucaugaaaaauacgguggauuaaacaaaagcaagccuuacuacacaggagaacaugcaaaagccauaggaaauugcccaauaugggugaaaacaccuuugaagcuugccaauggaaccaaauauagacccccugcaaaacuauuaaaggaaagggguuucuucggagcuauugcugguuuccuagaaggaggaugggaaggaaugauugcagguuggcacggauacacaucucacggagcacauggaguggcaguggcggcagaccuuaagaguacacaagaagcuauaaacaagauaacaaaaaaucucaauucuuugagugagcuagaaguaaagaaucuucaaagacuaaguggugccauggaugaacuccacaacgaaauacucgagcuggaugagaaaguggaugaucucagagcugacacuauaagcucacaaauagaacuugcagucuugcuuuccaacgaaggaauaauaaacagugaagaugagcaucuauuggcacuugagagaaaacuaaagaaaaugcugggucccucugcuguagacauaggaaauggauguuucgaaaccaaacacaagugcaaccagaccugcuuagauaggauagcugcuggcaccuuuaaugcaggagaauuuucucuccccacuuuugauucacugaacauuacugcugcaucuuuaaaugaugauggauuggauaaccauacuauacugcucuauuacucaacugcugcuucuaguuuggcuguaacauugaugcuagcuauuuuuauuguuuauauggucuccagagacaacguuucaugcuccaucugucuauaa

SEQ ID NO: 59576 - RNA, 1755 nt, Artificial Sequence; identical to SEQ ID NO: 59036
  derived and/or modified CDS sequence (wt) from hemagglutinin__InfluenzaB__AGX22249

SEQ ID NO: 59577 - RNA, 1755 nt, Artificial Sequence
  derived and/or modified CDS sequence (wt) from hemagglutinin__InfluenzaB__AGX22260
augaaggcaauaauuguacuacucaugguaguaacauccaaugcagaucgaaucugcacugggauaacaucuucaaacucaccucauguggucaaaacagcuacucaaggggaggucaaugugacuggugugauaccacugacaacaacaccaacaaaaucuuauuuugcaaaucucaaaggaacaaggaccagagggaaacuaugcccagacugucucaacuguacagaucuggauguggccuugggcaggccaauguguguggggaccacaccuucugcgaaagcuucaauacuccacgaagucagaccuguuacauccgggugcuuuccuauaaugcacgacagaacaaaaaucaggcaacuacccaaucuucucagaggauaugaaaauaucagguuaucaacccaaaacguuaucgaugcagaaaaagcaccaggaggacccuacagacuuggaaccucaggaucuugcccuaacgcuaccaguaaaagcggauuuuucgcaacaauggcuugggcugucccaaaggacaacaacaaaaaugcaacgaacccacuaacaguagaaguaccauacauuuguacagaaggggaagaccaaauuacuguuuggggguuccauucagauaacaaaacccaaaugaagaaccucuauggagacucaaauccucaaaaguucaccucaucugcuaauggaguaaccacacauuauguuucucagauuggcggcuucccagaucaaacagaagacggaggacuaccacaaagcggcagaauuguuguugauuacaugaugcaaaaaccugggaaaacaggaacaauugucuaucaaagagguguuuuguugccucaaaagguguggugcgcgaguggcaggagcaaaguaauaaaaggguccuugccuuuaauuggugaagcagauugccuucaugaaaaauacgguggauuaaacaaaagcaagccuuacuacacaggagaacaugcaaaagccauaggaaauugcccaauaugggugaaaacaccuuugaagcuugccaauggaaccaaauauagaccuccugcaaaacuauuaaaggaaagggguuucuuuggagcuauugcugguuuccuagaaggaggaugggaaggaaugauugcagguuggcacggauacacaucucacggagcacauggaguggcaguggcggcagaccuuaagaguacacaagaagcuauaaacaagauaacaaaaaaucucaauucuuugagugagcuagaaguaaagaaucuucaaagacuaaguggugccauggaugaacuccacaacgaaauacucgagcuggaugagaaaguggaugaucucagagcugacacuauaagcucacaaauagaacuugcagucuugcuuuccaacgaaggaauaauaaacagugaagacgagcaucuauuggcacuugagagaaaacuaaagaaaaugcugggucccucugcuguagacauaggaaauggaugcuucgaaaccaaacacaaaugcaaccagaccugcuuagacaggauagcugcuggcaccuuuaaugcaggagaauuuucucuccccaccuuugauucauugaacauuacugcugcaucuuuaaaugaugauggauuggauaaccauacuauacugcucuauuacucaacugcugcuucuaguuuggcuguaacauugaugcuagcuauuuuuauuguuuauauggucuccagagacaacguuucaugcuccaucugucuauaa

SEQ ID NO: 59578 - RNA, 1755 nt, Artificial Sequence
  derived and/or modified CDS sequence (wt) from hemagglutinin__InfluenzaB__AGX22271
augaaggcaauaauuguacuacucaugguaguaacauccaaugcagaucgaaucugcacugggauaacaucuucaaacucaccucauguggucaaaacagcuacucaaggggaggucaaugugacuggugugauaccacuaacaacaacaccaacaaaaucuuauuuugcaaaucucaaaggaacaagaaccagagggaaacuaugcccagacugucucaacuguacagaucuggauguggccuugggcagaccaauguguguggggaccacaccuucggcgaaagcuucaauacuccacgaagucagaccuguuacauccgggugcuuuccuauaaugcacgacagaacaaaaaucaggcaacuacccaaucuucucagaggauaugaaaauaucagguuaucaacccaaaacgucaucgaugcagaaaaggcaccaggaggacccuacagacuuggaaccucaggaucuugcccuaacgcuaccaguaaaagcggauuuuucgcaacaauggcuugggcugucccaaaggacaacaacaaaaaugcaacgaacccacuaacaguagaaguaccauacauuuguacagaaggggaagaccaaaucacuguuuggggguuccauucagauaacaaaacccaaaugaagaaccucuauggagacucaaauccucaaaaguucaccucgucugcuaauggaguaaccacacacuauguuucucagauuggcggcuucccagaucaaacagaagacggaggacuaccacaaagcggcaggauuguuguugauuacaugaugcaaaaaccugggaaaacaggaacaauugucuaccaaagagguguuuuguugccucaaaagguguggugcgcgaguggcaggagcaaaguaauaaaaggguccuugccuuuaauuggugaagcagauugccuucaugaaaaauacgguggauuaaacaaaagcaagccuuacuacacaggagaacaugcaaaagccauaggaaauugcccaauaugggugaaaacaccuuugaagcuugccaauggaaccaaauauagaccuucugcaaaacuauuaaaggaaagggguuucuucggagcuauugcugguuuccuagaaggaggaugggaaggaaugauugcaggcuggcacggauacacaucucacggagcacauggaguggcaguggcggcggaccuuaagaguacgcaagaagcuauaaacaagauaacaaaaaaucucaauucuuugagugagcuagaaguaaagaaucuucaaagacuaaguggugccauggaugaacuccacaacgaaauacucgagcuggaugagaaaguggaugaucucagagcugacacuauaagcucgcaaauagaacuugcagucuugcuuuccaacgaaggaauaauaaacagugaagaugagcaucuauuggcacuugagagaaaacuaaagaaaaugcugggucccucugcuguagagauaggaaauggaugcuucgaaaccaaacacaagugcaaccagaccugcuuagacaggauagcugcuggcaccuuuaaugcaggagaauuuucucuccccacuuuugauucacugaacauuacugcugcaucuuuaaaugaugauggauuggauaaccauacuauacugcucuauuacucaacugcugcuucuaguuuggcuguaacauugaugcuagcuauuuuuauuguuuauauggucuccagagacaacguuucaugcuccaucugucuauaa

SEQ ID NO: 59579 - RNA, 1755 nt, Artificial Sequence
  derived and/or modified CDS sequence (wt) from hemagglutinin__InfluenzaB__AGX22282
augaaggcaauaauuguacuacucaugguaguaacauccaaugcagaucgaaucugcacugggauaacaucuucaaacucaccucauguggucaaaacagcuacucaaggggaggucaaugugacuggugugauaccacugacaacaacaccaacaaaaucuuauuuugcaaaucucaaaggaacaaggaccagagggaaacuaugcccagacugucucaacuguacagaucuggauguggccuugggcaggccaauguguguggggaccacaccuucugcgaaagcuucaauacuccacgaagucagaccuguuacauccgggugcuuuccuauaaugcacgacagaacaaaaaucaggcaacuacccaaucuucucagaggauaugaaaauaucagguuaucaacccaaaacguuaucgaugcagaaaaggcaccaggaggacccuacagacuuggaaccucaggaucuugcccuaacgcuaccaguaaaagcggauuuuucgcaacaauggcuugggcugucccaaaggacaacaacaaaaaugcaacgaacccacuaacaguagaaguaccauacauuuguacagaaggggaagaccaaauuacuguuuggggguuccauucagauaacaaaacccaaaugaagaaccucuauggagacucaaauccucaaaaguucaccucaucugcuaauggaguaaccacacauuauguuucucagauuggcgacuucccagaucaaacagaagacggaggacuaccacaaagcggcagaauuguuguugauuacaugaugcaaaaaccugggaaaacaggaacaauugucuaucaaagagguguuuuguugccucaaaagguguggugcgcgaguggcaggagcaaaguaauaaaaggguccuugccuuuaauuggugaagcagauugccuucaugaaaaauacgguggauuaaacaaaagcaagccuuacuacacaggagaacaugcaaaagccauaggaaauugcccaauaugggugaaaacaccuuugaagcuugccaauggaaccaaauauagaccuccugcaaaacuauuaaaggaaagggguuucuuuggagcuauugcugguuuccuagaaggaggaugggaaggaaugauugcagguuggcacggauacacaucucacggagcacauggaguggcaguggcggcagaccuuaagaguacacaagaagcuauaaacaagauaacaaaaaaucucaauucuuugagugagcuagaaguaaagaaucuucaaagacuaaguggugccauggaugaacuccacaacgaaauacucgagcuugaugagaaaguggaugaucucagagcugacacuauaagcucacaaauagaacuugcagucuugcuuuccaacgaaggaauaauaaacagugaagacgagcaucuauuggcacuugagagaaaacuaaagaaaaugcugggucccucugcuguagacauaggaaauggaugcuucgaaaccaaacacaaaugcaaccagaccugcuuagacaggauagcugcuggcaccuuuaaugcaggagaauuuucucuccccaccuuugauucauugaacauuacugcugcaucuuuaaaugaugauggauuggauaaccauacuauacugcucuauuacucaacugcugcuucuaguuuggcuguaacauugaugcuagcuauuuuuauuguuuauauggucuccagagacaacguuucaugcuccaucugucuauaa

SEQ ID NO: 59580 - RNA, 1755 nt, Artificial Sequence
  derived and/or modified CDS sequence (wt) from hemagglutinin__InfluenzaB__AGX22293
augaaggcaauaauuguacuacucaugguaguaacauccaaugcagaucgaaucugcacugggauaacaucuucaaacucaccucacguggucaaaacagcuacucaaggggaggucaauguaacuggugugauaccacugacaacaacaccaacaaaaucuuauuuugcaaaucucaaaggaacaaggaccagagggaaacuaugcccagacugucucaacuguacagaucuggauguggccuuaggcagaccaauguguguggggaccacaccuucugcgaaagcuucaauacuccacgaagucagaccuguuacaucugggugcuuuccuauaaugcacgacagaacaaaaaucaggcaacuacccaaucuucucagaggauaugaaaauaucagguuaucaacccaaaacguuaucgaugcagaaaaggcaccaggaggacccuacagacuuggaaccucaggaucuugcccuaacgcuaccaguaaaagcggauuuuucgcaacaauggcuugggcugucccaaaggacaacaacaaaaaugcaacgaacccacuaacaguagaaguaccauacauuuguacagaaggggaagaccaaauuacuguuuggggguuccauucagauaacaaaacccaaaugaagaaccucuauggggacucaaauccucaaaaguucaccucaucugcuaauggaguaaccacacauuauguuucucagauuggcggcuucccagaucaaacagaagacggaggacuaccacaaaguggcagaauuguuguugauuacaugaugcaaaaaccugggaaaacaggaacaauugucuaucaaagagguguuuuguugccucaaaagguguggugcgcgaguggcaggagcaaaguaauaaaaggguccuugccuuuaauuggugaagcagauugccuucaugaaaaauacgguggauuaaacaaaagcaagccuuacuacacaggagaacaugcaaaagccauaggaaauugcccaauaugggugaaaacaccuuugaagcuugccaauggaaccaaauauagaccuccugcaaaacuauuaaaggaaagggguuucuucggagcuauugcugguuuccuagaaggaggaugggaaggaaugauugcagguuggcacggauacacaucucacggagcacauggaguggcaguggcggcagaccuuaagaguacacaagaagcuauaaacaagauaacaaaaaaucucaauucuuugagugagcuagaaguaaagaaucuucaaagacuaaguggugccauggaugaacuccacaacgaaauacucgagcuggaugagaaaguggaugaucucagagcugacacuauaaguucacaaauagaacuugcagucuuacuuuccaacgaaggaauaauaaacagugaagaugagcaucuauuggcacuugagagaaaacuaaagaaaaugcugggccccucugcuguagacauaggaaauggaugcuucgaaaccaaacacaagugcaaccagaccugcuuagacaggauagcugcuggcaccuuuaaugcaggagaauuuucucuccccacuuuugauucacugaacauuacugcugcaucuuuaaaugaugauggauuggauaaccauacuauacugcucuauuacucaacugcugcuucuaguuuggcuguaacauugaugcuagcuaucuuuauuguuuauauggucuccagagacaacguuucaugcuccaucugucuauaa

SEQ ID NO: 59581 - RNA, 1755 nt, Artificial Sequence
  derived and/or modified CDS sequence (wt) from hemagglutinin__InfluenzaB__AGX22304
augaaggcaauaauuguacuacucaugguaguaacauccaaugcagaucgaaucugcacugggauaacaucuucaaacucaccucauguggucaaaacagcuacucaaggggaggucaaugugacuggugugauaccacugacaacaacaccaacaaaaucuuauuuugcaaaucucaaaggaacaaggaccagagggaaacuaugcccagacugucucaacuguacagaucuggauguggccuugggcaggccaauguguguggggaccacaccuucugcgaaagcuucaauacuccacgaagucagaccuguuacauccgggugcuuuccuauaaugcacgacagaacaaaaaucaggcaacuacccaaucuucucagaggauaugaaaauaucagguuaucaacccaaaacguuaucgaugcagaaaaggcaccaggaggacccuacagacuuggaaccucaggaucuugcccuaacgcuaccaguaaaagcggauuuuucgcaacaauggcuugggcugucccaaaggacaacaacaaaaaugcaacgaacccacuaacaguagaaguaccauacauuuguacagaaggggaagaccaaauuacuguuuggggguuccauucagauaacaaaacccaaaugaagaaccucuauggagacucaaauccucaaaaguucaccucaucuacuaauggaguaaccacacauuauguuucucagauuggcggcuucccagaucaaacagaagacggaggacuaccacaaagcggcagaauuguuguugauuacaugaugcaaaaaccugggaaaacaggaacaauugucuaucaaagagguguuuuguugccucaaaagguguggugcgcgaguggcaggagcaaaguaauaaaaggguccuugccuuuaauuggugaagcagauugccuucaugaaaaauacgguggauuaaacaaaagcaagccuuacuacacaggagaacaugcaaaagccauaggaaauugcccaauaugggugaaaacaccuuugaagcuugccaauggaaccaaauauagaccuccugcaaaacuauuaaaggaaagggguuucuuuggagcuauugcugguuuccuagaaggaggaugggaaggaaugauugcagguuggcacggauacacaucucacggagcacauggaguggcaguggcggcagaccuuaagaguacacaagaagcuauaaacaagauaacaaaaaaucucaauucuuugagugagcuagaaguaaagaaucuucaaagacuaaguggugccauggaugaacuccacaacgaaauacucgagcuggaugagaaaguggaugaucucagagcugacacuauaagcucacaaauagaacuugcagucuugcuuuccaacgaaggaauaauaaacagugaagacgagcaucuauuggcacuugagagaaaacuaaagaaaaugcugggucccucugcuguagacauaggaaauggaugcuucgaaaccaaacacaaaugcaaccagaccugcuuagacaggauagcugcuggcaccuuuaaugcaggagaauuuucucuccccaccuuugauucauugaacauuacugcugcaucuuuaaaugaugauggauuggauaaccauacuauacugcucuauuacucaacugcugcuucuaguuuggcuguaacauugaugcuagcuauuuuuauuguuuauauggucuccagagacaacguuucaugcuccaucugucuauaa

SEQ ID NO: 59582 - RNA, 1755 nt, Artificial Sequence; identical to SEQ ID NO: 59546
  derived and/or modified CDS sequence (wt) from hemagglutinin__InfluenzaB__AGX22315

SEQ ID NO: 59583 - RNA, 1755 nt, Artificial Sequence
  derived and/or modified CDS sequence (wt) from hemagglutinin__InfluenzaB__AGX22326
augaaggcaauaauuguacuacucaugguaguaacauccaaugcagaucgaaucugcacugggauaacaucuucaaacucaccucauguggucaaaacagcuacucaaggggaggucaaugugacuggugugauaccacugacaacaacaccaacaaaaucuuauuuugcaaaucucaaaggaacaaggaccagagggaaacuaugcccagacugucucaacuguacagaucuggauguggccuugggcaggccaauguguguggggaccacaccuucugcgaaagcuucaauacuccacgaagucagaccuguuacauccgggugcuuuccuauaaugcacgacagaacaaaaaucaggcaacuagccaaucuucucagaggauaugaaaauaucagguuaucaacccaaaacguuaucgaugcagaaaaggcaccaggaggacccuacagacuuggaaccucaggaucuugcccuaacgcuaccaguaaaagcggauuuuucgcaacaauggcuugggcugucccaaaggacaacaacaaaaaugcaacgaacccacuaacaguagaaguaccauacauuuguacagagggggaagaccaaauuacuguuuggggguuccauucagauaacaaaacccaaaugaagaaccucuauggagacucaaauccucaaaaguucaccucaucugcuaauggaguaaccacacauuauguuucucagauuggcggcuucccagaucaaacagaagacggaggacuaccacaaagcggcagaauuguuguugauuacaugaugcaaaaaccugggaaaacaggaacaauugucuaucaaagagguguuuuguugccucaaaagguguggugcgcgaguggcaggagcaaaguaauaaaaggguccuugccuuuaauuggugaagcagauugccuucaugaaaaguacgguggauuaaacaaaagcaagccuuacuacacaggagaacaugcaaaagccauaggaaauugcccaauaugggugaaaacaccuuugaagcuugccaauggaaccaaauauagaccuccugcaaaacuauuaaaggaaagggguuucuucggagcuauugcugguuuccuagaaggaggaugggaaggaaugauugcagguuggcacggauacacaucucacggagcacauggaguggcaguggcggcagaccuuaagaguacacaagaagcuauaaacaagauaacaaaaaaucucaauucuuugagugagcuagaaguaaagaaucuucaaagacuaaguggugccauggaugaacuccacaacgaaauacucgagcuggaugagaaaguggaugaucucagagcugacacuauaagcucacaaauagaacuugcagucuugcuuuccaacgaaggaauaauaaacagugaagacgagcaucuauuggcacuugagagaaaacuaaagaaaaugcugggucccucugcuguagacauaggaaauggaugcuucgaaaccaaacacaaaugcaaccagaccugcuuagacaggauagcugcuggcaccuuuaaugcaggagaauuuucccuccccacuuuugauucauugaacauuacugcugcaucuuuaaaugaugauggauuggauaaccauacuauacugcucuauuacucaacugcugcuucuaguuuggcuguaacauugaugcuagcuauuuuuauuguuuauauggucuccagagacaacguuucaugcuccaucugucuauaa

SEQ ID NO: 59584 - RNA, 1755 nt, Artificial Sequence; identical to SEQ ID NO: 59542
  derived and/or modified CDS sequence (wt) from hemagglutinin__InfluenzaB__AGX22337

SEQ ID NO: 59585 - RNA, 1755 nt, Artificial Sequence; identical to SEQ ID NO: 59542
  derived and/or modified CDS sequence (wt) from hemagglutinin__InfluenzaB__AGX22348

SEQ ID NO: 59586 - RNA, 1755 nt, Artificial Sequence
  derived and/or modified CDS sequence (wt) from hemagglutinin__InfluenzaB__AGX22359
augaaggcaauaauuguacuacucaugguaguaacauccaaugcagaucgaaucugcacugggauaacaucuucaaacucaccucauguggucaaaacagcuacucaaggggaggucaaugugacugguguaauaccacugacaacaacaccaacaaaaucuuauuuugcaaaucucaaaggaacaaggaccagagggaaacuauguccagacugucucaacuguacagaucuagauguggccuugggcagaccaaugugugugggaaccacaccuucggcaaaagcuucaauacuccacgaagucagaccuguuacauccgggugcuuuccuauaaugcacgacagaacaaaaaucagacaacuacccaaucuucucagaggauaugaaaauaucagauuaucaacccaaaacguuaucgaugcagaaaaugcaccaggaggacccuacagacuuggaaccucaggaucuugcccuaacgcuaccaguaaaagcggauucuucgcaacaauggcuugggcugucccaaaggacaacaacaaaaaugcaacgaacccacuaacaguagaaguaccauacguuuguacggaaggggaagaccaaauuacuguuuggggguuccauucagauaacaaaacccaaaugaagaaccucuauggagacucaaauccucaaaaguucaccucaucugcuaauggaguaaccacacauuauguuucucagauuggcggcuucccagcucaaacagaagacggaggacuaccacaaagcggcagaauuguuguugauuacauggugcaaaaaccuaagaaaacaggaacaauugucuaucaaagagguguuuuguugccucaaaagguguggugcgcgaguggcaggagcaaaguaauaaaaggguccuugccuuuaauuggugaagcagauugccuucaugaaaaauacgguggauuaaacaaaagcaagccuuacuacacaggagaacaugcaaaagccauaggaaauugcccaauaugggugaaaacaccuuugaagcuugccaauggaaccaaauauagaccuccugcaaaacuauuaaaggaaagggguuucuucggagcuauugcugguuuccuagaaggaggaugggaaggaaugauugcagguuggcacggauacacaucucacggagcacauggaguggcaguggcggcagaccuuaagaguacgcaagaagcuauaaacaagauaacaaaaaaucucaauucuuugagugagcuagaaauaaagaaucuucaaagacuaaguggugccauggaugaacuccacaacgaaauacucgagcuggaugagaaaguggaugaucucagagcugacacuauaagcucgcaaauagaacuugcagucuugcuuuccaaugaaggaauaauaaacagugaagaugagcaucuauuggcacuugagagaaaacuaaagaaaaugcugggucccucugcuguagacauaggaaauggaugcuucgaaaccaaacacaagugcaaccagaccugcuuagacaggauagcugcuggcaccuuuaaugcaggagaauuuucucuccccacuuuugauucacugaacauuacugcugcaucuuuaaaugaugauggauuggauaaccauacuauacugcucuauuacucaacugcugcuucuaguuuggcuguaacauugaugcuagcuauuuuuauuguuuauauggucuccagagacaacguuucaugcuccaucugucuauaa

SEQ ID NO: 59587 - RNA, 1755 nt, Artificial Sequence; identical to SEQ ID NO: 59036
  derived and/or modified CDS sequence (wt) from hemagglutinin__InfluenzaB__AGX22370

SEQ ID NO: 59588 - RNA, 1755 nt, Artificial Sequence
  derived and/or modified CDS sequence (wt) from hemagglutinin__InfluenzaB__AGX22381
augaaggcaauaauuguacuacucaugguaguaacaucuaaugcagaucgaaucugcacugggauaacaucuucaaacucaccucauguggucaaaacagcuacucaaggggaggucaaugugacuggugugauaccacugacaacaacaccaacaaaaucuuauuuugcaaaucucaaaggaacaaggaccagagggaaacuaugcccagacugucucaacuguacagaucuggauguggccuugggcaggccaauguguguggggaccacaccuucugcgaaagcuucaauacuccacgaagucagaccuguuacauccgggugcuuuccuauaaugcacgacagaacaaaaaucaggcaacuauccaaucuucucagaggauaugaaaauaucagguuaucaacccaaaacguuaucgaugcagaaaaggcaccaggaggacccuacagacuuggaaccucaggaucuugcccuaacgcuaccaguaaaagcggauuuuucgcaacaauggcuugggcugucccaaaggacaacaacaaaaaugcaacgaacccacuaacaguagaaguaccauacauuuguacagaaggggaagaccaaauuacuguuuggggguuccauucagauaacaaaacccaaaugaagaaccucuauggagacucaaauccucaaaaguucaccucaucugcuaauggaguaaccacacauuauguuucucagauuggcggcuucccagaucaaacagaagacggaggacuaccacaaagcggcagaauuguuguugauuacaugaugcaaaaaccugggaaaacaggaacaauugucuaucaaagagguguuuuguugccucaaaagguguggugcgcgaguggcaggagcaaaguaauaaaaggguccuugccuuuaauuggugaagcagauugccuucaugaaaaauacgguggauuaaacaaaagcaagccuuacuacacaggagaacaugcaaaagccauaggaaauugcccaauaugggugaaaacaccuuugaagcuugccaauggaaccaaauauagaccuccugcaaaacuauuaaaggaaagggguuucuuuggagcuauugcugguuuccuagaaggaggaugggaaggaaugauugcagguuggcacggauacacaucucacggagcacauggaguggcaguggcggcagaccuuaagaguacacaagaagcuauaaacaagauaacaaaaaaucucaauucuuugagugagcuagaaguaaagaaucuucaaagacuaaguggugccauggaugaacuccacaacgaaauacucgagcuggaugagaaaguggaugaucucagagcugacacuauaagcucacaaauagaacuugcagucuugcuuuccaacgaaggaauaauaaacagugaagacgagcaucuauuggcacuugagagaaaacuaaagaaaaugcugggucccucugcuguagacauaggaaauggaugcuucgaaaccaaacacaaaugcaaccagaccugcuuagacaggauagcugcuggcaccuuuaaugcaggagaauuuucucuccccaccuuugauucauugaacauuacugcugcaucuuuaaaugaugauggauuggauaaccauacuauacugcucuauuacucaacugcugcuucuaguuuggcuguaacauugaugcuagcuauuuuuauuguuuauauggucuccagagacaacguuucaugcuccaucugucuauaa

SEQ ID NO: 59589 - RNA, 1755 nt, Artificial Sequence; identical to SEQ ID NO: 59041
  derived and/or modified CDS sequence (wt) from hemagglutinin__InfluenzaB__AGX22392

SEQ ID NO: 59590 - RNA, 1755 nt, Artificial Sequence
  derived and/or modified CDS sequence (wt) from hemagglutinin__InfluenzaB__AGX22403
augaaggcaauaauuguacuacucaugguaguaacauccaaugcagaucgaaucugcacugggauaacaucuucaaacucaccucauguggucaaaacagccacucaaggggaggucaaugugacuggugugauaccacugacaacaacaccaacaaaaucuuauuuugcaaaucucaaaggaacaaggaccagagggaaacuaugcccagacugucucaacuguacagaucuggauguggccuugggcagaccaauguguguggggaccacaccuucugcgaaagcuucaauacuccacgaagucagaccuguuacaucugggugcuuuccuauaaugcacgacagaacaaaaaucaggcaacuacccaaucuucucagaggauaugaaaauaucagguuaucaacccaaaacguuaucgaugcagaaaaggcaccaggaggacccuacagacuuggaaccucaggaucuugcccuaacgcuaccaguaaaagcggauuuuucgcaacaauggcuugggcugucccaaaggacaacaacaaaaaugcaacgaacccacuaacaguagaaguaccauacauuuguacagaaggggaagaccaaauuacuguuuggggguuccauucagauaacaaaacccaaaugaagaaccucuauggggacucaaauccucaaaaguucaccucaucugcuaauggaguaaccacacauuauguuucucagauuggcggcuucccagaucaaacagaagacggaggacuaccacaaagcggcagaauuguuguugauuacaugaugcaaaaaccugggaaaacaggaacaauugucuaucaaagagguguuuuguugccucaaaagguguggugcgcgaguggcaggagcaaaguaauaaaaggguccuugcccuuaauuggugaagcagauugccuucaugaaaaauacgguggauuaaacaaaagcaagccuuacuacacaggagaacaugcaaaagccauaggaaauugcccaauaugggugaaaacaccuuugaagcuugccaauggaaccaaauauagacccccugcaaaacuauuaaaggaaagggguuucuucggagcuauugcugguuuccuagaaggaggaugggaaggaaugauugcagguuggcacggauacacaucucacggagcacauggaguggcaguggcggcagaccuuaagaguacacaagaagcuauaaacaagauaacaaaaaaucucaauucuuugagugagcuagaaguaaagaaucuucaaagacuaaguggugccauggaugaacuccacaacgaaauacucgagcuggaugagaaaguggaugaucucagagcugacacuauaagcucacaaauagaacuugcagucuugcuuuccaacgaaggaauaauaaacagugaagaugagcaucuauuggcacuugagagaaaacuaaagaaaaugcugggucccucugcuguagacauaggaaauggauguuucgaaaccaaacacaagugcaaccagaccugcuuagacaggauagcugcuggcaccuucaaugcaggagauuuuucucuccccacuuuugauucacugaacauuacugcugcaucuuuaaaugaugauggauuggauaaccauacuauacugcucuauuacucaacugcugcuucuaguuuggcuguaacauugaugcuagcuauuuuuauuguuuauauggucuccagagacaacguuucaugcuccaucugucuauaa

SEQ ID NO: 59591 - RNA, 1755 nt, Artificial Sequence; identical to SEQ ID NO: 59546
  derived and/or modified CDS sequence (wt) from hemagglutinin__InfluenzaB__AGX22414

SEQ ID NO: 59592 - RNA, 1755 nt, Artificial Sequence
  derived and/or modified CDS sequence (wt) from hemagglutinin__InfluenzaB__AGX22425
augaaggcaauaauuguacuacucaugguaguaacauccaaugcagaucgaaucugcacugggauaacaucuucaaacucaccucauguggucaaaacagcuacucaaggggaggucaaugugacuggugugauaccacuaacaacaacaccaacaaaaucuuauuuugcaaaucucaaaggaacaagaaccagagggaaacuaugcccagacugucucaacuguacagaucuggauguggccuugggcagaccaauguguguggggaccacaccuucggcgaaagcuucaauacuccacgaagucagaccuguuacauccgggugcuuuccuauaaugcacgacagaacaaaaaucaggcaacuacccaaucuucucagaggauaugaaaauaucagguuaucaacccaaaacgucaucgaugcagaaaaggcaccaggaggacccuacagacuuggaaccucaggaucuugcccuaacgcuaccaguaaaagcggauuuuucgcaacaauggcuugggcugucccaaaggacaacaacaaaaaugcaacgaacccacuaacaguagaaguaccauacauuuguacagaaggggaagaccaaaucacuguuuggggguuccauucagauaacaaaauccaaaugaagaaccucuauggagacucaaauccucaaaaguucaccucaucugcuaauggaguaaccacacacuauguuucucagauuggcggcuucccagaucaaacagaagacggaggacuaccacaaagcggcaggauuguuguugauuacaugaugcaaaaaccugggaaaacaggaacaauugucuaccaaagagguguuuuguugccucaaaagguguggugcgcgaguggcaggagcaaaguaauaaaaggguccuugccuuuaauuggugaagcagauugccuucaugaaaaauacgguggauuaaacaaaagcaagccuuacuacacaggagaacaugcaaaagccauaggaaauugcccaauaugggugaaaacaccuuugaagcuugccaauggaaccaaauauagaccuccugcaaaacuauuaaaggaaagggguuucuucggagcuauugcugguuuccuagaaggaggaugggaaggaaugauugcaggcuggcacggauacacaucucacggagcacauggaguggcaguggcggcggaccuuaagaguacgcaagaagcuauaaacaagauaacaaaaaaucucaauucuuugagugagcuagaaguaaagaaucuucaaagacuaaguggugccauggaugaacuccacaacgaaauacucgagcuggaugagaaaguggaugaucucagagcugacacuauaagcucgcaaauagaacuugcagucuugcuuuccaacgaaggaauaauaaacagugaagaugagcaucuauuggcacuugagagaaaacuaaagaaaaugcugggucccucugcuguagagauaggaaauggaugcuucgaaaccaaacacaagugcaaccagaccugcuuagacaggauagcugcuggcaccuuuaaugcaggagaauuuucucuccccacuuuugauucacugaacauuacugcugcaucuuuaaaugaugauggauuggauaaccauacuauacugcucuauuacucaacugcugcuucuaguuuggcuguaacauugaugcuagcuauuuuuauuguuuauauggucuccagagacaacguuucaugcuccaucugucuauaa

SEQ ID NO: 59593 - RNA, 1755 nt, Artificial Sequence; identical to SEQ ID NO: 59036
  derived and/or modified CDS sequence (wt) from hemagglutinin__InfluenzaB__AGX22436

SEQ ID NO: 59594 - RNA, 1755 nt, Artificial Sequence
  derived and/or modified CDS sequence (wt) from hemagglutinin__InfluenzaB__AGX22445
augaaggcaauaauuguacuacucaugguaguaacauccaaugcagaucgaaucugcacugggauaacaucuucaaacucaccucauguggucaaaacagcuacucaaggggaggucaaugugacuggugugauaccacuaacaacaacaccaacaaaaucuuauuuugcaaaucucaaaggaacaaggaccagagggaaacuaugcccagacugucucaacuguacagaucuggauguggccuugggcagaccaauguguguggggaccacaccuucggcgaaagcuucaauacuccacgaagucagaccuguuacauccgggugcuuuccuauaaugcacgacagaacaaaaaucaggcaacuacccaaucuucucagaggauaugaaaauaucagguuaucaacccaaaacgucaucgaugcagaaaaggcaccaggaggacccuacagacuuggaaccucaggaucuugcccuaacgcuaccaguaaaagcggauuuuucgcaacaauggcuugggcugucccaaaggacaacaacaaaaaugcaacgaacccacuaacaguagaaguaccauacauuuguacagaaggggaagaccaaaucacuguuuggggguuccauucagauaacaaaacccaaaugaagaaccucuauggagacucaaauccucaaaaguucaccucaucugcuaauggaguaaccacacacuauguuucucagauuggcggcuucccagaucaaacagaagacggaggacuaccacaaagcggcaggauuguuguugauuacaugaugcaaaaaccugggaaaacaggaacaauugucuaccaaagagguguuuuguugccucaaaagguguggugcgcgaguggcaggagcaaaguaauaaaaggguccuugccuuuaauuggugaagcagauugccuucaugaaaaauacgguggauuaaacaaaagcaagccuuauuacacaggagaacaugcaaaagccauaggaaauugcccaauaugggugaaaacaccuuugaagcuugccaauggaaccaaauauagaccuccugcaaaacuauuaaaggaaagggguuucuucggagcuauugcugguuuccuagaaggaggaugggaaggaaugauugcaggcuggcacggauacacaucucacggagcacauggaguggcaguggcggcggaccuuaagaguacgcaagaagcuauaaacaaaauaacaaaaaaucucaauucuuugagugagcuagaaguaaagaaucuucaaagacuaaguggugccauggaugaacuccacaacgaaauacucgagcuggaugagaaaguggaugaucucagagcugacacuauaagcucgcaaauagaacuugcagucuugcuuuccaacgaaggaauaauaaacagugaagaugagcaucuauuggcacuugagagaaaacuaaagaaaaugcugggucccucugcuguagagauaggaaauggaugcuucgaaaccaaacacaagugcaaccagaccugcuuagacaggauagcugcuggcaccuuuaaugcaggagaauuuucucuccccacuuuugauucacugaacauuacugcugcaucuuuaaaugaugauggauuggauaaccauacuauacugcucuauuacucaacugcugcuucuaguuuggcuguaacauugaugcuagcuauuuuuauuguuuauauggucuccagagacaacguuucaugcuccaucugucuauaa

SEQ ID NO: 59595 - RNA, 1755 nt, Artificial Sequence
  derived and/or modified CDS sequence (wt) from hemagglutinin__InfluenzaB__AGX22456
augaaggcaauaauuguacuacucaugguaguaacauccaaugcagaucgaaucugcacugggauaacaucuucaagcucaccucauguggucaaaacagcuacucaaggggaggucaaugugacuggugugauaccacugacaacaacaccaacaaaaucuuauuuugcaaaucucaaaggaacaaggaccagagggaaacuaugcccagacugucucaacuguacagaucuggauguggccuugggcagaccaauguguguggggaccacaccuucagcgaaagcuucaauacuccacgaagucagaccuguuacauccgggugcuuuccuauaaugcacgacagaacaaaaaucaggcaacuacccaaucuucucagaggauaugaaaauaucagguuaucaacccaaaacguuaucgaugcagaaaaggcaccaggaggacccuacagacuuggaaccucaggaucuugcccuaacgcuaccaguaaaagcggauuuuucgcaacaauggcuugggcugucccaaaggacaacaacaaaaaugcaacgaacccacuaacaguagaaguaccauacauuuguacagaaggggaagaccaaauuacuguuuggggguuccauucagauaacaaaacccaaaugaagaaccucuauggagacucaaauccucaaaaguucaccucaucugcuaauggaguaaccacacauuauguuucucagauuggcggcuucccagaucaaacagaagacggaggacuaccacaaagcggcagaauuguuguugauuacaugaugcaaaaaccugggaaaacaggaacaauugucuaccaaagagguguuuuguugccucaaaagguguggugcgcgaguggcaggagcaaaguaauaaaaggguccuugccuuuaauuggugaagcagauugccuucaugaaaaauacgguggauuaaacaaaagcaagccuuacuacacaggagaacaugcaaaagccauaggaaauugcccaauaugggugaaaacaccuuugaagcuugccaauggaaccaaauauagaccuccugcaaaacuauuaaaggaaagggguuucuucggagcuauugcugguuuccuagaaggaggaugggaaggaaugauugcaggcuggcacggauacacaucucacggagcacauggaguggcaguggcggcagaccuuaagaguacgcaagaagcuauaaacaagauaacaaaaaaucucaauucuuugagugagcuagaaguaaagaaucuucaaagacuaaguggugccauggaugaacuccacagugaaauacucgagcuggaugagaaaguggaugaucucagagcugacacuauaagcucgcaaauagaacuugcagucuugcuuuccaacgaaggaauaauaaacagugaagaugagcaucuacuggcacuugagagaaagcuaaagaaaaugcugggucccucugcuguagacauaggaaauggaugcuucgaaaccaaacacaagugcaaccagaccugcuuagacaggauagcugcuggcaccuuuaaugcaggagaauuuucucuccccacuuuugauucacugaacauuacugcugcaucuuuaaaugaugauggauuggauaaccauacuauacugcucuauuacucaacugcugcuucuaguuuggcuguaacauugaugcuagcuauuuuuauuguuuauauagucuccagagacaacguuucaugcuccaucugucuauaa

SEQ ID NO: 59596 - RNA, 1755 nt, Artificial Sequence
  derived and/or modified CDS sequence (wt) from hemagglutinin__InfluenzaB__AGX22467
augaaggcaauaauuguacuacucaugguaguaacauccaaugcagaucgaaucugcacugggauaacaucuucaaacucaccucauguggucaaaacagcuacucaaggggaggucaaugugacuggugugauaccacugacaacaacaccaacaaaaucuuauuuugcaaaucucaaaggaacaaggaccagagggaaacuaugcccagacugucucaacuguacagaucuggauguggccuugggcaggccaauguguguggggaccacaccuucugcgaaagcuucaauacuccacgaagucagaccuguuacauccgggugcuuuccuauaaugcacgacagaacaaaaaucaggcaacuacccaaucuucucagaggauaugaaaauaucagguuaucaacccaaaacguuaucgaugcagaaaaggcaccaggaggacccuacagacuuggaaccucaggaucuugcccuaacgcuaccaguaaaagcggauuuuucgcaacaauggcuugggcugucccaaaggacaacaacaaaaaugcaacgaacccacuaacaguagaaguaccauacauuuguacagaaggggaagaccaaauuacuguuuggggguuccauucagauaacaaaacccaaaugaagaaccucuauggagacucaaauccucaaaaguucaccucaucugcuaauggaguaaccacacauuauguuucucagauuggcggcuucccagaucaaacagaagacggaggacuaccacaaagcggcagaauuguuguugauuacaugaugcaaaaaccugggaaaacaggaacaauugucuaucaaagagguguuuuguugccucaaaagguguggugcgcgaguggcaggagcaaaguaauaaaaggguccuugccuuuaauuggugaagcagauugccuucaugaaaaauacgguggauuaaacaaaagcaagccuuacuacacaggagaacaugcaaaagccauaggaaauugcccaauaugggugaaaacaccuuugaagcuugccaauggaaccaaauauagaccuccugcaaaacuauuaaaggaaagggguuucuuuggagcuauugcugguuuccuagaaggaggaugggaaggaaugauugcagguuggcacggauacacaucucacggagcacauggaguggcaguggcggcagaccuuaagaguacacaagaagcuauaaacaagauaacaaaaaaucucaauucuuugagugagcuagaaguaaagaaucuucaaagacuaaguggugccauggaugaacuccacaacgaaauacucgagcuggaugagaaaguagaugaucucagagcugacacuauaagcucacaaauagaacuugcagucuugcuuuccaacgaaggaauaauaaacagugaagacgagcaucuauuggcacuugagagaaaacuaaagaaaaugcugggucccucugcuguagacauaggaaauggaugcuucgaaaccaaacacaaaugcaaccagaccugcuuagacaggauagcugcuggcaccuuuaaugcaggagaauuuucucuccccaccuuugauucauugaacauuacugcugcaucuuuaaaugaugauggauuggauaaccauacuauacugcucuauuacucaacugcugcuucuaguuuggcuguaacauugaugcuagcuauuuuuauuguuuauauggucuccagagacaacguuucaugcuccaucugucuauaa

SEQ ID NO: 59597 - RNA, 1755 nt, Artificial Sequence; identical to SEQ ID NO: 59596
  derived and/or modified CDS sequence (wt) from hemagglutinin__InfluenzaB__AGX22478

SEQ ID NO: 59598 - RNA, 1755 nt, Artificial Sequence
  derived and/or modified CDS sequence (wt) from hemagglutinin__InfluenzaB__AGX22489
augaaggcaauaauuguacuacucaugguaguaacauccaaugcagaucgaaucugcacugggauaacaucuucaaacucaccucauguggucaaaacagcuacucaaggggaggucaaugugacuggugugauaccacugacaacaacaccaacaaaaucuuauuuugcaaaucucaaaggaacaaggaccagagggaaacuaugcccagacugucucaacuguacagaucuggauguggccuugggcagaccaauguguguggggaccacaccuucugcgaaagcuucaauacuccacgaagucagaccuguuacauccgggugcuuuccuauaaugcacgacagaacaaaaaucaggcaacuacccaaucuucucagaggauaugaaaauaucagguuaucaacccaaagcgcuaucgaugcagaaaaggcaccaggagggcccuacagacuuggaaccucaggaucuugcccuaaugcuaccaguaaaagcggauuuuucgcaacaauggcuugggcugucccaaaggacaacaacaaaaaugcaacgaacccacuaacaguagaaguaccauacauuuguacagaaggggaagaccaaauuacuguuuggggguuccauucagauaacaaaacccaaaugaagaaccucuauggagacucaaauccucaaaaguucaccucaucugcuaauggaguaaccacacauuauguuucucagauuggcggcuucccaggucaaacagaagacggaggacuaccacaaagcggcagaauuguuguugauuacaugauucaaaaaccugggaaaacaggaacaauugucuaucaaagagguguuuuguugccucaaaagguguggugcgcgaguggcaggagcaaaguaauaaaaggguccuugccuuuaauuggugaagcagauugccuucaugaaaaauacgguggauuaaacaaaagcaagccuuacuacacaggagaacaugcaaaagccauaggaaauugcccaauaugggugaaaacaccuuugaagcuugccaauggaaccaaauauagaccuccugcaaaacuauuaaaggaaagggguuucuucggagcuauugcugguuuccuagaaggaggaugggaaggaaugauugcagguuggcacggauacacaucucacggagcacauggaguggcaguggcggcagaccuuaagaguacacaagaagcuauaaacaagauaacaaaaaaucucaauucuuugagugagcuagaaguaaagaaucuucaaagacuaaguggugccauggaugaacuccacaacgaaauacucgagcuggaugagaaaguggaugaccucagagcugacacuauaagcgcacaaauagaacuugcagucuugcuuuccaacgaaggaauaauaaacagugaagacgagcaucuauuggcacuugagagaaaacuaaagaaaaugcugggucccucugcuguagacauaggaaauggaugcuucgaaaccaaacacaagugcaaccagaccugcuuggacaggauagcugcuggcaccuuuaaugcaggagaauuuucucuccccacuuuugacucauugaacauuacugcugcaucuuuaaaugaugauggauuggauaaccauacuauacugcucuauuacucaacugcugcuucuaguuuggcuguaacauugaugcuagcuauuuuuauuguuuauauggucuccagagacaacguuucaugcuccaucugucuauaa

SEQ ID NO: 59599 - RNA, 1755 nt, Artificial Sequence
  derived and/or modified CDS sequence (wt) from hemagglutinin__InfluenzaB__AGX22500
augaaggcaauaauuguacuacucaugguaguaacauccaaugcagaucgaaucugcacugggauaacaucuucaaacucaccucauguggucaaaacagcuacucaaggggaggucaaugugacugguguaauaccacugacaacaacaccaacaaaaucuuauuuugcaaaucucaaaggaacaaggaccagagggaaacuauguccagacugucucaacuguacagaucuggauguggccuugggcagaccaaugugugugggaaccacaccuucggcaaaagcuucaauacuccacgaagucagaccuguuacauccgggugcuuuccuauaaugcacgacagaacaaaaaucagacaacuacccaaucuucucagaggauaugaaaauaucagauuaucaacccaaaacguuaucgaugcagaaaaugcaccaggaggacccuacagacuuggaaccucaggaucuugcccuaacgcuaccaguaaaagcggauuuuuugcaacaauggcuugggcugucccaaaggacaacaacaaaaaugcaacgaacccacuaacaguagaaguaccauacauuuguacagaaggggaagaccaaauuacuguuuggggguuccauucagauaacaaaacccaaaugaagaaccucuauggagacucaaauccucaaaaguucaccucaucugcuaauggaguaaccacacauuauguuucucagauuggcggcuucccagcucaaacagaagacggaggacuaccacaaagcggcagaauuauuguugauuacauggugcaaaaaccuaggaaaacaggaacaauugucuaucaaagagguguuuuguugccucaaaagguguggugcgcgaguggcaggagcaaaguaauaaaaggguccuugccuuuaauuggugaagcagauugccuucaugaaaaauacgguggauuaaacaaaagcaagccuuacuacacaggagaacaugcaaaagccauaggaaauugcccaauaugggugaaaacaccuuugaagcuugccaauggaaccaaauauagaccuccugcaaaacuauuaaaggaaagggguuucuucggagcuauugcugguuuccuagaaggaggaugggaaggaaugauugcagguuggcacggauacacaucucacggagcacauggaguggcaguggcggcagaccuuaagaguacgcaagaagcuauaaacaagauaacaaaaaaucucaauucuuugagugagcuagaaguaaagaaucuucaaagacuaaguggugccauggaugaacuccacaacgaaauacucgagcuggaugagaaaguggaugaucucagagcugacacuauaagcucgcaaauagaacuugcagucuugcuuuccaaugaaggaauaauaaacagugaagaugagcaucuauuggcacuugagagaaaacuaaagaaaaugcugggucccucugcuguagacauaggaaauggaugcuucgaaaccaaacacaagugcaaccagaccugcuuagacaggauagcugcuggcaccuuuaaugcaggagaauuuucucuccccacuuuugauucacugaacauuacugcugcaucuuuaaaugaugauggauuggauaaccauacuauacugcucuauuacucaacuguugcuucuaguuuggcuguaacauugaugcuagcuauuuuuauuguuuauauggucuccagagacaacguuucaugcuccaucugucuauaa

SEQ ID NO: 59600 - RNA, 1755 nt, Artificial Sequence; identical to SEQ ID NO: 59573
  derived and/or modified CDS sequence (wt) from hemagglutinin__InfluenzaB__AGX22511

SEQ ID NO: 59601 - RNA, 1755 nt, Artificial Sequence
  derived and/or modified CDS sequence (wt) from hemagglutinin__InfluenzaB__AGX22522
augaaggcaauaauuguacuacucaugguaguaacauccaaugcagaucgaaucugcacugggauaacaucuucaaacucaccucauguggucaaaacagcuacucaaggggaggucaaugugacuggugugauaccacugacaacaacaccaacaaaaucuuauuuugcaaaucucaaaggaacaaggaccagagggaaacuaugcccagacugucucaacuguacagaucuggauguggccuugggcaggccaauguguguggggaccacaccuucugcgaaagcuucaauacuccacgaagucagaccuguuacauccgggugcuuuccuauaaugcacgacagaacaaaaaucaggcaacuagccaaucuucucagaggauaugaaaauaucagguuaucaacccaaaacguuaucgaugcagaaaaggcaccaggaggacccuacagacuuggaaccucaggaucuugcccuaacgcuaccaguaaaagcggauuuuucgcaacaauggcuugggcugucccaaaggacaacaacaaaaaugcaacgaacccacuaacaguagaaguaccauacauuuguacagaaggggaagaccaaauuacuguuuggggguuccauucagauaacaaaacccaaaugaagaaccucuauggagacucaaauccucaaaaguucaccucaucugcuaauggaguaaccaaacauuauguuucucagauuggcggcuucccagaucaaacagaagacggaggacuaccacaaagcggcagaauuguuguugauuacaugaugcaaaaaccugggaaaacaggaacaauugucuaucaaagagguguuuuguugccucaaaagguguggugcgcgaguggcaggagcaaaguaauaaaaggguccuugccuuuaauuggugaagcagauugccuucaugaaaaauacgguggauuaaacaaaagcaagccuuacuacacaggagaacaugcaaaagccauaggaaauugcccaauaugggugaaaacaccuuugaagcuugccaauggaaccaaauauagaccuccugcaaaacuauuaaaggaaagggguuucuucggagcuauugcugguuuccuagaaggaggaugggaaggaaugauugcagguuggcacggauacacaucucacggagcacauggaguggcaguggcggcagaccuuaagaguacacaagaagcuauaaacaagauaacaaaaaaucucaauucuuugagugagcuagaaguaaagaaucuucaaagacuaaguggugccauggaugaacuccacaacgaaauacucgagcuggaugagaaaguggaugaucucagagcugacacuauaagcucacaaauagaacuugcagucuugcuuuccaacgaaggaauaauaaacagugaagacgagcaucuauuggcacuugagagaaaacuaaagaaaaugcugggucccucugcuguagacauaggaaauggaugcuucgaaaccaaacacaaaugcaaccagaccugcuuagacaggauagcugcuggcaccuuuaaugcaggagaauuuucucuccccacuuuugauucauugaacauuacugcugcaucuuuaaaugaugauggauuggauaaccauacuauacugcucuauuacucaacugcugcuucuaguuuggcuguaacauugaugcuagcuauuuuuauuguuuauauggucuccagagacaacguuucaugcuccaucugucuauaa

SEQ ID NO: 59602 - RNA, 1755 nt, Artificial Sequence
  derived and/or modified CDS sequence (wt) from hemagglutinin__InfluenzaB__AGX22533
augaaggcaauaauuguacuacucaugguaguaacauccaaugcagaucgaaucugcacugggauaacaucuucaaacucaccucauguggucaaaacagcuacucaaggggaggucaaugugacuggugugauaccacugacaacaacaccaacaaaaucuuauuuugcaaaucucaaaggaacaaggaccagagggaaacuaugcccagacugucucaacuguacagaucuggauguggccuugggcaggccaauguguguggggaccacaccuucugcgaaagcuucaauacuccacgaagucagaccuguuacauccgggugcuuuccuauaaugcacgacagaacaaaaaucaggcaacuagccaaucuucucagaggauaugaaaauaucagguuaucaacccaaaacguuaucgaugcagaaaaggcaccaggaggacccuacagacuuggaaccucaggaucuugcccuaacgcuaccaguaaaagcggauuuuucgcaacaauggcuugggcugucccaaaggacaacaacaaaaaugcaacgaacccacuaacaguagaaguaccauacauuuguacagaaggggaagaccaaauuacuguuuggggguuccauucagauaacaaaacccaaaugaagaaccucuauggagacucaaauccucaaaaguucaccucaucugcuaauggaguaaccacacauuauguuucucagauuggcggcuucccagaucaaacagaagacggaggacuaccacaaagcggcagaauugucguugauuacaugaugcaaaaaccugggaaaacaggaacaauugucuaucaaagagguguuuuguugccucaaaagguguggugcgcgaguggcaggagcaaagugauaaaaggguccuugccuuuaauuggugaagcagauugccuucaugaaaaauacgguggauuaaacaaaagcaagccuuacuacacaggagaacaugcaaaagccauaggaaauugcccaauaugggugaaaacaccuuugaagcuugccaauggaaccaaauauagaccuccugcaaaacuauuaaaggaaagggguuucuucggagcuauugcugguuuccuagaaggaggaugggaaggaaugauugcagguuggcacggauacacaucucacggagcacauggaguggcaguugcggcagaccuuaagaguacacaagaagcuauaaacaagauaacaaaaaaucucaacucuuugagugagcuagaaguaaagaaucuucaaagacuaaguggugccauggaugaacuccacaacgaaauacucgagcuggaugagaaaguggaugaucucagagcugacacuauaagcucacaaauagaacuugcagucuugcuuuccaacgaaggaauaauaaacagugaagacgagcaucuauuggcacuugagagaaaacuaaagaaaaugcugggucccucugcuguagacauaggaaauggaugcuucgaaaccaaacacaaaugcaaccagacuugcuuagacaggauagcugcuggcaccuuuaaugcaggagaauuuucucuccccacuuuugauucauugaacauuacugcugcaucuuuaaaugaugauggauuggauaaccauacuauacugcucuauuacucaacugcugcuucuaguuuggcuguaacauugaugcuagcuauuuuuauuguuuauauggucuccagagacaacguuucaugcuccaucugucuauaa

SEQ ID NO: 59603 - RNA, 1755 nt, Artificial Sequence; identical to SEQ ID NO: 59050
  derived and/or modified CDS sequence (wt) from hemagglutinin__InfluenzaB__AGX22566

SEQ ID NO: 59604 - RNA, 1755 nt, Artificial Sequence; identical to SEQ ID NO: 59043
  derived and/or modified CDS sequence (wt) from hemagglutinin__InfluenzaB__AGX22577

SEQ ID NO: 59605 - RNA, 1755 nt, Artificial Sequence; identical to SEQ ID NO: 59050
  derived and/or modified CDS sequence (wt) from hemagglutinin__InfluenzaB__AGX22588

SEQ ID NO: 59606 - RNA, 1755 nt, Artificial Sequence
  derived and/or modified CDS sequence (wt) from hemagglutinin__InfluenzaB__AGX22599
augaaggcaauaauuguacuacucaugguaguaacauccaaugcagaucgaaucugcacugggauaacaucuucaaacucaccucauguggucaaaacagcuacucaaggggaggucaaugugacuggugugauaccacugacaacaacaccaacaaaaucuuacuuugcaaaucucaaaggaacaaggaccagagggaaacuaugcccagacugucucaacuguacagaucuggauguggccuugggcaggccaauguguguggggaccacaccuucugcgaaagcuucaauacuccacgaagucagaccuguuacauccgggugcuuuccuauaaugcacgacagaacaaaaauaaggcaacuagccaaucuucucagaggauaugaaaauaucagguuaucaacccaaaacguuaucgaugcagaaaaggcaccaggaggacccuacagacuuggaaccucaggaucuugcccuaacgcuaccaguaaaagcggauuuuucgcaacaauggcuugggcugucccaaaggacaacaacaaaaaugcaacgaacccacuaacaguagaaguaccauacauuuguacagaaggggaagaccaaauuacuguuuggggguuccauucagauaacaaaacccaaaugaagaaccucuauggagacucaaauccucaaaaguucaccucaucugcuaauggaguaaccacacauuauguuucucagauuggcggcuucccagaucaaacagaagacggaggacuaccacaaagcggcagaauugucguugauuacaugaugcaaaaaccugggaaaacaggaacaauugucuaucaaagagguguuuuguugccucaaaagguguggugcgcgaguggcaggagcaaaguaauaaaaggguccuugccuuuaauuggugaagcagauugccuucaugaaaaauacgguggauuaaacaaaagcaagccuuacuacacaggagaacaugcaaaagccauaggaaauugcccaauaugggugaaaacaccuuugaagcuugccaauggaaccaaauauagaccuccugcaaaacuauuaaaggaaagggguuucuucggagcuauugcugguuuccuagaaggaggaugggaaggaaugauugcagguuggcacggauacacaucucacggagcacauggaguggcaguugcggcagaccuuaagaguacacaagaagcuauaaacaagauaacaaaaaaucucaacucuuugagugagcuagaaguaaagaaucuucaaagacuaaguggugccauggaugaacuccacaacgaaauacucgagcuggaugagaaaguggaugaucucagagcugacacuauaagcucacaaauagaacuugcagucuugcuuuccaacgaaggaauaauaaacagugaagacgagcaucuauuggcacuugagagaaaacuaaagaaaaugcugggucccucugcuguagacauaggaaauggaugcuucgaaaccaaacacaaaugcaaccagaccugcuuagacaggauagcugcuggcaccuuuaaugcaggagaauuuucccuccccacuuuugauucauugaacauuacugcugcaucuuuaaaugaugauggauuggauaaccauacuauacugcucuauuacucaacugcugcuucuaguuuggcuguaacauugaugcuagcuauuuuuauugucuauauggucuccagagacaacguuucaugcuccaucugucuauaa

SEQ ID NO: 59607 - RNA, 1755 nt, Artificial Sequence
  derived and/or modified CDS sequence (wt) from hemagglutinin__InfluenzaB__AGX22610
augaaggcaauaauuguacuacucaugguaguaacauccaaugcagaucgaaucugcacugggauaacaucuucaaacucaccucauguggucaaaacagcuacucaaggggaggucaaugugacuggugugauaccacugacaacaacaccaacaaaaucuuauuuugcaaaucucaaaggaacaaggaccagagggaaacuaugcccagacugucucaacuguacagaucuggauguggccuugggcagaccaauguguguggggaccacaccuucggcgaaagcuucaauacuccacgaagucagaccuguuacauccgggugcuuuccuauaaugcacgacagaacaaaaaucaggcaacuacccaaucuucucagaggauaugaaaauaucagguuaucaacccaaaacguuaucgaugcagaaaaggcaccaggagggcccuacagacuuggaaccucagggucuugcccuaacgcuaccaguaaaagcggauuuuucgcaacaauggcuugggcugucccaaaggacaacaacaaaaaugcaacgaacccacuaacaguagaaguaccauacauuuguacagaaggggaagaccaaauuacuguuuggggguuccauucagauaacaaaacccaaaugaagaaccucuauggagacccaaauccucaaaaguucaccucaucugcuaauggaguaaccacacauuauguuucucagauuggcggcuucccagaucaaacagaagacggaggacuaccacaaagcggcagaauuguuguugauuacaugaugcaaaaaccugggaaaacaggaacaauugucuaccaaagagguguuuuguugccucaaaagguguggugcgcgaguggcaggagcaaaguaauaaaaggguccuugccuuuaauuggugaagcagauugccuucaugaaaaauacgguggauuaaacaaaagcaagccuuacuacacaggagaacaugcaaaagccauaggaaauugcccaauaugggugaaaacaccuuugaagcuugccaauggaaccaaauauagaccuccugcaaaacuauuaaaggaaagggguuucuucggagcuauugcugguuuccuagaaggaggaugggaaggaaugauugcaggcuggcacggauacacaucucacggagcacauggaguggcaguggcggcagaccuuaagaguacgcaagaagcuauaaacaagauaacaaaaaaucucaauucuuugagugagcuagaaguaaagaaucuucaaagacuaaguggugccauggaugaacuccacaacgaaauacucgagcuggaugagaaaguggaugaucucagagcugacacuauaagcucgcaaauagaacuugcagucuugcuuuccaaugaaggaauaauaaacagugaagaugagcaucuacuggcacuugagagaaaacuaaagaaaaugcugggucccucugcuguagacauaggaaauggaugcuucgaaaccaaacacaagugcaaccagaccugcuuagacaggauagcugcuggcaccuuuaaugcaggagaauuuucucuccccacuuuugacucacugaacauuacugcugcaucuuugaaugaugauggauuggauaaccauacuauacugcucuauuacucaacugcugcuuccaguuuggcuguaacauugaugcuagcuauuuuuauuguuuauauggucuccagagacaacguuucaugcuccaucugucuauaa

SEQ ID NO: 59608 - RNA, 1755 nt, Artificial Sequence
  derived and/or modified CDS sequence (wt) from hemagglutinin__InfluenzaB__AGX22621
augaaggcaauaauuguacuacucaugguaguaacauccaaugcagaucgaaucugcacugggauaacaucuucaaacucaccucauguggucaaaacagcuacucaaggggaggucaaugugacuggugugauaccacugacaacaacaccaacaaaaucuuauuuugcaaaucucaaaggaacaaggaccagagggaaacuaugcccagacugucucaacuguacagaucuggauguggccuugggcaggccaauguguguggggaccacaccuucugcgaaagcuucaauacuccacgaagucagaccuguuacauccgggugcuuuccuauaaugcacgacagaacaaaaaucaggcaacuagccaaucuucucagaggauaugaaaauaucagguuaucaacccaaaacguuaucgaugcagaaaaggcaccaggaggacccuacagacuuggaaccucaggaucuugcccuaacgcuaccaguaaaagcggauuuuucgcaacaauggcuugggcugucccaaaggacaacaacaaaaaugcaacgaacccacuaacaguagaaguaccauacauuuguacaggaggggaagaccaaauuacuguuuggggguuccauucagauaacaaaacccaaaugaagaaccucuauggagacucaaauccucaaaaguucaccucaucugcuaauggaguaaccacacauuauguuucucagauuggcggcuucccagaucaaacagaagacggaggacuaccacaaagcggcagaauugucguugauuacaugaugcaaaaaccugggaaaacaggaacaauugucuaucaaagagguguuuuguugccucaaaagguguggugcgcgaguggcaggagcaaaguaauaaaaggguccuugccuuuaauuggugaagcagauugccuucaugaaaaauacgguggauuaaacaaaagcaagccuuacuacacaggagaacaugcaaaagccauaggaaauugcccaauaugggugaaaacaccuuugaagcuugccaauggaaccaaauauagaccuccugcaaaacuauuaaaggaaagggguuucuucggagcuauugcugguuuccuagaaggaggaugggaaggaaugauugcagguuggcacggauacacaucucacggagcacauggaguggcaguugcggcagaccuuaagaguacacaagaagcuauaaacaagauaacaaaaaaucucaacucuuugagugagcuagaaguaaagaaucuucaaagacuaaguggugccauggaugaacuccacaacgaaauacucgagcuggaugagaaaguggaugaucucagagcugacacuauaagcucacaaauagaacuugcagucuugcuuuccaacgaaggaauaauaaacagugaagacgagcaucuauuggcacuugagagaaaacuaaagaaaaugcugggucccucugcuguagacauaggaaauggaugcuucgaaaccaaacacaaaugcaaccagaccugcuuagacaggauagcugcuggcaccuuuaaugcaggagaauuuucucuccccacuuuugauucauugaacauuacugcugcaucuuuaaaugaugauggauuggauaaccauacuauacugcucuauuacucaacugcugcuucuaguuuggcuguaacauugaugcuagcuauuuuuauuguuuauauggucuccagagacaacguuucaugcuccaucugucuauaa

SEQ ID NO: 59609 - RNA, 1755 nt, Artificial Sequence; identical to SEQ ID NO: 59602
  derived and/or modified CDS sequence (wt) from hemagglutinin__InfluenzaB__AGX22632

SEQ ID NO: 59610 - RNA, 1755 nt, Artificial Sequence
  derived and/or modified CDS sequence (wt) from hemagglutinin__InfluenzaB__AGX22643
augaaggcaauaauuguacuacucaugguaguaacauccaaugcagaucgaaucugcacugggauaacaucuucaaacucaccucauguggucaaaacagcuacucaaggggaggucaaugugacuggugugauaccacugacaacgacaccaacaaaaucuuauuuugcaaaucucaaaggaacaaggaccagagggaaacuaugcccagacugucucaacuguacagaucuggauguggccuugggcaggccaauguguguggggaccacaccuucugcgaaagcuucaauacuccacgaagucagaccuguuacauccgggugcuuuccuauaaugcacgacagaacaaaaaucaggcaacuagccaaucuucucagaggauaugaaaauaucagguuaucaauccaaaacguuaucgaugcagaaaaggcaccaggaggacccuacagacuuggaaccucaggaucuugcccuaacgcuaccaguaaaagcggauuuuucgcaacaauggcuugggcugucccaaaggacaacaacaaaaaugcaacgaacccacuaacaguagaaguaccauacauuuguacagaaggggaagaccaaauuacuguuuggggguuccauucagauaacaaaacccaaaugaagaaccucuauggagacucaaauccucaaaaguucaccucaucugcuaauggaguaaccacacauuauguuucucagauuggcggcuucccagaucaaacagaagacggaggacuaccacaaagcggcagaauugucguugauuacaugaugcaaaaaccugggaaaacaggaacaauugucuaucaaagagguguuuuguugccucaaaagguguggugcgcgaguggcaggagcaaaguaauaaaaggguccuugccuuuaauuggugaagcagauugccuucaugaaaaauacgguggauuaaacaaaagcaagccuuacuacacaggagaacaugcaaaagccauaggaaauugcccaauaugggugaaaacaccuuugaagcuugccaauggaaccaaauauagaccuccugcaaaacuauuaaaggaaagggguuucuucggagcuauugcugguuuccuagaaggaggaugggaaggaaugauugcagguuggcacggauacacaucucacggagcacauggaguggcaguugcggcagaccuuaagaguacacaagaagcuauaaacaagauaacaaaaaaucucaacucuuugagugagcuagaaguaaagaaucuucaaagacuaaguggugccauggaugaacuccacaacgaaauacucgagcuggaugagaaaguggaugaucucagagcugacacuauaagcucacaaauagaacuugcagucuugcuuuccaacgaaggaauaauaaacagugaagacgagcaucuauuggcacuugagagaaaacuaaagaaaaugcugggucccucugcuguagacauaggaaauggaugcuucgaaaccaaacacaaaugcaaccagaccugcuuagacaggauagcugcuggcaccuuuaaugcaggagaauuuucucuccccacuuuugauucauugaacauuacugcugcaucuuuaaaugaugauggauuggauaaccauacuauacugcucuauuacucaacugcugcuucuaguuuggcuguaacauugaugcuagcuauuuuuauuguuuauauggucuccagagacaacguuucaugcuccaucugucuauaa

SEQ ID NO: 59611 - RNA, 1755 nt, Artificial Sequence
  derived and/or modified CDS sequence (wt) from hemagglutinin__InfluenzaB__AGX22654
augaaggcaauaauuguacuacucaugguaguaacauccaaugcagaucgaaucugcacugggauaacaucuucaaacucaccucauguggucaaaacagcuacucaaggggaggucaaugugacuggugugauaccacugacaacaacaccaacaaaaucuuauuuugcaaaucucaaaggaacaaggaccagagggaaacuaugcccagacugucucaacuguacagaucuggauguggccuugggcaggccaauguguguggggaccacaccuucugcgaaagcuucaauacuccacgaagucagaccuguuacauccgggugcuuuccuauaaugcacgacagaacaaaaaucaggcaacuagccaaucuucucagaggauaugaaaauaucagguuaucaacccaaaacguuaucgaugcagaaaaggcaccaggaggacccuacagacuuggaaccucaggaucuugcccuaacgcuaccaguaaaagcggauuuuucgcaacaauggcuugggcugucccaaaggacaacaacaaaaaugcaacgaacccacuaacaguagaaguaccauacauuuguacagaaggggaagaccaaauuacuguuuggggguuccauucagauaacaaaacccaaaugaagaaccucuauggagacucaaauccucaaaaguucaccucaucugcuaauggaguaaccacacauuauguuucucagauuggcggcuucccagaucaaacagaagacggaggacuaccacaaagcggcagaauuguuguugauuacaugaugcaaaaaccugggaaaacaggaacaauugucuaucaaagagguguuuuguugccucaaaagguguggugcgcgaguggcaggagcaaaguaauaaaaggguccuugccuuuaauuggugaagcagauugccuucaugaaaaauacgguggauuaaacaaaagcaagccuuacuacacaggagaacaugcaaaagccauaggaaauugcccaauaugggugaaaacaccuuugaagcuugccaauggaaccaaauauagaccuccugcaaaacuauuaaaggaaagggguuucuucggagcuauugcugguuuccuagaaggaggaugggaaggaaugauugcagguuggcacggauacacaucucacggagcacauggaguggcaguggcggcagaccuuaagaguacacaagaagcuauaaacaagauaacaaaaaaucucaauucuuugagugagcuagaaguaaagaaucuucaaagacuaaguggugccauggaugaacuccacagcgaaauacucgagcuggaugagaaaguggaugaucucagagcugacacuauaagcucacaaauagaacuugcagucuugcuuuccaacgaaggaauaauaaacagugaagacgagcaucuauuggcacuugagagaaaacuaaagaaaaugcugggucccucugcuguagacauaggaaauggaugcuucgaaaccaaacacaaaugcaaccagaccugcuuagacaggauagcugcuggcaccuuuaaugcaggagaauuuucucuccccacuuuugauucauugaacauuacugcugcaucuuuaaaugaugauggauuggauaaccauacuauacugcucuauuacucaacugcugcuucuaguuuggcuguaacauugaugcuagcuauuuuuauuguuuauauggucuccagagacaacguuucaugcuccaucugucuauaa

SEQ ID NO: 59612 - RNA, 1755 nt, Artificial Sequence; identical to SEQ ID NO: 59050
  derived and/or modified CDS sequence (wt) from hemagglutinin__InfluenzaB__AGX22665

SEQ ID NO: 59613 - RNA, 1755 nt, Artificial Sequence; identical to SEQ ID NO: 59050
  derived and/or modified CDS sequence (wt) from hemagglutinin__InfluenzaB__AGX22676

SEQ ID NO: 59614 - RNA, 1755 nt, Artificial Sequence; identical to SEQ ID NO: 59606
  derived and/or modified CDS sequence (wt) from hemagglutinin__InfluenzaB__AGX22687

SEQ ID NO: 59615 - RNA, 1755 nt, Artificial Sequence; identical to SEQ ID NO: 59050
  derived and/or modified CDS sequence (wt) from hemagglutinin__InfluenzaB__AGX22698

SEQ ID NO: 59616 - RNA, 1755 nt, Artificial Sequence
  derived and/or modified CDS sequence (wt) from hemagglutinin__InfluenzaB__AGX22709
augaaggcaauaauuguacuacucaugguaguaacauccaaugcagaucgaaucugcacugggauaacaucuucaaacucaccucauguggucaaaacagcuacucaaggggaggucaaugugacuggugugauaccacugacaacgacaccaacaaaaucuuauuuugcaaaucucaaaggaacaaggaccagagggaaacuaugcccagacugucucaacuguacagaucuggauguggccuugggcaggccaauguguguggggaccacaccuucugcgaaagcuucaauacuccacgaagucagaccuguuacauccgggugcuuuccuauaaugcacgacagaacaaaaaucaggcaacuagccaaucuucucagaggauaugaaaauaucagguuaucaacccaaaacguuaucgaugcagaaaaggcaccaggaggacccuacagacuuggaaccucaggaucuugcccuaacgcuaccaguaaaagcggauuuuucgcaacaauggcuugggcugucccaaaggacaacaacaaaaaugcaacgaacccacuaacaguagaaguaccauacauuuguacagaaggggaagaccaaauuacuguuuggggguuccauucagauaacaaaacccaaaugaagaaccucuauggagacucaaauccucaaaaguucaccucaucugcuaauggaguaaccacacauuauguuucucagauuggcggcuucccagaucaaacagaagacggaggacuaccacaaagcggcagaauugucguugauuacaugaugcaaaaaccugagaaaacaggaacaauugucuaucaaagagguguuuuguugccucaaaagguguggugcgcgaguggcaggagcaaaguaauaaaaggguccuugccuuuaauuggugaagcagauugccuucaugaaaaauacgguggauuaaacaaaagcaagccuuacuacacaggagaacaugcaaaagccauagggaauugcccaauaugggugaaaacaccuuugaagcuugccaauggaaccaaauauagaccuccugcaaaacuauuaaaggaaagggguuucuucggagcuauugcugguuuccuagaaggaggaugggaaggaaugauugcagguuggcacggauacacaucucacggagcacauggaguggcaguugcggcagaccuuaagaguacacaagaagcuauaaacaagauaacaaaaaaucucaacucuuugagugagcuagaaguaaagaaucuucaaagacuaaguggugccauggaugaacuccacaacgaaauacuagagcuggaugagaaaguggaugaucucagagcugacacuauaagcucacaaauagaacuugcagucuugcuuuccaacgaaggaauaauaaacagugaagacgagcaucuauuggcacuugagagaaaacuaaagaaaaugcugggucccucugcuguagacauaggaaauggaugcuucgaaaccaaacacaaaugcaaccagaccugcuuagacaggauagcugcuggcaccuuuaaugcaggagaauuuucucucccuacuuuugauucauugaacauuacugcugcaucuuuaaaugaugauggauuggauaaccauacuauacugcucuauuacucaacugcugcuucuaguuuggcuguaacauugaugcuagcuauuuuuauuguuuauauggucuccagagacaacguuucaugcuccaucugucuauaa

SEQ ID NO: 59617 - RNA, 1755 nt, Artificial Sequence
  derived and/or modified CDS sequence (wt) from hemagglutinin__InfluenzaB__AGX22720
augaaggcaauaauuguacuacucaugguaguaacauccaaugcagaucgaaucugcacugggauaacaucuucaaacucaccucauguggucaaaacagcuacucaaggggaggucaaugugacuggugugauaccacugacaacaacaccaacaaaaucuuauuuugcaaaucucaaaggaacaaggaccagagggaaacuaugcccagacugucucaacuguacagaucuggauguggccuugggcaggccaauguguguggggaccacaccuucugcgaaagcuucaauacuccacgaagucagaccuguuacauccgggugcuuuccuauaaugcacgacagaacaaaaaucaggcaacuacccaaucuucucagaggauaugaaaauaucagguuaucaacccaaaacguuaucgaugcagaaaaggcaccaggaggacccuacagacuuggaaccucaggaucuugcccuaacgcuaccaguaaaagcggauuuuuugcaacaauggcuugggcugucccaaaggacaacaacaaaaaugcaacgaacccacuaacaguagaaguaccauacauuuguacagaaggggaagaccaaauuacuguuuggggguuccauucagauaacaaaacccaaaugaagaaccucuauggagacucaaauccucaaaaguucaccucaucugcuaauggagcaaccacacauuauguuucucagauuggcggcuucccagaucaaacagaagacggaggacuaccacaaagcggcagaauuguuguugauuacaugaugcaaaaaccugggaaaacaggaacaauugucuaucaaagagguguuuuguugccucaaaagguguggugcgcgaguggcaggagcaaaguaauaaaaggguccuugccuuuaauuggugaagcagauugccuucaugaaaaauacgguggauuaaacaaaagcaagccuuacuacacaggagaacaugcaaaagccauaggaaauugcccaauaugggugaaaacaccuuugaagcuugccaauggaaccaaauauagaccuccugcaaaacuauuaaaggaaagggguuucuucggagcuauugcugguuuccuagaaggaggaugggaaggaaugauugcagguuggcacggauacacaucucacggagcacauggaguggcaguggcggcagaccuuaagaguacacaagaagcuauaaacaagauaacaaaaaaucucaauucuuugagugagcuagaaguaaagaaucuucaaagacuaaguggugccauggaugaacuccacaacgaaauacucgagcuggaugagaaaguggaugaucucagagcugacacuauaagcucacaaauagaacuugcagucuugcuuuccaacgaaggaauaauaaacagugaagacgagcaucuauuggcucuugagagaaaacuaaagaaaaugcugggucccucugcuguagacauaggaaauggaugcuucgaaaccaaacacaaaugcaaccagaccugcuuagacaggauagcugcuggcaccuuuaaugcaggagaauuuucucuccccacuuuugauucauugaacauuacugcugcaucuuuaaaugaugauggauuggauaaccauacuauacugcucuauuacucaacugcugcuucuaguuuggcuguaacauugaugcuagcuauuuuuauuguuuauauggucuccagagacaacguuucaugcuccaucugucuauaa

SEQ ID NO: 59618 - RNA, 1755 nt, Artificial Sequence; identical to SEQ ID NO: 59050
  derived and/or modified CDS sequence (wt) from hemagglutinin__InfluenzaB__AGX22731

SEQ ID NO: 59619 - RNA, 1755 nt, Artificial Sequence; identical to SEQ ID NO: 59611
  derived and/or modified CDS sequence (wt) from hemagglutinin__InfluenzaB__AGX22742

SEQ ID NO: 59620 - RNA, 1755 nt, Artificial Sequence
  derived and/or modified CDS sequence (wt) from hemagglutinin__InfluenzaB__AGX22753
augaaggcaauaauuguacuacucaugguaguaacauccaaugcagaucgaaucugcacugggauaacaucuucaaacucaccucauguggucaaaacagcuacucaaggggaggucaaugugacuggugugauaccacugacaacaacaccagcaaaaucuuauuuugcaaaucucaaaggaacaaggaccagagggaaacuaugcccagacugucucaacuguacagaucuggauguggccuugggcaggccaauguguguggggaccacaccuucugcgaaagcuucaauacuccacgaagucagaccuguuacauccgggugcuuuccuauaaugcacgacagaacaaaaaucaggcaacuagccaaucuucucagaggauaugaaaauaucagguuaucaacccaaaacguuaucgaugcagaaaaggcaccaggaggacccuacagacuuggaaccucaggaucuugcccuaacgcuaccaguaaaagcggauuuuucgcaacaauggcuugggcugucccaaaggacaacaacaaaaaugcaacgaauccacuaacaguagagguaccauacauuuguaaagaaggggaagaccaaauuacuguuuggggguuccauucagauaacaaaacccaaaugaagaaccucuauggagacucaaauccucaaaaguucaccucaucugcuaauggaguaaccacacauuauguuucucagauuggcggcuucccagaucaaacagaagacggaggacuaccacaaagcggcagaauugucguugauuacaugauacaaaaaccugggaaaacaggaacaauugucuaucaaagagguguuuuguugccucaaaagguguggugcgcgaguggcaggagcaaaguaauaaaaggguccuugccuuuaauuggugaagcagauugccuucaugaaaaauacgguggauuaaacaaaagcaagccuuacuacacaggagaacaugcaaaagccauaggaaauugcccaauaugggugaaaacaccuuugaagcuugccaauggaaccaaauauagaccuccugcaaaacuauuaaaggaaagggguuucuucggagcuauugcugguuuccuagaaggaggaugggaaggaaugauugcagguuggcacggauacacaucucacggagcacauggaguggcaguugcggcagaccuuaagaguacacaagaagcuauaaacaagauaacaaaaaaucucaacucuuugagugagcuagaaguaaagaaucuucaaagacuaaguggugccauggaugaacuccacaacgaaauacucgagcuggaugagaaaguggaugaucucagagcugacacuauaagcucacaaauagaacuugcagucuugcuuuccaacgaaggaauaauaaacagugaagacgagcaucuauuggcacuugagagaaaacuaaagaaaaugcugggucccucugcuguagacauaggaaacggaugcuucgaaaccaaacacaaaugcaaccagaccugcuuagacaggauagcugcuggcaccuuuaaugcaggagaauuuucucuccccacuuuugauucauugaacauuacugcugcaucuuuaaaugaugauggauuggauaaccauacuauacugcucuauuacucaacugcugcuucuaguuuggcuguaacauugaugcuagcuauuuuuauuguuuauauggucuccagagacaacguuucaugcuccaucugucuauaa

SEQ ID NO: 59621 - RNA, 1755 nt, Artificial Sequence
  derived and/or modified CDS sequence (wt) from hemagglutinin__InfluenzaB__AGX22764
augaaggcaauaauuguacuacucaugguaguaacauccaaugcagaucgaaucugcacugggauaacaucuucaaacucaccucauguggucaaaacagcuacucaaggggaggucaaugugacuggugugauaccacugacaacaacaccaacaaaaucuuauuuugcaaaucucaaaggaacaaggaccagagggaaacuaugcccagacugucucaacuguacagaucuggauguggccuugggcaggccaauguguguggggaccacaccuucugcgaaagcuucaauacuccacgaagucagaccuguuacauccgggugcuuuccuauaaugcacgacagaacaaaaaucaggcaacuagccaaucuucucagaggauaugaaaauaucagguuaucaacccaaaacguuaucgaugcagaaaaggcaccaggaggacccuacagacuuggaaccucaggaucuugcccuaacgcuaccaguaaaagcggauuuuucgcaacaauggcuugggcugucccaaaggacaacaacaaaaaugcaacgaacccacuaacaguagagguaccauacauuuguaaagaaggggaagaccaaauuacuguuuggggguuccauucagauaacaaaacccaaaugaagaaccucuauggagacucaaauccucaaaaguucaccucaucugcuaauggaguaaccacacauuauguuucucagauuggcggcuucccagaucaaacagaagacggaggacuaccacaaagcggcagaauugucguugauuacaugauacaaaaaccugggaaaacaggaacaauugucuaucaaagagguguuuuguugccucaaaagguguggugcgcgaguggcaggagcaaaguaauaaaaggguccuugccuuuaauuggugaagcagauugccuucaugaaaaauacgguggauuaaacaaaagcaagccuuacuacacaggagaccaugcaaaagccauaggaaauugcccaauaugggugaaaacaccuuugaagcuugccaauggaaccaaauauagaccuccugcaaaacuauuaaaggaaagggguuucuucggagcuauugcugguuuccuagaaggaggaugggaaggaaugauugcagguuggcacggauacacaucucacggagcacauggaguggcaguugcggcagaccuuaagaguacacaagaagcuauaaacaagauaacaaaaaaucucaacucuuugagugagcuagaaguaaagaaucuucaaagacuaaguggugccauggaugaacuccacaacgaaauacucgagcuggaugagaaaguggaugaucucagagcugacacuauaagcucacaaauagaacuugcagucuugcuuuccaacgaaggaauaauaaacagugaagacgagcaucuauuggcacuugagagaaaacuaaagaaaaugcugggucccucugcuguagacauaggaaacggaugcuucgaaaccaaacacaaaugcaaccagaccugcuuagacaggauagcugcuggcaccuuuaaugcaggagaauuuucucuccccacuuuugauucauugaacauuacugcugcaucuuuaaaugaugauggauuggauaaccauacuauacugcucuauuacucaacugcugcuucuaguuuggcuguaacauugaugcuagcuauuuuuauuguuuauauggucuccagagacaacguuucaugcuccaucugucuauaa

SEQ ID NO: 59622 - RNA, 1755 nt, Artificial Sequence
  derived and/or modified CDS sequence (wt) from hemagglutinin__InfluenzaB__AGX22775
augaaggcaauaauuguacuacucaugguaguaacauccaaugcagaucgaaucugcacugggauaacaucuucaaacucaccucauguggucaaaacagcuacucaaggggaggucaaugugacuggugugauaccacuaacaacaacaccaacaaaaucuuauuuugcaaaucucaaaggaacaaggaccagagggaaacuaugcccagacugucucaacuguacagaucuggauguggccuugggcagaccaauguguguggggaccacaccuucggcgaaagcuucaauacuccacgaagucagaccuguuacauccgggugcuuuccuauaaugcacgacagaacaaaaaucaggcaacuacccaaucuucucagaggauaugaaaauaucaggcuaucaacccaaaacgucaucgaugcagaaaaggcaccaggaggacccuacagacuuggaaccucaggaucuugcccuaacgcuaccaguaaaagcggauuuuucgcaacaauggcuugggcugucccaaaggacaacaacaaaaaugcaacgaacccacuaacaguagaaguaccauacauuuguacagaaggggaagaccaaaucacuguuuggggguuccauucagauaacaaaacccaaaugaagaaccucuauggagacucaaauccucaaaaguucaccucaucugcuaauggaguaaccacacacuauguuucucagauuggcggcuucccagaucaaacagaagacggaggacuaccacaaagcggcaggauuguuguugauuacaugaugcaaaaaccugggaaaacaggaacaauugucuaccaaagagguguuuuguugccucaaaagguguggugcgcgaguggcaggagcaaaguaauaaaaggguccuugccuuuaauuggugaagcagauugccuucaugaaaaauacgguggauuaaacaaaagcaagccuuacuacacaggagaacaugcaaaagccauaggaaauugcccaauaugggugaaaacaccguugaagcuugccaauggaaccaaauauagaccuccugcaaaacuauuaaaggaaagggguuucuucggagcuauugcugguuuccuagaaggaggaugggaaggaaugauugcaggcuggcacggauacacaucucacggagcacauggaguggcaguggcggcggaccuuaagaguacgcaagaagcuauaaacaagauaacaaaaaaucucaauucuuugagugagcuagaaguaaagaaucuucaaagacuaaguggugccauggaugaacuccacaacgaaauacucgagcuggaugagaaaguggaugaucucagagcugacacuauaagcucgcaaauagaacuugcagucuugcuuuccaacgaaggaauaauaaacagugaagaugagcaucuauuggcacuugagagaagacuaaagaaaaugcugggucccucugcuguagagauaggaaauggaugcuucgaaaccaaacacaagugcaaccagaccugcuuagacaggauagcugcuggcaccuuuaaugcaggagaauuuucucuccccacuuuugauucacugaacauuacugcugcaucuuuaaaugaugauggauuggauaaccauacuauacugcucuauuacucaacugcugcuucuaguuuggcuguaacauugaugcuagcuauuuuuauuguuuauauggucuccagagacaacguuucaugcuccaucugucuauaa

SEQ ID NO: 59623 - RNA, 1755 nt, Artificial Sequence
  derived and/or modified CDS sequence (wt) from hemagglutinin__InfluenzaB__AGX22786
augaaggcaauaauuguacuacucaugguaguaacauccaaugcagaucgaaucugcacugggauaacaucuucaaacucaccucauguggucaaaacagcuacucaaggggaggucaaugugacuggugugauaccacugacaacaacaccaacaaaaucuuauuuugcaaaucucaaaggaacaaggaccagagggaaacuaugcccagacugucucaacuguacagaucuggauguggccuugggcaggccaauguguguggggaccacaccuucugcgaaagcuucaauacuccacgaagucagaccuguuacauccgggugcuuuccuauaaugcacgacagaacaaaaaucaggcaacuagccaaucuucucagaggauaugaaaauaucagguuaucaacccaaaacguuaucgaugcagaaaaggcaccaggaggacccuacagacuuggaaccucaggaucuugcccuaacgcuaccaguaaaagcggauuuuucgcaacaauggcuugggcugucccaaaggacaacaacaaaaaugcaacgaacccacuaacaguagagguaccauacauuuguaaagaaggggaagaccaaauuacuguuuggggguuccauucagauaacaaaacccaaaugaagaaccucuauggagacucaaauccucaaaaguucaccucaucugcuaauggaguaaccacacauuauguuucucagauuggcggcuucccagaucaaacagaagacggaggacuaccacaaagcggcagaauugucguugauuacaugauacaaaaaccugggaaaacaggaacaauugucuaucaaagagguguuuuguugccucaaaagguguggugcgcgaguggcaggagcaaaguaauaaaaggguccuugccuuuaauuggugaagcagauugccuucaugaaaaauacgguggauuaaacaaaagcaagccuuacuacacaggagaacaugcaaaagccauaggaaauugcccaauaugggugaaaacaccuuugaagcuugccaauggaaccaaauauagaccuccugcaaaacuauuaaaggaaagggguuucuucggagcuauugcugguuuccuagaaggaggaugggaaggaaugauugcagguuggcacggauacacaucucauggagcacauggaguggcaguugcggcagaccuuaagaguacacaagaagcuauaaacaagauaacaaaaaaucucaacucuuugagugagcuagaaguaaagaaucuucaaagacuaaguggugccauggaugaacuccacaacgaaauacucgagcuggaugagaaaguggaugaucucagagcugacacuauaagcucacaaauagaacuugcagucuugcuuuccaacgaaggaauaauaaacagugaagacgagcaucuauuggcacuugagagaaaacuaaagaaaaugcugggucccucugcuguagacauaggaaacggaugcuucgaaaccaaacacaaaugcaaccagaccugcuuagacaggauagcugcuggcaccuuuaaugcaggagaauuuucucuccccacuuuugauucauugaacauuacugcugcaucuuuaaaugaugauggauuggauaaccauacuauacugcucuauuacucaacugcugcuucuaguuuggcuguaacauugaugcuagcuauuuuuauuguuuauauggucuccagagacaacguuucaugcuccaucugucuauaa

SEQ ID NO: 59624 - RNA, 1755 nt, Artificial Sequence
  derived and/or modified CDS sequence (wt) from hemagglutinin__InfluenzaB__AGX22797
augaaggcaauaauuguacuacucaugguaguaacauccaaugcagaucgaaucugcacugggauaacaucuucaaacucaccucauguggucaaaacagcuacucaaggggaggucaaugugacuggugugauaccacugacaacaacaccaacaaaaucuuauuuugcaaaucucaaaggaacaaggaccagagggaaacuaugcccagacugucucaacuguacagaucuggauguggccuugggcaggccaauguguguggggaccacaccuucugcgaaagcuucaauacuccacgaagucagaccuguuacauccgggugcuuuccuauaaugcacgacagaacaaaaaucaggcaacuagccaaucuucucagaggauaugaaaauaucagguuaucaacccaaaacguuaucgaugcagaaaaggcaccaggaggacccuacagacuuggaaccucaggaucuugcccuaacgcuaccaguaaaagcggauuuuucgcaacaauggcuugggcugucccaaaggacaacaacaaaaaugcaacgaacccacuaacaguagagguaccauacauuuguaaagaaggggaagaccaaauuacuguuuggggguuccauucagauaacaaaacccaaaugaagaaccucuauggagacucaaauccucaaaaguucaccucaucugcuaauggaguaaccacacauuauguuucucagauuggcggcuucccagaucaaacagaagacggaggacuaccacaaagcggcagaauugucguugauuacaugauacaaaaaccugggaaaacaggaacaauugucuaucaaagagguguuuuguuuccucaaaagguguggugcgcgaguggcaggagcaaaguaauaaaaggguccuugccuuuaauuggugaagcagauugccuucaugaaaaauacgguggauuaaacaaaagcaagccuuacuacacaggagaacaugcaaaagccauaggaaauugcccaauaugggugaaaacaccuuugaagcuugccaauggaaccaaauauagaccuccugcaaaacuauuaaaggaaagggguuucuucggagcuauugcugguuuccuagaaggaggaugggaaggaaugauugcagguuggcacggauacacaucucauggagcacauggaguggcaguugcggcagaccuuaagaguacacaagaagcuauaaacaagauaacaaaaaaucucaacucuuugagugagcuagaaguaaagaaucuucaaagacuaaguggugccauggaugaacuccacaacgaaauacucgagcuggaugagaaaguggaugaucucagagcugacacuauaagcucacaaauagaacuugcagucuugcuuuccaacgaaggaauaauaaacagugaagacgagcaucuauuggcacuugagagaaaacuaaagaaaaugcugggucccucugcuguagacauaggaaacggaugcuucgaaaccaaacacaaaugcaaccagaccugcuuagacaggauagcugcuggcaccuuuaaugcaggagaauuuucucuccccacuuuugauucauugaacauuacugcugcaucuuuaaaugaugauggauuggauaaccauacuauacugcucuauuacucaacugcugcuucuaguuuggcuguaacauugaugcuagcuauuuuuauuguuuauauggucuccagagacaacguuucaugcuccaucugucuauaa

SEQ ID NO: 59625 - RNA, 1755 nt, Artificial Sequence
  derived and/or modified CDS sequence (wt) from hemagglutinin__InfluenzaB__AGX22808
augaaggcaauaauuguacuacucaugguaguaacauccaaugcagaucgaaucugcacugggauaacaucuucaaacucaccucauguggucaaaacagcuacucaaggggaggucaaugugacuggugugauaccacugacaacaacaccaacaaaaucuuauuuugcaaaucucaaaggaacaaggaccagagggaaacuaugcccagacugucucaacuguacagaucuggauguggccuugggcaggccaauguguguggggaccacaccuucugcgaaagcuucaauacuccacgaagucagaccuguuacauccgggugcuuuccuauaaugcacgacagaacaaaaaucaggcaauuagccaaucuucucagaggauaugaaaauaucagguuaucaacccaaaacguuaucgaugcagaaaaggcaccaggaggacccuauagacuuggaaccucaggaucuugcccuaacgcuaccaguaaaagcggauuuuucgcaacaauggcuugggcugucccaaaggacaacaacaaaaaugcaacgaacccacuaacaguagaaguaccauacauuuguaaagaaggggaagaccaaauuacuguuuggggguuccauucagauaacaaaacccaaaugaagaaccucuauggagacucaaauccucaaaaguucaccucaucugcuaauggaguaaccacacauuauguuucucagauuggcggcuucccagaucaaacagaagacggaggacuaccacaaagcggcagaauugucguugauuacaugauacaaaaaccugggaaaacaggaacaauugucuaucaaagagguguuuuguugccucaaaagguguggugcgcgaguggcaggagcaaaguaauaaaaggguccuugccuuuaauuggugaagcagauugccuucaugaaaaauacgguggauuaaacaaaagcaagccuuacuacacaggagaacaugcaaaagccauaggaaauugcccaauaugggugaaaacaccuuugaagcuugccaauggaaccaaauauagaccuccugcaaaacuauuaaaggaaagggguuucuucggagcuauugcugguuuccuagaaggaggaugggaaggaaugauugcagguuggcacggauacacaucucacggagcacauggaguggcaguugcggcagaccuuaagaguacacaagaagcuauaaacaagauaacaaaaaaucucaauucuuugagugagcuagaaguaaagaaucuucaaagacuaaguggugccauggaugaacuccacaacgaaauacucgagcuggaugagaaaguggaugaucucagagcugacacuauaagcucacaaauagaacuugcagucuugcuuuccaacgaaggaauaauaaacagugaagacgagcaucuauuggcacuugagagaaaacuaaagaaaaugcugggucccucugcuguagacauaggaaacggaugcuucgaaaccaaacacaaaugcaaccagaccugcuuagacaggauagcugcuggcaccuuuaaugcaggagaauuuucucuccccacuuuugauucauugaacauuacugcugcaucuuuaaaugaugauggauuggauaaccauacuauacugcucuauuacucaacugcugcuucuaguuuggcuguaacauugaugcuagcuauuuuuauuguuuauauggucuccagagacaacguuucaugcuccaucugucuauaa

SEQ ID NO: 59626 - RNA, 1755 nt, Artificial Sequence; identical to SEQ ID NO: 59050
  derived and/or modified CDS sequence (wt) from hemagglutinin__InfluenzaB__AGX22819

SEQ ID NO: 59627 - RNA, 1755 nt, Artificial Sequence; identical to SEQ ID NO: 59050
  derived and/or modified CDS sequence (wt) from hemagglutinin__InfluenzaB__AGX22830

SEQ ID NO: 59628 - RNA, 1755 nt, Artificial Sequence
  derived and/or modified CDS sequence (wt) from hemagglutinin__InfluenzaB__AGX22841
augaaggcaauaauuguacuacucaugguaguaacauccaaugcagaucgaaucugcacugggauaacaucuucaaacucaccucauguggucaaaacagcuacucaaggggaggucaaugugacuggugugauaccacugacaacaacaccaacaaaaucuuauuuugcaaaucucaaaggaacaaggaccagagggaaacuaugcccagacugucucaacuguacagaucuggauguggccuugggcaggccaauguguguggggaccacaccuucugcgaaagcuucaauacuccacgaagucagaccuguuacauccgggugcuuuccuauaaugcacgacagaacaaaaaucaggcaacuagccaaucuucucagaggauaugaaaauaucagguuaucaacccaaaacguuaucgaugcagaaaaggcaccaggaggacccuacagacuuggaaccucaggaucuugcccuaacgcuaccaguaaaagcggauuuuucgcaacaauggcuugggcugucccaaaggacaacaacaaaaaugcaacgaacccacuaacaguagagguaccauacauuuguaaagaaggggaagaccaaauuacuguuuggggguuccauucagauaacaaaacccaaaugaagaaccucuauggagacucaaauccucaaaaguucaccucaucugcugauggaguaaccacacauuauguuucucagauuggcggcuucccagaucaaacagaagacggaggacuaccacaaagcggcagaauugucguugauuacaugauacaaaaaccugggaaaacaggaacaauugucuaucaaagagguguuuuguugccucaaaagguguggugcgcgaguggcaggagcaaaguaauaaaaggguccuugccuuuaauuggugaagcagauugccuucaugaaaaauacgguggauuaaacaaaagcaagccuuacuacacaggagaacaugcaaaagccauaggaaauugcccaauaugggugaaaacaccuuugaagcuugccaauggaaccaaauauagaccuccugcaaaacuauuaaaggaaagggguuucuucggagcuauugcugguuuccuagaaggaggaugggaaggaaugauugcagguuggcacggauacacaucucacggagcacauggaguggcaguugcggcagaccuuaagaguacacaagaagcuauaaacaagauaacaaaaaaucucaacucuuugagugagcuagaaguaaagaaucuucaaagacuaaguggugccauggaugaacuccacaacgaaauacucgagcuggaugagaaaguggaugaucucagagcugacacuauaagcucacaaauagaacuugcagucuugcuuuccaacgaaggaauaauaaacagugaagacgagcaucuauuggcacuugagagaaaacuaaagaaaaugcugggucccucugcuguagacauaggaaacggaugcuucgaaaccaaacacaaaugcaaccagaccugcuuagacaggauagcugcuggcaccuuuaaugcaggagaauuuucucuccccacuuuugauucauugaacauuacugcugcaucuuuaaaugaugauggauuggauaaccauacuauacugcucuauuacucaacugcugcuucuaguuuggcuguaacauugaugcuagcuauuuuuauuguuuauauggucuccagagacaacguuucaugcuccaucugucuauaa

SEQ ID NO: 59629 - RNA, 1755 nt, Artificial Sequence
  derived and/or modified CDS sequence (wt) from hemagglutinin__InfluenzaB__AGX22852
augaaggcaauaauuguacuacucaugguaguaacauccaaugcagaucgaaucugcacugggauaacaucuucaaacucaccucauguggucaaaacagcuacucaaggggaggucaaugugacuggugugauaccacugacaacgacaccaacaaaaucuuauuuugcaaaucucaaaggaacaaggaccagagggaaacuaugcccagacugucucaacuguacagaucuggauguggccuugggcaggccaauguguguggggaccacaccuucugcgaaagcuucaauacuccacgaagucagaccuguuacauccgggugcuuuccuauaaugcacgacagaacaaaaaucaggcaacuagccaaucuucucagaggauaugaaaauaucagguuaucaacccaaaacguuaucgaugcagaaaaggcaccaggaggacccuacagacuuggaaccucaggaucuugcccuaacgcuaccaguaaaagcggauuuuucgcaacaauggcuugggcugucccaaaggacaacaacaaaaaugcaacgaacccacuaacaguagaaguaccauacauuuguacagaaggggaagaccaaauuacuguuuggggguuccauucagauaacaaaacccaaaugaagaaccucuauggagacucaaauccucaaaaguucaccucaucugcuaauggaguaaccacacauuauguuucucagauuggcggcuuccccgaucaaacagaagacggaggacuaccacaaagcggcagaauugucguugauuacaugaugcaaaaaccugggaaaacaggaacaauugucuaucaaagagguguuuuguugccucaaaagguguggugcgcgaguggcaggagcaaaguaauaaaaggguccuugccuuuaauuggugaagcagauugccuucaugaaaaauacgguggauuaaacaaaagcaagccuuacuacacaggagaacaugcaaaagccauaggaaauugcccaauaugggugaaaacaccuuugaagcuugccaauggaaccaaauauagaccuccugcaaaacuauuaaaggaaagggguuucuucggagcuauugcugguuuccuagaaggaggaugggaaggaaugauugcagguuggcacggauacacaucucacggagcacauggaguggcaguugcggcagaccuuaagaguacacaagaagcuauaaacaagauaacaaaaaaucucaacucuuugagugagcuagaaguaaagaaucuucaaagacuaaguggugccauggaugaacuccacaacgaaauacucgagcuggaugagaaaguggaugaucucagagcugacacuauaagcucacaaauagaacuugcagucuugcuuuccaacgaaggaauaauaaacagugaagacgagcaucuauuggcacuugagagaaaacuaaagaaaaugcugggucccucugcuguagacauaggaaauggaugcuucgaaaccaaacacaaaugcaaccagaccugcuuagacaggauagcugcuggcaccuuuaaugcaggagaauuuucucuccccacuuuugauucauugaacauuacugcugcaucuuuaaaugaugauggauuggauaaccauacuauacugcucuauuacucaacugcugcuucuaguuuggcuguaacauugaugcuagcuauuuuuauuguuuauauggucuccagagacaacguuucaugcuccaucugucuauaa

SEQ ID NO: 59630 - RNA, 1755 nt, Artificial Sequence; identical to SEQ ID NO: 59050
  derived and/or modified CDS sequence (wt) from hemagglutinin__InfluenzaB__AGX22863

SEQ ID NO: 59631 - RNA, 1755 nt, Artificial Sequence
  derived and/or modified CDS sequence (wt) from hemagglutinin__InfluenzaB__AGX22874
augaaggcaauaauuguacuacucaugguaguaacauccaaugcagaucgaaucugcacugggauaacaucuucaaacucaccucauguggucaaaacagcuacucaaggggaggucaaugugacuggugugauaccacugacaacaacaccaacaaaaucuuauuuugcaaaucucaaaggaacaaggaccagagggaaacuaugcccagacugucucaacuguacagaucuggauguggccuugggcaggccaauguguguggggaccacaccuucugcgaaagcuucaauacuccacgaagucagaccuguuacauccgggugcuuuccuauaaugcacgacagaacaaaaaucaggcaacuagccaaucuucucagaggauaugaaaauaucagguuaucaacccaaaacguuaucgaugcagaaaaggcaccaggaggacccuacagacuuggaaccucaggaucuugcccuaacgcuaccaguaaaagcggauuuuucgcaacaauggcuugggcugucccaaaggacaacaacaaaaaugcaacgaacccacuaacaguagagguaccauacauuuguaaagaaggggaagaccaaauuacuguuuggggguuccauucagauaacaaaacccaaaugaaaaaccucuauggagacucaaauccucaaaaguucaccucaucugcuaauggaguaaccacacauuauguuucucagauuggcggcuucccagaucaaacagaagacggaggacuaccacaaagcggcagaauugucguugauuacaugauacaaaaaccugggaaaacaggaacaauugucuaccaaagagguguuuuguugccucaaaagguguggugcgcgaguggcaggagcaaaguaauaaaaggguccuugccuuuaauuggugaagcagauugccuucaugaaaaauacgguggauuaaacaaaagcaagccuuacuacacaggagaacaugcaaaagccauaggaaauugcccaauaugggugaaaacaccuuugaagcuugccaauggaaccaaauauagaccuccugcaaaacuauuaaaggaaagggguuucuucggagcuauugcugguuuccuagaaggaggaugggaaggaaugauugcagguuggcacggauacacaucucauggagcacauggaguggcaguugcggcagaccuuaagaguacacaagaagcuauaaacaagauaacaaaaaaucucaacucuuugagugagcuagaaguaaagaaucuucaaagacuaaguggugccauggaugaacuccacaacgaaauacucgagcuggaugagaaaguggaugaucucagagcugacacuauaagcucacaaauagaacuugcagucuugcuuuccaacgaaggaauaauaaacagugaagacgagcaucuauuggcacuugagagaaaacuaaagaaaaugcugggucccucugcuguagacauaggaaacggaugcuucgaaaccaaacacaaaugcaaccagaccugcuuagacaggauagcugcuggcaccuuuaaugcaggagaauuuucucuccccacuuuugauucauugaacauuacugcugcaucuuuaaaugaugauggauuggauaaccauacuauacugcucuauuacucaacugccgcuucuaguuuggcuguaacauugaugcuagcuauuuuuauuguuuauauggucuccagagacaacguuucaugcuccaucugucuauaa

SEQ ID NO: 59632 - RNA, 1755 nt, Artificial Sequence
  derived and/or modified CDS sequence (wt) from hemagglutinin__InfluenzaB__AGX22885
augaaggcaauaauuguacuacucaugguaguaacauccaaugcagaucgaaucugcacugggauaacaucuucaaacucaccucauguggucaaaacagcuacucaaggggaggucaaugugacuggugugauaccacugacaacaacaccaacaaaaucuuacuuugcaaaucucaaaggaacaaggaccagagggaaacuaugcccagacugucucaacuguacagaucuggauguggccuugggcaggccaauguguguggggaccacaccuucugcgaaagcuucaauacuccacgaagucagaccuguuacauccgggugcuuuccuauaaugcacgacagaacaaaaaucaggcaacuagccaaucuucucagaggauaugaaaauaucagguuaucaacccaaaacguuaucgaugcagaaaaggcaccaggaggacccuacagacuuggaaccucaggaucuugcccuaacgcuaccaguaaaagcggauuuuucgcaacaauggcuugggcugucccaaaggacaacaacaaaaaugcaacgaacccacuaacaguagaaguaccauacauuuguacagaaggggaagaccaaauuacuguuuggggguuccauucagauaacaaaacccaaaugaagaaccucuauggagacucaaauccucaaaaguucaccucaucugcuaauggaguaaccacacauuauguuucucagauuggcggcuucccagaucaaacagaagacggaggacuaccacaaagcggcagaauugucguugauuacaugaugcaaaaaccugggaaaacaggaacaauugucuaucaaagagguguuuuguugccucagaagguguggugcgcgaguggcaggagcaaaguaauaaaaggguccuugccuuuaauuggugaagcagauugccuucaugaaaaauacgguggauuaaacaaaagcaagccuuacuacacaggagaacaugcaaaagccauaggaaauugcccaauaugggugaaaacaccuuugaagcuugccaauggaaccaaauauagaccuccugcaaaacuauuaaaggaaagggguuucuucggagcuauugcugguuuccuagaaggaggaugggaaggaaugauugcagguuggcacggauacacaucucacggagcacauggaguggcaguugcggcagaccuuaagaguacacaagaagcuauaaacaagauaacaaaaaaucucaacucuuugagugagcuagaaguaaagaaucuucaaagacuaaguggugccauggaugaacuccacaacgaaauacucgagcuggaugagaaaguggaugaucucagagcugacacuauaagcucacaaauagaacuugcagucuugcuuuccaacgaaggaauaauaaacagugaagacgagcaucuauuggcacuugagagaaaacuaaagaaaaugcugggucccucugcuguagacauaggaaauggaugcuucgaaaccaaacacaaaugcaaccagaccugcuuagacaggauagcugcuggcaccuuuaaugcaggagaauuuucccuccccacuuuugauucauugaacauuacugcugcaucuuuaaaugaugauggauuggauaaccauacuauacugcucuauuacucaacugcugcuucuaguuuggcuguaacauugaugcuagcuauuuuuauugucuauauggucuccagagacaacguuucaugcuccaucugucuauaa

SEQ ID NO: 59633 - RNA, 1755 nt, Artificial Sequence; identical to SEQ ID NO: 59611
  derived and/or modified CDS sequence (wt) from hemagglutinin__InfluenzaB__AGX22896

SEQ ID NO: 59634 - RNA, 1755 nt, Artificial Sequence
  derived and/or modified CDS sequence (wt) from hemagglutinin__InfluenzaB__AGX22907
augaaggcaauaauuguacuacucaugguaguaacauccaaugcagaucgaaucugcacugggauaacaucuucaaacucaccucauguggucaaaacagcuacucaaggggaggucaaugugacuggugugauaccacugacaacaacaccaacaaaaucuuauuuugcaaaucucaaaggaacaaggaccagagggaaacuaugcccagacugucucaacuguacagaucuggauguggccuugggcaggccaauguguguggggaccacaccuucugcgaaagcuucaauacuccacgaagucagaccuguuacauccgggugcuuuccuauaaugcacgacagaacaaaaaucaggcaacuagccaaucuucucagaggauaugaaaauaucagguuaucaacccaaaacguuaucgaugcagaaaaggcaccaggaggacccuacagacuuggaaccucaggaucuugcccuaacgcuaccaguaaaagcggauuuuucgcaacaauggcuugggcugucccaaaggacaacaacaaaaaugcaacgaacccacuaacaguagaaguaccauacauuuguacagaaggggaagaccaaauuacuguuuggggguuccauucagauaacaaaacccaaaugaagaaccucuauggagacucaaauccucaaaaguucaccucaucugcuaauggaguaaccacacauuauguuucucagauuggcggcuucccagaucaaacagaagacggaggacuaccacaaagcggcagaauugucguugauuacaugaugcaaaaaccugggaaaacaggaacaauugucuaucaaagagguguuuuguugccucaaaagguguggugcgcgaguggcaggagcaaaguaauaaaaggguccuugccuuuaauuggugaagcagauugccuucaugaaaaauacgguggauuaaacaaaagcaagccuuacuacacaggagaacaugcaaaagccauaggaaauugcccaauaugggugaaaacaccuuugaagcuugccaauggaaccaaauacagaccuccugcaaaacuauuaaaggaaagggguuucuucggagcuauugcugguuuccuagaaggaggaugggaaggaaugauugcagguuggcacggauacacaucucacggagcacauggaguggcaguugcggcagaccuuaagaguacacaagaagcuauaaacaagauaacaaaaaaucucaacucuuugagugagcuagaaguaaagaaucuucaaagacuaaguggugccauggaugaacuccacaacgaaauacucgagcuggaugagaaaguggaugaucucagagcugacacuauaagcucacaaauagaacuugcagucuugcuuuccaacgaaggaauaauaaacagugaagacgagcaucuauuggcacuugagagaaaacuaaagaaaaugcugggucccucugcuguagacauaggaaauggaugcuucgaaaccaaacacaaaugcaaccagaccugcuuagacaggauagcugcuggcaccuuuaaugcaggagaauuuucucuccccacuuuugauucauugaacauuacugcugcaucuuuaaaugaugauggauuggauaaccauacuauacugcucuauuacucaacugcugcuucuaguuuggcuguaacauugaugcuagcuauuuuuauuguuuauauggucuccagagacagcguuucaugcuccaucugucuauaa

SEQ ID NO: 59635 - RNA, 1755 nt, Artificial Sequence
  derived and/or modified CDS sequence (wt) from hemagglutinin__InfluenzaB__AGX22918
augaaggcaauaauuguacuacucaugguaguaacauccaaugcagaucgaaucugcacugggauaacaucuucaaacucaccucauguggucaaaacagcuacucaaggggaggucaaugugacuggugugauaccacugacaacaacaccaacaaaaucuuauuuugcaaaucucaaaggaacaaggaccagagggaaacuaugcccagacugucucaacuguacagaucuggauguggccuugggcaggccaauguguguggggaccacaccuucugcgaaagcuucaauacuccacgaagucagaccuguuacauccgggugcuuuccuauaaugcacgacagaacaaaaaucaggcaacuagccaaucuucucagaggauaugaaaauaucagguuaucaacccaaaacguuaucgaugcagaaaaggcaccaggaggacccuacagacuuggaaccucaggaucuugcccuaacgcuaccaguaaaagcggauuuuucgcaacaauggcuugggcugucccaaaggacaacaacaaaaaugcaacgaacccacuaacaguagaaguaccauacauuuguacagaaggggaagaccaaauuacuguuuggggguuccauucagauaacaaaacucaaaugaagaaccucuauggagacucaaauccucaaaaguucaccucaucugcuaauggaguaaccacacauuauguuucucagauugguggcuucccagaucaaacagaagacggaggacuaccacaaagcggcagaauuguuguugauuacaugaugcaaaaaccugggaaaacaggaacaauugucuaucaaagagguguuuuguugccucaaaagguguggugcgcgaguggcaggagcaaaguaauaaaaggguccuugccuuuaauuggugaagcagauugccuucaugaaaaauacgguggauuaaacaaaagcaagccuuacuacacaggagaacaugcaaaagcuauaggaaauugcccaauaugggugaaaacaccuuugaagcuugccaauggaaccaaauauagaccuccugcaaaacuauuaaaggaaagggguuucuucggagcuauugcugguuuccuagaaggaggaugggaaggaaugauugcagguuggcacggauacacaucucacggagcacauggaguggcaguggcggcagaccuuaagaguacacaagaagcuauaaacaagauaacaaaaaaucucaauucuuugagugagcuagaaguaaagaaucuucaaagacuaaguggugccauggaugaacuccacaacgaaauacucgagcuggaugagaaaguggaugaucucagagcugacacuauaagcucacaaauagaacuugcagucuugcuuuccaacgaaggaauaauaaacagugaagacgagcaucuauuggcacuugagagaaaacuaaagaaaaugcugggucccucugcuguagacauaggaaauggaugcuucgaaaccaaacacaaaugcaaccagaccugcuuagacaggauagcugcuggcaccuuuaaugcaggagaauuuucucuccccacuuuugauucauugaacauuacugcugcaucuuuaaaugaugauggauuggauaaccauacuauacugcucuauuacucaacugcugcuucuaguuuggcuguaacauugaugcuagcuauuuuuauuguuuauauggucuccagagacaacguuucaugcuccaucugucuauaa

SEQ ID NO: 59636 - RNA, 1755 nt, Artificial Sequence
  derived and/or modified CDS sequence (wt) from hemagglutinin__InfluenzaB__AGX22929
augaaggcaauaauuguacuacucaugguaguaacauccaaugcagaucgaaucugcacugggauaacaucuucaaacucaccucauguggucaaaacagcuacucaaggggaggucaaugugacuggugugauaccacugacaacaacaccaacaaaaucuuauuuugcaaaucucaaaggaacaaggaccagagggaaacuaugcccagacugucucaacuguacagaucuggauguggccuugggcagaccaaugugugugggaaccacaccuucugcgaaagcuucaauacuccacgaagucagaccuguuacauccgggugcuuuccuauaaugcacgacagaacaaaaaucaggcaacuagccaaucuucucagaggauaugaaaauaucagguuaucaacccaaaacguuaucgaugcagaaaaggcaccaggaggacccuacagacuuggaaccucaggaucuugcccuaacgcuaccaguaaaagcggauuuuucgcaacaauggcuugggcugucccaaaggacaacaacaaaaaugcaacgaacccacuaacaguagaaguaccauacauuuguacagaaggggaagaccaaauuacuguuuggggguuccauucagauaacaaaacccaaaugaagaaccucuauggagacucaaauccucaaaaguucaccucaucugcuaauggaguaaccacacauuauguuucucagauuggcggcuucccagaucaaacagaagacggaggacuaccacaaagcggcagaauugucguugauuacaugaugcaaaaaccugggaaaacaggaacaauugucuaucaaagagguguuuuguugccucaaaagguguggugcgcgaguggcaggagcaaaguaauaaaaggguccuugccuuuaauuggugaagcagauugccuucaugaaaaauacgguggauuaaacaaaagcaagccuuacuacacaggagaacaugcaaaagccauaggaaauugcccaauaugggugaaaacaccuuugaagcuugccaauggaaccaaauauagaccuccugcaaaacuauuaaaggaaagggguuucuucggagcuauugcugguuuccuagaaggaggaugggaaggaaugauugcagguuggcacggauacacaucucacggagcacauggaguggcaguugcggcagaccuuaagaguacacaagaagcuauaaacaagauaacaaaaaaucucaacucuuugagugagcuagaaguaaagaaucuucaaagacuaaguggugccauggaugaacuccacaacgaaauacucgagcuggaugagaaaguggaugaucucagagcugacacuauaagcucacaaauagaacuugcagucuugcuuuccaacgaaggaauaauaaacagugaagacgagcaucuauuggcacuugagagaaaacuaaagaaaaugcugggucccucugcuguagacauaggaaauggaugcuucgaaaccaaacacaaaugcaaccagaccugcuuagacaggauagcugcuggcaccuuuaaugcaggagaauuuucucuccccacuuuugauucauugaacauuacugcugcaucuuuaaaugaugauggauuggauaaccauacuauacugcucuauuacucaacugcugcuucuaguuuggcuguaacauugaugcuagcuauuuuuauuguuuauauggucuccagagacaacguuucaugcuccaucugucuauaa

SEQ ID NO: 59637 - RNA, 1755 nt, Artificial Sequence; identical to SEQ ID NO: 59623
  derived and/or modified CDS sequence (wt) from hemagglutinin__InfluenzaB__AGX22940

SEQ ID NO: 59638 - RNA, 1755 nt, Artificial Sequence
  derived and/or modified CDS sequence (wt) from hemagglutinin__InfluenzaB__AGX22951
augaaggcaauaauuguacuacucaugguaguaacauccaaugcagaucgaaucugcacugggauaacaucuucaaacucaccucauguggucaaaacagcuacucaaggggaggucaaugugacuggugugauaccacugacaacaacaccaacaaaaucuuacuuugcaaaucucaaaggaacaaggaccagagggaaacuaugcccagacugucucaacuguacagaucuggauguggccuugggcaggccaauguguguggggaccacaccuucugcgaaagcuucaauacuccacgaagucagaccuguuacauccgggugcuuuccuauaaugcacgacagaacaaaaauaaggcaacuagccaaucuucucagaggauaugaaaauaucagguuaucaacccaaaacguuaucgaugcagaaaaggcaccaggaggacccuacagacuuggaaccucaggaucuugcccuaacgcuaccaguaaaagcggauuuuucgcaacaauggcuugggcugucccaaaggacaacaacaaaaaugcaacgaacccacuaacaguagaaguaccauacauuuguacagaaggggaagaccaaauuacuguuuggggguuccauucagauaacaaaacccaaaugaagaaccucuauggagacucaaauccucaaaaguucaccucaucugcuaauggaguaaccacacauuauguuucucagauuggcggcuucccagaucaaacagaagacggaggacuaccacaaagcggcagaauugucguugauuacaugaugcaaaaaccugggaaaacaggaacaauugucuaucaaagagguguuuuguugccucaaaagguguggugcgcgaguggcaggagcaaaguaauaaaaggguccuugccuuuaauuggugaagcagauugccuucaugaaaaauacgguggauuaaacaaaagcaagccuuacuacacaggagaacaugcaaaagccauaggaaauugcccaauaugggugaaaacaccuuugaagcuugccaauggaaccaaauauagaccuccugcaaaacuauuaaaggaaagggguuucuucggagcuauugcugguuuccuagaaggaggaugggaaggaaugauugcagguuggcacggauacacaucucacggagcacauggaguggcaguugcggcagaccuuaagaguacacaagaagcuauaaacaagauaacaaaaaaucucaacucuuugagugagcuagaaguaaagaaucuucaaagacuaaguggugccauggaugaacuccacaacgaaauacucgagcuggaugagaaaguggaugaucucagagcugacacuauaagcucacaaauagaacuugcagucuugcuuuccaacgaaggaauaauaaacagugaagacgagcaucuauuggcacuugagagaaaacuaaagaaaaugcugggucccucugcuguagacauaggaaauggaugcuucgaaaccaaacacaaaugcaaccagaccugcuuagacaggauagcugcuggcaccuuuaaugcaggagaauuuucccuccccacuuuugauucauugaacauuacugcugcaucuuuaaaugaugauggauuggauaaucauacuauacugcucuauuacucaacugcugcuucuaguuuggcuguaacauugaugcuagcuauuuuuauugucuauauggucuccagagacaacguuucaugcuccaucugucuauaa

SEQ ID NO: 59639 - RNA, 1755 nt, Artificial Sequence
  derived and/or modified CDS sequence (wt) from hemagglutinin__InfluenzaB__AGX22962
augaaggcaauaauuguacuacucaugguaguaacauccaaugcagaucgaaucugcacugggauaacaucuucaaacucaccucauguggucaaaacagcuacucaaggggaggucaaugugacuggugugauaccacugacaacaacaccaacaaaaucuuauuuugcaaaucucaaaggaacaaggaccagagggaaacuaugcccagacugucucaacuguacagaucuggauguggccuugggcagaccaauguguguggggaccacaccuucugcgaaagcuucaauacuccacgaagucagaccuguuacauccgggugcuuuccuauaaugcacgacagaacaaaaaucaggcaacuagccaaucuucucagaggauaugaaaauaucagguuaucaacccaaaacguuaucgaugcagaaaaggcaccaggaggacccuacagacuuggaaccucaggaucuugcccuaacgcuaccaguaaaagcggauuuuucgcaacaauggcuugggcugucccaaaggacaacaacaaaaaugcaacgaacccacuaacaguagaaguaccauacauuuguacagaaggggaagaccaaauuacuguuuggggguuccauucagauaacaaaacccaaaugaagaaccucuauggagacucaaauccucaaaaguucaccucaucugcuaauggaguaaccacacauuauguuucucagauuggcggcuucccagaucaaacagaagacggaggacuaccacaaagcggcagaauugucguugauuacaugaugcaaaaaccugggaaaacaggaacaauugucuaucaaagagguguuuuguugccucaaaagguguggugcgcaaguggcaggagcaaaguaauaaaaggguccuugccuuuaauuggugaagcagauugccuucaugaaaaauacgguggauuaaacaaaagcaagccuuacuacacaggagaacaugcaaaagccauaggaaauugcccaauaugggugaaaacaccuuugaagcuugccaauggaaccaaauauagaccuccugcaaaacuauuaaaggaaagggguuucuucggagcuauugcugguuuccuagaaggaggaugggaaggaaugauugcagguuggcacggauacacaucucacggagcacauggaguggcaguugcggcagaccuuaagaguacacaagaagcuauaaacaagauaacaaaaaaucucaacucuuugagugagcuagaaguaaagaaucuucaaagacuaaguggugccauggaugaacuccacaacgaaauacucgagcuggaugagaaaguggaugaucucagagcugacacuauaagcucacaaauagaacuugcagucuugcuuuccaacgaaggaauaauaaacagugaagacgagcaucuauuggcacuugagagaaaacuaaagaaaaugcugggucccucugcuguagacauaggaaauggaugcuucgaaaccaaacacaagugcaaccagaccugcuuagacaggauagcugcuggcaccuuuaaugcaggagaauuuucucuccccacuuuugauucauugaacauuacugcugcaucuuuaaaugaugauggauuggauaaccauacuauacugcucuauuacucaacugcugcuucuaguuuggcuguaacauugaugcuagcuauuuuuauuguuuauauggucuccagagacaacguuucaugcuccaucugucuauaa

SEQ ID NO: 59640 - RNA, 1755 nt, Artificial Sequence
  derived and/or modified CDS sequence (wt) from hemagglutinin__InfluenzaB__AGX22973
augaaggcaauaauuguacuacucaugguaguaacauccaaugcagaucgaaucugcacugggauaacaucuucaaacucaccucauguggucaaaacagcuacucaaggggaggucaaugugacuggugugauaccacugacaacaacaccaacaaaaucuuauuuugcaaaucucaaaggaacaaggaccagagggaaacuaugcccagacugucucaacuguacagaucuggauguggccuugggcaggccaauguguguggggaccacaccuucugcgaaagcuucaauacuccacgaagucagaccuguuacauccgggugcuuuccuauaaugcacgacagaacaaaaaucaggcaacuagccaaucuucucagaggauaugaaaauaucagguuaucaacccaaaacguuaucgaugcagaaaaggcaccaggaggacccuacagacuuggaaccucaggaucuugcccuaacgcuaccaguaaaagcggauuuuucgcaacaauggcuugggcugucccaaaggacaacaacaaaaaugcaacgaacccacuaacaguagaaguaccauacauuuguacagaaggggaagaccaaauuacuguuuggggguuccauucagauaacaaaacccaaaugaagaaccucuauggagacucaaauccucaaaaguucaccucaucugcuaauggaguaaccacacauuauguuucucagauuggcggcuucccagaucaaacagaagacggaggacuaccacaaagcggcagaauuguuguugauuacaugaugcaaaaaccugggaaaacaggaacaauugucuaucaaagagguguuuuguugccucaaaagguguggugcgcgaguggcaggagcaaaguaauaaaaggguccuugccuuuaauuggugaagcagauugccuucaugaaaaauacgguggauuaaacaaaagcaagccuuacuacacaggagaacaugcaaaagcuauaggaaauugcccaauaugggugaaaacaccuuugaagcuugccaauggaaccaaauauagaccuccugcaaaacuauuaaaggaaagggguuucuucggagcuauugcugguuuccuagaaggaggaugggaaggaaugauugcagguuggcacggauacacaucucacggagcacauggaguggcaguggcggcagaccuuaagaguacacaagaagcuauaaacaagauaacaaaaaaucucaauucuuugagugagcuagaaguaaagaaucuucaaagacuaaguggugccauggaugaacuccacaacgaaauacucgagcuggaugagaaaguggaugaucucagagcugacacuauaagcucacaaauagaacuugcagucuugcuuuccaacgaaggaauaauaaacagugaagacgagcaucuauuggcacuugagagaaaacuaaagaaaaugcugggucccucugcuguagacauaggaaauggaugcuucgaaaccaaacacaaaugcaaccagaccugcuuagacaggauagcugcuggcaccuuuaaugcaggagaauuuucucuccccacuuuugauucauugaacauuacugcugcaucuuuaaaugaugauggauuggauaaccauacuauacugcucuauuacucaacugcugcuucuaguuuggcuguaacauugaugcuagcuauuuuuauuguuuauauggucuccagagacaacguuucaugcuccaucugucuauaa

SEQ ID NO: 59641 - RNA, 1755 nt, Artificial Sequence
  derived and/or modified CDS sequence (wt) from hemagglutinin__InfluenzaB__AGX22984
augaaggcaauaauuguacuacucaugguaguaacauccaaugcagaucgaaucugcacugggauaacaucuucaaacucaccucauguggucaaaacagcuacucaaggggaggucaaugugacuggugugauaccacugacaacaacaccaacaaaaucuuauuuugcaaaucucaaaggaacaaggaccagagggaaacuaugcccagacugucucaacuguacagaucuggauguggccuugggcagaccaauguguguggggaccacaccuucugcgaaagcuucaauacuccacgaagucagaccuguuacauccgggugcuuuccuauaaugcacgacagaacaaaaaucaggcaacuagccaaucuucucagaggauaugaaaauaucagguuaucaacccaaaacguuaucgaugcagaaaaggcaccaggaggacccuacagacuuggaaccucaggaucuugcccuaacgcuaccaguaaaagcggauuuuucgcaacaauggcuugggcugucccaaaggacaacaacaaaaaugcaacgaacccacuaacaguagaaguaccauacauuuguacagaaggggaagaccaaauuacuguuuggggguuccauucagauaacaaaacccaaaugaagaaccucuauggagacucaaauccucaaaaguucaccucaucugcuaauggaguaaccacacauuauguuucucagauuggcggcuucccagaucaaacagaagacggaggacuaccacaaagcggcagaauugucguugauuacaugaugcaaaaaccugggaaaacaggaacaauugucuaucaaagagguguuuuguugccucaaaagguguggugcgcaaguggcaggagcaaaguaauaaaaggguccuugccuuuaauuggugaagcagauugccuucaugaaaaauacgguggauuaaacaaaagcaagccuuacuacacaggagaacaugcaaaagccauaggaaauugcccaauaugggugaaaacaccuuugaagcuugccaauggaaccaaauauagaccuccugcaaaacuauuaaaggaaagggguuucuucggagcuauugcugguuuccuagaaggaggaugggaaggaaugauugcagguuggcacggauacacaucucacggagcacauggaguggcaguugcggcagaccuuaagaguacacaagaagcuauaaacaagauaacaaaaaaucucaacucuuugagugagcuagaaguaaagaaucuucaaagacuaaguggugccauggaugaacuccacaacgaaauacucgagcuggaugagaaaguggaugaucucagagcugacacuauaagcucacaaauagaacuugcagucuugcuuuccaacgaaggaauaauaaacagugaagacgagcaucuauuggcacuugagagaaaacuaaagaaaaugcugggucccucugcuguagacauaggaaauggaugcuucgaaaccaaacacaaaugcaaccagaccugcuuagacaggauagcugcuggcaccuuuaaugcaggagaauuuucucuccccacuuuugauucauugaacauuacugcugcaucuuuaaaugaugauggauuggauaaccauacuauacugcucuauuacucaacugcugcuucuaguuuggcuguaacauugaugcuagcuauuuuuauuguuuauauggucuccagagacaacguuucaugcuccaucugucuauaa

SEQ ID NO: 59642 - RNA, 1755 nt, Artificial Sequence; identical to SEQ ID NO: 59049
  derived and/or modified CDS sequence (wt) from hemagglutinin__InfluenzaB__AGX22995

SEQ ID NO: 59643 - RNA, 1755 nt, Artificial Sequence; identical to SEQ ID NO: 59048
  derived and/or modified CDS sequence (wt) from hemagglutinin__InfluenzaB__AGX23006

SEQ ID NO: 59644 - RNA, 1755 nt, Artificial Sequence
  derived and/or modified CDS sequence (wt) from hemagglutinin__InfluenzaB__AGX23017
augaaggcaauaauuguacuacucaugguaguaacauccaaugcagaucgaaucugcacugggauaacaucuucaaacucaccucauguggucaaaacagcuacucaaggggaggucaaugugacuggugugauaccacugacaacaacaccaacaaaaucuuauuuugcaaaucucaaaggaacaaggaccagagggaaacuaugcccagacugucucaacuguacagaucuggauguggccuugggcaggccaauguguguggggaccacaccuucugcgaaagcuucaauacuccacgaaaucagaccuguuacauccgggugcuuuccuauaaugcacgacagaacaaaaaucaggcaacuagccaaucuucucagaggauaugaaaauaucagguuaucaacccaaaacguuaucgaugcagaaaaggcaccaggaggacccuacagacuuggaaccucaggaucuugcccuaacgcuaccaguaaaagcggauuuuucgcaacaauggcuugggcugucccaaaggacaacaacaaaaaugcaacgaacccacuaacaguagaaguaccauacauuuguacagaaggggaagaccaaauuacuguuuggggguuccauucagauaacaaaacccaaaugaagaaccucuauggagacucaaauccucaaaaguucaccucaucugcuaauggaguaaccacacauuauguuucucagauuggcggcuucccagaucaaacagaagacggaggacuaccacaaagcggcagaauuguuguugauuacaugaugcaaaaaccugggaaaacaggaacaauugucuaucaaagagguguuuuguugccucaaaagguguggugcgcgaguggcaggagcaaaguaauaaaaggguccuugccuuuaauuggugaagcagauugccuucaugaaaaauacgguggauuaaacaaaagcaagccuuacuacacaggagaacaugcaaaagccauaggaaauugcccaauaugggugaaaacaccuuugaagcuugccaauggaaccaaauauagaccuccugcaaaacuauuaaaggaaagggguuucuucggagcuauugcugguuuccuagaaggaggaugggaaggaaugauugcagguuggcacggauacacaucucacggagcacauggaguggcaguggcggcagaccuuaagaguacacaagaagcuauaaacaagauaacaaaaaaucucaauucuuugagugagcuagaaguaaagaaucuucaaagacuaaguggugccauggaugaacuccacaacgaaauacucgagcuggaugagaaaguggaugaucucagagcugacacuauaagcucacaaauagaacuugcagucuugcuuuccaacgaaggaauaauaaacagugaagacgagcaucuauuggcacuugagagaaaacuaaagaaaaugcugggucccucugcuguagacauaggaaauggaugcuucgaaaccaaacacaaaugcaaccagaccugcuuagacaggauagcugcuggcaccuuuaaugcaggagaauuuucucuccccacuuuugauucauugaacauuacugcugcaucuuuaaaugacgauggauuggauaaccauacuauacugcucuauuacucaacugcugcuucuaguuuggcuguaacauugaugcuagcuauuuuuauuguuuauauggucuccagagacaacguuucaugcuccaucugucuauaa

SEQ ID NO: 59645 - RNA, 1755 nt, Artificial Sequence
  derived and/or modified CDS sequence (wt) from hemagglutinin__InfluenzaB__AGX23028
augaaggcaauaauuguacuacucaugguaguaacauccaaugcagaucgaaucugcacugggauaacaucuucaaacucaccucauguggucaaaacagcuacucaaggggaggucaaugugacuggugugauaccacugacaacaacaccaacaaaaucuuauuuugcaaaucucaaaggaacaaagaccagagggaaacuaugcccagacugucucaacuguacagaucuggauguggccuugggcaggccaauguguguggggaccacaccuucugcgaaagcuucaauacuccacgaagucagaccuguuacauccgggugcuuuccuauaaugcacgacagaacaaaaaucaggcaacuagccaaucuucucagaggauaugaaaauaucagguuaucaacccaaaacguuaucgaugcagaaaaggcaccaggaggacccuacaaacuuggaaccucaggaucuugcccuaacgcuaccaguaaaagcggauuuuucgcaacaauggcuugggcugucccaaaggacaacaacaaaaaugcaacgaacccacuaacaguagaaguaccauacauuuguacagaaggggaagaccaaauuacuguuuggggguuccauucagauaacaaaacccaaaugaagaaccucuauggagacucaaauccucaaaaguucaccucaucugcuaauggaguaaccacacauuauguuucucagauuggcggcuucccagaucaaacagaagacggaggacuaccacaaagcggcagaauugucguugauuacaugaugcaaaaaccugggaaaacaggaacaauugucuaucaaagagguguuuuguugccucaaaagguguggugcgcgaguggcaggagcaaaguaauaaaaggguccuugccuuuaauuggugaagcagauugccuucaugaaaaauacgguggauuaaacaaaagcaagccuuacuacacaggagaacaugcaaaagccauaggaaauugcccaauaugggugaaaacaccuuugaagcuugccaauggaaccaaauauagaccuccugcaaaacuauuaaaggaaagggguuucuucggagcuauugcugguuuccuagaaggaggaugggaaggaaugauugcagguuggcacggauacacaucucacggagcacauggaguggcaguugcggcagaccuuaagaguacacaagaagcuauaaacaagauaacaaaaaaucucaacucuuugagugagcuagaaguaaagaaucuucaaagacuaaguggugccauggaugaacuccacaacgaaauacucgagcuggaugagaaaguggaugaucucagagcugacacuauaagcucacaaauagaacuugcagucuugcuuuccaacgaaggaauaauaaacagugaagacgagcaucuauuggcacuugagagaaaacuaaagaaaaugcugggucccucugcuguagacauaggaaauggaugcuucgaaaccaaacacaaaugcaaccagaccugcuuagacaggauagcugcuggcaccuuuaaugcaggagaauuuucucuccccacuuuugauucauugaacauuacugcugcaucuuuaaaugaugauggauuggauaaccauacuauacugcucuauuacucaacugcugcuucuaguuuggcuguaacauugaugcuagcuauuuuuauuguuuauauggucuccagagacaacguuucaugcuccaucugucuauaa

SEQ ID NO: 59646 - RNA, 1755 nt, Artificial Sequence; identical to SEQ ID NO: 59045
  derived and/or modified CDS sequence (wt) from hemagglutinin__InfluenzaB__AGX23039

SEQ ID NO: 59647 - RNA, 1755 nt, Artificial Sequence
  derived and/or modified CDS sequence (wt) from hemagglutinin__InfluenzaB__AGX23050
augaaggcaauaauuguacuacucaugguaguaacauccaaugcagauagaaucugcacugggauaacaucuucaaacucaccucauguggucaaaacagcuacucaaggggaggucaaugugacuggugugauaccacugacaacaacaccaacaaaaucuuauuuugcaaaucucaaaggaacaaggaccagagggaaacuaugcccagacugucucaacuguacagaucuggauguggccuugggcaggccaauguguguggggaccacaccuucugcgaaagcuucaauacuccacgaagucaguccuguuacauccgggugcuuuccuauaaugcacgacagaacaaaaaucaggcaacuagccaaucuucucagaggauaugaaaauaucagguuaucaacccaaaacguuaucgaugcagaaaaggcaccaggaggacccuacagacuuggaaccucaggaucuugcccuaacgcuaccaguaaaagcggauuuuucgcaacaauggcuugggcugucccaaaggacaacaacaaaaaugcaacgaacccacuaacaguagaaguaccauacauuuguacagaaggggaagaccaaauuacuguuuggggguuccauucagauaacaaaacccaaaugaagaaccucuauggagacucaaauccucaaaaguucaccucaucugcuaauggaguaaccacacauuauguuucucagauuggcggcuucccagaucaaacagaagacggaggacuaccacaaagcggcagaauuguuguugauuacaugaugcaaaaaccugggaaaacaggaacaauugucuaucaaagagguguuuuguugccucaaaagguguggugcgcgaguggcaggagcaaaguaauaaaaggguccuugccuuuaauuggugaagcagauugccuucaugaaaaauacgguggauuaaacaaaagcaagccuuacuacacaggagaacaugcaaaagccauaggaaauugcccaauaugggugaaaacaccuuugaggcuugccaauggaaccaaauauagaccuccugcaaaacuauuaaaggaaagggguuucuucggagcuauugcugguuuccuagaaggaggaugggaaggaaugauugcagguuggcacggauacacaucucacggagcacauggaguggcaguggcggcagaccuuaagaguacacaagaagcuauaaacaagauaacaaaaaaucucaauucuuugagugagcuagaaguaaagaaucuucaaagacuaaguggugccauggaugaacuccacaacgaaauacucgagcuggaugagaaaguggaugaucucagagcugacacuauaagcucacaaauagaacuugcagucuugcuuuccaacgaaggaauaauaaacagugaagacgagcaucuauuggcacuugagagaaaacuaaagaaaaugcugggucccucugcuguagacauaggaaauggaugcuucgaaaccaaacacaaaugcaaccagaccugcuuagacaggauagcugcuggcaccuuuaaugcaggagaauuuucucuccccacuuuugauucauugaacauuacugcugcaucuuuaaaugaugauggauuggauaaccauacuauacugcucuauuacucaacugcugcuucuaguuuggcuguaacauugaugcuagcuauuuuuauuguuuauauggucuccagagacaacguuucaugcuccaucugucuauaa

SEQ ID NO: 59648 - RNA, 1755 nt, Artificial Sequence
  derived and/or modified CDS sequence (wt) from hemagglutinin__InfluenzaB__AGX23061
augaaggcaauaauuguacuacucaugguaguaacauccaaugcagauagaaucugcacugggauaacaucuucaaacucaccucauguggucaaaacagcuacucaaggggaggucaaugugacuggugugauaccacugacaacaacaccaacaaaaucuuauuuugcaaaucucaaaggaacaaggaccagagggaaacuaugcccagacugucucaacuguacagaucuggauguggccuugggcaggccaauguguguggggaccacaccuucugcgaaagcuucaauacuccacgaagucagaccuguuacauccgggugcuuuccuauaaugcacgacagaacaaaaaucaggcaacuagccaaucuucucagaggauaugaaaauaucagguuaucaacccaaaacguuaucgaugcagaaaaggcaccaggaggacccuacagacuuggaaccucaggaucuugcccuaacgcuaccaguaaaagcggauuuuucgcaacaauggcuugggcugucccaaaggacaacaacaaaaaugcaacgaacccacuaacaguagaaguaccauacauuuguacagaaggggaagaccaaauuacuguuuggggguuccauucagauaacaaaacccaaaugaagaaccucuauggagacucaaauccucaaaaguucaccucaucugcuaauggaguaaccacacauuauguuucucagauuggcggcuucccagaucaaacagaagacggaggacuaccacaaagcggcagaauuguuguugauuacaugaugcaaaaaccugggaaaacaggaacaauugucuaucaaagagguguuuuguugccucaaaagguguggugcgcgaguggcaggagcaaaguaauaaaaggguccuugccuuuaauuggugaagcagauugccuucaugaaaaauacgguggauuaaacaaaagcaagccuuacuacacaggagaacaugcaaaagccauaggaaauugcccaauaugggugaaaacaccuuugaggcuugccaauggaaccaaauauagaccuccugcaaaacuauuaaaggaaagggguuucuucggagcuauugcugguuuccuagaaggaggaugggaaggaaugauugcagguuggcacggauacacaucucacggagcacauggaguggcaguggcggcagaccuuaagaguacacaagaagcuauaaacaagauaacaaaaaaucucaauucuuugagugagcuagaaguaaagaaucuucaaagacuaaguggugccauggaugaacuccacaacgaaauacucgagcuggaugagaaaguggaugaucucagagcugacacuauaagcucacaaauagaacuugcagucuugcuuuccaacgaaggaauaauaaacagugaagacgagcaucuauuggcacuugagagaaaacuaaagaaaaugcugggucccucugcuguagacauaggaaauggaugcuucgaaaccaaacacaaaugcaaccagaccugcuuagacaggauagcugcuggcaccuuuaaugcaggagaauuuucucuccccacuuuugauucauugaacauuacugcugcaucuuuaaaugaugauggauuggauaaccauacuauacugcucuauuacucaacugcugcuucuaguuuggcuguaacauugaugcuagcuauuuuuauuguuuauauggucuccagagacaacguuucaugcuccaucugucuauaa

SEQ ID NO: 59649 - RNA, 1755 nt, Artificial Sequence
  derived and/or modified CDS sequence (wt) from hemagglutinin__InfluenzaB__AGX23072
augaaggcaauaauuguacuacucaugguaguaacauccaaugcagaucgaaucugcacugggauaacaucuucaaacucaccucauguggucaaaacagcuacucaaggggaggucaaugugacuggugugauaccacugacaacaacaccaacaaaaucuuauuuugcaaaucucaaaggaacaaggaccagagggaaacuaugcccagacugucucaacuguacagaucuggauguggccuugggcaggccaauguguguggggaccacaccuucugcgaaagcuucaauacuccacgaagucagaccuguuacauccgggugcuuuccuauaaugcacgacagaacaaaaaucaggcaacuagccaaucuucucagaggauaugaaaauaucagguuaucaacccaaaacguuaucgaugcagaaaaggcaccaggaggacccuacagacuuggaaccucaggaucuugcccuaacgcuaccaguaaaagcggauuuuucgcaacaauggcuugggcugucccaaaggacaacaacaaaaaugcaacgaacccacuaacaguagaaguaccauacauuuguacagaaggggaagaccaaauuacuguuuggggguuucauucagauaacaaaacccaaaugaagaaccucuauggagacucaaauccucaaaaguucaccucaucugcuaauggaguaaccacacauuauguuucucagauuggcggcuucccagaucaaacagaagacggaggacuaccacaaagcggcagaauuguuguugauuacaugaugcaaaaaccugggaaaacaggaacaauugucuaucaaagagguguuuuguugccucaaaagguguggugcgcaaguggcaggagcaaaguaauaaaaggguccuugccuuuaauuggugaagcagauugccuucaugaaaaauacgguggauuaaacaaaagcaagccuuacuacacaggagaacaugcaaaagccauaggaaauugcccaauaugggugaaaacaccuuugaagcuugccaauggaaccaaauauagaccuccugcaaaacuauuaaaggaaagggguuucuucggagcuauugcugguuuccuagaaggaggaugggaaggaaugaucgcagguuggcacggauacacaucucacggagcacauggaguggcaguggcggcagaccuuaagaguacacaagaagcuauaaacaagauaacaaaaaaucucaauucuuugagugagcuagaaguaaagaaucuucaaagacuaaguggugccauggaugaacuccacaacgaaauacucgagcuggaugagaaaguggaugaucucagagcugacacuauaagcucacaaauagaacuugcagucuugcuuuccaacgaaggaauaauaaacagugaagacgagcaucuauuggcacuugagagaaaacuaaagaaaaugcugggucccucugcuguagacauaggaaauggaugcuucgaaaccaaacacaaaugcaaccagaccugcuuagacaggauagcugcuggcaccuuuaaugcaggagaauuuucucuccccacuuuugauucauugaacauuacugcugcaucuuuaaaugaugauggauuggauaaccauacuauacugcucuauuacucaacugcugcuucuaguuuggcuguaacauugaugcuagcuauuuuuauuguuuauauggucuccagagacaacguuucaugcuccaucugucuauaa

SEQ ID NO: 59650 - RNA, 1755 nt, Artificial Sequence; identical to SEQ ID NO: 59050
  derived and/or modified CDS sequence (wt) from hemagglutinin__InfluenzaB__AGX23083

SEQ ID NO: 59651 - RNA, 1755 nt, Artificial Sequence
  derived and/or modified CDS sequence (wt) from hemagglutinin__InfluenzaB__AGX23094
augaaggcaauaauuguacuacucaugguaguaacauccaaugcagaucgaaucugcacugggauaacaucuucaaacucaccucauguggucaaaacagcuacucaaggggaggucaaugugacuggugugauaccacugacaacaacaccaacaaaaucuuauuuugcaaaucucaaaggaacaaggaccagagggaaacuaugcccagacugucucaacuguacagaucuggauguggccuugggcaggccaauguguguggggaccacuccuucugcgaaagcuucaauacuccacgaagucagaccuguuacauccgggugcuuuccuauaaugcacgacagaacaaaaaucaggcaacuagccaaucuucucagaggauaugaaaauaucagguuaucaacccaaaacguuaucgaugcagaaaaggcaccaggaggacccuacagacuuggaaccucaggaucuugcccuaacgcuaccaguaaaagcggauuuuucgcaacaauggcuugggcugucccaaaggacaacaacaaaaaugcaacgaacccacuaacaguagaaguaccauacauuuguacagaaggggaagaccaaauuacuguuuggggguuccauucagauaacaaaacccaaaugaagaaccucuauggagacucaaauccucaaaaguucaccucaucugcuaauggaguaaccacacauuauguuucucagauuggcggcuucccagaucaaacagaagacggaggacuaccacaaagcggcagaauuguuguugauuacaugaugcaaaaaccugggaaaacaggaacaauugucuaucaaagagguguuuuguugccucaaaagguguggugcgcgaguggcaggagcaaaguaauaaaaggguccuugccuuuaauuggugaagcagauugccuucaugaaaaauacgguggauuaaacaaaagcaagccuuacuacacaggagaacaugcaaaagccauaggaaauugcccaauaugggugaaaacaccuuugaagcuugccaauggaaccaaauauagaccuccugcaaaacuauuaaaggaaagggguuucuucggagcuauugccgguuuccuagaaggaggaugggaaggaaugauugcagguuggcacggauacacaucucacggagcacauggaguggcaguggcggcagaccucaagaguacacaagaagcuauaaacaagauaacaaaaaaucucaauucuuugagugagcuagaaguaaagaaucuucaaagacuaaguggugccauggaugaacuccacaacgaaauacucgagcuggaugagaaaguggaugaucucagagcugacacuauaagcucacaaauagaacuugcagucuugcuuuccaacgaaggaauaauaaacagugaagacgagcaucuauuggcacuugagagaaaacuaaagaaaaugcugggucccucugcuguagacauaggaaauggaugcuucgaaaccaaacacaaaugcaaccagaccugcuuagacaggauagcugcuggcaccuuuaaugcaggagaauuuucucuccccacuuuugauucauugaacauuacugcugcaucuuuaaaugaugauggauuggauaaccauacuauacugcucuauuacucaacugcugcuucuaguuuggcuguaacauugaugcuagcuauuuuuauuguuuauauggucuccagagacaacguuucaugcuccaucugucuauaa

SEQ ID NO: 59652 - RNA, 1755 nt, Artificial Sequence
  derived and/or modified CDS sequence (wt) from hemagglutinin__InfluenzaB__AGX23105
augaaggcaauaauuguacuacucaugguaguaacauccaaugcagaucgaaucugcacugggauaacaucuucaaacucaccucauguggucaaaacagcuacucaaggggaggucaaugugacuggugugauaccacugacaacaacaccaacaaaaucuuauuuugcaaaucucaaaggaacaaggaccagagggaagcuaugcccagacugucucaacuguacagaucuggauguggccuugggcaggccaauguguguggggaccacaccuucugcgaaagcuucaauacuccacgaagucagaccuguuacauccgggugcuuuccuauaaugcacgacagaacaaaaaucaggcaacuagccaaucuucucagaggauaugaaaauaucagguuaucaacccaaaacguuaucgaugcagaaaaggcaccaggaggacccuacagacuuggaaccucaggaucuugcccuaacgcuaccaguaaaagcggauuuuucgcaacaauggcuugggcugucccaaaggacaacaacaaaaaugcaacgaacccacuaacaguagaaguaccauacauuuguacagaaggggaagaccaaauuacuguuuggggguuccauucagauaacaaaacccaaaugaagaaccucuauggagacucaaauccucaaaaguucaccucaucugcuaauggaguaaccacacauuauguuucucagauuggcggcuucccagaucaaacagaagacggaggacuaccacaaagcggcagaauuguuguugauuacaugaugcaaaaaccugggaaaacaggaacaauugucuaucaaagagguguuuuguugccucaaaagguguggugcgcgaguggcaggagcaaaguaauaaaaggguccuugccuuuaauuggugaagcagauugccuucaugaaaaauacgguggauuaaacaaaagcaagccuuacuacacaggagaacaugcaaaagccauaggaaauugcccaauaugggugaaaacaccuuugaagcuugccaauggaaccaaauauagaccuccugcaaaacuauuaaaggaaagggguuucuucggagcuauugcugguuuccuagaaggaggaugggaaggaaugauugcagguuggcacggauacacaucucacggagcacauggaguggcaguggcggcagaccuuaagaguacacaagaagcuauaaacaagauaacaaaaaaucucaauucuuugagugagcuagaaguaaagaaucuucaaagacuaaguggugccauggaugaacuccacaacgaaauacucgagcuggaugagaaaguggaugaucucagagcugacacuauaagcucacaaauagaacuugcagucuugcuuuccaacgaaggaauaauaaacagugaagacgagcaucuauuggcacuugagagaaaacuaaagaaaaugcugggucccucugcuguagacauaggaaauggaugcuucgaaaccaaacacaaaugcaaccagaccugcuuagacaggauagcugcuggcaccuuuaaugcaggagaauuuucucuccccacuuuugauucauugaacauuacugcugcaucuuuaaaugaugauggauuggauaaccauacuauacugcucuauuacucaacugcugcuucuaguuuggcuguaacauugaugcuagcuauuuuuauuguuuauauggucuccagagacaacguuucaugcuccaucugucuauaa

SEQ ID NO: 59653 - RNA, 1755 nt, Artificial Sequence
  derived and/or modified CDS sequence (wt) from hemagglutinin__InfluenzaB__AGX23116
augaaggcaauaauuguacuacucaugguaguaacauccaaugcagaucgaaucugcacugggauaacaucuucaaacucaccucauguggucaaaacagcuacucaaggggaggucaaugugacuggugugauaccacugacaacaacaccaacaaaaucuuauuuugcaaaucucaaaggaacaaggaccagagggaaacuaugcccagacugucucaacuguacagaucuggauguggccuugggcaggccaauguguguggggaccacaccuucugcgaaagcuucaauacuccacgaagucagaccuguuacauccgggugcuuuccuauaaugcacgacagaacaaaaaucaggcaauuagccaaucuucucagaggauaugaaaauaucagguuaucaacccaaaacguuaucgaugcagaaaaggcaccaggaggacccuacagacuuggaaccucaggaucuugcccuaacgcuaccaguaaaagcggauuuuucgcaacaauggcuugggcugucccaaaggacaacaacaaaaaugcaacgaacccacuaacaguagagguaccauacauuuguaaagaaggggaagaccaaauuacuguuuggggguuccauucagauaacaaaacccaaaugaagaaccucuauggagacucaaauccucaaaaguucaccucaucugcuaauggaguaaccacacauuauguuucucagauuggcggcuucccagaucaaacagaagacggaggacuaccacaaagcggcagaauugucguugauuacaugauacaaaaaccugggaaaacaggaacaauugucuaucaaagagguguuuuguugccucaaaagguguggugcgcgaguggcaggagcaaaguaauaaaaggguccuugccuuuaauuggugaagcagauugccuucaugaaaaauacgguggauuaaacaaaagcaagccuuacuacacaggagaacaugcaaaagccauaggaaauugcccaauaugggugaaaacaccuuugaagcuugccaauggaaccaaauauagaccuccugcaaaacuauuaaaggaaagggguuucuucggagcuauugcugguuuccuagaaggaggaugggaaggaaugauugcagguuggcacggauacacaucucacggagcacauggaguggcaguugcggcagaccuuaagaguacacaagaagcuauaaacaagauaacaaaaaaucucaacucuuugagugagcuagaaguaaagaaucuucaaagacuaaguggugccauggaugaacuccacaacgaaauacucgagcuggaugagaaaguggaugaucucagagcugacacuauaagcucacaaauagaacuugcagucuugcuuuccaacgaaggaauaauaaacagugaagacgagcaucuauuggcacuugagagaaaacuaaagaaaaugcugggucccucugcuguagacauaggaaacggaugcuucgaaaccaaacacaaaugcaaccagaccugcuuagacaggauagcugcuggcaccuuuaaugcaggagaauuuucucuccccacuuuugauucauugaacauuacugcugcaucuuuaaaugaugauggauuggauaaccauacuauacugcucuauuacucaacugcugcuucuaguuuggcuguaacauugaugcuagcuauuuuuauuguuuauauggucuccagagacaacguuucaugcuccaucugucuauaa

SEQ ID NO: 59654 - RNA, 1755 nt, Artificial Sequence; identical to SEQ ID NO: 59636
  derived and/or modified CDS sequence (wt) from hemagglutinin__InfluenzaB__AGX23127

SEQ ID NO: 59655 - RNA, 1755 nt, Artificial Sequence
  derived and/or modified CDS sequence (wt) from hemagglutinin__InfluenzaB__AGX23138
augaaagcaauaauuguacuacucaugguaguaacauccaaugcagaucgaaucugcacugggauaacaucuucaaacucaccucauguggucaaaacagcuacucaaggggaggucaaugugacuggugugauaccacugacaacaacaccaacaaaaucuuauuuugcaaaucucaaaggaacaaggaccagagggaaacuaugcccagacugucucaacuguacagaucuggauguggccuugggcaggccaauguguguggggaccacaccuucugcgaaagcuucaauacuccacgaagucagaccuguuacauccgggugcuuuccuauaaugcacgacagaacaaaaaucaggcaacuagccaaucuucucagaggauaugaaaauaucagguuaucaacccaaaacguuaucgaugcagaaaaggcaccaggaggacccuacagacuuggaaccucaggaucuugcccuaacgcuaccaguaaaagcggauuuuucgcaacaauggcuugggcugucccaaaggacaacaacaaaaaugcaacgaacccacuaacaguagaaguaccauacauuuguacagaaggggaagaccaaauuacuguuuggggguuccauucagauaacaaaacccaaaugaagaaccucuauggagacucaaauccucaaaaguucaccucaucugcuaauggaguaaccacacauuauguuucucagauuggcggcuucccagaucaaacagaagacggaggacuaccacaaagcggcagaauugucguugauuacaugaugcaaaaaccugggaaaacaggaacaauugucuaucaaagagguguuuuguugccucaaaagguguggugcgcgaguggcaggagcaaaguaauaaaaggguccuugccuuuaauuggugaagcagauugccuucaugaaaaauacgguggauuaaacaaaagcaagccuuacuacacaggagaacaugcaaaagccauaggaaauugcccaauaugggugaaaacaccuuugaagcuugccaauggaaccaaauauagaccuccugcaaaacuauuaaaggaaagggguuucuucggagcuauugcugguuuccuagaaggaggaugggaaggaaugauugcagguuggcacggauacacaucucacggagcacaugggguggcaguugcggcagaccuuaagaguacacaagaagcuauaaacaagauaacaaaaaaucucaacucuuugagugagcuagaaguaaagaaucuucaaagacuaaguggugccauggaugaacuccacaacgaaauacucgagcuggaugagaaaguggaugaucucagagcugacacuauaagcucacaaauagaacuugcagucuugcuuuccaacgaaggaauaauaaacagugaagacgagcaucuauuggcacuugagagaaaacuaaagaaaaugcugggucccucugcuguagacauaggaaauggaugcuucgaaaccaaacacaaaugcaaccagaccugcuuagacaggauagcugcuggcaccuuuaaugcaggagaauuuucucuccccacuuuugauucauugaacauuacugcugcaucuuuaaaugaugauggauuggauaaccauacuauacugcucuauuacucaacugcugcuucuaguuuggcuguaacauugaugcuagcuauuuuuauuguuuauauggucuccagagacaacguuucaugcuccaucugucuauaa

SEQ ID NO: 59656 - RNA, 1755 nt, Artificial Sequence
  derived and/or modified CDS sequence (wt) from hemagglutinin__InfluenzaB__AGX23149
augaaggcaauaauuguacuacucaugguaguaacauccaaugcagaucgaaucugcacugggauaacaucuucagacucaccucauguggucaaaacagcuacucaaggggaggucaaugugacuggugugauaccacugacaacaacaccaacaaaaucuuauuuugcaaaucucaaaggaacaaggaccagagggaaacuaugcccagacugucucaacuguacagaucuggauguggccuugggcaggccaauguguguggggaccacaccuucugcgaaagcuucaauacuccacgaagucagaccuguuacauccgggugcuuuccuauaaugcacgacagaacaaaaaucaggcaacuagccaaucuucucagaggauaugaaaauaucagguuaucaacccaaaacguuaucgaugcagaaaaggcaccaggaggacccuacagacuuggaaccucaggaucuugcccuaacgcuaccaguaaaaguggauuuuucgcaacaauggcuugggcugucccaaaggacaacaacaaaaaugcaacgaacccacuaacaguagaaguaccauacauuuguacagaaggggaagaccaaauuacuguuuggggguuccauucagauaacaaaacccaaaugaagaaccucuauggagacucaaauccucaaaaguucaccucaucugcuaauggaguaaccacacauuauguuucucagauuggcggcuucccagaucaaacagaagacggaggacuaccacaaagcggcagaauuguuguugauuacaugaugcaaaaaccugggaaaacaggaacaauugucuaucaaagagguguuuuguugccucaaaagguguggugcgcgaguggcaggagcaaaguaauaaaaggguccuugccuuuaauuggugaagcagauugccuucaugaaaaauacgguggauuaaacaaaagcaagccuuacuacacaggagaacaugcaaaagcuauaggaaauugcccaauaugggugaaaacaccuuugaagcuugccaauggaaccaaauauagaccuccugcaaaacuauuaaaggaaagggguuucuucggagcuauugcugguuuccuagaaggaggaugggaaggaaugauugcagguuggcacggauacacaucucacggagcacauggaguggcaguggcggcagaccuuaagaguacacaagaagcuauaaacaagauaacaaaaaaucucaauucuuugagugagcuagaaguaaagaaucuucaaagacuaaguggugccauggaugaacuccacaacgaaauacucgagcuggaugagaaaguggaugaucucagagcugacacuauaagcucacaaauagaacuugcagucuugcuuuccaacgaaggaauaauaaacagugaagacgagcaucuauuggcacuugagagaaaacuaaagaaaaugcugggucccucugcuguagacauaggaaauggaugcuucgaaaccaaacacaaaugcaaccagaccugcuuagacaggauagcugcuggcaccuuuaaugcaggagaauuuucucuccccacuuuugauucauugaacauuacugcugcaucuuuaaaugaugauggauuggauaaccauacuauacugcucuauuacucaacugcugcuucuaguuuggcuguaacauugaugcuagcuauuuuuauuguuuauauggucuccagagacaacguuucaugcuccaucugucuauaa

SEQ ID NO: 59657 - RNA, 1755 nt, Artificial Sequence
  derived and/or modified CDS sequence (wt) from hemagglutinin__InfluenzaB__AGX23160
augaaggcaauaauuguacuacucaugguaguaacauccaaugcagauagaaucugcacugggauaacaucuucaaacucaccucauguggucaaaacagcuacucaaggggaggucaaugugacuggugugauaccacugacaacaacaccaacaaaaucuuauuuugcaaaucucaaaggaacaaggaccagagggaaacuaugcccagacugucucaacuguacagaucuggauguggccuugggcaggccaauguguguggggaucacaccuucugcgaaagcuucaauacuccacgaagucagaccuguuacauccgggugcuuuccuauaaugcacgacagaacaaaaaucaggcaacuagccaaucuucucagaggauaugaaaauaucagguuaucaacccaaaacguuaucgaugcagaaaaggcaccaggaggacccuacagacuuggaaccucaggaucuugcccuaacgcuaccaguaaaagcggauuuuucgcaacaauggcuugggcugucccaaaggacaacaacaaaaaugcaacgaacccacuaacaguagaaguaccauacauuuguacagaaggggaagaccaaauuacuguuuggggguuccauucagauaacaaaacccaaaugaagaaccucuauggagacucaaauccucaaagguucaccucaucugcuaauggaguaaccacacauuauguuucucagauuggcggcuucccagaucaaacagaagacggaggacuaccacaaagcggcagaauuguuguugauuacaugaugcaaaaaccugggaaaacaggaacaauugucuaccaaagagguguuuuguugccucaaaagguguggugcgcgaguggcaggagcaaaguaauaaaaggguccuugccuuuaauuggugaagcagauugccuucaugaaaaauacgguggauuaaacaaaagcaagccuuacuacacaggagaacaugcaaaagccauaggaaauugcccaauaugggugaaaacaccuuugaggcuugccaauggaaccaaauauagaccuccugcaaaacuauuaaaggaaagggguuucuucggagcuauugcugguuuccuagaaggaggaugggaaggaaugauugcagguuggcacggauacacaucucacggagcacauggaguggcaguggcggcagaccuuaagaguacacaagaagcuauaaacaagauaacaaaaaaucucaauucuuugagugagcuagaaguaaagaaucuucaaagacuaaguggugccauggaugaacuccacaacgaaauacucgagcuggaugagaaaguggaugaucucagagcugacacuauaagcucacaaauagaacuugcagucuugcuuuccaacgaaggaauaauaaacagugaagacgagcaucuauuggcacuugagagaaaacuaaagaaaaugcugggucccucugcuguagacauaggaaauggaugcuucgaaaccaaacacaaaugcaaccagaccugcuuagacaggauagcugcuggcaccuuuaaugcaggagaauuuucucuccccacuuuugauucauugaacauuacugcugcaucuuuaaaugaugauggauuggauaaccauacuauacugcucuauuacucaacugcugcuucuaguuuggcuguaacauugaugcuagcuauuuuuauuguuuauauggucuccagagacaacguuucaugcuccaucugucuauaa

SEQ ID NO: 59658 - RNA, 1755 nt, Artificial Sequence
  derived and/or modified CDS sequence (wt) from hemagglutinin__InfluenzaB__AGX23171
augaaggcaauaauuguacuacucaugguaguaacauccaaugcagauagaaucugcacugggauaacaucuucaaacucaccucauguggucaaaacagcuacucaaggggaggucaaugugacuggugugauaccacugacaacaacaccaacaaaaucuuauuuugcaaaucucaaaggaacaaggaccagagggaaacuaugcccagacugucucaacuguacagaucuggauguggccuugggcaggccaauguguguggggaccacaccuucugcgaaagcuucaauacuccacgaagucagaccuguuacauccgggugcuuuccuauaaugcacgacagaacaaaaaucaggcaacuagccaaucuucucagaggauaugaaaauaucagguuaucaacccaaaacguuaucgaugcagaaaaggcaccaggaggacccuacagacuuggaaccucaggaucuugcccuaacgcuaccaguaaaagcggauuuuucgcaacaauggcuugggcugucccaaaggacaacaacaaaaaugcaacgaacccacuaacaguagaaguaccauacauuuguacagaaggggaagaccaaauuacuguuuggggguuccauucagauaacaaaacccaaaugaagaaccucuauggagacucaaauccucaaagguucaccucaucugcuaauggaguaaccacacauuauguuucucagauuggcggcuucccagaucaaacagaagacggaggacuaccacaaagcggcagaauuguuguugauuacaugaugcaaaaaccugggaaaacaggaacaauugucuaccaaagagguguuuuguugccucaaaagguguggugcgcgaguggcaggagcaaaguaauaaaaggguccuugccuuuaauuggugaagcagauugccuucaugaaaaauacgguggauuaaacaaaagcaagccuuacuacacaggagaacaugcaaaagccauaggaaauugcccaauaugggugaaaacaccuuugaggcuugccaauggaaccaaauauagaccuccugcaaaacuauuaaaggaaagggguuucuucggagcuauugcugguuuccuagaaggaggaugggaaggaaugauugcagguuggcacggauacacaucucacggagcacauggaguggcaguggcggcagaccuuaagaguacacaagaagcuauaaacaagauaacaaaaaaucucaauucuuugagugagcuagaaguaaagaaucuucaaagacuaaguggugccauggaugaacuccacaacgaaauacucgagcuggaugagaaaguggaugaucucagagcugacacuauaagcucacaaauagaacuugcagucuugcuuuccaacgaaggaauaauaaacagugaagacgagcaucuauuggcacuugagagaaaacuaaagaaaaugcugggucccucugcuguagacauaggaaauggaugcuucgaaaccaaacacaaaugcaaccagaccugcuuagacaggauagcugcuggcaccuuuaaugcaggagaauuuucucuccccacuuuugauucauugaacauuacugcugcaucuuuaaaugaugauggauuggauaaccauacuauacugcucuauuacucaacugcugcuucuaguuuggcuguaacauugaugcuagcuauuuuuauuguuuauauggucuccagagacaacguuucaugcuccaucugucuauaa

SEQ ID NO: 59659 - RNA, 1755 nt, Artificial Sequence
  derived and/or modified CDS sequence (wt) from hemagglutinin__InfluenzaB__AGX23182
augaaggcaauaauuguacuacucaugguaguaacauccaaugcagaucgaaucugcacugggauaacaucuucaaacucaccucauguggucaaaacagcuacucaaggggaggucaaugugacuggugugauaccacugacaacaacaccaacaaaaucuuacuuugcaaaucucaaaggaacaaggaccagagggaaacuaugcccagacugucucaacuguacagaucuggauguggccuugggcaggccaauguguguggggaccacaccuucugcaaaagcuucaauacuccacgaagucagaccuguuacauccgggugcuuuccuauaaugcacgacaggacaaaaaucaggcaacuagccaaucuucucagaggauaugaaaauaucagguuaucaacccaaaacguuaucgaugcagaaaaggcaccaggaggacccuacagacuuggaaccucaggaucuugcccuaacgcuaccaguaaaagcggauuuuucgcaacaauggcuugggcugucccaaaggacaacaacaaaaaugcaacgaacccacuaacaguagaaguaccauacauuuguacagaaggggaagaccaaauuacuguuuggggguuccauucagauaacaaaacccaaaugaagaaccucuauggagacucaaauccucaaaaguucaccucaucugcuaauggaguaaccacacauuauguuucucagauuggcggcuucccagaucaaacagaagacggaggacuaccacaaagcggcagaauugucguugauuacaugaugcaaaaaccugggaaaacaggaacaauugucuaucaaagagguguuuuguugccucaaaagguguggugcgcgaguggcaggagcaaaguaauaaaaggguccuugccuuuaauuggugaagcagauugccuucaugaaaaauacgguggauuaaacaaaagcaagccuuacuacacaggagaacaugcaaaagccauaggaaauugcccaauaugggugaaaacaccuuugaagcuugccaauggaaccaaauauagaccuccugcaaaacuauuaaaggaaagggguuucuucggagcuauugcugguuuccuagaaggaggaugggaaggaaugauugcagguuggcacggauacacaucucacggagcacauggaguggcaguugcggcagaccuuaagaguacacaagaagcuauaaacaagauaacaaaaaaucucaacucuuugagugagcuagaaguaaagaaucuucaaagacuaaguggugccauggaugaacuccacaacgaaauacucgagcuggaugagaaaguggaugaucucagagcugacacuauaagcucacaaauagaacuugcagucuugcuuuccaacgaaggaauaauaaacagugaagacgagcaucuauuggcacuugagagaaaacuaaagaaaaugcugggucccucugcuguagacauaggaaauggaugcuucgaaaccaaacacaaaugcaaccagaccugcuuagacaggauagcugcuggcaccuuuaaugcaggagaauuuucccuccccacuuuugauucauugaacauuacugcugcaucuuuaaaugaugauggauuggauaaccauacuauacugcucuauuacucaacugcugcuucuaguuuggcuguaacauugaugcuagcuauuuuuauugucuauauggucuccagagacaacguuucaugcuccaucugucuauaa

SEQ ID NO: 59660 - RNA, 1755 nt, Artificial Sequence
  derived and/or modified CDS sequence (wt) from hemagglutinin__InfluenzaB__AGX23193
augaaagcaauaauuguacuacucaugguaguaacauccaaugcagaucgaaucugcacugggauaacaucuucaaacucaccucauguggucaaaacagcuacucaaggggaggucaaugugacuggugugauaccacugacaacaacaccaacaaaaucuuauuuugcaaaucucaaaggaacaaggaccagagggaaacuaugcccagacugucucaacuguacagaucuggauguggccuugggcaggccaauguguguggggaccacaccuucugcgaaagcuucaauacuccacgaagucagaccuguuacauccgggugcuuuccuauaaugcacgacagaacaaaaaucaggcaacuagccaaucuucucagaggauaugaaaauaucagguuaucaacccaaaacguuaucgaugcagaaaaggcaccaggaggacccuacagacuuggaaccucaggaucuugcccuaacgcuaccaguaaaagcggauuuuucgcaacaauggcuugggcugucccaaaggacaacaacaaaaaugcaacgaacccacuaacaguagaaguaccauacauuuguacagaaggggaagaccaaauuacuguuuggggguuccauucagauaacaaaacccaaaugaagaaccucuauggagacucaaauccucaaaaguucaccucaucugcuaauggaguaaccacacauuauguuucucagauuggcggcuucccagaucaaacagaagacggaggacuaccacaaagcggcagaauugucguugauuacaugaugcaaaaaccugggaaaacaggaacaauugucuaucaaagagguguuuuguugccucaaaagguguggugcgcgaguggcaggagcaaaguaauaaaaggguccuugccuuuaauuggugaagcagauugccuucaugaaaaauacgguggauuaaacaaaagcaagccuuacuacacaggagaacaugcaaaagccauaggaaauugcccaauaugggugaaaacaccuuugaagcuugccaauggaaccaaauauagaccuccugcaaaacuauuaaaggaaagggguuucuucggagcuauugcugguuuccuagaaggaggaugggaaggaaugauugcagguuggcacggauacacaucucacggagcacauggaguggcaguugcggcagaccuuaagaguacacaagaagcuauaaacaagauaacaaaaaaucucaacucuuugagugagcuagaaguaaagaaucuucaaagacuaaguggugccauggaugaacuccacaacgaaauacucgagcuggaugagaaaguggaugaucucagagcugacacuauaagcucacaaauagaacuugcagucuugcuuuccaacgaaggaauaauaaacagugaagacgagcaucuauuggcacuugagagaaaacuaaagaaaaugcugggucccucugcuguagacauaggaaauggaugcuucgaaaccaaacacaaaugcaaccagaccugcuuagacaggauagcugcuggcaccuuuaaugcaggagaauuuucucuccccacuuuugauucauugaacauuacugcugcaucuuuaaaugaugauggauuggauaaccauacuauacugcucuauuacucaacugcugcuucuaguuuggcuguaacauugaugcuagcuauuuuuauuguuuauauggucuccagagacaacguuucaugcuccaucugucuauaa

SEQ ID NO: 59661 - RNA, 1755 nt, Artificial Sequence; identical to SEQ ID NO: 59623
  derived and/or modified CDS sequence (wt) from hemagglutinin__InfluenzaB__AGX23204

SEQ ID NO: 59662 - RNA, 1755 nt, Artificial Sequence; identical to SEQ ID NO: 59660
  derived and/or modified CDS sequence (wt) from hemagglutinin__InfluenzaB__AGX23215

SEQ ID NO: 59663 - RNA, 1755 nt, Artificial Sequence
  derived and/or modified CDS sequence (wt) from hemagglutinin__InfluenzaB__AGX23226
augaaggcaauaauuguacuacucaugguaguaacauccaaugcagaucgaaucugcacugggauaacaucuucaaacucaccucauguggucaaaacagcuacucaaggggaggucaaugugacuggugugauaccacugacaacaacaccaacaaaaucuuauuuugcaaaucucaaaggaacaaggaccagagggaaacuaugcccagacugucucaacuguacagaucuggauguggccuugggcaggccaauguguguggggaccacaccuucugcgaaagcuucaauacuccacgaagucagaccuguuacauccgggugcuuuccuauaaugcacgacagaacaaaaaucaggcaacuagccaaucuucucagaggauaugaaaauaucagguuaucaacccaaaacguuaucgaugcagaaaaggcaccaggaggacccuacagacuuggaaccucaggaucuugcccuaacgcuaccaguaaaagcggauuuuucgcaacaauggcuugggcugucccaaaggacaacaacaaaaaugcaacgaacccacuaacaguagagguaccauacauuuguaaagaaggggaagaccaaauuacuguuuggggguuccauucagauaacaaaacccaaaugaagaaccucuauggagacucaaauccucaaaaguucaccucaucugcuaguggaguaaccacacauuauguuucucagauuggcggcuucccagaucaaacagaagacggaggacuaccacaaagcggcagaauugucguugauuacaugauacaaaaaccugggaaaacaggaacaauugucuaucaaagagguguuuuguugccucaaaagguguggugcgcgaguggcaggagcaaaguaauaaaaggguccuugccuuuaauuggugaagcagauugccuucaugaaaaauacgguggauuaaacaaaagcaagccuuacuacacaggagaacaugcaaaagccauaggaaauugcccaauaugggugaaaacaccuuugaagcuugccaauggaaccaaauauagaccuccugcaaaacuauuaaaggaaagggguuucuucggagcuauugcugguuuccuagaaggaggaugggaaggaaugauugcagguuggcacggauacacaucucacggagcacauggaguggcaguugcggcagaccuuaagaguacacaagaagcuauaaacaagauaacaaaaaaucucaacucuuugagugagcuagaaguaaagaaucuucaaagacuaaguggugccauggaugaacuccacaacgaaauacucgagcuggaugagaaaguggaugaucucagagcugacacuauaagcucacaaauagaacuugcagucuugcuuuccaacgaaggaauaauaaacagugaagacgagcaucuauuggcacuugagagaaaacuaaagaaaaugcugggucccucugcuguagacauaggaaacggaugcuucgaaaccaaacacaaaugcaaccagaccugcuuagacaggauagcugcuggcaccuuuaaugcaggagaauuuucucuccccacuuuugauucauugaacauuacugcugcaucuuuaaaugaugauggauuggauaaccauacuauacugcucuauuacucaacugcugcuucuaguuuggcuguaacauugaugcuagcuauuuuuauuguuuauauggucuccagagacaacguuucaugcuccaucugccuauaa

SEQ ID NO: 59664 - RNA, 1755 nt, Artificial Sequence
  derived and/or modified CDS sequence (wt) from hemagglutinin__InfluenzaB__AGX23237
augaaggcaauaauuguacuacucaugguaguaacauccaaugcagaucgaaucugcacugggauaacaucuucaaacucaccucauguggucaaaacagcuacucaaggggaggucaaugugacuggugugauaccacugacaacaacaccaacaaaaucuuauuuugcaaaccucaaaggaacaaggaccagagggaaacuaugcccagacugucucaacuguacagaucuggauguggccuugggcaggccaauguguguggggaccacaccuucugcgaaagcuucaauacuccacgaagucagaccuguuacauccgggugcuuuccuauaaugcacgacagaacaaaaaucaggcaacuagccaaucuucucagaggauaugaaaauaucagguuaucaacccaaaacguuaucgaugcagaaaaggcaccaggaggacccuacagacuuggaaccucaggaucuugcccuaacgcuaccaguaaaagcggauuuuucgcaacaauggcuugggcugucccaaaggacaacaacaaaaaugcaacgaacccacuaacaguagaaguaccauacauuuguacagaaggagaagaccaaauuacuguuuggggguuccauucagauaacaaaacccaaaugaagaaccucuauggagacucaaauccucaaaaguucaccucaucugcuaauggaguaaccacacauuauguuucucagauuggcggcuucccagaucaaacagaagacggaggacuaccacaaagcggcagaauuguuguugauuacaugaugcaaaaaccugggaaaacaggaacaauugucuaucaaagagguguuuuguugccucaaaagguguggugcgcgaguggcaggagcaaaguaauaaaaggguccuugccuuuaauuggugaagcagauugccuucaugaaaaauacgguggauuaaacaaaagcaagccuuacuacacaggagaacaugcaaaagccauaggaaauugcccaauaugggugaaaacaccuuugaagcuugccaauggaaccaaauauagaccuccugcaaaacuauuaaaggaaagggguuucuucggagcuauugcugguuuccuagaaggaggaugggaaggaaugauugcagguuggcacggauacacaucucacggagcacauggaguggcaguggcggcagaccuuaagaguacacaagaagcuauaaacaagauaacaaaaaaucucaauucuuugagugagcuagaaguaaagaaucuucaaagacuaaguggugccauggaugaacuccacagcgaaauacucgagcuggaugagaaaguggaugaucucagagcugacacuauaagcucacaaauagaacuugcagucuugcuuuccaacgaaggaauaauaaacagugaagacgagcaucuauuggcacuugagagaaaacuaaagaaaaugcugggucccucugcuguagacauaggaaauggaugcuucgaaaccaaacacaaaugcaaccagaccugcuuagacaggauagcugcuggcaccuuuaaugcaggagaauuuucucuccccacuuuugauucauugaacauuacugcugcaucuuuaaaugaugauggauuggauaaccauacuauacugcucuauuacucaacugcugcuucuaguuuggcuguaacauugaugcuagcuauuuuuauuguuuauauggucuccagagacaacguuucaugcuccaucugucuauaa

SEQ ID NO: 59665 - RNA, 1755 nt, Artificial Sequence
  derived and/or modified CDS sequence (wt) from hemagglutinin__InfluenzaB__AGX23248
augaaggcaauaauuguacuacucaugguaguaacauccaaugcagaucgaaucugcacugggauaacaucuucaaacucaccucauguggucaaaacagcuacucaaggggaggucaaugugacuggugugauaccacugacaacaacaccaacaaaaucuuauuuugcaaaucucaaaggaacaaggaccagagggaaacuaugcccagacugucucaacuguacagaucuggauguggccuugggcaggccaauguguguggggaccacaccuucugcgaaagcuucaauacuccacgaagucagaccuguuacauccgggugcuuuccuauaaugcacgacagaacaaaaaucaggcaacuagccaaucuucucagaggauaugaaaauaucagguuaucaacccaaaacguuaucgaugcagaaaaggcaccaggaggacccuacagacuuggaaccucaggaucuugcccuaacgcuaccaguaaaagcggauuuuucgcaacaauggcuugggcugucccaaaggacaacaacaaaaaugcaacgaacccacuaacaguagagguaccauacauuuguaaagaaggggaagaccaaauuacuguuuggggguuccauucagauaacaaaacccaaaugaagaaccucuauggagacucaaauccucaaaaguucaccucaucugcuaguggaguaaccacacauuauguuucucagauuggcggcuucccagaucaaacagaagacggaggacuaccacaaagcggcagaauugucguugauuacaugauacaaaaaccugggaaaacaggaacaauugucuaucaaagagguguuuuguugccucaaaagguguggugcgcgaguggcaggagcaaaguaauaaaaggguccuugccuuuaauuggugaagcagauugccuucaugaaaaauacgguggauuaaacaaaagcaagccuuacuacacaggagaacaugcaaaagccauaggaaauugcccaauaugggugaaaacaccuuugaagcuugccaauggaaccaaauauagaccuccugcaaaacuauuaaaggaaagggguuucuucggagcuauugcugguuuccuagaaggaggaugggaaggaaugauugcagguuggcacggauacacaucucacggagcacauggaguggcaguugcggcagaccuuaagaguacacaagaagcuauaaacaagauaacaaaaaaucucaacucuuugagugagcuagaaguaaagaaucuucaaagacuaaguggugccauggaugaacuccacaacgaaauacucgagcuggaugagaaaguggaugaucucagagcugacacuauaagcucacaaauagaacuugcagucuugcuuuccaacgaaggaauaauaaacagugaagacgagcaucuauuggcacuugagagaaaacuaaagaaaaugcugggucccucugcuguagacauaggaaacggaugcuucgaaaccaaacacaaaugcaaccagaccugcuuaaacaggauagcugcuggcaccuuuaaugcaggagaauuuucucuccccacuuuugauucauugaacauuacugcugcaucuuuaaaugaugauggauuggauaaccauacuauacugcucuauuacucaacugcugcuucuaguuuggcuguaacauugaugcuagcuauuuuuauuguuuauauggucuccagagacaacguuucaugcuccaucugccuauaa

SEQ ID NO: 59666 - RNA, 1755 nt, Artificial Sequence
  derived and/or modified CDS sequence (wt) from hemagglutinin__InfluenzaB__AGX23259
augaaagcaauaauuguacuacucaugguaguaacauccaacgcagaucgaaucugcacugggauaacaucuucaaacucaccucauguggucaaaacagcuacucaaggggaggucaaugugacuggugugauaccacugacaacaacaccaacaaaaucuuauuuugcaaaucucaaaggaacaaggaccagagggaaacuaugcccagacugucucaacuguacagaucuggauguggccuugggcaggccaauguguguggggaccacaccuucugcgaaagcuucaauacuccacgaagucagaccuguuacauccgggugcuuuccuauaaugcacgacagaacaaaaaucaggcaacuagccaaucuucucagaggauaugaaaauaucagguuaucaacccaaaacguuaucgaugcagaaaaggcaccaggaggacccuacagacuuggaaccucaggaucuugcccuaacgcuaccaguaaaagcggauuuuucgcaacaauggcuugggcugucccaaaggacaacaacaaaaaugcaacgaacccacuaacaguagaaguaccauacauuuguacagaaggggaagaccaaauuacuguuuggggguuccauucagauaacaaaacccaaaugaagaaccucuauggagacucaaauccucaaaaguucaccucaucugcuaauggaguaaccacacauuauguuucucagauuggcggcuucccagaucaaacagaagacggaggacuaccacaaaguggcagaauugucguugauuacaugaugcaaaaaccugggaaaacaggaacaauugucuaucaaagagguguuuuguugccucaaaagguguggugcgcgaguggcaggagcaaaguaauaaaaggguccuugccuuuaauuggugaagcagauugccuucaugaaaaauacgguggauuaaacaaaagcaagccuuacuacacaggagaacaugcaaaagccauaggaaauugcccaauaugggugaaaacaccuuugaagcuugccaauggaaccaaauauagaccuccugcaaaacuauuaaaggaaagggguuucuucggagcuauugcugguuuccuagaaggaggaugggaaggaaugauugcagguuggcacggauacacaucucacggagcacauggaguggcaguugcggcagaccuuaagaguacacaagaagcuauaaacaagauaacaaaaaaucucaacucuuugagugagcuagaaguaaagaaucuucaaagacuaaguggugccauggaugaacuccacaacgaaauacucgagcuggaugagaaaguggaugaucucagagcugacacuauaagcucacaaauagaacuugcagucuugcuuuccaacgaaggaauaauaaacagugaagacgagcaucuauuggcacuugagagaaaacuaaagaaaaugcugggucccucugcuguagacauaggaaauggaugcuucgaaaccaaacacaaaugcaaccagaccugcuuagacaggauagcugcuggcaccuuuaaugcaggagaauuuucucuccccacuuuugauucauugaacauuacugcugcaucuuuaaaugaugauggauuggauaaccauacuauacugcucuauuacucaacugcugcuucuaguuuggcuguaacauugaugcuagcuauuuuuauuguuuauauggucuccagagacaacguuucaugcuccaucugucuauaa

SEQ ID NO: 59667 - RNA, 1755 nt, Artificial Sequence; identical to SEQ ID NO: 59666
  derived and/or modified CDS sequence (wt) from hemagglutinin__InfluenzaB__AGX23270

SEQ ID NO: 59668 - RNA, 1755 nt, Artificial Sequence
  derived and/or modified CDS sequence (wt) from hemagglutinin__InfluenzaB__AGX23281
augaaggcaauaauuguacuacucaugguaguaacauccaaugcagaucgaaucugcacugggauaacaucuucaaacucaccucauguggucaaaacagcuacucaaggggaggucaaugugacuggugugauaccacugacaacaacaccaacaaaaucuuauuuugcaaaccucaaaggaacaaggaccagagggaaacuaugcccagacugucucaacuguacagaucuggauguggccuugggcaggccaauguguguggggaccacaccuucugcgaaagcuucaauacuccacgaagucagaccuguuacauccgggugcuuuccuauaaugcacgacagaacaaaaaucaggcaacuagccaaucuucucagaggauaugaaaauaucagguuaucaacccaaaacguuaucgaugcagaaaaggcaccaggaggacccuacagacuuggaaccucaggaucuugcccuaacgcugccaguaaaagcggauuuuucgcaacaauggcuugggcugucccaaaggacaacaacaaaaaugcaacgaacccacuaacaguagaaguaccauacauuuguacagaaggggaagaccaaauuacuguuuggggguuccauucagauaacaaaacccaaaugaagaaccucuauggagacucaaauccucaaaaguucaccucaucugcuaauggaguaaccacacauuauguuucucagauuggcggcuucccagaucaaacagaagacggaggacuaccacaaagcggcagaauuguuguugauuacaugaugcaaaaaccugggaaaacaggaacaauugucuaucaaagagguguuuuguugccucaaaagguguggugcgcgaguggcaggagcaaaguaauaaaaggguccuugccuuuaauuggugaagcagauugccuucaugaaaaauacgguggauuaaacaaaagcaagccuuacuacacaggagaacaugcaaaagccauaggaaauugcccaauaugggugaaaacaccuuugaagcuugccaauggaaccaaauauagaccuccugcaaaacuauuaaaggaaagggguuucuucggagcuauugcugguuuccuagaaggaggaugggaaggaaugauugcagguuggcacggauacacaucucacggagcacauggaguggcaguggcggcagaccuuaagaguacacaagaagcuauaaacaagauaacaaaaaaucucaauucuuugagugagcuagaaguaaagaaucuucaaagacuaaguggugccauggaugaacuccacagcgaaauacucgagcuggaugagaaaguggaugaucucagagcugacacuauaagcucacaaauagaacuugcagucuugcuuuccaacgaaggaauaauaaacagugaagacgagcaucuauuggcacuugagagaaaacuaaagaaaaugcugggucccucugcuguagacauaggaaauggaugcuucgaaaccaaacacaaaugcaaccagaccugcuuagacaggauagcugcuggcaccuuuaaugcaggagaauuuucucuccccacuuuugauucauugaacauuacugcugcaucuuuaaaugaugauggauuggauaaccauacuauacugcucuauuacucaacugcugcuucuaguuuggcuguaacauugaugcuagcuauuuuuauuguuuauauggucuccagagacaacguuucaugcuccaucugucuauaa

SEQ ID NO: 59669 - RNA, 1755 nt, Artificial Sequence
  derived and/or modified CDS sequence (wt) from hemagglutinin__InfluenzaB__AGX23292
augaaagcaauaauuguacuacucaugguaguaacauccaaugcagaucgaaucugcacugggauaacaucuucaaacucaccucauguggucaaaacagcuacucaaggggaggucaaugugacuggugugauaccacugacaacaacaccaacaaaaucuuauuuugcaaaucucaaaggaacaaggaccagagggaaacuaugcccagacugucucaacuguacagaucuggauguggccuugggcaggccaauguguguggggaccacaccuucugcgaaagcuucaauacuccacgaagucagaccuguuacauccgggugcuuuccuauaaugcacgacagaacaaaaaucaggcaacuagccaaucuucucagaggauaugaaaauaucagguuaucaacccaaaacguuaucgaugcagaaaaggcaccaggaggacccuacagacuuggaaccucaggaucuugcccuaacgcuaacaguaaaagcggauuuuucgcaacaauggcuugggcugucccaaaggacaacaacaaaaaugcaacgaacccacuaacaguagaaguaccauacauuuguacagaaggggaagaccaaauuacuguuuggggguuccauucagauaacaaaacccaaaugaagaaccucuauggagacucaaauccucaaaaguucaccucaucugcuaauggaguaaccacacauuauguuucucagauuggcggcuucccagaucaaacagaagacggaggacuaccacaaagcggcagaauugucguugauuacaugaugcaaaaaccugggaaaacaggaacaauugucuaucaaagagguguuuuguugccucaaaagguguggugcgcgaguggcaggagcaaaguaauaaaaggguccuugccuuuaauuggugaagcagauugccuucaugaaaaauacgguggauuaaacaaaagcaagccuuacuacacaggagaacaugcaaaagccauaggaaauugcccaauaugggugaaaacaccuuugaagcuugccaauggaaccaaauauagaccuccugcaaaacuauuaaaggaaagggguuucuucggagcuauugcugguuuccuagaaggaggaugggaaggaaugauugcagguuggcacggauacacaucucacggagcacaugggguggcaguugcggcagaccuuaagaguacacaagaagcuauaaacaagauaacaaaaaaucucaacucuuugagugagcuagaaguaaagaaucuucaaagacuaaguggugccauggaugaacuccacaacgaaauacucgagcuggaugagaaaguggaugaucucagagcugauacuauaagcucacaaauagaacuugcagucuugcuuuccaacgaaggaauaauaaacagugaagacgagcaucuauuggcacuugagagaaaacuaaagaaaaugcugggucccucugcuguagacauaggaaauggaugcuucgaaaccaaacacaaaugcaaccagaccugcuuagacaggauagcugcuggcaccuuuaaugcaggagaauuuucucuccccacuuuugauucauugaacauuacugcugcaucuuuaaaugaugauggauuggauaaccauacuauacugcucuauuacucaacugcugcuucuaguuuggcuguaacauugaugcuagcuauuuuuauuguuuauauggucuccagagacaacguuucaugcuccaucugucuauaa

SEQ ID NO: 59670 - RNA, 1755 nt, Artificial Sequence
  derived and/or modified CDS sequence (wt) from hemagglutinin__InfluenzaB__AGX23314
augaaggcaauaauuguacuacucaugguaguaacauccaaugcagaucgaaucugcacugggauaacaucuucaaacucaccucauguggucaaaacagcuacucaaggggaggucaaugugacuggugugauaccacuaacaacaacaccaacaaaaucuuauuuugcaaaucucaaaggaacaaggaccagagggaaacuaugcccagacugucucaacuguacagaucuggauguggccuugggcagaccaauguguguggggaccacaccuucugcgaaagcuucaauacuccacgaagucagaccuguuacauccgggugcuuuccuauaaugcacgacagaacaaaaaucaggcaacuagccaaucuucucagaggauaugaaaauaucagguuaucaacccaaaacguuaucgaugcagaaagggcaccaggaggacccuacagacuuggaaccucaggaucuugcccuaacgcuaccaguaaaagcggauuuuucgcaacaauggcuugggcugucccaaaggacaacaacaaaaacgcaacgaacccacuaacaguagaaguaccauacauuuguacagaaggggaagaccaaauuacuguuuggggguuccauucagauaacaaaacccaaaugaagaaccucuauggagacucaaauccucaaaaguucaccucaucugcuaauggaguaaccacacauuauguuucucagauuggcggcuucccagaucaaacagaagacggaggacuaccacaaagcggcagaauugucguugauuacaugaugcaaaaaccugggaaaacaggaacaauugucuaucaaagagguguuuuguugccucaaaagguguggugcgcgaguggcaggagcaaaguaauaaaaggguccuugccuuuaauuggugaagcagauugccuucaugaaaaauacgguggauuaaacaaaagcaagccuuacuacacaggagaacaugcaaaagccauaggaaauugcccaauaugggugaaaacaccuuugaagcuugccaauggaaccaaauauagaccuccugcaaaacuauuaaaggaaagggguuucuucggagcuauugcugguuuccuagaaggaggaugggaaggaaugauugcagguuggcauggauacacaucucacggagcacauggaguggcaguugcggcagaccuuaagaguacacaagaagcuauaaacaagauaacaaaaaaucucaacucuuugagugagcuagaaguaaagaaucuucaaagacuaaguggugccauggaugaacuccacaacgaaauacucgagcuggaugagaaaguggaugaucucagagcugacacuauaagcucacaaauagaacuugcaguuuugcuuuccaacgaaggaauaauaaacagugaggacgagcaucuauuggcacuugagagaaaacuaaagaaaaugcugggucccucugcuguagacauaggaaauggaugcuucgaaaccaaacacaaaugcaaccagaccugcuuagacaggauagcugcuggcaccuuuaaugcaggagaauuuucucuccccacuuuugauucauugaacauuacugcugcaucuuuaaaugaugauggauuggauaaccauacuauacugcucuauuacucaacugcugcuucuaguuuggcuguaacauugaugcuagccauuuuuauuguuuauauggucuccagagacaacguuucaugcuccaucugucuauaa

SEQ ID NO: 59671 - RNA, 1755 nt, Artificial Sequence; identical to SEQ ID NO: 59670
  derived and/or modified CDS sequence (wt) from hemagglutinin__InfluenzaB__AGX23325

SEQ ID NO: 59672 - RNA, 1755 nt, Artificial Sequence; identical to SEQ ID NO: 59670
  derived and/or modified CDS sequence (wt) from hemagglutinin__InfluenzaB__AGX23336

SEQ ID NO: 59673 - RNA, 1755 nt, Artificial Sequence; identical to SEQ ID NO: 59670
  derived and/or modified CDS sequence (wt) from hemagglutinin__InfluenzaB__AGX23347

SEQ ID NO: 59674 - RNA, 1755 nt, Artificial Sequence; identical to SEQ ID NO: 59670
  derived and/or modified CDS sequence (wt) from hemagglutinin__InfluenzaB__AGX23358

SEQ ID NO: 59675 - RNA, 1755 nt, Artificial Sequence; identical to SEQ ID NO: 59670
  derived and/or modified CDS sequence (wt) from hemagglutinin__InfluenzaB__AGX23369

SEQ ID NO: 59676 - RNA, 1755 nt, Artificial Sequence; identical to SEQ ID NO: 59670
  derived and/or modified CDS sequence (wt) from hemagglutinin__InfluenzaB__AGX23380

SEQ ID NO: 59677 - RNA, 1755 nt, Artificial Sequence
  derived and/or modified CDS sequence (wt) from hemagglutinin__InfluenzaB__AGX23391
augaaggcaauaauuguacuacucaugguaguaacauccaaugcagaucgaaucugcacugggauaacaucuucaaacucaccucauguggucaaaacagcuacucaaggggaggucaaugugacuggugugauaccacuaacaacaacaccaacaaaaucuuauuuugcaaaucucaaaggaacaaggaccagagggaaacuaugcccagacugucucaacuguacagaucuggauguggccuugggcagaccaauguguguggggaccacaccuucugcgaaagcuucaauacuccacgaagucagaccuguuacaucugggugcuuuccuauaaugcacgacagaacaaaaaucaggcaacuagccaaucuucucagaggauaugaaaauaucagguuaucaacccaaaacguuaucgaugcagaaaaggcaccaggaggacccuacagacuuggaaccucaggaucuugcccuaacgcuaccaguaaaagcggauuuuucgcaacaauggcuugggcugucccaaaggacaacaacaaaaacgcaacgaacccacuaacaguagaaguaccauacauuuguacagaaggggaagaccaaauuacuguuuggggguuccauucagauaacaaaacccaaaugaagaaccucuauggagacucaaauccucaaaaguucaccucaucugcuaauggaguaaccacacauuauguuucucagauuggcggcuucccagaucaaacagaagacggaggacuaccacaaagcggcagaauugucguugauuacaugaugcaaaaaccugggaaaacaggaacaauugucuaucaaagagguguuuuguugccucaaaagguguggugcgcgaguggcaggagcaaaguaauaaaaggguccuugccuuuaauuggugaagcagauugccuucaugaaaaauacgguggauuaaacaaaagcaagccuuacuacacaggagaacaugcaaaagccauaggaaauugcccaauaugggugaaaacaccuuugaagcuugccaauggaaccaaauauagaccuccugcaaaacuauuaaaggaaagggguuucuucggagcuauugcugguuuccuagaaggaggaugggaaggaaugauugcagguuggcacggauacacaucucacggagcacauggaguggcaguugcggcagaccuuaagaguacacaagaagcuauaaacaagauaacaaaaaaucucaacucuuugagugagcuagaaguaaagaaucuucaaagacuaaguggugccauggaugaacuccacaacgaaauacucgagcuggaugagaaaguggaugaucucagagcugacacuauaagcucacaaauagaacuugcaguuuugcuuuccaacgaaggaauaauaaacagugaagacgagcaucuauuggcacuugagagaaaacuaaagaaaaugcugggucccucugcuguagacauaggaaauggaugcuucgaaaccaaacacaaaugcaaccagaccugcuuagacaggauagcugcuggcaccuuuaaugcaggagaauuuucucuccccacuuuugauucauugaacauuacugcugcaucuuuaaaugaugauggauuggauaaccauacuauacugcucuauuacucaacugcugcuucuaguuuggcuguaacauugaugcuagccauuuuuauuguuuauauggucuccagagacaacguuucaugcuccaucugucuauaa

SEQ ID NO: 59678 - RNA, 1755 nt, Artificial Sequence
  derived and/or modified CDS sequence (wt) from hemagglutinin__InfluenzaB__AGX23413
augaaggcaauaauuguacuacucaugguaguaacauccaaugcagaucgaaucugcacugggauaacaucuucaaacucaccccauguggucaaaacagcuacucaaggggaggucaaugugacuggugugauaccacugacaacaacaccaacaaaaucuuauuuugcaaaucucaaaggaacaaggaccagagggaaacuaugcccagacugucucaacuguacagaucuggauguggccuugggcaggccaauguguguggggaccacaccuucugcgaaagcuucaauacuccacgaagucagaccuguuacauccgggugcuuuccuauaaugcacgacagaacaaaaaucaggcaacuagccaaucuucucagaggauaugaaaauaucagguuaucaaaccaaaacguuaucgaugcagaaagggcaccaggaggacccuacagacuuggaaccucaggaucuugcccuaacgcuaccaguaaaagcggauuuuucgcaacaauggcuugggcugucccaaaggacaacaacaaaaaugcaacgaacccacuaacaguagaaguaccauacauuuguacagaaggggaagaccaaauuacuguuuggggguuccauucagauaacaaaacccaaaugaagaaccucuauggagacucaaauccucaaaaguucaccucaucugcuaauggaguaaccacacauuauguuucucaaauuggcggcuucccagaucaaacagaagacggaggacuaccacaaagcggcagaauugucguugauuacaugaugcaaaaaccugggaaaacaggaacaauugucuaucaaagagguguuuuguugccucaaaagguguggugcgcgaguggcaggagcaaaguaauaaaaggguccuugccuuuaauuggugaagcagauugccuucaugaaaaauacgguggauuaaacaaaagcaagccuuacuacacaggagaacaugcaaaagccauaggaaauugcccaauaugggugaaaacaccuuugaagcuugccaauggaaccaaauauagaccuccugcaaaacuauuaaaggaaagggguuucuucggagcuauugcugguuuccuagaaggaggaugggaaggaaugauugcagguuggcacggauacacaucucacggagcacauggaguggcaguggcggcagaccuuaagaguacacaagaagcuauaaacaagauaacaaaaaaucucaacucuuugagugagcuagaaguaaagaaucuucaaagacuaaguggugccauggaugaacuccacaacgaaauacucgagcuggaugagaaaguggaugaucucagagcugacacuauaagcucacaaauagaacuugcagucuugcuuuccaacgaaggaauaauaaacagugaagacgagcaucuauuggcacuugagagaaaacuaaagaaaaugcugggucccucugcuguagacauaggaaauggaugcuucgaaaccaaacacaaaugcaaccagaccugcuuagacaggauagcugcuggcaccuuuaaugcaggagaauuuucucuccccacuuuugauucauugaacauuacugcugcaucuuuaaaugaugauggauuggauaaccauacuauacugcucuauuacucaacugcugcuucuaguuuggcuguaacauugaugcuagcuauuuuuauuguuuauauggucuccagagacaacguuucaugcuccaucugucuauaa

SEQ ID NO: 59679 - RNA, 1755 nt, Artificial Sequence
  derived and/or modified CDS sequence (wt) from hemagglutinin__InfluenzaB__AGX23424
augaaggcaauaauuguacuacucaugguaguaacauccaaugcagaucgaaucugcacugggauaacaucuucaaacucaccccauguggucaaaacagcuacucaaggggaggucaaugugacuggugugauaccacugacaacaacaccaacaaaaucuuauuuugcaaaucucaaaggaacaaggaccagagggaaacuaugcccagacugucucaacuguacagaucuggauguggccuugggcaggccaauguguguggggaccacaccuucugcgaaagcuucaauacuccacgaagucagaccuguuacauccgggugcuuuccuauaaugcacgacagaacaaaaaucaggcaacuagcuaaucuucucagaggauaugaaaauaucagguuaucaaaccaaaacguuaucgaugcagaaagggcaccaggaggacccuacagacuuggaaccucaggaucuugcccuaacgcuaccaguaaaagcggauuuuucgcaacaauggcuugggcugucccaaaggacaacaacaaaaaugcaacgaacccacuaacaguagaaguaccauacauuuguacagaaggggaagaccaaauuacuguuuggggguuccauucagauaacaaaacccaaaugaagaaccucuauggagacucaaauccucaaaaguucaccucaucugcuaauggaguaaccacacauuauguuucucaaauuggcggcuucccagaucaaacagaagacggaggacuaccacaaagcggcagaauugucguugauuacaugaugcaaaaaccugggaaaacaggaacaauugucuaucaaagagguguuuuguugccucaaaagguguggugcgcgaguggcaggagcaaaguaauaaaaggguccuugccuuuaauuggugaagcagauugccuucaugaaaaauacgguggauuaaacaaaagcaagccuuacuacacaggagaacaugcaaaagccauaggaaauugcccaauaugggugaaaacaccuuugaagcuugccaauggaaccaaauauagaccuccugcaaaacuauuaaaggaaagggguuucuucggagcuauugcugguuuccuagaaggaggaugggaaggaaugauugcagguuggcacggauacacaucucacggagcacauggaguggcaguggcggcagaccuuaagaguacacaagaagcuauaaacaagauaacaaaaaaucucaacucuuugagugagcuagaaguaaagaaucuucaaagacuaaguggugccauggaugaacuccacaacgaaauacucgagcuggaugagaaaguggaugaucucagagcugacacuauaagcucacaaauagaacuugcagucuugcuuuccaacgaaggaauaauaaacagugaagacgagcaucuauuggcacuugagagaaaacuaaagaaaaugcugggucccucugcuguagacauaggaaauggaugcuucgaaaccaaacacaaaugcaaccagaccugcuuagacaggauagcugcuggcaccuuuaaugcaggagaauuuucucuccccacuuuugauucauugaacauuacugcugcaucuuuaaaugaugauggauuggauaaccauacuauacugcucuauuacucaacugcugcuucuaguuuggcuguaacauugaugcuagcuauuuuuauuguuuauauggucuccagagacaacguuucaugcuccaucugucuauaa

SEQ ID NO: 59680 - RNA, 1755 nt, Artificial Sequence
  derived and/or modified CDS sequence (wt) from hemagglutinin__InfluenzaB__AGX23435
augaaggcaauaauuguacuacucaugguaguaacauccaaugcagaucgaaucugcacugggauaacaucuucaaacucaccucauguggucaaaacagcuacucaaggggaggucaaugugacuggugugauaccacugacaacaacaccaacaaaaucuuauuuugcaaaucucaaaggaacaaggaccagagggaaacuaugcccggacugucucaacuguacagaucuggauguggccuugggcaggccaauguguguggggaccacaccuucugcuaaagcuucaauacuccacgaagucagaccuguuacauccgggugcuuuccuauaaugcacgacagaacaaaaaucaggcaacuacccaaucuucucagaggauaugaaaauaucagguuaucaacccaaaacguuaucgaugcagaaaaagcaccaggaggacccuacagacuuggaaccucaggaucuugcccuaacgcuaccaguaaaaucggauuuuucgcaacaauggcuugggcugucccaaaggacaacuacaaaaaugcaacgaacccacuaacaguagaaguaccauacauuuguacagaaggggaagaccaaauuacuguuuggggguuccauucagauaacaaaacccaaaugaagaaccucuauggagacucaaauccucaaaaguucaccucaucugcuaauggaguaaccacacauuauguuucucagauuggcgacuucccagaucaaacagaagacggaggacuaccacaaagcggcagaauuguuguugauuacaugaugcaaaaaccugggaaaacaggaacaauugucuaucaaagagguguuuuguugccucaaaagguguggugcgcgaguggcaggagcaaaguaauaaaagggucauugccuuuaauuggugaagcagauugccuucaugaaaaauacgguggauuaaacaaaagcaagccuuacuacacaggagaacaugcaaaagccauaggaaauugcccaauauggguaaaaacaccuuugaagcuugccaauggaaccaaauauagaccuccugcaaaacuauuaaaggaaagggguuucuucggagcuauugcugguuuccuagaaggaggaugggaaggaaugauugcagguuggcacggauacacaucucacggagcacauggaguggcaguggcggcagaccuuaagaguacacaagaagcuauaaauaagauaacaaaaaaucucaauucuuugagugagcuagaaguaaagaaccuucaaagacuaaguggugccauggaugaacuccacaacgaaauacucgagcuggaugagaaaguggaugaucucagagcugacacuauaagcucacaaauagaacuugcagucuugcuuuccaacgaaggaauaauaaacagugaagacgagcaucuauuggcacuugagagaaaacuaaagaaaaugcugggucccucugcuguagacauaggaaauggaugcuucgaaaccaaacacaaaugcaaccagaccugcuuagacaggauagcugcuggcaccuuuaaugcaggagaauuuucucuccccacuuuugauucauugaacauuacugcugcaucuuuaaaugaugauggauuggauaaccauacuauacugcucuauuacucaacugcugcuucuaguuuggcuguaacauuaaugcuagcuauuuuuauuguuuauauggucuccagagacaacguuucaugcuccaucugucuauaa

SEQ ID NO: 59681 - RNA, 1755 nt, Artificial Sequence; identical to SEQ ID NO: 59056
  derived and/or modified CDS sequence (wt) from hemagglutinin__InfluenzaB__AGX23446

SEQ ID NO: 59682 - RNA, 1755 nt, Artificial Sequence; identical to SEQ ID NO: 59680
  derived and/or modified CDS sequence (wt) from hemagglutinin__InfluenzaB__AGX23457

SEQ ID NO: 59683 - RNA, 1755 nt, Artificial Sequence
  derived and/or modified CDS sequence (wt) from hemagglutinin__InfluenzaB__AGX23468
augaaggcaauaauuguacuacucaugguaguaacauccaaugcagaucgaaucugcacugggauaacaucuucaaacucaccucauguggucaaaacagcuacucaaggggaggucaaugugacuggugugauaccacugacaacaacaccaacaaaaucuuauuuugcaaaucucaaaggaacaaagaccagagggaaacuaugcccagacugucucaacuguacagaucuggauguggccuugggcaggccaaugugugugggaaccacaccuucugcgaaagcuucaauacuccacgaagucagaccuguuacauccgggugcuuuccuauaaugcacgacagaacaaaaaucaggcaacuagccaaucuucucagaggauaugaaaauaucagguuaucaacccaaaacguuaucgaugcagaaaaggcaccaggaggacccuacagacuuggaaccucaggaucuugcccuaacgcuaccaguaaaagcggauuuuucgcaacaauggcuugggcugucccaaaggacaacaacaaaaaugcaacgaacccacuaacaguagaaguaccauacauuuguacagaaggggaagaccaaauuacuguuuggggguuccauucagauaacaaaacccaaaugaagaaccucuauggagacucaaauccucaaaaguucaccucaucugcuaauggaguaaccacacauuauguuucucagauuggcggcuucccagaucaaacagaagacggaggacuaccacaaagcggcagaauugucguugauuacaugaugcaaaaaccugggaaaacaggaacaauugucuaucaaagagguguuuuguugccucaaaagguguggugcgcgaguggcaggagcaaaguaauaaaaggguccuugccuuuaauuggugaagcagauugccuucaugaaaaauacgguggauuaaacaaaagcaagccuuacuacacaggagaacaugcaaaagccauaggaaauugcccaauaugggugaaaacaccuuugaagcuugccaauggaaccaaauauagaccuccugcaaaacuauuaaaggaaagggguuucuucggagcuauugcugguuuccuagaaggaggaugggaaggaaugauugcagguuggcacggauacacaucucacggagcacauggaguggcaguugcggcagaccuuaagaguacacaagaagcuauaaacaagauaacaaaaaaucucaacucuuugagugagcuagaaguaaagaaucuucaaagacuaaguggugccauggaugaacuccacaacgaaauacucgagcuggaugagaaaguggaugaucucagagcugacacuauaagcucacaaauagaacuugcagucuugcuuuccaacgaaggaauaauaaacagugaagacgagcaucuauuggcacuugagagaaaacuaaagaaaaugcugggucccucugcuguagacauaggaaauggaugcuucgaaaccaaacacaaaugcaaccagaccugcuuagacaggauagcugcuggcaccuuuaaugcaggagaguuuucucuccccacuuuugauucauugaacauuacugcugcaucuuuaaaugaugauggauuggauaaccauacuauacugcucuauuacucaacugcugcuucuaguuuggcuguaacauugaugcuagcuauuuuuauuguuuauauggucuccagagacaacguuucaugcuccaucugucuauaa

SEQ ID NO: 59684 - RNA, 1755 nt, Artificial Sequence
  derived and/or modified CDS sequence (wt) from hemagglutinin__InfluenzaB__AGX23479
augaaggcaauaauuguacuacucaugguaguaacauccaaugcagaucgaaucugcacugggauaacaucuucaaacucaccucauguggucaaaacagcuacucaaggggaggucaaugugacuggugugauaccacugacaacaacaccaacaaaaucuuauuuugcaaaucucaaaggaacaaggaccagagggaaacuaugcccagacugucucaacuguacagaucuggauguggccuugggcagaccaauguguguggggaccacaccuucugcgaaagcuucaauacuccacgaagucagaccuguuacauccgggugcuuuccuauaaugcacgacagaacaaaaaucaggcaacuagccaaucuucucagaggauaugaaaauaucagguuaucaacccaaaacguuaucgaugcagaaaaggcaccaggaggacccuacagacuuggaaccucaggaucuugcccuaacgcuaccaguaaaagcggauuuuucgcaacaauggcuugggcugucccaaaggacaacaacaaaaaugcaacgaacccacuaacaguagaaguaccauacauuuguacagaaggggaagaccaaauuacuguuuggggguuccauucagauaacaaaacccaaaugaagaaccucuauggagacucaaauccucaaaaguucaccucaucugcuaauggaguaaccacacauuauguuucucagauuggcggcuucccagaucaaacagaagacggaggacuaccacaaagcggcagaauugucguugauuacaugaugcaaaaaccugggaaaacaggaacaauugucuaucaaagagguguuuuguugccucaaaagguguggugcgcgaguggcaggagcaaaguaauaaaaggguccuugccuuuaauuggugaagcagauugccuucaugaaaaauacgguggauuaaacaaaagcaagccuuacuacacaggagaacaugcaaaagccauaggaaauugcccaauaugggugaaaacaccuuugaaacuugccaauggaaccaaauauagaccuccugcaaaacuauuaaaggaaagggguuucuucggagcuauugcugguuuccuagaaggaggaugggaaggaaugauugcagguuggcacggauacacaucucacggagcacauggaguggcaguugcggcagaccuuaagaguacacaagaagcuauaaacaagauaacaaaaaaucucaacucuuugagugagcuggaaguaaagaaucuucaaagacuaaguggugccauggaugaacuccacaacgaaauacucgagcuggaugagaaaguggaugaucucagagcugacacuauaagcucacaaauagaacuugcagucuugcuuuccaacgaaggaauaauaaacagugaagacgagcaucuauuggcacuugagagaaaacuaaagaaaaugcugggucccucugcuguagacauaggaaauggaugcuucgaaaccaaacacaaaugcaaccagaccugcuuagacaggauagcugcuggcaccuuuaaugcaggagaauuuucucuccccacuuuugauucauugaacauuacugcugcaucuuuaaaugaugauggauuggauaaccauacuauacugcucuauuacucaacugcugcuucuaguuuggcuguaacauugaugcuagcuauuuuuauuguuuauauggucuccagagacaacguuucaugcuccaucugucuauaa

SEQ ID NO: 59685 - RNA, 1755 nt, Artificial Sequence
  derived and/or modified CDS sequence (wt) from hemagglutinin__InfluenzaB__AGX23490
augaaggcaauaauuguacuacucaugguaguaacauccaaugcagaucgaaucugcacugggauaacaucuucaaacucaccucauguggucaaaacagcuacucaaggggaggucaaugugacuggugugauaccacuaacaacaacaccaacaaaaucuuauuuugcaaaucucaaaggaacaaggaccagagggaaacuaugcccagacugucucaacuguacagaucuggauguggccuugggcagaccaauguguguggggaccacaccuucugcgaaagcuucaauacuccacgaagucagaccuguuacauccgggugcuuuccuauaaugcacgacaggacaaaaaucaggcaacuagccaaucuucucagaggauaugaaaauaucagguuaucaacccaaaacguuaucgaugcagaaaaggcaccaggaggacccuacagacuuggaaccucaggaucuugcccuaacgcuaccaguaaaagcggauuuuucgcaacaauggcuugggcugucccaaaggacaacaacaaaaacgcaacgaacccacuaacaguagaaguaccauacauuuguacagaaggggaagaccaaauuacuguuuggggguuccauucagauaacaaaacccaaaugaagaaccucuauggagacucaaauccucaaaaguucaccucaucugcuaauggaguaaccacacauuauguuucucaaauuggcggcuucccagaucaaacagaagacggaggacuaccacaaagcggcagaauugucguugauuacaugaugcaaaaaccugggaaaacaggaacaauugucuaucaaagagguguuuuguugccucaaaagguguggugcgcgaguggcaggagcaaaguaauaaaaggguccuugccuuuaauuggugaagcagauugccuucaugaaaaauacgguggauuaaauaaaagcaagccuuacuacacaggagaacaugcaaaagccauaggaaauugcccaauaugggugaaaacaccuuugaagcuugccaauggaaccaaauauagaccuccugcaaaacuauuaaaggaaagggguuucuucggagcuauugcugguuuccuagaaggaggaugggaaggaaugauugcagguuggcacggauacacaucucacggagcacauggaguggcaguugcggcagaccuuaagaguacacaagaagcuauaaacaagauaacaaaaaaucucaacucuuugagugagcuagaaguaaagaaucuucaaagacuaaguggugccauggaugaacuccacaacgaaauacucgagcuggaugagaaaguggaugaucucagagcugacacuauaagcucacaaauagaacuugcaguuuugcuuuccaacgaaggaauaauaaacagugaagacgagcaucuauuggcacuugagagaaaacugaagaaaaugcugggucccucugcuguagacauaggaaauggaugcuucgaaaccaaacacaaaugcaaccagaccugcuuagacaggauagcugcuggcaccuuuaaugcaggagaauuuucucucccuacuuuugauucauugaacauuacugcugcaucuuuaaaugaugauggauuggauaaccauacuauacugcucuauuacucaacugcugcuucuaguuuggcuguaacauugaugcuagccauuuuuauuguuuauauggucuccagagacaacguuucaugcuccaucugucuauaa

SEQ ID NO: 59686 - RNA, 1755 nt, Artificial Sequence
  derived and/or modified CDS sequence (wt) from hemagglutinin__InfluenzaB__AGX23501
augaaggcaauaauuguacuacucaugguaguaacauccaaugcagaucgaaucugcacuggaauaacaucuucaaacucaccucauguggucaaaacagccacucaaggggaggucaaugugacuggugugauaccacuaacaacaacaccaacaaaaucuuauuuugcaaaucucaaaggaacaaggaccagagggaaacuaugcccagacugucucaacugcacagaucuggauguggcuuugggcagaccaauguguguggggaccacaccuucggcgaaagcuucaauacuccacgaagucagaccuguuacauccgggugcuuuccuauaaugcacgacagaacaaaaaucaggcaacuacccaaucuucucagaggauaugaaaauaucaggcuaucaacccaaaacgucaucgaugcggaaaaggcaccaggaggacccuacagacuuggaaccucaggaucuugcccuaacgcuaccaguaagagcggauuuuucgcaacaauggcuugggcugucccaaaggacaacaacaaaaaugcaacgaacccacuaacaguagaaguaccauacauuuguacagaaggggaagaccaaaucacuguuuggggguuccauucagauaacaaaacccaaaugaagaaccucuauggagacucaaacccucaaaaguucaccucaucugcuaauggaguaaccacacacuauguuucucagauuggcagcuucccagaucaaacagaagacggaggacuaccacaaagcggcaggauuguuguugauuacaugaugcaaaaaccugggaaaacaggaacaauugucuaccaaagagguauuuuguugccucaaaagguguggugcgcgaguggcaggagcaaaguaauaaaaggguccuugccuuuaauuggugaagcagauugccuucaugaaaaauacgguggauuaaacaaaagcaagccuuacuacacaggagaacaugcaaaagccauaggaaauugcccaauaugggugaaaacaccuuugaagcuugccaauggaaccaaauauagaccuccugcaaaacuauuaaaggaaagggguuucuucggagcuauugcugguuuccuagaaggaggaugggaaggaaugauugcaggcuggcacggauacacaucucacggagcacauggaguggcaguggcggcggaccuuaagaguacgcaagaagcuauaaacaagauaacaaaaaaucucaauucuuugagugagcuagaaguaaagaaucuucaaagacuaaguggugccauggaugaacuccacaacgaaauacucgagcuggaugagaaaguggaugaucucagagcugacacuauaagcucgcaaauagaacuugcagucuugcuuuccaacgaaggaauaauaaacagugaagaugagcaucuauuggcacuugagagaaaacuaaagaaaaugcugggucccucugcuguagagauaggaaauggaugcuucgaaaccaaacacaagugcaaccagaccugcuuagacaggauagcugcuggcaccuuuaaugcaggagaauuuucucuccccacuuuugauucacugaacauuacugcugcaucuuuaaaugaugauggauuggauaaccauacuauacugcucuauuacucaacugcugcuucuaguuuggcuguaacauugaugcuagcuauuuuuauuguuuauauggucuccagagacaacguuucaugcuccaucugucuauaa

SEQ ID NO: 59687 - RNA, 1755 nt, Artificial Sequence
  derived and/or modified CDS sequence (wt) from hemagglutinin__InfluenzaB__AGX23512
augaaggcaauaauuguacuacucaugguaguaacauccaaugcagaucgaaucugcacugggauaacaucuucaaacucaccucauguggucaaaacagcuacucaaggggaggucaaugugacuggugugauaccacugacaacaacaccaacaaaaucuuauuuugcaaaucucaaaggaacaaagaccagagggaaacuauguccagacugucucaacuguacagaucuggauguggccuugggcaggccaaugugugugggaaccacaccuucugcgaaagcuucaauacuccacgaagucagaccuguuacauccgggugcuuuccuauaaugcacgacagaacaaaaaucaggcaacuagccaaucuucucagaggauaugaaaauaucagguuaucaacccaaaacguuaucgaugcagaaaaggcaccaggaggacccuacagacuuggaaccucaggaucuugcccuaacgcuaccaguaaaagcggauuuuucgcaacaauggcuugggcugucccaaaggacaacaacaaaaaugcaacgaacccacuaacaguagaaguaccauacauuuguacagaaggggaagaccaaauuacuguuuggggguuccauucagauaacaaaacccaaaugaagacccucuauggagacucaaauccucaaaaguucaccucaucugcuaauggaguaaccacacauuauguuucucagauuggcggcuucccagaucaaacagaagacggaggacuaccacaaagcggcagaauugucguugauuacaugaugcaaaaaccugggaaaacaggaacaauugucuaucaaagagguguuuuguugccucaaaagguguggugcgcgaguggcaggagcaaaguaauaaaaggguccuugccuuuaauuggugaagcagauugccuucaugaaaaauacgguggauuaaacaaaagcaagccuuacuacacaggagaacaugcaaaagccauaggaaauugcccaauaugggugaaaacaccuuugaagcuugccaauggaaccaaauauagaccuccugcaaaacuauuaaaggaaagggguuucuucggagcuauugcugguuuccuagaaggaggaugggaaggaaugauugcaggcuggcacggauacacaucucacggagcacauggaguggcaguugcggcagaccuuaagaguacacaagaagcuauaaacaagauaacaaaaaaucucaacucuuugagugagcuagaaguaaagaaucuucaaagacuaaguggugccauggaugaacuccacaacgaaauacucgagcuggaugagaaaguggaugaucucagagcugacacuauaagcucacaaauagaacuugcagucuugcuuuccaacgaaggaauaauaaacagugaagacgagcaucuauuggcacuugagagaaaacuaaagaaaaugcugggucccucugcuguagacauaggaaauggaugcuucgaaaccaaacacaaaugcaaccagaccugcuuagacaggauagcugcuggcaccuuuaaugcaggagaguuuucucuccccacuuuugauucauugaacauuacugcugcaucuuuaaaugaugauggauuggauaaccauacuauacugcucuauuacucaacugcugcuucuaguuuggcuguaacauugaugcuagcuauuuuuauuguuuauauggucuccagagacaacguuucaugcuccaucugucuauaa

SEQ ID NO: 59688 - RNA, 1755 nt, Artificial Sequence; identical to SEQ ID NO: 59055
  derived and/or modified CDS sequence (wt) from hemagglutinin__InfluenzaB__AGX23523

SEQ ID NO: 59689 - RNA, 1755 nt, Artificial Sequence
  derived and/or modified CDS sequence (wt) from hemagglutinin__InfluenzaB__AGX23534
augaaggcaauaauuguacuacucaugguaguaacauccaaugcagaucgaaucugcacugggauaacaucuucaaacucaccucauguggucaaaacagcuacucaaggggaggucaaugugacuggugugauaccacugacaacaacaccaacaaaaucuuauuuugcaaaucucaaaggaacaaagaccagagggaaacuaugcccagacugucucaacuguacagaucuggauguggccuugggcaggccaaugugugugggaaccacaccuucugcgaaagcuucaauacuccacgaagucagaccuguuacauccgggugcuuuccuauaaugcacgacagaacaaaaaucaggcaacuagccaaucuucucagaggauaugaaaauaucagguuaucaacucaaaacguuaucgaugcagaaaaggcaccaggaggacccuacagacuuggaaccucaggaucuugcccuaacgcuaccaguaaaagcggauuuuucgcaacaauggcuugggcugucccaaaggacaacaacaaaaaugcaacgaacccacuaacaguagaaguaccauacauuuguacagaaggggaagaccaaauuacuguuuggggguuccauucagauaacaaaacccaaaugaagaaccucuauggagacucaaauccucaaaaguucaccucaucugcuaauggaguaaccacacauuauguuucucagauuggcggcuucccagaucaaacagaagacggaggacuaccacaaagcggcagaauugucguugauuacaugaugcaaaaaccugggaaaacaggaacaauugucuaucaaagagguguuuuguugccucaaaagguguggugcgcgaguggcaggagcaaaguaauaaaaggguccuugccuuuaauuggugaagcagauugccuucaugaaaaauacgguggauuaaacaaaagcaagccuuacuacacaggagaacaugcaaaagccauaggaaauugcccaauaugggugaaaacaccuuugaagcuugccaauggaaccaaauauagaccuccugcaaaacuauuaaaggaaagggguuucuucggagcuauugcugguuuccuagaaggaggaugggaaggaaugauugcagguuggcacggauacacaucucacggagcacauggaguggcaguugcggcagaccuuaagaguacacaagaagcuauaaacaagauaacaaaaaaucucaacucuuugagugagcuagaaguaaagaaucuucaaagacuaaguggugccauggaugaacuccacaacgaaauacucgagcuggaugagaaaguggaugaucucagagcugacacuauaagcucacaaauagaacuugcagucuugcuuuccaacgaaggaauaauaaacagugaagacgagcaucuauuggcacuugagagaaaacuaaagaaaaugcugggucccucugcuguagacauaggaaauggaugcuucgaaaccaaacacaaaugcaaccagaccugcuuagacaggauagcugcuggcaccuuuaaugcaggagaguuuucucuccccacuuuugauucauugaacauuacugcugcaucuuuaaaugaugauggauuggauaaccauacuauacugcucuauuacucaacugcugcuucuaguuuggcuguaacauugaugcuagcuauuuuuauuguuuauauggucuccagagacaacguuucaugcuccaucugucuauaa

SEQ ID NO: 59690 - RNA, 1755 nt, Artificial Sequence; identical to SEQ ID NO: 59689
  derived and/or modified CDS sequence (wt) from hemagglutinin__InfluenzaB__AGX23545

SEQ ID NO: 59691 - RNA, 1755 nt, Artificial Sequence
  derived and/or modified CDS sequence (wt) from hemagglutinin__InfluenzaB__AGX23556
augaaggcaauaauuguacuacucaugguaguaacauccaaugcagaucgaaucugcacugggauaacaucuucaaacucaccucauguggucaaaacagcuacucaaggggaggucaaugugacuggugugauaccacugacaacaacaccaacaaaaucuuauuuugcaaaucucaaagggacaaggaccagagggaaacuaugcccagacugucucaacuguacagaucuggauguggccuugggcaggccaauguguguggggaccacaccuucugcgaaagcuucaauacuccacgaagucagaccuguuacauccgggugcuuuccuauaaugcacgacagaacaaaaaucaggcaacuagccaaucuucucagaggauaugaaaauaucagguuaucaacccaaaacguuaucgaugcagaaaaggcaccaggaggacccuacagacuuggaaccucaggaucuugcccuaacgcuaccaguaaaagcggauuuuucgcaacaauggcuugggcugucccaaaggacaacaacaaaaaugcaacgaacccacuaacaguagaaguaccauacauuuguacagaaggggaagaccaaauuacuguuugggguuuccauucagauaacaaaacccaaaugaagaaccucuauggagacucaaauccucaaaaguucaccucaucugcuaauggaguaaccacacauuauguuucucagauuggcggcuucccagaucaaacagaagacggaggacuaccacaaagcggcagaauugucguugauuacaugaugcaaaaaccugggaaaacaggaacaauugucuaucaaagagguguuuuguugccucaaaagguguggugcgcgaguggcaggagcaaaguaauaaaaggguccuugccuuuaauuggugaagcagauugccuucaugaaaaauacgguggauuaaacaaaagcaagccuuacuacacaggagaacaugcaaaagccauaggaaauugcccaauaugggugaaaacaccuuugaagcuugccaauggaaccaaauauagaccuccugcaaaacuauuaaaggaaagggguuucuucggagcuauugcugguuuccuagaaggaggaugggaaggaaugauugcagguuggcacggauacacaucucacggagcacauggaguggcaguggcggcagaccuuaagaguacacaagaagcuauaaacaagauaacaaaaaaucucaacucuuugagugagcuagaaguaaagaaccuucaaagacuaaguggugccauggaugaacuccacaacgaaauacucgagcuggaugagaaaguggaugaucucagagcugacacuauaagcucacaaauagaacuugcagucuugcuuuccaacgaaggaauaauaaacagugaagaugagcaucuauuggcacuugagagaaaacuaaagaaaaugcugggucccucugccguagacauaggaaauggaugcuucgaaaccaaacacaaaugcaaccagaccugcuuagacaggauagcugcuggcaccuuuaaugcaggagaauuuucucuccccacuuuugauucauuaaacauuacugcugcaucuuuaaaugaugauggauuggauaaccauacuauacugcucuauuacucaacugcugcuucuaguuuggcuguaacauugaugcuagcuauuuuuauuguuuauauggucuccagagacaacguuucauguuccaucugucuauaa

SEQ ID NO: 59692 - RNA, 1755 nt, Artificial Sequence
  derived and/or modified CDS sequence (wt) from hemagglutinin__InfluenzaB__AGX23567
augaaggcaauaauuguacuacucaugguaguaacauccaaugcagaucgaaucugcacugggauaacaucuucaaacucaccucauguggucaaaacagcuacucaaggggaggucaaugugacuggugugauaccacuaacaacaacaccaacaaaaucuuauuuugcaaaucucaaaggaacaaggaccagagggaaacuaugcccagacugucucaacuguacagaucuggauguggccuugggcagaccaauguguguggggaccacaccuucugcgaaagcuucaauacuccacgaagucagaccuguuacauccgggugcuuuccuauaaugcacgacaggacaaaaaucaggcaacuagccaaucuucucagaggauaugaaaauaucagguuaucaacccaaaacguuaucgaugcagaaaaggcaccaggaggacccuacagacuuggaaccucaggaucuugcccuaacgcuaccaguaaaagcggauuuuuugcaacaauggcuugggcugucccaaaggacaacaacaaaaacgcaacgaacccacuaacaguagaaguaccauacauuuguacagaaggggaagaccaaauuacuguuuggggauuccauucagauaacaaaacccaaaugaagaaccucuauggagacucaaauccucaaaaguucaccucaucugcuaauggaguaaccacacauuauguuucucagauuggcggcuucccagaucaaacagaagacggaggacuaccacaaagcggcagaauugucguugauuacaugaugcaaaaaccugggaaaacaggaacaauugucuaucaaagagguguuuuguugccucaaaagguguggugcgcgaguggcaggagcaaaguaauaaaaggguccuugccuuuaauuggugaagcagauugccuucaugaaaaauacgguggauuaaauaaaagcaagccuuacuacacaggagaacaugcaaaagccauaggaaauugcccaauaugggugaaaacaccuuugaagcuugccaauggaaccaaauauagaccuccugcaaaacuauuaaaggaaagggguuucuucggagcuauugcugguuuccuagaaggaggaugggaaggaaugauugcagguuggcacggauacacaucucacggagcacauggaguggcaguugcggcagaccuuaagaguacacaagaagcuauaaacaagauaacaaaaaaucucaacucuuugagugagcuagaaguaaagaaucuucaaagacuaaguggugccauggaugaacuccacaacgaaauacucgagcuggaugagaaaguggaugaucucagagcugacacuauaagcucacaaauagaacuugcaguuuugcuuuccaacgaaggaauaauaaacagugaagacgagcaucuauuggcacuugagagaaaacugaagaaaaugcugggucccucugcuguagacauaggaaauggaugcuucgaaaccaaacacaaaugcaaccagaccugcuuagacaggauagcugcuggcaccuuuaaugcaggagaauuuucucucccuacuuuugauucauugaacauuacugcugcaucuuuaaaugaugauggauuggauaaccauacuauacugcucuauuacucaacugcugcuucuaguuuggcuguaacauugaugcuagccauuuuuauuguuuauauggucuccagagacaacguuucaugcuccaucugucuauaa

SEQ ID NO: 59693 - RNA, 1755 nt, Artificial Sequence; identical to SEQ ID NO: 59054
  derived and/or modified CDS sequence (wt) from hemagglutinin__InfluenzaB__AGX23578

SEQ ID NO: 59694 - RNA, 1755 nt, Artificial Sequence
  derived and/or modified CDS sequence (wt) from hemagglutinin__InfluenzaB__AGX23600
augaaggcaauaauuguacuacucaugguaguaacauccaaugcagaucgaaucugcacugggauaacaucuucaaacucaccucauguggucaaaacagcuacucaaggggaggucaaugugacuggugugauaccacugacaacaacaccaacaaaaucuuauuuugcaaaucucaaaggaacaaggaccagaggaaaacuaugcccagacugucucaacuguacagaucuggauguggccuugggcagaccaauguguguggggaccacaccuucugcaaaagcuucaauacuccacgaagucagaccuguuacauccgggugcuuuccuauaaugcacgacagaacaaaaaucaggcaacuagccaaucuucucagaggauaugaaaauaucagguuaucaacccaaaacguuaucgaugcagaaaaggcaccaggaggacccuacagacuuggaaccucaggaucuugcccuaacgcuaccaguaaaagcggauuuuucgcaacaauggcuugggcugucccaaaggacaacaacaaaaaugcaacgaacccacuaacaguagaaguaccauacauuuguacagaaggggaagaccaaauuacuguuuggggguuucauucagauaacaaaacccaaaugaagaaccucuauggagacucaaauccucaaaaguucaccucaucugcuaauggaguaaccacacauuauguuucucagauuggcggcuucccagaucaaacagaagacggaggacuaccacaaagcggcagaauugucguugauuacaugaugcaaaaaccugggaaaacaggaacaauugucuaucaaagagguguuuuguugccucaaaagguguggugcgcgaguggcaggagcaaaguaauaaaaggguccuugccuuuaauuggugaagcagauugccuucaugaaaaauacgguggauuaaacaaaagcaagccuuacuacacaggagaacaugcaaaagccauaggaaauugcccaauaugggugaaaacaccuuugaagcuugccaauggaaccaaauauagaccuccugcaaaacuauuaaaggaaagggguuucuucggagcuauugcugguuuccuagaaggaggaugggaaggaaugauugcagguuggcacggauacacaucucacggagcgcauggaguggcaguugcggcagaccuuaagaguacacaagaagcuauaaacaagauaacaaaaaaucucaacucuuugagugagcuagaaguaaagaaucuucaaagacuaaguggugccauggaugaacuccacaacgaaauacucgagcuggaugagaaaguggaugaucucagagcugacacuauaagcucacaaauagaacuugcagucuugcuuuccaacgaaggaauaauaaacagugaagacgagcaucuauuggcacuugagagaaaacuaaagaaaaugcugggucccucugcuguagacauaggaaauggaugcuucgaaaccaaacacaaaugcaaccagaccugcuuagacaggauagcugcuggcaccuuuaaugcaggagaauuuucucuccccacuuuugauucauugaacauuacugcugcaucuuuaaaugaugauggauuggauaaccauacuauacugcucuauuacucaacugcugcuucuaguuuggcuguaacauugaugcuagcuauuuuuauuguuuauauggucuccagagacaacguuucaugcuccaucugucuauaa

SEQ ID NO: 59695 - RNA, 1755 nt, Artificial Sequence
  derived and/or modified CDS sequence (wt) from hemagglutinin__InfluenzaB__AGX23611
augaaggcaauaauuguacuacucaugguaguaacauccaaugcagaucgaaucugcacugggauaacaucuucaaacucaccucauguggucaaaacagcuacucaaggggaggucaaugugacuggugugauaccacugacaacaacaccaacaaaaucuuauuuugcaaaucucaaagggacaaggaccagagggaaacuaugcccagacugucucaauuguacagaucuggauguggccuugggcaggccaauguguguggggaccacaccuucugcgaaagcuucaauacuccacgaagucagaccuguuacauccgggugcuuuccuauaaugcacgacagaacaaaaaucaggcaacuagccaaucuucucagaggauaugaaaauaucagguuaucaacccaaaacguuaucgaugcagaaaaggcaccaggaggacccuacagacuuggaaccucaggaucuugcccuaacgcuaccaguaaaagcggauuuuucgcaacaauggcuugggcugucccaaaggacaacaacaaaaaugcaacgaacccacuaacaguagaaguaccauacauuuguacagaaggggaagaucaaauuacuguuuggggguuccauucagauaacaaaacccaaaugaagaaccucuauggagacucaaauccucaaaaguucaccucaucugcuaauggaguaaccacacauuauguuucucagauuggcggcuucccagaucaaacagaagacggaggacuaccacaaagcggcagaauugucguugauuacaugaugcaaaaaccugggaaaacaggaacaauugucuaucaaagagguguuuuguugccucaaaagguguggugcgcgaguggcaggagcaaaguaauaaaaggguccuugccuuuaauuggugaagcagauugccuucaugaaaaauacgguggauuaaacaaaagcaagccuuacuacacaggagaacaugcaaaagccauaggaaauugcccaauaugggugaaaacaccuuugaagcuugccaauggaaccaaauauagaccuccugcaaaacuauuaaaggaaagggguuucuucggagcuauugcugguuuccuagaaggaggaugggaaggaaugauugcagguuggcacggauacacaucucacggagcacauggaguggcaguggcggcagaucuuaagaguacacaagaagcuauaaacaagauaacaaaaaaucucaacucuuugagugagcuagaaauaaagaaccuucaaagacuaaguggugccauggaugaacuccacaacgaaauacucgagcuggaugagaaaguggaugaucucagagcugacacuauaagcucacaaauagaacuugcagucuugcuuuccaacgaaggaauaauaaacagugaagaugagcaucuauuggcacuugagagaaaacuaaagaaaaugcugggucccucugccguagacauaggaaauggaugcuucgaaaccaaacacaaaugcaaccagaccugcuuagacaggauagcugcuggcaccuuuaaugcaggagaauuuucucuccccacuuuugauucauugaacauuacugcugcaucuuuaaaugaugauggauuggauaaccauacuauacugcucuauuacucaacugcugcuucuaguuuggcuguaacauugaugcuagcuauuuuuauuguuuauauggucuccagagacaacguuucaugcuccaucugucuauaa

SEQ ID NO: 59696 - RNA, 1755 nt, Artificial Sequence; identical to SEQ ID NO: 59054
  derived and/or modified CDS sequence (wt) from hemagglutinin__InfluenzaB__AGX23622

SEQ ID NO: 59697 - RNA, 1755 nt, Artificial Sequence
  derived and/or modified CDS sequence (wt) from hemagglutinin__InfluenzaB__AGX23633
augaaggcaauaauuguacuacucaugguaguaacauccaaugcagaucgaaucugcacugggauaacaucuucaaacucaccucauguggucaaaacagcuacucaaggggaggucaaugugacuggugugauaccacugacaacaacaccaacaaaaucuuauuuugcaaaucucaaaggaacaaagaccagagggaaacuaugcccagacugucucaacuguacagaucuggauguggccuugggcaggccaaugugugugggaaccacaccuucugcgaaagcuucaauacuccacgaagucagaccuguuacauccgggugcuuuccuauaaugcacgacagaacaaaaaucaggcaacuagccaaucuucucagaggauaugagaauaucagguuaucaacccaaaacguuaucgaugcagaaaaggcaccgggaggacccuacagacuuggaaccucaggaucuugcccuaacgcuaccaguaaaagcggauuuuucgcaacaauggcuugggcugucccaaaggacaacaacaaaaaugcaacgaacccacuaacaguagaaguaccauacauuuguacagaaggggaagaccaaauuacuguuuggggguuccauucagauaacaaaacccaaaugaagaaccucuauggagacucaaauccucaaaaguucaccucaucugcuaauggaguaaccacacauuauguuucucagauuggcggcuucccagaucaaacagaagacggaggacuaccacaaagcggcagaauugucguugauuacaugaugcaaaaaccugggaaaacaggaacaauugucuaucaaagagguguuuuguugccucaaaagguguggugcgcgaguggcaggagcaaaguaauaaaaggguccuugccuuuaauuggugaagcagauugccuucaugaaaaauacgguggauuaaacaaaagcaagccuuacuacacaggagaacaugcaaaagccauaggaaauugcccaauaugggugaaaacaccuuugaagcuugccaauggaaccaaauauagaccuccugcaaaacuauuaaaggaaagggguuucuucggagcuauugcugguuuccuagaaggaggaugggaaggaaugauugcagguuggcacggauacacaucucacggagcacauggaguggcaguugcggcagaccuuaagaguacacaagaagcuauaaacaagauaacaaaaaaucucaacucuuugagugagcuagaaguaaagaaucuucaaagacuaaguggugccauggaugaacuccacaacgaaauacucgagcuggaugagaaaguggaugaucucagagcugacacuauaagcucacaaauagaacuugcagucuugcuuuccaacgaaggaauaauaaacagugaagacgagcaucuauuggcacuugagagaaaacuaaagaaaaugcugggucccucugcuguagacauaggaaauggaugcuucgaaaccaaacacaaaugcaaccagaccugcuuagacaggauagcugcuggcaccuuuaaugcaggagaguuuucucuccccacuuuugauucauugaacauuacugcugcaucuuuaaaugaugauggauuggauaaccauacuauacugcucuauuacucaacugcugcuucuaguuuggcuguaacauugaugcuagcuauuuuuauuguuuauauggucuccagagacaacguuucaugcuccaucugucuauaa

SEQ ID NO: 59698 - RNA, 1755 nt, Artificial Sequence; identical to SEQ ID NO: 59056
  derived and/or modified CDS sequence (wt) from hemagglutinin__InfluenzaB__AGX23644

SEQ ID NO: 59699 - RNA, 1755 nt, Artificial Sequence; identical to SEQ ID NO: 59055
  derived and/or modified CDS sequence (wt) from hemagglutinin__InfluenzaB__AGX23655

SEQ ID NO: 59700 - RNA, 1755 nt, Artificial Sequence; identical to SEQ ID NO: 59056
  derived and/or modified CDS sequence (wt) from hemagglutinin__InfluenzaB__AGX23666

SEQ ID NO: 59701 - RNA, 1755 nt, Artificial Sequence
  derived and/or modified CDS sequence (wt) from hemagglutinin__InfluenzaB__AGX23677
augaaggcaauaauuguacuacucaugguaguaacauccaaugcagaucgaaucugcacugggauaacaucuucaaacucaccucauguggucaaaacagcuacucaaggggaggucaaugugacuggugugauaccacugacaacaacaccaacaaaaucuuauuuugcaaaucucaaaggaacaaagaccagagggaaacuaugcccagacugucucaacuguacagaucuggauguggccuugggcaggccaaugugugugggaaccacaccuucugcgaaagcuucaauacuccacgaagucagaccuguuacauccgggugcuuuccuauaaugcacgacagaacaaaaaucaggcaacuagccaaucuucuuagaggauaugaaaagaucagguuaucaacucaaaacguuaucgaugcagaaaaggcaccaggaggacccuacagacuuggaaccucaggaucuugcccuaacgcuaccaguaaaagcggauuuuucgcaacaauggcuugggcugucccaaaggacaacaacaaaaaugcaacgaacccacuaacaguagaaguaccauacauuuguauagaaggggaagaccaaauuacuguuuggggguuccauucagauaauaaaacccaaaugaagaaccucuauggagacucaaauccucaaaaguucaccucaucugcuaauggaguaaccacacauuauguuucucagauuggcggcuucccagaucaaacagaagacggaggacuaccacaaagcggcagaauugucguugauuacaugaugcaaaaaccugggaaaacaggaacaauugucuaucaaagagguguuuuguugccucaaaagguguggugcgcgaguggcaggagcaaaguaauaaaaggguccuugccuuuaauuggugaagcagauugccuucaugaaaaauacgguggauuaaacaaaagcaagccuuacuacacaggagaacaugcaaaagccauaggaaauugcccaauaugggugaaaacaccuuugaagcuugccaauggaaccaaauauagaccuccugcaaaacuauuaaaggaaagggguuucuucggagcuauugcugguuuccuagaaggaggaugggaaggaaugauugcagguuggcacggauacacaucucacggagcacauggaguggcaguugcggcagaccuuaagaguacacaagaagcuauaaacaagauaacaaaaaaucucaacucuuugagugagcuagaaguaaagaaucuucaaagacuaaguggugccauggaugaacuccacaacgaaauacucgagcuggaugagaaaguggaugaucucagagcugacacuauaagcucacaaauagaacuugcagucuugcuuuccaacgaaggaauaauaaacagugaagacgagcaucuauuggcacuugagagaaaacuaaagaaaaugcugggucccucugcuguagacauaggaaauggaugcuucgaaaccaaacacaaaugcaaccagaccugcuuagacaggauagcugcuggcaccuuuaaugcaggagaguuuucucuccccacuuuugauucauugaacauuacugcugcaucuuuaaaugaugauggauuggauaaucauacuauacugcucuauuacucaacugcugcuucuaguuuggcuguaacauugaugcuagcuauuuucauuguuuauauggucuccagagacaacguuucaugcuccaucugucuauaa

SEQ ID NO: 59702 - RNA, 1755 nt, Artificial Sequence; identical to SEQ ID NO: 59056
  derived and/or modified CDS sequence (wt) from hemagglutinin__InfluenzaB__AGX23688

SEQ ID NO: 59703 - RNA, 1755 nt, Artificial Sequence
  derived and/or modified CDS sequence (wt) from hemagglutinin__InfluenzaB__AGX23699
augaaggcaauaauuguacuacucaugguaguaacauccaaugcagaucgaaucugcacugggauaacaucuucaaacucaccucauguggucaaaacagcuacucaaggggaggucaaugugacuggugugauaccacugacaacaacaccaacaaaaucuuauuuugcaaaucucaaaggaacaaagaccagagggaaacuaugcccagacugucucaacuguacagaucuggauguagccuugggcaggccaaugugugugggaaccacaccuucugcgaaagcuucaauacuccacgaagucagaccuguuacauccgggugcuuuccuauaaugcacgacagaacaaaaaucaggcaacuagccaaucuucucagaggauaugaaaauaucagguuaucaacccaaaacguuaucgaugcagaaaaggcaccgggaggacccuacagacuuggaaccucaggaucuugcccuaacgcuaccaguaaaagcggauuuuucgcaacaauggcuugggcugucccaaaggacaacaacaaaaaugcaacgaacccacuaacaguagaaguaccauacauuuguacagaaggggaagaccaaauuacuguuuggggguuccauucagauaacaaaacccaaaugaagaaccucuauggagacucaaauccucaaaaguucaccucaucugcuaauggaguaaccacacauuauguuucucagauuggcggcuucccagaucaaacagaagacggaggacuaccacaaagcggcagaauugucguugauuacaugaugcaaaaaccugggaaaacaggaacaauugucuaucaaagagguguuuuguugccucaaaagguguggugcgcgaguggcaggagcaaaguaauaaaaggguccuugccuuuaauuggugaagcagauugccuucaugaaaaauacgguggauuaaacaaaagcaagccuuacuacacaggagaacaugcaaaagccauaggaaauugcccaauaugggugaaaacaccuuugaagcuugccaauggaaccaaauauagaccuccugcaaaacuauuaaaggaaagggguuucuucggagcuauugcugguuuccuagaaggaggaugggaaggaaugauugcagguuggcacggauacacaucucacggagcacauggaguggcaguugcggcagaccuuaagaguacacaagaagcuauaaacaagauaacaaaaaaucucaacucuuugagugagcuagaaguaaagaaucuucaaagacuaaguggugccauggaugaacuccacaacgaaauacucgagcuggaugagaaaguggaugaucucagagcugacacuauaagcucacaaauagaacuugcagucuugcuuuccaacgaaggaauaauaaacagugaagacgagcaucuauuggcacuugagagaaaacuaaagaaaaugcugggucccucugcuguagacauaggaaauggaugcuucgaaaccaaacacaaaugcaaccagaccugcuuagacaggauagcugcuggcaccuuuaaugcaggagaguuuucucuccccacuuuugauucauugaacauuacugcugcaucuuuaaaugaugauggauuggauaaccauacuauacugcucuauuacucaacugcugcuucuaguuuggcuguaacauugaugcuagcuauuuuuauuguuuauauggucuccagagacaacguuucaugcuccaucugucuauaa

SEQ ID NO: 59704 - RNA, 1755 nt, Artificial Sequence; identical to SEQ ID NO: 59054
  derived and/or modified CDS sequence (wt) from hemagglutinin__InfluenzaB__AGX23710

SEQ ID NO: 59705 - RNA, 1755 nt, Artificial Sequence; identical to SEQ ID NO: 59056
  derived and/or modified CDS sequence (wt) from hemagglutinin__InfluenzaB__AGX23721

SEQ ID NO: 59706 - RNA, 1755 nt, Artificial Sequence
  derived and/or modified CDS sequence (wt) from hemagglutinin__InfluenzaB__AGX23732
augaaggcaauaauuguacuacucaugguaguaacauccaaugcagaucgaaucugcacugggauaacaucuucaaacucaccucauguggucaaaacagcuacucaaggggaggucaaugugacuggugugauaccacuaacaacaacaccaacaaaaucuuauuuugcaaaucucaaaggaacaaggaccagagggaaacuaugcccagacugucucaacuguacagaucuggauguggccuugggcagaccaauguguguggggaccacaccuucugcgaaagcuucaauacuccacgaagucagaccuguuacauccgggugcuuuccuauaaugcacgacaggacaaaaaucaggcaacuagccaaucuucucagaggauaugaaaauaucagguuaucaacccaaaacguuaucgaugcagaaaaggcaccaggaggacccuacagacuuggaaccucaggaucuugcccuaacgcuaccaguaaaagcggauuuuucgcaacaauggcuugggcugucccaaaggacaacaacaaaaacgcaacgaacccacuaacaguagaaguaccauacauuuguacagaaggggaagaccaaauuacuguuuggggauuccauucagauaacaaaacccaaaugaagaaccucuauggagacucaaauccucaaaaguucaccucaucugcuaauggaguaaccacacauuauguuucucagauuggcggcuucccagaucaaacagaagacggaggacuaccacaaagcggcagaauugucguugauuacaugaugcaaaaaccugggaaaacaggaacaauugucuaucaaagagguguuuuguugccucaaaagguguggugcgcgaguggcaggagcaaaguaauaaaaggguccuugccuuuaauuggugaagcagauugccuucaugaaaaauacgguggauuaaauaaaagcaagccuuacuacacaggagaacaugcaaaagccauaggaaauugcccaauaugggugaaaacaccuuugaagcuugccaauggaaccaaauauagaccuccugcaaaacuauuaaaggaaagggguuucuucggagcuauugcugguuuccuagaaggaggaugggaaggaaugauugcagguuggcacggauacacaucucacggagcacauggaguggcaguugcggcagaccuuaagaguacacaagaagcuauaaacaagauaacaaaaaaucucaacucuuugagugagcuagaaguaaagaaucuucaaagacuaaguggugccauggaugaacuccacaacgaaauacucgagcuggaugagaaaguggaugaucucagagcugacacuauaagcucacaaauagaacuugcaguuuugcuuuccaacgaaggaauaauaaacagugaagacgagcaucuauuggcacuugagagaaaacugaagaaaaugcugggucccucugcuguagacauaggaaauggaugcuucgaaaccaaacacaaaugcaaccaaaccugcuuagacaggauagcugcuggcaccuuuaaugcaggagaauuuucucucccuacuuuugauucauugaacauuacugcugcaucuuuaaaugaugauggauuggauaaccauacuauacugcucuauuacucaacugcugcuucuaguuuggcuguaacauugaugcuagccauuuuuauuguuuauauggucuccagagacaacguuucaugcuccaucugucuauaa

SEQ ID NO: 59707 - RNA, 1755 nt, Artificial Sequence; identical to SEQ ID NO: 59056
  derived and/or modified CDS sequence (wt) from hemagglutinin__InfluenzaB__AGX23743

SEQ ID NO: 59708 - RNA, 1755 nt, Artificial Sequence
  derived and/or modified CDS sequence (wt) from hemagglutinin__InfluenzaB__AGX23754
augaaggcaauaauuguacuacucaugguaguaacauccaaugcagaucgaaucugcacugggauaacaucuucaaacucaccccauguggucaaaacagcuacucaaggggaggucaaugugacuggugugauaccacugacaacaacaccaacaaaaucuuauuuugcaaaucucaaaggaacaaagaccagagggaaacuaugcccagacugucucaacuguacagaucuggauguggccuugggcaggccaaugugugugggaaccacaccuucugcgaaagcuucaauacuccacgaagucagaccuguuacauccgggugcuuuccuauaaugcacgacagaacaaaaaucaggcaacuagccaaucuucucagaggauaugaaaauaucagguuaucaacccaaaacguuaucgaugcagaaaaggcaccaggaggacccuacagacuuggaaccucaggaucuugcccuaacgcuaccaguaaaagcggauuuuucgcaacaauggcuugggcugucccaaaggacaauaacaaaaaugcaacgaacccacuaacaguagaaguaccauacauuuguacagaaggggaagaccaaauuacuguuuggggguuccauucagauaacaaaacccaaaugaagaaccucuauggagacucaaauccucaaaaguucaccucaucugcuaauggaguaaccacacauuauguuucucagauuggcggcuucccagaucaaacagaagacggaggacuaccacaaagcggcagaauugucguugauuacaugaugcaaaaaccugggaaaacaggaacaauugucuaucaaagagguguuuuguugccucaaaagguguggugcgcgaguggcaggagcaaaguaauaaaaggguccuugccuuuaauuggugaagcagauugccuucaugaaaaauacgguggauuaaacaaaagcaagccuuacuacacaggagaacaugcaaaagccauaggaaauugcccaauaugggugaaaacaccuuugaagcuugccaauggaaccaaauauagaccuccugcaaaacuauuaaaggaaagggguuucuucggagcuauugcugguuuccuagaaggaggaugggaaggaaugauugcagguuggcacggauacacaucucacggagcacauggaguggcaguugcggcagaccuuaagaguacacaagaagcuauaaacaagauaacaaaaaaucucaacucuuugagugagcuagaaguaaagaaucuucaaagacuaaguggugccauggaugaacuccacaacgaaauacucgagcuggaugagaaaguggaugaucucagagcugacacuauaagcucacaaauagaacuugcagucuugcuuuccaacgaaggaauaauaaacagugaagacgagcaucuauuggcacuugagagaaaacuaaagaaaaugcugggucccucugcuguagacauaggaaauggaugcuucgaaaccaaacacaaaugcaaccagaccugcuuagacaggauagcugcuggcaccuuuaaugcaggagaguuuucucuccccacuuuugauucauugaacauuacugcugcaucuuuaaaugaugauggauuggauaaccauacuauacugcucuauuacucaacugcugcuucuaguuuggcuguaacauugaugcuagcuauuuuuauuguuuauauggucuccagagacaacguuucaugcuccaucugucuauaa

SEQ ID NO: 59709 - RNA, 1755 nt, Artificial Sequence; identical to SEQ ID NO: 59054
  derived and/or modified CDS sequence (wt) from hemagglutinin__InfluenzaB__AGX23765

SEQ ID NO: 59710 - RNA, 1755 nt, Artificial Sequence
  derived and/or modified CDS sequence (wt) from hemagglutinin__InfluenzaB__AGX23776
augaaggcaauaauuguacuacucaugguaguaacauccaaugcagaucgaaucugcacugggauaacaucuucaaacucaccucauguggucaaaacagcuacucaaggggaggucaaugugacuggugugauaccacugacaacaacaccaacaaaaucuuauuuugcaaaucucaaaggaacaaagaccagagggaaacuaugcccagacugucucaacuguacagaucuggauguggccuugggcaggccaaugugugugggaaccacaccuucugcgaaagcuucaauacuccacgaagucagaccuguuacauccgggugcuuuccuauaaugcacgacagaacaaaaaucaggcaacuagccaaucuucucagaggauaugaaaauaucagguuaucaacccaaaacguuaucgaugcagaaaaggcaccgggaggacccuacagacuuggaaccucaggaucuugcccuaacgcuaccaguaaaagcggauuuuucgcaacaauggcuugggcugucccaaaggacaacaacaaaaaugcaacgaacccacuaacaguagaaguaccauacauuuguacagaaggggaagaccaaauuacuguuuggggguuccauucagauaacaaaacccaaaugaagaaccucuauggagacucaaauccucaaaaguucaccucaucugcuaauggaguaaccacacauuauguuucccagauuggcggcuucccagaucaaacagaagacggaggacuaccacaaagcggcagaauugucguugauuacaugaugcaaaaaccugggaaaacaggaacaauugucuaucaaagagguguuuuguugccucaaaagguguggugcgcgaguggcaggagcaaaguaauaaaaggguccuugccuuuaauuggugaagcagauugccuucaugaaaaauacgguggauuaaacaaaagcaagccuuacuacacaggagaacaugcaaaagccauaggaaauugcccaauaugggugaaaacaccuuugaagcuugccaauggaaccaaauauagaccuccugcaaaacuauuaaaggaaagggguuucuucggagcuauugcugguuuccuagaaggaggaugggaaggaaugauugcagguuggcacggauacacaucucacggagcacauggaguggcaguugcggcagaccuuaagaguacacaagaagcuauaaacaagauaacaaaaaaucucaacucuuugagugagcuagaaguaaagaaucuucaaagacuaaguggugccauggaugaacuccacaacgaaauacucgagcuggaugagaaaguggaugaucucagagcugacacuauaagcucacaaauagaacuugcagucuugcuuuccaacgaaggaauaauaaacagugaagacgagcaucuauuggcacuugagagaaaacuaaagaaaaugcugggucccucugcuguagacauaggaaauggaugcuucgaaaccaaacacaaaugcaaccagaccugcuuagacaggauagcugcuggcaccuuuaaugcaggagaguuuucucuccccacuuuugauucauugaacauuacugcugcaucuuuaaaugaugauggauuggauaaccauacuauacugcucuauuacucaacugcugcuucuaguuuggcuguaacauugaugcuagcuauuuuuauuguuuauauggucuccagagacaacguuucaugcuccaucugucuauaa

SEQ ID NO: 59711 - RNA, 1755 nt, Artificial Sequence
  derived and/or modified CDS sequence (wt) from hemagglutinin__InfluenzaB__AGX23787
augaaggcaauaauuguacuacucaugguaguaacauccaaugcagaucgaaucugcacugggauaacaucuucaaacucaccucauguggucaaaacagcuacucaaggggaggucaaugugacuggugugauaccacugacaacaacaccaacaaaaucuuauuuugcaaaucucaaaggaacaaagaccagagggaaacuaugcccagacugucucaacuguacagaucuggauguggccuugggcaggccaaugugugugggaaccacaccuucugcgaaagcuucaauacuccacgaagucagaccuguuacauccgggugcuuuccuauaaugcacgacagaacaaaaaucaggcaacuagccaaucuucucagaggauaugaaaauaucagguuaucaacccaaaacguuaucgaugcagaaaaggcaccgggaggacccuacagacuuggaaccucaggaucuugcccuaacgcuaccaguaaaagcggauuuuucgcaacaauggcuugggcugucccaaaggacaacaacaaaaaugcaacgaacccacuaacaguagaaguaccauacauuuguacagaaggggaagaccaaauuacuguuuggggguuccauucagauaacaaaacccaaaugaagaaccucuauggagacucaaauccucaaaaguucaccucaucugcuaauggaguaaccacacauuauguuucucagauuggcggcuucccagaucaaacagaagacggaggacuaccacaaagcggcagaauugucguugauuacaugaugcaaaaaccugggaaaacaggaacaauugucuaucaaagagguguuuuguugccucaaaagguguggugcgcgaguggcaggagcaaaguaauaaaaggguccuugccuuuaauuggugaagcagauugccuucaugaaaaauacgguggauuaaacaaaagcaagccuuacuacacaggagaacaugcaaaagccauaggaaauugcccaauaugggugaaaacaccuuugaagcuugccaauggaaccaaauauagaccuccugcaaaacuauuaaaggaaagggguuucuucggagcuauugcugguuuccuagaaggaggaugggaaggaaugauugcagguuggcacggauacacaucucacggagcacauggaguggcaguugcggcagaccuuaagaguacacaagaagcuauaaacaagauaacaaaaaaucucaacucuuugagugagcuagaagugaagaaucuucaaagacuaaguggugccauggaugaacuccacaacgaaauacucgagcuggaugagaaaguggaugaucucagagcugacacuauaagcucacaaauagaacuugcagucuugcuuuccaacgaaggaauaauaaacagugaagacgagcaucuauuggcacuugagagaaaacuaaagaaaaugcugggucccucugcuguagacauaggaaauggaugcuucgaaaccaaacacaaaugcaaccagaccugcuuagacaggauagcugcuggcaccuuuaaugcaggagaguuuucucuccccacuuuugauucauugaacauuacugcugcaucuuuaaaugaugauggauuggauaaccauacuauacugcucuauuacucaacugcugcuucuaguuuggcuguaacauugaugcuagcuauuuuuauuguuuauauggucuccagagacaacguuucaugcuccaucugucuauaa

SEQ ID NO: 59712 - RNA, 1755 nt, Artificial Sequence; identical to SEQ ID NO: 59706
  derived and/or modified CDS sequence (wt) from hemagglutinin__InfluenzaB__AGX23798

SEQ ID NO: 59713 - RNA, 1755 nt, Artificial Sequence; identical to SEQ ID NO: 59692
  derived and/or modified CDS sequence (wt) from hemagglutinin__InfluenzaB__AGX23809

SEQ ID NO: 59714 - RNA, 1755 nt, Artificial Sequence; identical to SEQ ID NO: 59706
  derived and/or modified CDS sequence (wt) from hemagglutinin__InfluenzaB__AGX23820

SEQ ID NO: 59715 - RNA, 1755 nt, Artificial Sequence
  derived and/or modified CDS sequence (wt) from hemagglutinin__InfluenzaB__AGX23831
augaaggcaauaauuguacuacucaugguaguaacauccaaugcagaucgaaucugcacugggauaacaucuucaaacucaccucauguggucaaaacagcuacucaaggggaagucaaugugacuggugugauaccacugacaacaacaccaacaaaaucuuauuuugcaaaucucaaaggaacaaagaccagagggaaacuaugcccagacugucucaacuguacagaucuggauguggccuugggcaggccaaugugugugggaaccacaccuucugcgaaagcuucaauacuccacgaagucagaccuguuacauccgggugcuuuccuauaaugcacgacagaacaaaaaucaggcaacuagccaaucuucucagaggauaugaaaauaucagguuaucaacccaaaacguuaucgaugcagaaaaggcaccgggaggacccuacagacuuggaaccucaggaucuugcccuaacgcuaccaguaaaagcggauuuuucgcaacaauggcuugggcugucccaaaggacaacaacaaaaaugcaacgaacccacuaacaguagaaguaccauacauuuguacagaaggggaagaccaaauuacuguuuggggguuccauucagauaacaaaacccaaaugaagaaccucuauggagacucaaauccucaaaaguucaccucaucugcuaauggaguaaccacacauuauguuucucagauuggcggcuucccagaucaaacagaagacggaggacuaccacaaagcggcagaauugucguugauuacaugaugcaaaaaccugggaaaacaggaacaauugucuaucaaagagguguuuuguugccucaaaagguguggugcgcgaguggcaggagcaaaguaauaaaaggguccuugccuuuaauuggugaagcagauugccuucaugaaaaauacgguggauuaaacaaaagcaagccuuacuacacaggagaacaugcaaaagccauaggaaauugcccaauaugggugaaaacaccuuugaagcuugccaauggaaccaaauauagaccuccugcaaaacuauuaaaggaaagggguuucuucggagcuauugcugguuuccuagaaggaggaugggaaggaaugauugcagguuggcacggauacacaucucacggagcacauggaguggcaguugcggcagaccuuaagaguacacaagaagcuauaaacaagauaacaaaaaaucucaacucuuugagugagcuagaaguaaagaaucuucaaagacuaaguggugccauggaugaacuccacaacgaaauacucgagcuggaugagaaaguggaugaucucagagcugacacuauaagcucacaaauagaacuugcagucuugcuuuccaacgaaggaauaauaaacagugaagacgagcaucuauuggcacuugagagaaaacuaaagaaaaugcugggucccucugcuguagacauaggaaauggaugcuucgaaaccaaacacaaaugcaaccagaccugcuuagacaggauagcugcuggcaccuuuaaugcaggagaguuuucucuccccacuuuugauucauugaacauuacugcugcaucuuuaaaugaugauggauuggauaaccauacuauacugcucuauuacucaacugcugcuucuaguuuggcuguaacauugaugcuagcuauuuuuauuguuuauauggucuccagagacaacguuucaugcuccaucugucuauaa

SEQ ID NO: 59716 - RNA, 1755 nt, Artificial Sequence; identical to SEQ ID NO: 59706
  derived and/or modified CDS sequence (wt) from hemagglutinin__InfluenzaB__AGX23842

SEQ ID NO: 59717 - RNA, 1755 nt, Artificial Sequence
  derived and/or modified CDS sequence (wt) from hemagglutinin__InfluenzaB__AGX23853
augaaggcaauaauuguacuacucaugguaguaacauccaaugcagaucgaaucugcacugggauaacaucuucaaacucaccucauguggucaaaacagcuacucaaggggaggucaaugugacuggugugauaccacugacaacaacaccaacaaaaucuuauuuugcaaaucucaaagggacaaggaccagagggaaacuaugcccagacugucucaacuguacagaucuggauguggccuugggcaggccaauguguguggggaccacaccuucugcgaaagcuucaauacuccacgaagucagaccuguuacauccgggugcuuuccuauaaugcacgacagaacaaaaaucaggcaacuagccaaucuucucagaggauaugaaaauaucagguuaucaauccaaaacguuaucgaugcagaaaaggcaccaggaggacccuacagacuuggaaccucaggaucuugcccuaacgcuaccaguaaaagcggauuuuucgcaacaauggcuugggcugucccaaaggacaacaacaaaaaugcaacgaacccacuaacaguagaaguaccauacauuuguacagaaggggaagaccaaauuacuguuuggggguuccauucagauaacaaaacccaaaugaagaaccucuauggagacucaaauccucaaaaguucaccucaucugcuaauggaguaaccacacauuauguuucucagaucggcggcuucccagaucaaacagaagacggaggacuaccacaaagcggcagaauugucguugauuacaugaugcaaaaaucugggaaaacaggaacaauugucuaucaaagagguguuuuguugccucaaaagguguggugcgcgaguggcaggagcaaaguaauaaaaggguccuugccuuuaauuggugaagcagauugccuucaugaaaaauacgguggauuaaacaaaagcaagccuuacuacacaggagaacaugcaaaagccauaggaaauugcccaauaugggugaaaacaccuuugaagcuugccaauggaaccaaauauagaccuccugcaaaacuauuaaaggaaagggguuucuucggagcuauugcugguuuccuagaaggaggaugggaaggaaugauugcagguuggcacggauacacaucucacggagcacauggaguggcaguggcggcagaccuuaagaguacacaagaagcuauaaacaagauaacaaaaaaucucaacucuuugagugagcuagaaguaaagaaccuucaaagacuaaguggugccauggaugaacuccacaacgaaauacucgagcuggaugagaaaguggaugaucucagagcugacacuauaagcucacaaauagaacuugcagucuugcuuuccaacgaaggaauaauaaacagugaagaugagcaucuauuggcacuugagagaaaacuaaagaaaaugcugggucccucugcuguagacauaggaaauggaugcuucgaaaccaaacacaaaugcaaccagaccugcuuagacaggauagcugcuggcaccuuuaaugcaggagaauuuucucuccccacuuuugauucauugaacauuacugcugcaucuuuaaaugaugauggauuggauaaccauacuauacugcucuauuacucaacugcugcuucuaguuuggcuguaacauugaugcuagcuauuuuuauuguuuauauggucuccagagacaacguuucaugcuccaucugucuauaa

SEQ ID NO: 59718 - RNA, 1755 nt, Artificial Sequence
  derived and/or modified CDS sequence (wt) from hemagglutinin__InfluenzaB__AGX23864
augaaggcaauaauuguacuacucaugguaguaacauccaaugcagaucgaaucugcacugggauaacaucuucaaacucaccucauguggucaaaacagcuacucaaggggaggucaaugugacuggugugauaccacuaacaacaacaccaacaaaaucuuauuuugcaaaucucaaaggaacaaggaccagagggaaacuaugcccagacugucucaacuguacagaucuggauguggccuugggcagaccaauguguguggggaccacaccuucugcgaaagcuucaauacuccacgaagucagaccuguuacauccgggugcuuuccuauaaugcacgacaggacaaaaaucaggcaacuagccaaucuucucagaggauaugaaaauaucagguuaucaacccaaaacguuaucgaugcagaaaaggcaccaggaggacccuacagacuuggaaccucaggaucuugcccuaacgcuaccaguaaaagcggauuuuucgcaacaauggcuugggcugucccaaaggacaacaacaaaaacgcaacgaacccacuaacaguagaaguaccauacauuuguacagaaggggaagaccaaauuacuguuuggggauuccauucagauaacaaaacccaaaugaagaaccucuauggagacucaaauccucaaaaguucaccucaucugcuaauggaguaaccacacauuauguuucccagauuggcggcuucccagaucaaacagaagacggaggacuaccacaaagcggcagaauugucguugauuacaugaugcaaaaaccugggaaaacaggaacaauugucuaucaaagagguguuuuguugccucaaaagguguggugcgcgaguggcaggagcaaaguaauaaaaggguccuugccuuuaauuggugaagcagauugccuucaugaaaaauacgguggauuaaauaaaagcaagccuuacuacacaggagaacaugcaaaagccauaggaaauugcccaauaugggugaaaacaccuuugaagcuugccaauggaaccaaauauagaccuccugcaaaacuauuaaaggaaagggguuucuucggagcuauugcugguuuccuagaaggaggaugggaaggaaugauugcagguuggcacggauacacaucucacggagcacauggaguggcaguugcggcagaccuuaagaguacacaagaagcuauaaacaagauaacaaaaaaucucaacucuuugagugagcuagaaguaaagaaucuucaaagacuaaguggugccauggaugaacuccacaacgaaauacucgagcuggaugagaaaguggaugaucucagagcugacacuauaagcucacaaauagaacuugcaguuuugcuuuccaacgaaggaauaauaaacagugaagacgagcaucuauuggcacuugagagaaaacugaagaaaaugcugggucccucugcuguagacauaggaaauggaugcuucgaaaccaaacacaaaugcaaccagaccugcuuagacaggauagcugcuggcaccuuuaaugcaggagaauuuucucucccuacuuuugauucauugaacauuacugcugcaucuuuaaaugaugauggauuggauaaccauacuauacugcucuauuacucaacugcugcuucuaguuuggcuguaacauugaugcuagccauuuuuauuguuuauauggucuccagagacaacguuucaugcuccaucugucuauaa

SEQ ID NO: 59719 - RNA, 1755 nt, Artificial Sequence; identical to SEQ ID NO: 59056
  derived and/or modified CDS sequence (wt) from hemagglutinin__InfluenzaB__AGX23875

SEQ ID NO: 59720 - RNA, 1755 nt, Artificial Sequence
  derived and/or modified CDS sequence (wt) from hemagglutinin__InfluenzaB__AGX23886
augaaggcaauaauuguacuacucaugguaguaacauccaaugcagaucgaaucugcacugggauaacaucuucaaacucaccucauguggucaaaacagcuacucaaggggaggucaaugugacuggugugauaccacuaacaacaacaccaacaaaaucuuauuuugcaaaucucaaaggaacaaggaccagagggaaacuaugcccagacugucucaacuguacagaucuggauguggccuugggcagaccaauguguguggggaccacaccuucugcgaaagcuucaauacuccacgaagucagaccuguuacauccgggugcuuuccuauaaugcacgacaggacaaaaaucaggcaacuagccaaucuucucagaggauaugaaaauaucagguuaucaacccaaaacguuaucgaugcagaaaaggcaccaggaggacccuacagacuuggaaccucaggaucuugcccuaacgcuaccaguaaaagcggauuuuuugcaacaauggcuugggcugucccaaaggacaacaacaaaaacgcaacgaacccacuaacaguagaaguaccauacauuuguacagaaggggaagaccaaauuacuguuuggggauuccauucagauaacaaaacccaaaugaagaaccucuauggagacucaaauccucaaaaguucaccucaucugcuaauggaguaaccacacauuauguuucucagauuggcggcuucccagaucaaacagaagacggaggacuaccacaaagcggcagaauugucguugauuacaugaugcaaaaaccugggaaaacaggaacaauugucuaucaaagagguguuuuguugccucaaaagguguggugcgcgaguggcaggagcaaaguaauaaaaggguccuugccuuuaauuggugaagcagauugccuucaugaaaaauacgguggauuaaauaaaagcaagccuuacuacacaggagaacaugcaaaagccauaggaaauugcccaauaugggugaaaacaccuuugaagcuugccaauggaaccaaauauagaccuccugcaaaacuauuaaaggaaagggguuucuucggagcuauugcugguuuccuagaaggaggaugggaaggaaugauugcagguuggcacggauacacaucucacggagcacauggaguggcaguugcggcagaccuuaagaguacacaagaagcuauaaacaagauaacaaaaaaucucaacucuuugagugagcuagaaguaaagaaucuucaaagacuaaguggugccauggaugaacuccacaacgaaauacucgagcuggaugagaaaguggaugaucucagagcugacacuauaagcucacaaauagaacuugcaguuuugcuuuccaacgaaggaauaauaaacagugaagacgagcaucuauuggcacuugaaagaaaacugaagaaaaugcugggucccucugcuguagacauaggaaauggaugcuucgaaaccaaacacaaaugcaaccagaccugcuuagacaggauagcugcuggcaccuuuaaugcaggagaauuuucucucccuacuuuugauucauugaacauuacugcugcaucuuuaaaugaugauggauuggauaaccacacuauacugcucuauuacucaacugccgcuucuaguuuggcuguaacauugaugcuagccauuuuuauuguuuauauggucuccagagacaacguuucaugcuccaucugucuauaa

SEQ ID NO: 59721 - RNA, 1755 nt, Artificial Sequence
  derived and/or modified CDS sequence (wt) from hemagglutinin__InfluenzaB__AGX23897
augaaggcaauaauuguacuacucaugguaguaacauccaaugcagaucgaaucugcacugggauaacaucuucaaacucaccucauguggucaaaacagcuacucaaggggaggucaaugugacuggugugauaccacugacaacaacaccaacaaaaucuuauuuugcaaaucucaaagggacaaggaccagagggaaacuaugcccagacugucucaacuguacagaucuggauguggccuugggcaggccaauguguguggggaccacaccuucugcgaaagcuucaauacuccacgaagucagaccuguuacauccgggugcuuuccuauaaugcacgacagaacaaaaaucaggcaacuagccaaucuucucagaggauaugaaaauaucagguuaucaacccaaaacguuaucgaugcagaaaaggcaccaggaggacccuacagacuuggaaccucaggaucuugcccuaacgcuaccaguaaaagcggauuuuucgcaacaauggcuugggcugucccaaaggacaacaacaaaaaugcaacgaacccacuaacaguagaaguaccauacauuuguacagaaggggaagaccaaauuacuguuuggggguuccauucagauaacaaaacccaaaugaagaaccucuauggagacucaaauccucaaaaguucaccucaucugcuaauggaguaaccacacauuauguuucucagaucggcggcuucccagaucaaacagaagacggaggacuaccacaaagcggcagaauugucguugauuacaugaugcaaaaaucugggaaaacaggaacaauugucuaucaaagagguguuuuguugccucaaaagguguggugcgcgaguggcaggagcaaaguaauaaaaggguccuugccuuuaauuggugaagcagauugccuucaugaaaaauacgguggauuaaacaaaagcaagccuuacuacacaggagaacaugcaaaagccauaggaaauugcccaauaugggugaaaacaccuuugaagcuugccaauggaaccaaauauagaccuccugcaaaacuauuaaaggaaagggguuucuucggagcuauugcugguuuccuagaaggaggaugggaaggaaugauugcagguuggcacggauacacaucucacggagcacauggaguggcaguggcggcagaccuuaagaguacacaagaagcuauaaacaagauaacaaaaaaucucaacucuuugagugagcuagaaguaaagaaccuucaaagacuaaguggugccauggaugaacuccacaacgaaauacucgagcuggaugagaaaguggaugaucucagagcugacacuauaagcucacaaauagaacuugcagucuugcuuuccaacgaaggaauaauaaacagugaagaugagcaucuauuggcacuugagagaaaacuaaagaaaaugcugggucccucugcuguagacauaggaaauggaugcuucgaaaccaaacacaaaugcaaccagaccugcuuagacaggauagcugcuggcaccuuuaaugcaggagaauuuucucuccccacuuuugauucauugaacauuacugcugcaucuuuaaaugaugauggauuggauaaccauacuauacugcucuauuacucaacugcugcuucuaguuuggcuguaacauugaugcuagcuauuuuuauuguuuauauggucuccagagacaacguuucaugcuccaucugucuauaa

SEQ ID NO: 59722 - RNA, 1755 nt, Artificial Sequence
  derived and/or modified CDS sequence (wt) from hemagglutinin__InfluenzaB__AGX23908
augaaggcaauaauuguacuacucaugguaguaacauccaaugcagaucgaaucugcacugggauaacaucuucaaacucaccucauguggucaaaacagcuacucaaggggaggucaaugugacuggugugauaccacuaacaacaacaccaacaaaaucuuauuuugcaaaucucaaaggaacaaggaccagagggaaacuaugcccagacugucucaacuguacagaucuggauguggccuugggcagaccaauguguguggggaccacaccuucugcgaaagcuucaauacuccacgaagucagaccuguuacauccgggugcuuuccuauaaugcacgacaggacaaaaaucaggcaacuagccaaucuucucagaggauaugaaaauaucagguuaucaacccaaaacguuaucgaugcagaaaaggcaccaggaggacccuacagacuuggaaccucaggaucuugcccuaacgcuaccaguaaaagcggauuuuucguaacaauggcuugggcugucccaaaggacaacaacaaaaacgcaacgaacccacuaacaguagaaguaccauacauuuguacagaaggggaagaccaaauuacuguuuggggauuccauucagauaacaaaacccaaaugaagaaccucuauggagacucaaauccucaaaaguucaccucaucugcuaauggaguaaccacacauuauguuucucagauuggcggcuucccagaucaaacagaagacggaggacuaccacaaagcggcagaauugucguugauuacaugaugcaaaaaccugggaaaacaggaacaauugucuaucaaagagguguuuuguugccucaaaagguguggugcgcgaguggcaggagcaaaguaauaaaaggguccuugccuuuaauuggugaagcagauugccuucaugaaaaauacgguggauuaaauaaaagcaagccuuacuacacaggagaacaugcaaaagccauaggaaauugcccaauaugggugaaaacaccuuugaagcuugccaauggaaccaaauauagaccuccugcaaaacuauuaaaggaaagggguuucuucggagcuauugcugguuuccuagaaggaggaugggaaggaaugauugcagguuggcacggauacacaucucacggagcacauggaguggcaguugcggcagaccuuaagaguacacaagaagcuauaaacaagauaacaaaaaaucucaacucuuugagugagcuagaaguaaagaaucuucaaagacuaaguggugccauggaugaacuccacaacgaaauacucgagcuggaugagaaaguggaugaucucagagcugacacuauaagcucacaaauagaacuugcaguuuugcuuuccaacgaaggaauaauaaacagugaagacgagcaucuauuggcacuugagagaaaacugaagaaaaugcugggucccucugcuguagacauaggaaauggaugcuucgaaaccaaacacaaaugcaaccaaaccugcuuagacaggauagcugcuggcaccuuuaaugcaggagaauuuucucucccuacuuuugauucauugaacauuacugcugcaucuuuaaaugaugauggauuggauaaccauacuauacugcucuauuacucaacugcugcuucuaguuuggcuguaacauugaugcuagccauuuuuauuguuuauauggucuccagagacaacguuucaugcuccaucugucuauaa

SEQ ID NO: 59723 - RNA, 1755 nt, Artificial Sequence
  derived and/or modified CDS sequence (wt) from hemagglutinin__InfluenzaB__AGX23919
augaaggcaauaauuguacuacucaugguaguaacauccaaugcagaucgaauaugcacuggaauaacaucuucaaacucaccucauguggucaaaacagccacucaaggggaggucaaugugacuggugugauaccacuaacaacaacaccaacaaaaucuuauuuugcaaaucucaaaggaacaaggaccagagggaaacuaugcccagacugucucaacugcacagaucuggauguggcuuugggcagaccaauguguguggggaccacaccuucggcgaaagcuucaauacuccacgaagucagaccuguuacauccgggugcuuuccuauaaugcacgacagaacaaaaaucaggcaacuacccaaucuucucagaggauaugaaaauaucaggcuaucaacccaaaacgucaucgaugcggaaaaggcaccaggaggacccuacagacuuggaaccucaggaucuugcccuaacgcuaccaguaagagcggauuuuucgcaacaauggcuugggcugucccaaaggacaacaacaaaaaugcaacgaacccacuaacaguagaaguaccauacauuuguacagaaggggaagaccaaaucacuguuuggggguuccauucagauaacaaaacccaaaugaagaaccucuauggagacucaaauccucaaaaguucaccucaucugcuaauggaguaaccacacacuauguuucucagauuggcagcuucccagaucaaacagaagacggaggacuaccacaaagcggcaggauuguuguugauuacaugaugcaaaaaccugggaaaacaggaacaauugucuaccaaagagguguuuuguugccucaaaagguguggugcgcgaguggcaggagcaaaguaauaaaaggguccuugccuuuaauuggugaagcagauugccuucaugaaaaauacgguggauuaaacaaaagcaagccuuacuacacuggagaacaugcaaaagccauaggaaauugcccaauaugggugaaaacaccuuugaagcuugccaauggaaccaaauauagaccuccugcaaaacuauuaaaggaaagggguuucuucggagcuauugcugguuuccuagaaggaggaugggaaggaaugauugcaggcuggcacggauacacaucucacggagcacauggaguggcaguggcggcggaccuuaagaguacgcaagaagcuauaaacaagauaacaaaaaaucucaauucuuugagugagcuagaaguaaagaaucuucaaagacuaaguggugcuauggaugaacuccacaacgaaauacucgagcuggaugagaaaguggaugaucucagagcugacacuauaagcucgcaaauagaacuugcagucuugcuuuccaacgaaggaauaauaaacagugaagaugagcauuuauuggcacuugagagaaaacuaaagaaaaugcugggucccucugcuguagagauaggaaauggaugcuucgaaaccaaacacaagugcaaccagaccugcuuagacaggauagcugcuggcaccuuuaaugcaggagaauuuucucuccccacuuuugauucacugaacauuacugcugcaucuuuaaaugaugauggauuggauaaccauacuauacugcucuauuacucaacugcugcuucuaguuuggcuguaacauugaugcuagcuauuuuuauuguuuauauggucuccagagacaacguuucaugcuccaucugucuauaa

SEQ ID NO: 59724 - RNA, 1755 nt, Artificial Sequence
  derived and/or modified CDS sequence (wt) from hemagglutinin__InfluenzaB__AGX23930
augaaggcaauaauuguacuacucaugguaguaacauccaaugcagaucgaaucugcacuggaauaacaucuucaaacucaccucauguggucaaaacagccacucaaggggaggucaaugugacuggugugauaccacuaacaacaacaccaacaaaaucuuauuuugcaaaucucaaaggaacaaggaccagagggaaacuaugcccagacugucucaacugcacagaucuggauguggcuuugggcagaccaauguguguggggaccacaccuucggcgaaagcuucaauacuccacgaagucagaccuguuacauccgggugcuuuccuauaaugcacgacagaacaaaaaucaggcaacuacccaaucuucucagaggauaugaaaauaucaggcuaucaacccaaaacgucaucgaugcggaaaaggcaccaggaggacccuacagacuuggaaccucaggaucuugcccuaacgcuaccaguaagagcggauuuuucgcaacaauggcuugggcugucccaaaggacaacaacaaaaaugcaacgaacccacuaacaguagaaguaccauacauuuguacagaaggggaagaccaaaucacuguuuggggguuccauucagauaacaaaacccaaaugaagaaccucuauggagacucaaauccucaaaaguucaccucaucugcuaauggaguaaccacacacuauguuucucagauuggcagcuucccagaucaaacagaagacggaggacuaccacaaagcggcaggauuguuguugauuacaugaugcaaaaaccugggaaaacaggaacaauugucuaccaaagagguauuuuguugccucaaaagguguggugcgcgaguggcaggagcaaaguaauaaaaggguccuugccuuuaauuggugaagcagauugccuucaugaaaaauacgguggauuaaacaaaagcaagccuuacuacacaggagaacaugcaaaagccauaggaaauugcccaauaugggugaaaacaccuuugaagcuugccaauggaaccaaauauagaccuccugcaaaacuauuaaaggaaagggguuucuucggagcuauugcugguuuccuagaaggaggaugggaaggaaugauugcaggcuggcacggauacacaucucacggagcacauggaguggcaguggcggcggaccuuaagaguacgcaagaagcuauaaacaagauaacaaaaaaucucaauucuuugagugagcuagaaguaaagaaucuucaaagacuaaguggugccauggaugaacuccacaacgaaauacucgagcuggaugagaaaguggaugaucucagagcugacacuauaagcucgcaaauagaacuugcagucuugcuuuccaacgaaggaauaauaaacagugaagaugagcaucuauuggcacuugagagaaaacuaaagaaaaugcugggucccucugcuguagagauaggaaauggaugcuucgaaaccaaacacaagugcaaccagaccugcuuagacaggauagcugcuggcaccuuuaaugcaggagaauuuucucuccccacuuuugauucacugaacauuacugcugcaucuuuaaaugaugauggauuggauaaccauacuauacugcucuauuacucaacugcugcuucuaguuuggcuguaacauugaugcuagcuauuuuuauuguuuauauggucuccagagacaacguuucaugcuccaucugucuauaa

SEQ ID NO: 59725 - RNA, 1755 nt, Artificial Sequence
  derived and/or modified CDS sequence (wt) from hemagglutinin__InfluenzaB__AGX23941
augaaggcaauaauuguacuacucaugguaguaacauccaaugcagaucgaaucugcacugggauaacaucuucaaacucaccucauguggucaaaacagcuacucaaggggaggucaaugugacuggugugauaccacuaacaacaacaccaacaaaaucuuauuuugcaaaucucaaaggaacaaggaccagagggaaacuaugcccagacugucucaacuguacagaucuggauguggccuugggcagaccaauguguguggggaccacaccuucugcgaaagcuucaauacuccacgaagucagaccuguuacauccgggugcuuuccuauaaugcacgacaggacaaaaaucaggcaacuagccaaucuucucagaggauaugaaaauaucagguuaucaacccaaaacguuaucgaugcagaaaaggcaccaggaggacccuacagacuuggaaccucaggaucuugcccuaacgcuaccaguaaaagcggauuuuucgcaacaauggcuugggcugucccaaaggacaacaacaaaaacgcaacgaacccacuaacaguagaaguaccauacauuuguacagaaggggaagaccaaauuacuguuuggggauuccauucagauaacaaaacccaaaugaagaaccucuauggagacucaaauccucaaaaguucaccucaucugcuaauggaguaaccacacauuauguuucucagauuggcggcuucccagaucaaacagaagacggaggacuaccacaaagcggcagaauugucguugauuacaugaugcaaaaaccugggaaaacaggaacaauugucuaucaaagagguguuuuguugccucaaaagguguggugcgcgaguggcaggagcaaaguaauaaaaggguccuugccuuuaauuggugaagcagauugccuucaugaaaaauacgguggauuaaauaaaagcaagccuuacuacacaggagaacaugcaaaagccauaggaaauugcccaauaugggugaaaacaccuuugaagcuugccaauggaaccaaauauagaccuccugcaaaacuauuaaaggaaagggguuucuucggagcuauugcugguuuccuagaaggaggaugggaaggaaugauugcagguuggcacggauacacaucucacggagcacauggaguggcaguugcggcagaccuuaagaguacacaagaagcuauaaacaagauaacaaaaaaucucaacucuuugagugagcuagaaguaaagaaucuucaaagacuaaguggugccauggaugaacuccacaacgaaauacucgagcuggaugagaaaguggaugaucucagagcugacacuauaagcucacaaauagaacuugcaguuuugcuuuccaacgaaggaauaauaaacagugaagacgagcaucuauuggcacuugagagaaaacugaagaaaaugcugggucccucugcuguagacauaggaaauggaugcuucgaaaccaaacacaaaugcaaccagaccugcuuagacaggauagcugcuggcaccuuuaaugcaggagaauucucucucccuacuuuugauucauugaacauuacugcugcaucuuuaaaugaugauggauuggauaaccauacuauacugcucuauuacucaacugcugcuucuaguuuggcuguaacauugaugcuagccauuuuuauuguuuauauggucuccagagacaacguuucaugcuccaucugucuauaa

SEQ ID NO: 59726 - RNA, 1755 nt, Artificial Sequence
  derived and/or modified CDS sequence (wt) from hemagglutinin__InfluenzaB__AGX23952
augaaggcaauaauuguacuacucaugguaguaacauccaaugcagaucgaaucugcacugggauaacaucuucaaacucaccucauguggucaaaacagcuacucaaggggaggucaaugugacuggugugauaccacugacaacaacaccaacaaaaucuuauuuugcaaaucucaaaggaacaaagaccagagggaaacuaugcccagacugucucaacuguacagaucuggauguggccuugggcaggccaaugugugugggaaccacaccuucugcgaaagcuucaauacuccacgaagucagaccuguuacauccgggugcuuuccuauaaugcacgacagaacaaaaaucaggcaacuagccaaucuucucagaggauaugaaaauaucagguuaucaacccaaaacguuaucgaugcagaaaaggcaccgggaggacccuacagacuuggaaccucaggaucuugcccuaacgcuaccaguaaaaguggauuuuucgcaacaauggcuugggcugucccaaaggacaacaacaaaaaugcaacgaacccacuaacaguagaaguaccauacauuuguacagaaggggaagaccaaauuacuguuuggggguuccauucagauaacaaaacccaaaugaagaaccucuauggagacucaaauccucaaaaguucaccucaucugcuaauggaguaaccacacauuauguuucucagauuggcggcuucccagaucaaacagaagacggaggacuaccacaaagcggcagaauugucguugauuacaugaugcaaaaaccugggaaaacaggaacaauugucuaucaaagagguguuuuguugccucaaaagguguggugcgcgaguggcaggagcaaaguaauaaaaggguccuugccuuuaauuggugaagcagauugccuucaugaaaaauacgguggauuaaacaaaagcaagccuuacuacacaggagaacaugcaaaagccauaggaaauugcccaauaugggugaaaacaccuuugaagcuugccaauggaaccaaauauagaccuccugcaaaacuauuaaaggaaagggguuucuucggagcuauugcugguuuccuagaaggaggaugggaaggaaugauugcagguuggcacggauacacaucucacggagcacauggaguggcaguugcggcagaccuuaagaguacacaagaagcuauaaacaagauaacaaaaaaucucaacucuuugagugagcuagaaguaaagaaucuucaaagacuaaguggugccauggaugaacuccacaacgaaauacucgagcuggaugagaaaguggaugaucucagagcugacacuauaagcucacaaauagaacuugcagucuugcuuuccaacgaaggaauaauaaacagugaagacgagcaucuauuggcacuugagagaaaacuaaagaaaaugcugggucccucugcuguagacauaggaaauggaugcuucgaaaccaaacacaaaugcaaccagaccugcuuagacaggauagcugcuggcaccuuuaaugcaggagaguuuucucuccccacuuuugauucauugaacauuacugcugcaucuuuaaaugaugauggauuggauaaccauacuauacugcucuauuacucaacugcugcuucuaguuuggcuguaacauugaugcuagcuauuuuuauuguuuauauggucuccagagacaacguuucaugcuccaucugucuauaa

SEQ ID NO: 59727 - RNA, 1755 nt, Artificial Sequence
  derived and/or modified CDS sequence (wt) from hemagglutinin__InfluenzaB__AGX23963
augaaggcaauaauuguacuacucaugguaguaacauccaaugcagaucgaaucugcacugggauaacaucuucaaacucaccucauguggucaaaacagcuacucaaggggaggucaaugugacuggugugauaccacugacaacaacaccaacaaaaucuuauuuugcaaaucucaaaggaacaaagaccagagggaaacuaugcccagacugucucaacuguacagaucuggauguggccuugggcaggccaaugugugugggaaccacaccuucugcgaaagcuucaauacuccacgaagucagaccuguuacauccgggugcuuuccuauaaugcacgacagaacaaaaaucaggcaacuagccaaucuucucagaggauaugaaaauaucagguuaucaacccaaaacguuaucgaugcagaaaaagcaccgggaggacccuacagacuuggaaccucaggaucuugcccuaacgcuaccaguaaaagcggauuuuucgcaacaauggcuugggcugucccaaaggacaacaacaaaaaugcaacgaacccacuaacaguagaaguaccauacauuuguacagaaggggaagaccaaauuacuguuuggggguuccauucagauaacaaaacccaaaugaagaaccucuauggagacucaaauccucaaaaguucaccucaucugcuaauggaguaaccacacauuauguuucucagauuggcggcuucccagaucaaacagaagacggaggacuaccacaaagcggcagaauugucguugauuacaugaugcaaaaaccugggaaaacaggaacaauugucuaucaaagagguguuuuguugccucaaaagguguggugcgcgaguggcaggagcaaaguaauaaaaggguccuugccuuuaauuggugaagcagauugccuucaugaaaaauacgguggauuaaacaaaagcaagccuuacuacacaggagaacaugcaaaagccauaggaaauugcccaauaugggugaaaacaccuuugaagcuugccaauggaaccaaauauagaccuccugcaaaacuauuaaaggaaagggguuucuucggagcuauugcugguuuccuagaaggaggaugggaaggaaugauugcagguuggcacggauacacaucucacggagcacauggaguggcaguugcggcagaccuuaagaguacacaagaagcuauaaacaagauaacaaaaaaucucaacucuuugagugagcuagaaguaaagaaucuucaaagacuaaguggugccauggaugaacuccacaacgaaauacucgagcuggaugagaaaguggaugaucucagagcugacacuauaagcucacaaauagaacuugcagucuugcuuuccaacgaaggaauaauaaacagugaagacgagcaucuauuggcacuugagagaaaacuaaagaaaaugcugggucccucugcuguagacauaggaaauggaugcuucgaaaccaaacacaaaugcaaccagaccugcuuagacaggauagcugcuggcaccuuuaaugcaggagaguuuucucuccccacuuuugauucauugaacauuacugcugcaucuuuaaaugaugauggauuggauaaccauacuauacugcucuauuacucaacugcugcuucuaguuuggcuguaacauugaugcuagcuauuuuuauuguuuauauggucuccagagacaacguuucaugcuccaucugucuauaa

SEQ ID NO: 59728 - RNA, 1755 nt, Artificial Sequence
  derived and/or modified CDS sequence (wt) from hemagglutinin__InfluenzaB__AGX23974
augaaggcaauaauuguacuacucaugguaguaacauccaaugcagaucgaaucugcacuggaauaacaucuucaaacucaccucauguggucaaaacagccacucaaggggaggucaaugugacuggugugauaccacuaacaacaacaccaacaaaaucuuauuuugcaaaucucaaaggaacaaggaccagagggaaacuaugcccagacugucucaacugcacagaucuggauguggcuuugggcagaccaauguguguggggaccacaccuucggcgaaagcuucaauacuccacgaagucagaccuguuacauccgggugcuuuccuauaaugcacgacagaacaaaaaucaggcaacuacccaaucuucucagaggauaugaaaauaucaggcuaucaacccaaaacgucaucgaugcggaaaaggcaccaggaggacccuacagacuuggaaccucaggaucuugcccuaacgcuaccaguaagagcggauuuuucgcaacaauggcuugggcugucccaaaggacaacaacaaaaaugcaacgaacccacuaacaguagaaguaccauacauuuguacagaaggggaagaccaaaucacuguuuggggguuccauucagauaacaaaacccaaaugaagaaccucuauggagacucaaauccucaaaaguucaccucaucugcuaauggaguaaccacacacuauguuucucagauuggcagcuucccagaucaaacagaagacggaggacuaccacaaagcggcaggauuguuguugauuacaugaugcaaaaaccugggaaaacaggaacaauugucuaccaaagagguauuuuguugccucaaaagguguggugcgcgaguggcaggagcaaaguaauaaaaggguccuugccuuuaauuggugaagcagauugccuucaugaaaaauacgguggauuaaacaaaagcaagccuuacuacacaggagaacaugcaaaagccauaggaaauugcccaauaugggugaaaacaccuuugaagcuugccaauggaaccaaauauagaccuccugcaaaacuauuaaaggaaagggguuucuucggagcuauugcugguuuccuagaaggaggaugggaaggaaugauugcaggcuggcacggauacacaucucacggagcacauggaguggcaguggcggcggaccuuaagaguacgcaagaagcuauaaacaagauaacaaaaaaucucaauucuuugagugagcuagaaguaaagaaucuucaaagacuaaguggugccauggaugaacuccacaacgaaauacucgagcuggaugagaaaguggaugaucucagagcugacacuauaagcucgcaaauagaacuugcagucuugcuuuccaacgaaggaauaauaaacagugaagaugagcaucuauuggcacuugagagaaaacuaaagaaaaugcugggucccucugcuguagagauaggaaauggaugcuucgaaaccaaacacaagugcaaccagaccugcuuagacaggauagcugcuggcaccuuuaaugcgggagaauuuucucuccccacuuuugauucacugaacauuacugcugcaucuuuaaaugaugauggauuggauaaccauacuauacugcucuauuacucaacugcugcuucuaguuuggcuguaacauugaugcuagcuauuuuuauuguuuauauggucuccagagacaacguuucaugcuccaucugucuauaa

SEQ ID NO: 59729 - RNA, 1755 nt, Artificial Sequence
  derived and/or modified CDS sequence (wt) from hemagglutinin__InfluenzaB__AGX23985
augaaggcaauaauuguacuacucaugguaguaacauccaaugcagaucgaaucugcacuggaauaacaucuucaaacucaccucauguggucaaaacagccacucaaggggaggucaaugugacuggugugauaccacuaacaacaacaccaacaaaaucuuauuuugcaaaucucaaaggaacaaggaccagagggaaacuaugcccagacugucucaacugcacagaucuggauguggcuuugggcagaccaauguguguggggaccacaccuucggcgaaagcuucaauacuccacgaagucagaccuguuacauccgggugcuuuccuauaaugcacgacagaacaaaaaucaggcaacuacccaaucuucucagaggauaugaaaauaucaggcuaucaacccaaaacgucaucgaugcggaaaaggcaccaggaggacccuacagacuuggaaccucaggaucuugcccuaacgcuaccaguaagagcggauuuuucgcaacaauggcuugggcugucccaaaggacaacaacaaaaaugcaacgaacccacuaacaguagaaguaccauacauuuguacagaaggggaagaccaaaucacuguuuggggguuccauucagauaacaaaacccaaaugaagaaccucuauggagacucaaauccucaaaaguucaccucaucugcuaauggaguaaccacacacuauguuucucagauuggcagcuucccagaucaaacagaagacggaggacuaccacaaagcggcaggauuguuguugauuacaugaugcaaaaaccugggaaaacaggaacaauugucuaccaaagagguguuuuguugccucaaaaaguguggugcgcgaguggcaggagcaaaguaauaaaaggguccuugccuuuaauuggugaagcagauugccuucaugaaaaauacgguggauuaaacaaaagcaagccuuacuacacuggagaacaugcaaaagccauaggaaauugcccaauaugggugaaaacaccuuugaagcuugccaauggaaccaaauauagaccuccugcaaaacuauuaaaggaaagggguuucuucggagcuauugcugguuuccuagaaggaggaugggaaggaaugauugcaggcuggcacggauacacaucucacggagcacauggaguggcaguggcggcggaccuuaagaguacgcaagaagcuauaaacaagauaacaaaaaaucucaauucuuugagugagcuagaaguaaagaaucuucaaagacuaaguggugcuauggaugaacuccacaacgaaauacucgagcuggaugagaaaguggaugaucucagagcugacacuauaagcucgcaaauagaacuugcagucuugcuuuccaacgaaggaauaauaaacagugaagaugagcauuuauuggcacuugagagaaaacuaaagaaaaugcugggucccucugcuguagagauaggaaauggaugcuucgaaaccaaacacaagugcaaccagaccugcuuagacaggauagcugcuggcaccuuuaaugcaggagaauuuucucuccccacuuuugauucacugaacauuacugcugcaucuuuaaaugaugauggauuggauaaccauacuauacugcucuauuacucaacugcugcuucuaguuuggcuguaacauugaugcuagcuauuuuuauuguuuauauggucuccagagacaacguuucaugcuccaucugucuauaa

SEQ ID NO: 59730 - RNA, 1755 nt, Artificial Sequence
  derived and/or modified CDS sequence (wt) from hemagglutinin__InfluenzaB__AGX23996
augaaggcaauaauuguacuacucaugguaguaacauccaaugcagaucgaaucugcacugggauaacaucuucaaacucaccucauguggucaaaacagcuacucaaggggaggucaaugugacuggugugauaccacuaacaacaacaccaacaaaaucuuauuuugcaaaucucaaaggaacaaggaccagagggaaacuaugcccagacugucucaacuguacagaucuggauguggccuugggcagaccaauguguguggggaccacaccuucugcgaaagcuucaauacuccacgaagucagaccuauuacauccgggugcuuuccuauaaugcacgacaggacaaaaaucaggcaacuagccaaucuucucagaggauaugaaaauaucagguuaucaacccaaaacguuaucgaugcagaaaaggcaccaggaggacccuacagacuuggaaccucaggaucuugcccuaacgcuaccaguaaaagcggauuuuucgcaacaauggcuugggcugucccaaaggacaacaacaaaaacgcaacgaacccacuaacaguagaaguaccauacauuuguacagaaggggaagaccaaauuacuguuuggggauuccauucagauaacaaaacccaaaugaagaaccucuauggagacucaaauccucaaaaguucaccucaucugcuaauggaguaaccacacauuauguuucucagauuggcggcuucccagaucaaacagaagacggaggacuaccacaaagcggcagaauugucguugauuacaugaugcaaaaaccuggaaaaacaggaacaauugucuaucaaagagguguuuuguugccucaaaagguguggugcgcgaguggcaggagcaaaguaauaaaaggguccuugccuuuaauuggugaagcagauugccuucaugaaaaauacgguggauuaaauaaaagcaagccuuacuacacaggagaacaugcaaaggccauaggaaauugcccaauaugggugaaaacaccuuugaagcuugccaauggaaccaaauauagaccuccugcaaaacuauuaaaggaaagggguuucuucggagcuauugcugguuuccuagaaggaggaugggaaggaaugauugcagguuggcacggauacacaucucacggagcacauggaguggcaguugcggcagaccuuaagaguacacaagaagcuauaaacaagauaacaaaaaaucucaacucuuugagugagcuagaaguaaagaaucuucaaagacuaaguggugccauggaugaacuccacaacgaaauacucgagcuggaugagaaaguggaugaucucagagcugacacuauaagcucacaaauagaacuugcaguuuugcuuuccaacgaaggaauaauaaacagugaagacgagcaucuauuggcacuugagagaaaacugaagaaaaugcugggucccucugcuguagacauaggaaauggaugcuucgaaaccaaacacaaaugcaaccagaccugcuuagacaggauagcugcuggcaccuuuaaugcaggagaauuuucucucccuacuuuugauucauugaacauuacugcugcaucuuuaaaugaugauggauuggauaaccauacuauacugcucuauuacucaacugcugcuucuaguuuggcuguaacauugaugcuagccauuuuuauuguuuauauggucuccagagacaacguuucaugcuccaucugucuauaa

SEQ ID NO: 59731 - RNA, 1755 nt, Artificial Sequence; identical to SEQ ID NO: 59724
  derived and/or modified CDS sequence (wt) from hemagglutinin__InfluenzaB__AGX24007

SEQ ID NO: 59732 - RNA, 1755 nt, Artificial Sequence
  derived and/or modified CDS sequence (wt) from hemagglutinin__InfluenzaB__AGX24018
augaaggcaauaauuguacuacucaugguaguaacauccaaugcagaucgaaucugcacuggaauaacaucuucaaacucaccucauguggucaaaacagccacucaaggggaggucaaugugacuggugugauaccacuaacaacaacaccaacaaaaucuuauuuugcaaaucucaaaggaacaaggaccagagggaaacuaugcccagacugucucaacugcacagaucuggauguggcuuugggcagaccaauguguguggggaccacaccuucggcgaaagcuucaauacuccacgaagucagaccuguuacauccgggugcuuuccuauaaugcacgacagaacaaaaaucaggcaacuacccaaucuucucagaggauaugaaaauaucaggcuaucaacccaaaacgucaucgaugcggaaaaggcaccaggaggacccuacagacuuggaaccucaggaucuugcccuaacgcuaccaguaagagcggauuuuucgcaacaauggcuugggcugucccaaaggacaacaacaaaaaugcaacgaacccacuaacaguagaaguaccauacauuuguacagaaggggaagaccaaaucacuguuuggggguuccauucagauaacaaaacccaaaugaagaaccucuauggagacucaaauccucaaaaguucaccucaucugcuaauggaguaaccacacacuauguuucucagauuggcagcuucccagaucaaacagaagacggaggacuaccacaaagcggcaggauuguuguugauuacaugaugcaaaaaccugggaaaacaggaacaauugucuaccaaagagguauuuuguugccucaaaagguguggugcgcgaguggcaggagcaaagugauaaaaggguccuugccuuuaauuggugaagcagauugccuucaugaaaaauacgguggauuaaacaaaagcaagccuuacuacacaggagaacaugcaaaagccauaggaaauugcccaauaugggugaaaacaccuuugaagcuugccaauggaaccaaauauagaccuccugcaaaacuauuaaaggaaagggguuucuucggagcuauugcugguuuccuagaaggaggaugggaaggaaugauugcaggcuggcacggauacacaucucacggagcacauggaguggcaguggcggcggaccuuaagaguacgcaagaagcuauaaacaagauaacaaaaaaucucaauucuuugagugagcuagaaguaaagaaucuucaaagacuaaguggugccauggaugaacuccacaacgaaauacucgagcuggaugagaaaguggaugaucucagagcugacacuauaagcucgcaaauagaacuugcagucuugcuuuccaacgaaggaauaauaaacagugaagaugagcaucuauuggcacuugagagaaaacuaaagaaaaugcugggucccucugcuguagagauaggaaauggaugcuucgaaaccaaacacaagugcaaccagaccugcuuagacaggauagcugcuggcaccuuuaaugcaggagaauuuucucuccccacuuuugauucacugaacauuacugcugcaucuuuaaaugaugauggauuggauaaccauacuauacugcucuauuacucaacugcugcuucuaguuuggcuguaacauugaugcuagcuauuuuuauuguuuauauggucuccagagacaacguuucaugcuccaucugucuauaa

SEQ ID NO: 59733 - RNA, 1755 nt, Artificial Sequence
  derived and/or modified CDS sequence (wt) from hemagglutinin__InfluenzaB__AGX24029
augaaggcaauaauuguacuacucaugguaguaacauccaaugcagaucgaaucugcacuggaauaacaucuucaaacucaccucauguggucaaaacagccacucaaggggaggucaaugugacuggugugauaccacuaacaacaacaccaacaaaaucuuauuuugcaaaucucaaaggaacaaggaccagagggaaacuaugcccagacugucucaacugcacagaucuggauguggcuuugggcagaccaauguguguggggaccacaccuucggcgaaagcuucaauacuccacgaagucagaccuguuacauccgggugcuuuccuauaaugcacgacagaacaaaaaucaggcaacuacccaaucuucucagaggauaugaaaauaucaggcuaucaacccaaaacgucaucgaugcggaaaaggcaccaggaggacccuacagacuuggaaccucaggaucuugcccuaacgcuaccaguaagagcggauuuuucgcaacaauggcuugggcugucccaaaggacaacaacaaaaaugcaacgaacccacuaacaguagaaguaccauacauuuguaaagaaggggaagaccaaaucacuguuuggggguuccauucagauaacaaaacccaaaugaagaaccucuauggagacucaaauccucaaaaguucaccucaucugcuaauggaguaaccacacacuauguuucucagauuggcagcuucccagaucaaacagaagacggaggacuaccacaaagcggcaggauuguuguugauuacaugaugcaaaaaccugggaaaacaggaacaauugucuaccaaagagguguuuuguugccucaaaagguguggugcgcgaguggcaggagcaaaguaauaaaaggguccuugccuuuaauuggugaagcagauugccuucaugaaaaauacgguggauuaaacaaaagcaagccuuacuacacuggagaacaugcaaaagccauaggaaauugcccaauaugggugaaaacaccuuugaagcuugccaauggaaccaaauauagaccuccugcaaaacuauuaaaggaaagggguuucuucggagcuauugcugguuuccuagaaggaggaugggaaggaaugauugcaggcuggcacggauacacaucucacggagcacauggaguggcaguggcggcggaccuuaagaguacgcaagaagcuauaaacaagauaacaaaaaaucucaauucuuugagugagcuagaaguaaagaaucuucaaagacuaaguggugcuauggaugaacuccacaacgaaauacucgagcuggaugaaaaaguggaugaucucagagcugacacuauaagcucgcaaauagaacuugcagucuugcuuuccaacgaaggaauaauaaacagugaagaugagcauuuauuggcacuugagagaaaacuaaagaaaaugcugggucccucugcuguagagauaggaaauggaugcuucgaaaccaaacacaagugcaaccagaccugcuuaaacaggauagcugcuggcaccuuuaaugcaggagaauuuucucuccccacuuuugauucacugaacauuacugcugcaucuuuaaaugaugauggauuggauaaccauacuauacugcucuauuacucaacugcugcuucuaguuuggcuguaacauugaugcuagcuauuuuuauuguuuauauggucuccagagacaacguuucaugcuccaucugucuauaa

SEQ ID NO: 59734 - RNA, 1755 nt, Artificial Sequence
  derived and/or modified CDS sequence (wt) from hemagglutinin__InfluenzaB__AGX24040
augaaggcaauaauuguacuacucaugguaguaacauccaaugcagaucgaaucugcacuggaauaacaucuucaaacucaccucauguggucaaaacagccacucaaggggaggucaaugugacuggugugauaccacuaacaacaacaccaacaaaaucuuauuuugcaaaucucaaaggaacaaggaccagagggaaacuaugcccagacugucucaacugcacagaucuggauguggcuuugggcagaccaauguguguggggaccacaccuucggcgaaagcuucaauacuccacgaagucagaccuguuacauccgggugcuuuccuauaaugcacgacagaacaaaaaucaggcaacuacccaaucuucucagaggauaugaaaauaucaggcuaucaacccaaaacgucaucgaugcggaaaaggcaccaggaggacccuacagacuuggaaccucaggaucuugcccuaacgcuaccaguaagagcggauuuuucgcaacaauggcuugggcugucccaaaggacaacaacaaaaaugcaacgaacccacuaacaguagaaguaccauacauuuguacagaaggggaagaccaaaucacuguuuggggguuccauucagauaacaaaacccaaaugaagaaccucuauggagacucaaauccucaaaaguucaccucaucugcuaauggaguaaccacacacuauguuucucagauuggcagcuucccagaucaaacagaagacggaggacuaccacaaagcggcaggauuguuguugauuacaugaugcaaaaaccugggaaaacaggaacaauugucuaccaaagagguauuuuguugccucaaaagguguggugcgcgaguggcaggagcaaagugauaaaaggguccuugccuuuaauuggugaagcagauugccuucaugaaaaauacgguggauuaaacaaaagcaagccuuacuacacaggagaacaugcaaaagccauaggaaauugcccaauaugggugaaaacaccuuugaagcuugccaauggaaccaaauauagaccuccugcaaaacuauuaaaggaaagggguuucuucggagcuauugcugguuuccuagaaggaggaugggaaggaaugauugcaggcuggcacggauacacaucucacggagcacauggaguggcaguggcggcggaucuuaagaguacgcaagaagcuauaaacaagauaacaaaaaaucucaauucuuugagugagcuagaaguaaagaaucuucaaagacuaaguggugccauggaugaacuccacaacgaaauacucgagcuggaugagaaaguggaugaucucagagcugacacuauaagcucgcaaauagaacuugcagucuugcuuuccaacgaaggaauaauaaacagugaagaugagcaucuauuggcacuugagagaaaacuaaagaaaaugcugggucccucugcuguagagauaggaaauggaugcuucgaaaccaaacacaagugcaaccagaccugcuuagacaggauagcugcuggcaccuuuaaugcaggagaauuuucucuccccacuuuugauucacugaacauuacugcugcaucuuuaaaugaugauggauuggauaaccauacuauacugcucuauuacucaacugcugcuucuaguuuggcuguaacauugaugcuagcuauuuuuauuguuuauauggucuccagagacaacguuucaugcuccaucugucuauaa

SEQ ID NO: 59735 - RNA, 1755 nt, Artificial Sequence
  derived and/or modified CDS sequence (wt) from hemagglutinin__InfluenzaB__AGX24051
augaaggcaauaauuguacuacucaugguaguaacauccaaugcagaucgaaucugcacugggauaacaucuucaaacucaccucauguggucaaaacagcuacucaaggggaggucaaugugacuggugugauaccacugacaacaacaccaacaaaaucuuauuuugcaaaucucaaaggaacaaagaccagagggaaacuaugcccagacugucucaacuguacagauuuggauguggccuugggcaggccaaugugugugggaaccacaccuucugcgaaagcuucaauacuccacgaagucagaccuguuacauccgggugcuuuccuauaaugcacgacagaacaaaaaucaggcaacuagccaaucuucucagaggauaugaaaauaucagguuaucaacccaaaacguuaucgaugcagaaaaggcaccgggaggacccuacagacuuggaaccucaggaucuugcccuaacgcuaccaguaaaagcggauuuuucgcaacaauggcuugggcugucccaaaggacaacaacaaaaaugcaacgaacccacuaacaguagaaguaccauacauuuguacagaaggggaagaccaaauuacuguuuggggguuccauucagauaacaaaacccaaaugaagaaccucuauggagacucaaauccucaaaaguucaccucaucugcuaauggaguaaccacacauuauguuucucagauuggcggcuucccagaucaaacagaagacggaggacuaccacaaagcggcagaauugucguugauuacaugaugcaaaaaccugggaaaacaggaacaauugucuaucaaagagguguuuuguugccucaaaagguguggugcgcgaguggcaggagcaaaguaauaaaaggguccuugccuuuaauuggugaagcagauugccuucaugaaaaauacgguggauuaaacaaaagcaagccuuacuacacaggagaacaugcaaaagccauaggaaauugcccaauaugggugaaaacaccuuugaagcuugccaauggaaccaaauacagaccuccugcaaaacuauuaaaggaaagggguuucuucggagcuauugcugguuuccuagaaggaggaugggaaggaaugauugcagguuggcacggauacacaucucacggagcacauggaguggcaguugcggcagaccuuaagaguacacaagaagcuauaaacaagauaacaaaaaaucucaacucuuugagugagcuagaaguaaagaaucuucaaagacuaaguggugccauggaugaacuccacaacgaaauacucgagcuggaugagaaaguggaugaucucagagcugacacuauaagcucacaaauagaacuugcagucuugcuuuccaacgaaggaauaauaaacagugaagacgagcaucuauuggcacuugagagaaaacuaaagaaaaugcugggucccucugcuguagacauaggaaauggaugcuuugaaaccaaacacaaaugcaaccagaccugcuuagacaggauagcugcuggcaccuuuaaugcaggagaguuuucucuccccacuuuugauucauuaaacauuacugcugcaucuuuaaaugaugauggauuggauaaccauacuauacugcucuauuacucaacugcugcuucuaguuuggcuguaacauugaugcuagcuauuuuuauuguuuauauggucuccagagacaacguuucaugcuccaucugucuauaa

SEQ ID NO: 59736 - RNA, 1755 nt, Artificial Sequence
  derived and/or modified CDS sequence (wt) from hemagglutinin__InfluenzaB__AGX24062
augaaggcaauaauuguacuacucaugguaguaacauccaaugcagaucgaaucugcacugggauaacaucuucaaacucaccucauguggucaaaacagcuacucaaggggaggucaaugugacuggugugauaccacugacaacaacaccaacaaaaucuuauuuugcaaaucucaaaggaacaaggaccagagggaaacuaugcccggacugucucaacuguacagaucuggauguggccuugggcaggccaauguguguggggaccacaccuucugcuaaggcuucaauacuccacgaagucagaccuguuacauccgggugcuuuccuauaaugcacgacagaacaaaaaucaggcaacuacccaaucuucucagaggauaugaaaauaucagguuaucaacccaaaacguuaucgaugcagaaaaagcaccaggaggacccuacagacuuggaaccucaggaucuugcccuaacgcuaccaguaaaaucggauuuuucgcaacaauggcuugggcugucccaaaggacaacuacaaaaaugcaacgaacccacuaacaguagaaguaccauacauuuguacagaaggggaagaccaaauuacuguuuggggguuccauucagauaacaaaacccaaaugaagaaccucuauggagacucaaauccucaaaaguucaccucaucugcuaauggaguaaccacacauuauguuucucagauuggcgacuucccagaucaaacagaagacggaggacuaccacaaagcggcagaauuguuguugauuacaugaugcaaaaaccugggaaaacaggaacaauugucuaucaaagagguguuuuguugccucaaaagguguggugcgcgaguggcaggagcaaaguaauaaaagggucauugccuuuaauuggugaagcagauugccuucaugaaaaauacgguggauuaaacaaaagcaagccuuacuacacaggagaacaugcaaaagccauaggaaauugcccaauauggguaaaaacaccuuugaagcuugccaauggaaccaaauauagaccuccugcaaaacuauuaaaggaaagggguuucuucggagcuauugcugguuuccuagaaggaggaugggaaggaaugauugcagguuggcacggauacacaucucacggagcacauggaguggcaguggcggcagaccuuaagaguacacaagaagcuauaaauaagauaacaaaaaaucucaauucuuugagugagcuagaaguaaagaaccuucaaagacuaaguggugccauggaugaacuccacaacgaaauacucgagcuggaugagaaaguggaugaucucagagcugacacuauaagcucacaaauagaacuugcagucuugcuuuccaacgaaggaauaauaaacagugaagacgagcaucuauuggcacuugagagaaaacuaaagaaaaugcugggucccucugcuguagacauaggaaauggaugcuucgaaaccaaacacaaaugcaaccagaccugcuuagacaggauagcugcuggcaccuuuaaugcaggagaauuuucucuccccacuuuugauucauugaacauuacugcugcaucuuuaaaugaugauggauuggauaaccauacuauacugcucuauuacucaacugcugcuucuaguuuggcuguaacauuaaugcuagcuauuuuuauuguuuauauggucuccagagacaacguuucaugcuccaucugucuauaa

SEQ ID NO: 59737 - RNA, 1755 nt, Artificial Sequence
  derived and/or modified CDS sequence (wt) from hemagglutinin__InfluenzaB__AGX24073
augaaggcaauaauuguacuacucaugguaguaacauccaaugcagaucgaaucugcacuggaauaacaucuucaaacucaccucauguggucaaaacagccacucaaggggaggucaaugugacuggugugauaccacuaacaacaacaccaacaaaaucuuauuuugcaaaucucaaaggaacaaggaccagagggaaacuaugcccagacugucucaacugcacagaucuggauguggcuuugggcagaccaauguguguggggaccacaccuucggcgaaagcuucaauacuccacgaagucagaccuguuacauccgggugcuuuccuauaaugcacgacagaacaaaaaucaggcaacuacccaaucuucucagaggauaugaaaauaucaggcuaucaacccaaaacgucaucgaugcggaaaaggcaccaggaggacccuacagacuuggaaccucaggaucuugcccuaacgcuaccaguaagagcggauuuuucgcaacaauggcuugggcugucccaaaggacaacaacaaaaaugcaacgaacccacuaacaguagaaguaccauacauuuguacagaaggggaagaccaaaucacuguuuggggguuccauucagauaacaaaacccaaaugaagaaccucuauggagacucaaauccucaaaaguucaccucaucugcuaauggaguaaccacacacuauguuucucagauuggcagcuucccagaucaaacagaagacggaggacuaccacaaagcggcaggauuguuguugauuacaugaugcaaaaaccugggaaaacaggaacaauugucuaccaaagagguguuuuguugccucaaaagguguggugcgcgaguggcaggagcaaaguaauaaaaggguccuugccuuuaauuggugaagcagauugccuucaugaaaaauacgguggauuaaacaaaagcaagccuuacuacacuggagaacaugcaaaagccauaggaaauugcccaauaugggugaaaacaccuuugaagcuugccaauggaaccaaauauagaccuccugcaaaacuauuaaaggaaagggguuucuucggagcuauugcugguuuccuagaaggaggaugggaaggaaugauugcaggcuggcacggauacacaucucacggagcacauggaguggcaguggcggcggaccuuaagaguacgcaagaagcuauaaacaagauaacaaaaaaucucaauucuuugagugagcuagaaguaaagaaucuucaaagacuaaguggugcuauggaugaacuccacaacgaaauacucgagcuggaugagaaaguggaugaucucagagcugacacuauaagcucgcaaauagaacuugcagucuugcuuuccaacgaaggaauaauaaacagugaagaugagcauuuauuggcacuugagagaaaacuaaagaaaaugcugggucccucugcuguagagauaggaaauggaugcuucgaaaccaaacacaagugcaaccagaccugcuuagacaggauagcugcuggcaccuuuaaugcaggagaauuuucucuccccacuuuugauucacugaacauuacugcugcaucuuuaaaugaugauggauuggauaaccauacuauacugcucuauuacucaacugcugcuucuaguuuggcuguaacauugaugcuagcuauuuuuauuguuuauauggucuccagagacaacguuucaugcuccaucugucuauaa

SEQ ID NO: 59738 - RNA, 1755 nt, Artificial Sequence
  derived and/or modified CDS sequence (wt) from hemagglutinin__InfluenzaB__AGX24084
augaaggcaauaauuguacuacucaugguaguaacauccaaugcagaucgaaucugcacugggauaacaucuucaaacucaccucauguggucaaaacagcuacucaaggggaggucaaugugacuggugugauaccacuaacaacaacaccaacaaaaucuuauuuugcaaaucucaaaggaacaaggaccagagggaaacuaugcccagacugucucaacuguacagaucuggauguggccuugggcagaccaauguguguggggaccacaccuucugcgaaagcuucaauaauccacgaagucagaccuguuacauccgggugcuuuccuauaaugcacgacaggacaaaaaucaggcaacuagccaaucuucucagaggauaugaaaauaucagguuaucaacccaaaacguuaucgaugcagaaaaggcaccaggaggacccuacagacuuggaaccucaggaucuugcccuaacgcuaccaguaaaagcggauuuuucgcaacaauggcuugggcugucccaaaggacaacaacaaaaacgcaacgaacccacuaacaguagaaguaccauacauuuguacagaaggggaagaccaaauuacuguuuggggauuccauucagauaacaaaacccaaaugaagaaccucuauggagacucaaauccucaaaaguucaccucaucugcuaauggaguaaccacacauuauguuucucagauuggcggcuucccagaucaaacagaagacggaggacuaccacaaagcggcagaauugucguugauuacaugaugcaaaaaccugggaaaacaggaacaauugucuaucaaagagguguuuuguugccucaaaagguguggugcgcgaguggcaggagcaaaguaauaaaaggguccuugccuuuaauuggugaagcagauugccuucaugaaaaauacgguggauuaaauaaaagcaagccuuacuacacaggagaacaugcaaaagccauaggaaauugcccaauaugggugaaaacaccuuugaagcuugccaauggaaccaaauauagaccuccugcaaaacuauuaaaggaaagggguuucuucggagcuauugcugguuuccuagaaggaggaugggaaggaaugauugcagguuggcacggauacacaucucacggagcacauggaguggcaguugcggcagaccuuaagaguacacaagaagcuauaaacaagauaacaaaaaaucucaacucuuugagugagcuagaaguaaagaaucuucaaagacuaaguggugccauggaugaacuccacaacgaaauacucgagcuggaugagaaaguggaugaucucagagcugacacuauaagcucacaaauagaacuugcaguuuugcuuuccaacgaaggaauaauaaacagugaagacgagcaucuauuggcacuugagagaaaacugaagaaaaugcugggucccucugcuguagacauaggaaauggaugcuucgaaaccaaacacaaaugcaaccagaccugcuuagacaggauagcugcuggcaccuuuaaugcaggagaauuuucucucccuacuuuugauucauugaacauuacugcugcaucuuuaaaugaugauggauuggauaaccauacuauacugcucuauuacucaacugcugcuucuaguuuggcuguaacauugaugcuagccauuuuuauuguuuauauggucuccagagacaacguuucaugcuccaucugucuauaa

SEQ ID NO: 59739 - RNA, 1755 nt, Artificial Sequence
  derived and/or modified CDS sequence (wt) from hemagglutinin__InfluenzaB__AGX24095
augaaggcaauaauuguacuacucaugguaguaacauccaaugcagaucgaaucugcacuggaauaacaucuucaaacucaccucauguggucaaaacagccacucaaggggaggucaaugugacuggugugauaccacuaacaacaacaccaacaaaaucuuauuuugcaaaucucaaaggaacaaggaccagagggaaacuaugcccagacugucucaacugcacagaucuggauguggcuuugggcagaccaauguguguggggaccacaccuucggcgaaagcuucaauacuccacgaagucagaccuguuacauccgggugcuuuccuauaaugcacgacagaacaaaaaucaggcaacuacccaaucuucucagaggauaugaaaauaucaggcuaucaacccaaaacgucaucgaugcggaaaaggcaccaggaggacccuacagacuuggaaccucaggaucuugcccuaacgcuaccaguaagagcggauuuuucgcaacaauggcuugggcugucccaaaggacaacaacaaaaaugcaacgaacccacuaacaguagaaguaccauacauuuguacagaaggggaagaccaaaucacuguuuggggguuccauucagauaacaaaacccaaaugaagaaccucuauggagacucaaauccucaaaaguucaccucauccgcuaauggaguaaccacacacuauguuucucagauuggcagcuucccagaucaaacagaagacggaggacuaccacaaagcggcaggauuguuguugauuacaugaugcaaaaaccugggaaaacaggaacaauugucuaccaaagagguauuuuguugccucaaaagguguggugcgcgaguggcaggagcaaaguaauaaaaggguccuugccuuuaauuggugaagcagauugccuucaugaaaaauacgguggauuaaacaaaagcaagccuuacuacacaggagaacaugcaaaagccauaggaaauugcccaauaugggugaaaacaccuuugaagcuugccaauggaaccaaauauagaccuccugcaaaacuauuaaaggaaagggguuucuucggagcuauugcugguuuccuagaaggaggaugggaaggaaugauugcaggcuggcacggauacacaucucacggagcacauggaguggcaguggcggcggaccuuaagaguacgcaagaagcuauaaacaagauaacaaaaaaucucaauucuuugagugagcuagaaguaaagaaucuucaaagacuaaguggugccauggaugaacuccacaacgaaauacucgagcuggaugagaaaguggaugaucucagagcugacacuauaagcucgcaaauagaacuugcagucuugcuuucuaacgaaggaauaauaaacagugaagaugagcaucuauuggcacuugagagaaaacuaaagaaaaugcugggucccucugcuguagagauaggaaauggaugcuucgaaaccaaacacaagugcaaccagaccugcuuagacaggauagcugcuggcaccuuuaaugcaggagaauuuucucuccccacuuuugauucacugaacauuacugcugcaucuuuaaaugaugauggauuggauaaccauacuauacugcucuauuacucaacugcugcuucuaguuuggcuguaacauugaugcuagcuauuuuuauuguuuauauggucuccagagacaacguuucaugcuccaucugucuauaa

SEQ ID NO: 59740 - RNA, 1755 nt, Artificial Sequence
  derived and/or modified CDS sequence (wt) from hemagglutinin__InfluenzaB__AGX24106
augaaggcaauaauuguacuacucaugguaguaacauccaaugcagaucgaaucugcacugggauaacaucuucaaacucaccucauguggucaaaacagcuacucaaggggaggucaaugugacuggugugauaccacuaacaacaacaccaacaaaaucuuauuuugcaaaucucaaaggaacaaggaccagagggaaacuaugcccagacugucucaacuguacagaucuggauguggccuugggcagaccaauguguguggggaccacaccuucugcgaaagcuucaauacuccacgaagucagaccuguuacauccgggugcuuuccuauaaugcacgacaggacaaaaaucaggcaacuagccaaucuucucagaggauaugaaaauaucagguuaucaacccaaaacguuaucgaugcagaaaaggcaccaggaggacccuacagacuuggaaccucaggaucuugcccuaacacuaccaguaaaagcggauuuuucgcaacaauggcuugggcugucccaaaggacaacaacaaaaacgcaacgaacccacuaacaguagaaguaccauacauuuguacagaaggggaagaccaaauuacuguuuggggauuccauucagauaacaaaacccaaaugaagaaccucuauggagacucaaauccucaaaaguucaccucaucugcuaauggaguaaccacacauuauguuucucagauuggcggcuucccagaucaaacagaagacggaggacuaccacaaagcggcagaauugucguugauuacaugaugcaaaaaccugggaaaacaggaacaauugucuaucaaagagguguuuuguugccucaaaagguguggugcgcgaguggcaggagcaaaguaauaaaaggguccuugccuuuaauuggugaagcagauugccuucaugaaaaauacgguggauuaaauaaaagcaagccuuacuacacaggagaacaugcaaaagccauaggaaauugcccaauaugggugaaaacaccuuugaagcuugccaauggaaccaaauauagaccuccugcaaaacuauuaaaggaaagggguuucuucggagcuauugcugguuuccuagaaggaggaugggaaggaaugauugcagguuggcacggauacacaucucacggagcacauggaguggcaguugcggcagaccuuaagaguacacaagaagcuauaaacaagauaacaaaaaaucucaacucuuugagugagcuagaaguaaagaaucuucaaagacuaaguggugccauggaugaacuccauaacgaaauacucgagcuggaugagaaaguggaugaucucagagcugacacuauaagcucacaaauagaacuugcaguuuugcuuuccaacgaaggaauaauaaacagugaagacgagcaucuauuggcacuugagagaaaacugaagaaaaugcugggucccucugcuguagacauaggaaauggaugcuucgaaaccaaacacaaaugcaaccaaaccugcuuagacaggauagcugcuggcaccuuuaaugcaggagaauuuucucucccuacuuuugauucauugaacauuacugcugcaucuuuaaaugaugauggauuggauaaccauacuauacugcucuauuacucaacugcugcuucuaguuuggcuguaacauugaugcuagccauuuuuauuguuuauauggucuccagagacaacguuucaugcuccaucugucuauaa

SEQ ID NO: 59741 - RNA, 1755 nt, Artificial Sequence
  derived and/or modified CDS sequence (wt) from hemagglutinin__InfluenzaB__AGX24117
augaaggcaauaauuguacuacucaugguaguaacauccaaugcagaucgaaucugcacuggaauaacaucuucaaacucaccucauguggucaaaacagccacucaaggggaggucaaugugacuggugugauaccacuaacaacaacaccaacaaaaucuuauuuugcaaaucucaaaggaacaaggaccagagggaaacuaugcccagacugucucaacugcacagaucuggauguggcuuugggcagaccaauguguguggggaccacaccuucggcgaaagcuucaauacuccacgaagucagaccuguuacauccgggugcuuuccuauaaugcacgacagaacaaaaaucaggcaacuacccaaucuucucagaggauaugaaaauaucaggcuaucaacccaaaacgucaucgaugcggaaaaggcaccaggaggacccuacagacuuggaaccucaggaucuugcccuaacacuaccaguaagagcggauuuuucgcaacaauggcuugggcugucccaaaggacaacaacaaaaaugcaacgaacccacuaacaguagaaguaccauacauuuguacagaaggggaagaccaaaucacuguuuggggguuccauucagauaacaaaacccaaaugaagaaccucuauggagacucaaauccucaaaaguucaccucaucugcuaauggaguaaccacacacuauguuucucagauuggcagcuucccagaucaaacagaagacggaggacuaccacaaagcggcaggauuguuguugauuacaugaugcaaaaaccugggaaaacaggaacaauugucuaccaaagagguauuuuguugccucaaaagguguggugcgcgaguggcaggagcaaagugauaaaaggguccuugccuuuaauuggugaagcagauugccuucaugaaaaauacgguggauuaaacaaaagcaagccuuacuacacaggagaacaugcaaaagccauaggaaauugcccaauaugggugaaaacaccuuugaagcuugccaauggaaccaaauauagaccuccugcaaaacuauuaaaggaaagggguuucuucggagcuauugcugguuuccuagaaggaggaugggaaggaaugauugcaggcuggcacggauacacaucucacggagcacauggaguggcaguggcggcggaucuuaagaguacgcaagaagcuauaaacaagauaacaaaaaaucucaauucuuugagugagcuagaaguaaagaaucuucaaagacuaaguggugccauggaugaacuccacaacgaaauacucgagcuggaugagaaaguggaugaucucagagcugacacuauaagcucgcaaauagaacuugcagucuugcuuuccaacgaaggaauaauaaacagugaagaugagcaucuauuggcacuugagagaaaacuaaagaaaaugcugggucccucugcuguagagauaggaaauggaugcuucgaaaccaaacacaagugcaaccagaccugcuuagacaggauagcugcuggcaccuuuaaugcaggagaauuuucucuccccacuuuugauucacugaacauuacugcugcaucuuuaaaugaugauggauuggauaaccauacuauacugcucuauuacucaacugcugcuucuaguuuggcuguaacauugaugcuagcuauuuuuauuguuuauauggucuccagagacaacguuucaugcuccaucugucuauaa

SEQ ID NO: 59742 - RNA, 1755 nt, Artificial Sequence
  derived and/or modified CDS sequence (wt) from hemagglutinin__InfluenzaB__AGX24128
augaaggcaauaauuguacuacucaugguaguaacauccaaugcagaucgaaucugcacugggauaacaucuucaaacucaccucauguggucaaaacagcuacucaaggggaggucaaugugacuggugugauaccacugacaacaacaccaacaaaaucuuauuuugcaaaucucaaaggaacaaggaccagagggaaacuaugcccggacugucucaacuguacagaucuggauguggccuugggcaggccaauguguguggggaccacaccuucugcuaaagcuucaauacuccacgaagucagacccguuacauccgggugcuuuccuauaaugcacgacagaacaaaaaucaggcaacuacccaaucuucucagaggauaugaaaauaucagguuaucaacccaaaacguuaucgaugcagaaaaagcaccaggaggacccuacagacuuggaaccucaggaucuugcccuaacgcuaccaguaaaaucggauuuuucgcaacaauggcuugggcugucccaaaggacaacuacaaaaaugcaacgaacccacuaacaguagaaguaccauacauuuguacagaaggggaagaccaaauuacuguuuggggguuccauucagauaacaaaacccaaaugaagaaccucuauggagacucaaauccucaaaaguucaccucaucugcuaauggaguaaccacacauuauguuucucagauuggcgacuucccagaucaaacagaagacggaggacuaccacaaagcggcagaauuguuguugauuacaugaugcaaaaaccugggaaaacaggaacaauugucuaucaaagagguguuuuguugccucaaaagguguggugcgcgaguggcaggagcaaaguaauaaaagggucauugccuuuaauuggugaagcagauugcauucaugaaaaauacgguggauuaaacaaaagcaagccuuacuacacaggagaacaugcaaaagccauaggaaauugcccaauauggguaaaaacaccuuugaagcuugccaauggaaccaaauauagaccuccugcaaaacuauuaaaggaaagggguuucuucggagcuauugcugguuuccuagaaggaggaugggaaggaaugauugcagguuggcacggauacacaucucacggagcacauggaguggcaguggcggcagaccuuaagaguacacaagaagcuauaaauaagauaacaaaaaaucucaauucuuugagugagcuagaaguaaagaaccuucaaagacuaaguggugccauggaugaacuccacaacgaaauacucgagcuggaugagaaaguggaugaucucagagcugacacuauaagcucacaaauagaacuugcagucuugcuuuccaacgaaggaauaauaaacagugaagacgagcaucuauuggcacuugagagaaaacuaaagaaaaugcugggucccucugcuguagacauaggaaauggaugcuucgaaaccaaacacaaaugcaaccagaccugcuuagacaggauagcugcuggcaccuuuaaugcaggagaauuuucucuccccacuuuugauucauugaacauuacugcugcaucuuuaaaugaugauggauuggauaaccauacuauacugcucuauuacucaacugcugcuucuaguuuggcuguaacauuaaugcuagcuauuuuuauuguuuauauggucuccagagacaacguuucaugcuccaucugucuauaa

SEQ ID NO: 59743 - RNA, 1755 nt, Artificial Sequence
  derived and/or modified CDS sequence (wt) from hemagglutinin__InfluenzaB__AGX24139
augaaggcaauaauuguacuacucaugguaguaacauccaaugcagaucgaaucugcacugggauaacaucuucaaacucaccucauguggucaaaacagcuacucaaggggaggucaaugugacuggugugauaccacugacaacaacaccaacaaaaucuuauuuugcaaaucucaaagggacaaggaccagagggaaacuaugcccagacugucucaacuguacagaucuggauguggccuugggcaggccaauguguguggggaccacaccuucugcgaaagcuucaauacuccacgaagucagaccuguuacauccgggugcuuuccuauaaugcacgacagaacaaaaaucaggcaacuagccaaucuucucagaggauaugaaaauaucagguuaucaacccaaaacguuaucgaugcagaaaaggcaccaggaggacccuacagacuuggaaccucaggaucuugcccuaacgcuaccaguaaaagcggauuuuucgcaacaauggcuugggcugucccaaaggacaacaacaaaaaugcaacgaacccacuaacaguagaaguaccauacauuuguacagaaggggaagaccaaauuacuguuuggggguuccauucagauaacaaaacccaaaugaagaaccucuauggagacucaaauccucaaaaguucaccucaucugcuaauggaguaaccacacauuauguuucucagauuggcggcuucccagaucaaacagaagacggaggacuaccacaaagcggcagaauugucguugauuacaugaugcaaaaaccugggaaaacaggaacaauugucuaucaaagagguguuuuguugccucaaaagguguggugcgcgaguggcaggagcaaaguaauaaaaggguccuugccuuuaauuggugaagcagauugccuucaugaaaaauacgguggauuaaacaaaagcaagccuuacuacacaggagaacaugcaaaagccauaggaaauugcccaauaugggugaaaacaccuuugaagcuugccaauggaaccaaauauagaccuccugcaaaacuauuaaaggaaagggguuucuucggagcuauugcugguuuccuagaaggaggaugggaaggaaugauugcagguuggcacggauacacaucucacggagcacauggaguggcaguggcggcagaccuuaagaguacacaagaagcuauaaacaagauaacaaaaaaucucaacucuuugagugagcuagaaguaaagaaccuucaaagacuaaguggugccauggaugaacuccacaacgaaauacucgagcuggaugagaaaguggaugaucucagagcugacacuauaagcucacaaauagaacuugcagucuugcuuuccaacgaaggaauaauaaacagugaagaugagcaucuauuagcacuugagagaaaacuaaagaaaaugcugggucccucugcuguagacauaggaaauggaugcuucgaaaccaaacacaaaugcaaccagaccugcuuagacaggauagcugcuggcaccuuuaaugcaggggaauuuucucuccccacuuuugauucauugaacauuacugcugcaucuuuaaaugaugauggauuggauaaccauacuauacugcucuauuacucaacugcugcuucuaguuuggcuguaacauugaugcuagcuauuuuuauuguuuauauggucuccagagacaacguuucaugcuccaucugucuauaa

SEQ ID NO: 59744 - RNA, 1755 nt, Artificial Sequence
  derived and/or modified CDS sequence (wt) from hemagglutinin__InfluenzaB__AGX24150
augaaggcaauaauuguacuacucaugguaguaacauccaaugcagaucgaaucugcacuggaauaacaucuucaaacucaccucauguggucaaaacagccacucaaggggaggucaaugugacuggugugauaccacuaacaacaacaccaacaaaaucuuauuuugcaaaucucaaaggaacaaggaccagagggaaacuaugcccauacugucucaacugcacagaucuggauguggcuuugggcagaccaauguguguggggaccacaccuucggcgaaagcuucaauacuccacgaagucagaccuguuacauccgggugcuuuccuauaaugcacgacagaacaaaaaucaggcaacuacccaaucuucucagaggauaugaaaauaucaggcuaucaacccaaaacgucaucgaugcggaaaaggcaccaggaggacccuacagacuuggaaccucaggaucuugcccuaacgcuaccaguaagagcggauuuuucgcaacaauggcuugggcugucccaaaggacaacaacaaaaaugcaacgaacccacuaacaguagaaguaccauacauuuguacagaaggggaagaccaaaucacuguuuggggguuccauucagauaacaaaacccaaaugaagaaccucuauggagacucaaauccucaaaaguucaccucaucugcuaauggaguaaccacacacuauguuucucagauuggcagcuucccagaucaaacagaagacggaggacuaccacaaagcggcaggauuguuguugauuacaugaugcaaaaaccugggaaaacaggaacaauugucuaccaaagagguauuuuguugccucaaaagguguggugcgcgaguggcaggagcaaaguaauaaaaggguccuugccuuuaauuggugaagcagauugccuucaugaaaaauacgguggauuaaacaaaagcaagccuuacuacacaggagaacaugcaaaagccauaggaaauugcccaauaugggugaaaacaccuuugaagcuugccaauggaaccaaauauagaccuccugcaaaacuauuaaaggaaagggguuucuucggagcuauugcugguuuccuagaaggaggaugggaaggaaugauugcaggcuggcacggauacacaucucacggagcacauggaguggcaguggcggcggaccuuaagaguacgcaagaagcuauaaacaagauaacaaaaaaucucaauucuuugagugagcuagaaguaaagaaucuucaaagacuaaguggugccauggaugaacuccacaacgaaauacucgagcuggaugagaaaguggaugaucucagagcugacacuauaagcucgcaaauagaacuugcagucuugcuuuccaacgaaggaauaauaaacagugaagaugagcaucuauuggcacuugagagaaaacuaaagaaaaugcugggucccucugcuguagagauaggaaauggaugcuucgaaaccaaacacaagugcaaccagaccugcuuagacaggauagcugcuggcaccuuuaaugcaggagaauuuucucuccccacuuuugauucacugaacauuacugcugcaucuuuaaaugaugauggauuggauaaccauacuauacugcucuauuacucaacugcugcuucuaguuuggcuguaacauugaugcuagcuauuuuuauuguuuauauggucuccagagacaacguuucaugcuccaucugucuauaa

SEQ ID NO: 59745 - RNA, 1755 nt, Artificial Sequence
  derived and/or modified CDS sequence (wt) from hemagglutinin__InfluenzaB__AGX24161
augaaggcaauaauuguacuacucaugguaguaacauccaaugcagaucgaaucugcacuggaauaacaucuucaaacucaccucauguggucaaaacagccacucaaggggaggucaaugugacuggugugauaccacuaacaacaacaccaacaaaaucuuauuuugcaaaucucaaaggaacaaggaccagagggaaacuaugcccagacugucucaacugcacagaucuggauguggcuuugggcagaccaauguguguggggaccacaccuucggcgaaagcuucaauacuccacgaagucagaccuguuacauccgggugcuuuccuauaaugcacgacagaacaaaaaucaggcaacuacccaaucuucucagaggauaugaaaauaucaggcuaucaacccaaaacgucaucgaugcggaaaaggcaccaggaggacccuacagacuuggaaccucaggaucuugcccuaacgcuaccaguaagagcggauuuuucgcaacaauggcuugggcugucccaaaggacaacaacaaaaaugcaacgaacccacuaacaguagaaguaccauacauuuguacagaaggggaagaccaaaucacuguuuggggguuccauucagauaacaaaacccaaaugaagaaccucuauggagacucaaauccucaaaaguucaccucaucugcuaauggaguaaccacacacuauguuucucagauuggcagcuucccagaucaaacagaagacggaggacuaccacaaagcggcaggauuguuguugauuacaugaugcaaaaaccugggaaaacaggaacaauugucuaccaaagagguauuuuguugccucaaaagguguggugcgcgaguggcaggagcaaaguaauaaaaggguccuugccuuuaauuggugaagcagauugccuucaugaaaaauacgguggauuaaacaaaagcaagccuuacuacacaggagaacaugcaaaagccauaggaaauugcccaauaugggugaaaacaccuuugaagcuugccaauggaaccaaauauagaccuccugcaaaacuauuaaaggaaagggguuucuucggagcuauugcugguuuccuagaaggaggaugggaaggaaugauugcaggcuggcacggauacacaucucacggagcacauggaguggcaguggcggcggaccuuaagaguacgcaagaagcuauaaacaagauaacaaaaaaucucaauucuuugagugagcuagaaguaaagaaucuucaaagacuaaguggugccauggaugaacuccacaacgaaauacucgagcuggacgagaaaguggaugaucucagagcugacacuauaagcucgcaaauagaacuugcagucuugcuuuccaacgaaggaauaauaaacagugaagaugagcaucuauuggcacuugagagaaaacuaaagaaaaugcugggucccucugcuguagagauaggaaauggaugcuucgaaaccaaacacaagugcaaccagaccugcuuagacaggauagcugcuggcaccuuuaaugcaggagaauuuucucuccccacuuuugauucacugaacauuacugcugcaucuuuaaaugaugauggauuggauaaccauacuauacugcucuauuacucaacugcugcuucuaguuuggcuguaacauugaugcuagcuauuuuuauuguuuauauggucuccagagacaacguuucaugcuccaucugucuauaa

SEQ ID NO: 59746 - RNA, 1755 nt, Artificial Sequence
  derived and/or modified CDS sequence (wt) from hemagglutinin__InfluenzaB__AGX24172
augaaggcaauaauuguacuacucaugguaguaacauccaaugcagaucgaaucugcacugggauaacaucuucaaacucaccucauguggucaaaacagcuacucaaggggaggucaaugugacuggugugauaccacugacaacaacaccaacaaaaucuuauuuugcaaaucucaaaggaacaaggaccagagggaagcuaugcccggacugucucaacuguacagaucuggauguggccuugggcaggccaauguguguggggaccacaccuucugcuaaagcuucaauacuccacgaagucagaccuguuacauccgggugcuuuccuauaaugcacgacagaacaaaaaucaggcaacuacccaaucuucucagaggauaugaaaauaucagguuaucaacccaaaacguuaucgaugcagaaaaagcaccaggaggacccuacagacuuggaaccucaggaucuugcccuaacgcuaccaguaaaaucggauuuuucgcaacaauggcuugggcugucccaaaggacaacuacaaaaaugcaacgaacccacuaacaguagaaguaccauacauuuguacagaaggggaagaccaaauuacuguuuggggguuccauucagauaacaaaacccaaaugaagaaccucuauggagacucaaauccucaaaaguucaccucaucugcuaauggaguaaccacacauuauguuucucagauuggcgacuucccagaucaaacagaagacggaggacuaccacaaagcggcagaauuguuguugauuacaugaugcaaaaaccugggaaaacaggaacaauugucuaucaaagagguguuuuguugccucaaaagguguggugcgcgaguggcaggagcaaaguaauaaaagggucauugccuuuaauuggugaagcagauugccuucaugaaaaauacgguggauuaaacaaaagcaagccuuacuacacaggagaacaugcaaaagccauaggaaauugcccaauauggguaaaaacaccuuugaagcuugccaauggaaccaaauauagaccuccugcaaaacuauuaaaggaaagggguuucuucggagcuauugcugguuuccuagaaggaggaugggaaggaaugauugcagguuggcacggauacacaucucacggagcacauggaguggcaguggcggcagaccuuaagaguacacaagaagcuauaaauaagauaacaaaaaaucucaauucuuugagugagcuagaaguaaagaaccuucaaagacuaaguggugccauggaugaacuccacaacgaaauacucgagcuggaugagaaaguggaugaucucagagcugacacuauaagcucacaaauagaacuugcagucuugcuuuccaacgaaggaauaauaaacagugaagacgagcaucuauuggcacuugagagaaaacuaaagaaaaugcugggucccucugcuguagacauaggaaauggaugcuucgaaaccaaacacaaaugcaaccagaccugcuuagacaggauagcugcuggcaccuuuaaugcaggagaauuuucucuccccacuuuugauucauugaacauuacugcugcaucuuuaaaugaugauggauuggauaaccauacuauacugcucuauuacucaacugcugcuucuaguuuggcuguaacauuaaugcuagcuauuuuuauuguuuauauggucuccagagacaacguuucaugcuccaucugucuauaa

SEQ ID NO: 59747 - RNA, 1755 nt, Artificial Sequence
  derived and/or modified CDS sequence (wt) from hemagglutinin__InfluenzaB__AGX24183
augaaggcaauaauuguacuacucaugguaguaacauccaaugcagaucgaaucugcacugggauaacaucuucaaacucaccucauguggucaaaacagcuacucaaggggaggucaaugugacuggcgugauaccacugacaacaacaccaacaaaaucuuauuuugcaaaucucaaaggaacaaggaccagagggaaacuaugcccggacugucucaacuguacagaucuggauguggccuugggcaggccaauguguguggggaccacaccuucugcuaaagcuucaauacuccacgaagucagaccuguuacauccgggugcuuuccuauaaugcacgacagaacaaaaaucaggcaacuacccaaucuucucagaggauaugaaaauaucagguuaucaacccagaacguuaucgaugcagaaaaagcaccaggaggacccuacagacuuggaaccucaggaucuugcccuaaugcuaccaguaaaaucggauuuuucgcaacaauggcuugggcugucccaaaggacaacuacaaaaaugcaacgaacccacuaacaguagaaguaccauacauuuguacagaaggggaagaccaaauuacuguuuggggguuccauucagauaacaaaacccaaaugaagaaccucuauggagacucaaauccucaaaaguucaccucaucugcuaauggaguaaccacacauuauguuucucaaauuggcgacuucccagaucaaacagaagacggaggacuaccacaaagcggcagaauuguuguugauuacaugaugcaaaaaccugggaaaacaggaacaauugucuaucaaagagguguuuuguugccucaaaagguguggugcgcgaguggcaggagcaaaguaauaaaagggucauugccuuuaauuggugaagcagauugccuucaugaaaaauacgguggauuaaacaaaagcaagccuuacuacacaggagaacaugcaaaagccauaggaaauugcccaauauggguaaaaacaccuuugaagcuugccaauggaaccaaauauagaccuccugcaaaacuauuaaaggaaagggguuucuucggagcuauugcugguuuccuagaaggaggaugggaaggaaugauugcagguuggcacggauacacaucucacggagcacauggaguggcaguggcggcagaccuuaagaguacacaagaagcuauaaauaagauaacaaaaaaucucaauucuuugagugagcuagaaguaaagaaccuucaaagacuaaguggugccauggaugaacuccacaacgaaauacucgagcuggaugagaaaguggaugaucucagagcugacacuauaagcucacaaauagaacuugcagucuugcuuuccaacgaaggaauaauaaacagugaagacgagcaucuauuggcacuugagagaaaacuaaagaaaaugcugggccccucugcuguagacauaggaaauggaugcuucgaaaccaaacacaaaugcaaccagaccugcuuagacaggauagcugcuggcaccuuuaaugcaggagaauuuucucuccccacuuuugauucauugaacauuacugcugcaucuuuaaaugaugauggauuggauaaccauacuauacugcucuauuacucaacugcugcuucuaguuuggcuguaacauuaaugcuagcuauuuuuauuguuuauauggucuccagagacaacguuucaugcuccaucugucuauaa

SEQ ID NO: 59748 - RNA, 1755 nt, Artificial Sequence
  derived and/or modified CDS sequence (wt) from hemagglutinin__InfluenzaB__AGX24194
augaaggcaauaauuguacuacucaugguaguaacauccaaugcagaucgaaucugcacugggauaacaucuucaaacucaccucauguggucaaaacagcuacucaaggggaggucaaugugacuggcgugauaccacugacaacaacaccaacaaaaucuuauuuugcaaaccucaaaggaacaaggaccagagggaaacuaugcccggacugucucaacuguacagaucuggauguggccuugggcaggccaauguguguggggaccacaccuucugcuaaagcuucaauacuccacgaagucagaccuguuacauccgggugcuuuccuauaaugcacgacagaacaaaaaucaggcaacuacccaaucuucucagaggauaugaaaauaucagguuaucaacccagaacguuaucgaugcagaaaaagcaccaggaggacccuacagacuuggaaccucaggaucuugcccuaaugcuaccaguaaaaucggauuuuucgcaacaauggcuugggcugucccaaaggacaacuacaaaaaugcaacgaacccacuaacaguagaaguaccauacauuuguacagaaggggaagaccaaauuacuguuuggggguuccauucagauaacaaaacccaaaugaagaaccucuauggagacucaaauccucaaaaguucaccucaucugcuaauggaguaaccacacauuauguuucucagauuggcgacuucccagaucaaacagaagacggaggacuaccacaaagcggcagaauuguuguugauuacaugaugcaaaaaccugggaaaacaggaacaauugucuaucaaagagguguuuuguugccucaaaagguguggugcgcgaguggcaggagcaaaguaauaaaagggucauugccuuuaauuggugaagcagauugccuucaugaaaaauacgguggauuaaacaaaagcaagccuuacuacacaggagaacaugcaaaagccauaggaaauugcccaauauggguaaaaacaccuuugaagcuugccaauggaaccaaauauagaccuccugcaaaacuauuaaaggaaagggguuucuucggagcuauugcugguuuccuagaaggaggaugggaaggaaugauugcagguuggcacggauacacaucucacggagcacauggaguggcaguggcggcagaccuuaagaguacacaagaagcuauaaacaagauaacaaaaaaucucaauucuuugagugagcuggaaguaaagaaccuucaaagacuaaguggugccauggaugaacuccacaacgaaauacucgagcuggaugagaaaguggaugaucucagagcugacacuauaagcucacaaauagaacuugcagucuugcuuuccaacgaaggaauaauaaacagugaagacgagcaucuauuggcacuugagagaaaacuaaagaaaaugcugggccccucugcuguagacauaggaaauggaugcuucgaaaccaaacacaaaugcaaccagaccugcuuagacaggauagcugcuggcaccuuuaaugcaggagaauuuucucuccccacuuuugauucauugaacauuacugcugcaucuuuaaaugaugauggauuggauaaccauacuauacugcucuauuacucaacugcugcuucuaguuuggcuguaacauuaaugcuagcuauuuuuauuguuuauauggucuccagagacaacguuucaugcuccaucugucuauaa

SEQ ID NO: 59749 - RNA, 1755 nt, Artificial Sequence
  derived and/or modified CDS sequence (wt) from hemagglutinin__InfluenzaB__AGX24205
augaaggcaauaauuguacuacucaugguaguaacauccaaugcagaucgaaucugcacuggaauaacaucuucaaacucaccucacguggucaaaacagccacucaaggggaggucaaugugacuggugugauaccacuaacaacaacaccaacaaaaucuuauuuugcaaaucucaaaggaacaaggaccagagggaaacuaugcccagacugucucaacugcacagaucuggauguggcuuugggcagaccaauguguguggggaccacaccuucggcgaaagcuucaauacuccacgaagucagaccuguuacauccgggugcuuuccuauaaugcacgacagaacaaaaaucaggcaacuacccaaucuucucagaggauaugaaaauaucaggcuaucaacccaaaacgucaucgaugcggaaaaggcaccaggaggacccuacagacuuggaaccucaggaucuugcccuaacgcuaccaguaagagcggauuuuucgcaacaauggcuugggcugucccaaaggacaacaacaaaaaugcaacgaacccacuaacaguagaaguaccauacauuuguacagaaggggaagaccaaaucacuguuuggggguuccauucagauaacaaaacccaaaugaagaaccucuauggagacucaaauccucaaaaguucaccucaucugcuaauggaguaaccacacacuauguuucucagauuggcagcuucccagaucaaacagaagacggaggacuaccacaaagcggcaggauuguuguugauuacaugaugcaaaaaccugggaaaacaggaacaauugucuaccaaagagguguuuuguugccucaaaagguguggugcgcgaguggcaggagcaaaguaauaaaaggguccuugccuuuaauuggugaagcagauugccuucaugaaaaauacgguggauuaaacaaaagcaagccuuacuacacaggagaacaugcaaaagccauaggaaauugcccaauaugggugaaaacaccuuugaagcuugccaauggaaccaaauauagaccuccugcaaaacuauuaaaggaaagggguuucuucggagcuauugcugguuuccuagaaggaggaugggaaggaaugauugcaggcuggcacggauacacaucucacggagcacauggaguggcaguggcggcggaccuuaagagcacacaagaagcuauaaacaagauaacaaaaaaucucaauucuuugagugagcuagaaguaaagaaucuucaaagacuaaguggugccauggaugaacuccacaacgaaauacucgagcuggaugagaaaguggaugaucucagagcugacacuauaagcucgcaaauagaacuugcagucuugcuuuccaacgaaggaauaauaaacagugaagaugagcaucuauuggcacuugagagaaaacuaaagaaaaugcugggucccucugcuguagagauaggaaauggaugcuucgaaaccaaacacaagugcaaccagaccugcuuagacaggauagcugcuggcaccuuuaaugcaggagaauuuucucuccccacuuuugauucacugaacauuacugcugcaucuuuaaaugaugauggauuggauaaccauacuauacugcucuauuacucaacugcugcuucuaguuuggcuguaacauugaugcuagcuauuuuuauuguuuauauggucuccagagacaacguuucaugcuccaucugucuauaa

SEQ ID NO: 59750 - RNA, 1755 nt, Artificial Sequence
  derived and/or modified CDS sequence (wt) from hemagglutinin__InfluenzaB__AGX24227
augaaggcaauaauuguacuacucaugguaguaacauccaaugcagaucgaaucugcacugggauaacaucuucaaacucaccucauguggucaaaacagcuacucaaggggaggucaaugugacuggugugauaccacugacaacaacaccaacaaaaucuuauuuugcaaaucucaaaggaacaaagaccagagggaaacuaugcccagacugucucaacuguacagaucuagauguggccuugggcaggccaaugugugugggaaccacaccuucugcgaaagcuucaauacuccacgaagucagaccuguuacauccgggugcuuuccuauaaugcacgacagaacaaaaaucaggcaacuagccaaucuucucagaggauaugaaaauaucagguuaucaacccaaaacguuaucgaugcagaaaaggcaccaggaggacccuacagacuuggaaccucaggaucuugcccuaacgcuaccaguaaaagcggauuuuucgcaacaauggcuugggcugucccaaaggacaacaacaaaaaugcaacgaacccacuaacaguagaaguaccauacauuuguacagaaggggaagaccaaauuacuguuuggggguuccauucagauaacaaaacccaaaugaagaaccucuauggagacucaaauccucaaaaguucaccucaucugcuaauggaguaaccacacauuauguuucucagauuggcggcuucccagaucaaacagaagacggaggacuaccacaaagcggcagaauugucguugauuacaugaugcaaaaaccugggaaaacaggaacaauugucuaucaaagagguguuuuguugccucaaaagguguggugcgcgaguggcaggagcaaaguaauaaaaggguccuugccuuuaauuggugaagcagauugccuucaugaaaaauacgguggauuaaacaaaagcaagccuuacuacacaggagaacaugcaaaagccauaggaaauugcccaauaugggugaaaacaccuuugaagcuugccaauggaaccaaauauagaccuccugcaaaacuauuaaaggaaagggguuucuucggagcuauugcugguuuccuagaaggaggaugggaaggaaugauugcagguuggcacggauacacaucucacggagcacauggaguggcaguugcggcagaccuuaagaguacacaagaagcuauaaacaagauaacaaaaaaucucaacucuuugagugagcuagaaguaaagaaucuucaaagacuaaguggugccauggaugaacuccacaacgaaauacucgagcuggacgagaaaguggaugaucucagagcugacacuauaagcucacaaauagaacuugcagucuugcuuuccaacgaaggaauaauaaacagugaagacgagcaucuauuggcacuugagagaaaacuaaagaaaaugcugggucccucugcuguagacauaggaaauggaugcuucgagaccaaacacaaaugcaaccagaccugcuuagacaggauagcugcuggcaccuuuaaugcaggagaguuuucucuccccacuuuugauucauugaacauuacugcugcaucuuuaaaugaugauggauuggauaaccauacuauacugcucuauuacucaacugcugcuucuaguuuggcuguaacauugauguuggcuauuuuuauuguuuauauggucuccagagacaacguuucaugcuccaucugucuauaa

SEQ ID NO: 59751 - RNA, 1755 nt, Artificial Sequence
  derived and/or modified CDS sequence (wt) from hemagglutinin__InfluenzaB__AGX24238
augaaggcaauaauuguacuacucaugguaguaacauccaaugcagaucgaaucugcacugggauaacaucuucaaacucaccucauguggucaaaacagcuacucaaggggaggucaaugugacuggcgugauaccacugacaacaacaccaacaaaaucuuauuuugcaaaccucaaaggaacaaggaccagagggaaacuaugcccggacugucucaacuguacagaucuggauguggccuugggcaggccaauguguguggggaccacaccuucugcuaaagcuucaauacuccacgaagucagaccuguuacauccgggugcuuuccuauaaugcacgacagaacaaaaaucaggcaacuacccaaucuucucagaggauaugaaaauaucagguuaucaacccagaacguuaucgaugcagaaaaagcaccaggaggacccuacagacuuggaaccucaggaucuugcccuaaugcuaccaguaaaaucggauuuuucgcaacaauggcuugggcugucccaaaggacaacuacaaaaaugcaacgaacccacuaacaguagaaguaccauacauuuguacagaaggggaagaccaaauuacuguuuggggguuccauucagauaacaaaacccaaaugaagaaccucuauggagacucaaauccucaaaaguucaccucaucugcuaauggaguaaccacacauuauguuucucagauuggcgacuucccagaucaaacagaagacggaggacuaccacaaagcggcagaauuguuguugauuacaugaugcaaaaaccugggaaaacaggaacaauugucuaucaaagagguguuuuguugccucaaaagguguggugcgcgaguggcagaagcaaaguaauaaaagggucauugccuuuaauuggugaagcagauugccuucaugaaaaauacgguggauuaaacaaaagcaagccuuacuacacaggagaacaugcaaaagccauaggaaauugcccaauauggguaaaaacaccuuugaagcuugccaauggaaccaaauauagaccuccugcaaaacuauuaaaggaaagggguuucuucggagcuauugcugguuuccuagaaggaggaugggaaggaaugauugcagguuggcacggauacacaucucacggagcacauggaguggcaguggcggcagaccuuaagaguacacaagaagcuauaaauaagauaacaaaaaaucucaauucuuugagugagcuagaaguaaagaaccuucaaagacuaaguggugccauggaugaacuccacaacgaaauacucgagcuggaugagaaaguggaugaucucagagcugacacuauaagcucacaaauagaacuugcagucuugcuuuccaacgaaggaauaauaaacagugaagacgagcaucuauuggcacuugagagaaaacuaaagaaaaugcugggccccucugcuguagacauaggaaauggaugcuucgaaaccaaacacaaaugcaaccagaccugcuuagacaggauagcugcuggcaccuuuaaugcaggagaauuuucucuccccacuuuugauucauugaacauuacugcugcaucuuuaaaugaugauggauuggauaaccauacuauacugcucuauuacucaacugcugcuucuaguuuggcuguaacauuaaugcuagcuauuuuuauuguuuauauggucuccagagacaacguuucaugcuccaucugucuauaa

SEQ ID NO: 59752 - RNA, 1755 nt, Artificial Sequence
  derived and/or modified CDS sequence (wt) from hemagglutinin__InfluenzaB__AGX24249
augaaggcaauaauuguacuacucaugguaguaacauccaaugcagaucgaaucugcacugggauaacaucuucaaaaucaccucauguggucaaaacagcuacucaaggggaggucaaugugacuggugugauaccacugacaacaacaccaacaaaaucuuauuuugcaaaucucaaaggaacaaggaccagagggaaacuaugcccggacugucucaacuguacagaucuggauguggccuugggcaggccaauguguguggggaccacaccuucugcuaaagcuucaauacuccacgaagucagaccuguuacauccgggugcuuuccuauaaugcacgacagaacaaaaaucaggcaacuacccaaucuucucagaggauaugaaaauaucagguuaucaacccaaaacguuaucgaugcagaaaaagcaccaggaggacccuacagacuuggaaccucaggaucuugcccuaacgcuaccaguaaaaucggauuuuucgcaacaauggcuugggcugucccaaaggacaacuacaaaaaugcaacgaacccacuaacaguagaaguaccauacauuuguacagaaggggaagaccaaauuacuguuuggggguuccauucagauaacaaaacccaaaugaagaaccucuauggagacucaaauccucaaaaguucaccucaucugcuaauggaguaaccacacauuauguuucucagauuggcgacuucccagaucaaacagaagacggaggacuaccacaaagcggcagaauuguuguugauuacaugaugcaaaaaccugggaaaacaggaacaauugucuaucaaagagguguuuuguugccucaaaagguguggugcgcgaguggcaggagcaaaguaauaaaagggucauugccuuuaauuggugaagcagauugccuucaugaaaaauacgguggauuaaacaaaagcaagccuuacuacacaggagaacaugcaaaagccauaggaaauugcccaauauggguaaaaacaccuuugaagcuugccaauggaaccaaauauagaccuccugcaaaacuauuaaaggaaagggguuucuucggagcuauugcugguuuccuagaaggaggaugggaaggaaugauugcagguuggcacggauacacaucucacggagcacauggaguagcaguggcggcagaccuuaagaguacacaagaagcuauaaauaagauaacaaaaaaucucaauucuuugagugagcuagaaguaaagaaccuucaaagacuaaguggugccauggaugaacuccacaacgaaauacucgagcuggaugagaaaguggaugaucucagagcugacacuauaagcucacaaauagaacuugcagucuugcuuuccaacgaaggaauaauaaacagugaagacgagcaucuauuggcacuugagagaaaacuaaagaaaaugcugggucccucugcuguagacauaggaaauggaugcuucgaaaccaaacacaaaugcaaccagaccugcuuagacaggauagcugcuggcaccuuuaaugcaggagaauuuucucuccccacuuuugauucauugaacauuacugcugcaucuuuaaaugaugauggauuggauaaccauacuauacugcucuauuacucaacugcugcuucuaguuuggcuguaacauuaaugcuagcuauuuuuauuguuuauauggucuccagagacaacguuucaugcuccaucugucuauaa

SEQ ID NO: 59753 - RNA, 1755 nt, Artificial Sequence
  derived and/or modified CDS sequence (wt) from hemagglutinin__InfluenzaB__AGX24260
augaaggcaauaauuguacuacucaugguaguaacauccaaugcagaucgaaucugcacuggaauaacaucuucaaacucaccucacguggucaaaacagccacucaaggggaggucaaugugacuggugugauaccacuaacaacaacaccaacaaaaucuuauuuugcaaaucucaaaggaacaaggaccagagggaaacuaugcccagacugucucaacugcacagaucuggauguggcuuugggcagaccaauguguguggggaccacaccuucggcgaaagccucaauacuccacgaagucagaccuguuacauccgggugcuuuccuauaaugcacgacagaacaaaaaucaggcaacuacccaaucuucucagaggauaugaaaauaucaggcuaucaacccaaaacgucaucgaugcggaaaaggcaccaggaggacccuacagacuuggaaccucaggaucuugcccuaacgcuaccaguaagagcggauuuuucgcaacaauggcuugggcugucccaaaggacaacaacaaaaaugcaacgaacccacuaacaguagaaguaccauacauuuguacagaaggggaagaccaaaucacuguuuggggguuccauucagauaacaaaacccaaaugaagaaccucuauggagacucaaauccucaaaaguucaccucaucugcuaauggaguaaccacacacuauguuucucagauuggcagcuucccagaucaaacagaagacggaggacuaccacaaagcggcaggauuguuguugauuacaugaugcaaaaaccugggaaaacaggaacaauugucuaccaaagagguguuuuguugccucaaaagguguggugcgcgaguggcaggagcaaaguaauaaaaggguccuugccuuuaauuggugaagcagauugccuucaugaaaaauacgguggauuaaacaaaagcaagccuuacuacacaggagaacaugcaaaagccauaggaaauugcccaauaugggugaaaacaccuuugaagcuugccaauggaaccaaauauagaccuccugcaaaacuauuaaaggaaagggguuucuucggagcuauugcugguuuccuagaaggaggaugggaaggaaugauugcaggcuggcacggauacacaucucacggagcacauggaguggcaguggcggcggaccuuaagagcacgcaagaagcuauaaacaagauaacaaaaaaucucaauucuuugagugagcuagaaguaaagaaucuucaaagacuaaguggugccauggaugaacuccacaacgaaauacucgagcuggaugagaaaguggaugaucucagagcugacacuauaagcucgcaaauagaacuugcagucuugcuuuccaacgaaggaauaauaaacagugaagaugagcaucuauuggcacuugagagaaaacuaaagaaaaugcugggucccucugcuguagagauaggaaauggaugcuucgaaaccaaacacaagugcaaccagaccugcuuagacaggauagcugcuggcaccuuuaaugcaggagaauuuucucuccccacuuuugauucacugaacauuacugcugcaucuuuaaaugaugauggauuggauaaccauacuauacugcucuauuacucaacugcugcuucuaguuuggcuguaacauugaugcuagcuauuuuuauuguuuauauggucuccagagacaacguuucaugcuccaucugucuauaa

SEQ ID NO: 59754 - RNA, 1755 nt, Artificial Sequence; identical to SEQ ID NO: 59329
  derived and/or modified CDS sequence (wt) from hemagglutinin__InfluenzaB__AGX24271

SEQ ID NO: 59755 - RNA, 1755 nt, Artificial Sequence
  derived and/or modified CDS sequence (wt) from hemagglutinin__InfluenzaB__AGX24282
augaaggcaauaauuguacuacucaugguaguaacauccaaugcagaucgaaucugcacuggaauaacauccucaaacucaccucauguggucaaaacagccacucaaggggaggucaaugugacuggugugauaccacuaacaacaacaccaacaaaaucuuauuuugcaaaucucaaaggaacaaggaccagagggaaacuaugcccagacugucucaacugcacagaucuggauguggcuuugggcagaccaauguguguggggaccacaccuucggcgaaagcuucaauacuccacgaagucagaccuguuacauccgggugcuuuccuauaaugcacgacagaacaaaaaucaggcaacuacccaaucuucucagaggauaugaaaauaucaggcuaucaacccaaaacgucaucgaugcggaaaaggcaccaggaggacccuacagacuuggaaccucaggaucuugcccuaacgcuaccaguaagagcggauuuuucgcaacaauggcuugggcugucccaaaggacaacaacaaaaaugcaacgaacccacuaacaguagaaguaccauacauuuguacaaaaggggaagaccaaaucacuguuuggggguuccauucagauaacaaaacccaaaugaagaaccucuauggagacucaaauccucaaaaguucaccucaucugcuaauggaguaaccacacacuauguuucucagauuggcagcuucccagaucaaacagaagacggaggacuaccacaaagcggcaggauuguuguugauuacaugaugcaaaaaccugggaaaacaggaacaauugucuaccaaagagguguuuuguugccucaaaggguguggugcgcgaguggcaggagcaaaguaauaaaaggguccuugccuuuaauuggugaagcagauugccuucaugaaaaauacgguggauuaaacaaaagcaagccuuacuacacaggagaacaugcaaaagccauaggaaauugcccaauaugggugaaaacaccuuugaagcuugccaauggaaccaaauauagaccuccugcaaaacuauuaaaggaaagggguuucuucggagcuauugcugguuuccuagaaggaggaugggaaggaaugauugcaggcuggcacggauacacaucucacggagcacauggaguggcaguggcggcggaccuuaagaguacgcaagaagcuauaaauaagauaacaaaaaaucucaauucuuugagugagcuagaaguaaagaaucuucaaagacuaaguggugccauggaugaacuccacaacgaaauacucgagcuggaugagaaaguggaugaucucagagcugacacuauaagcucgcaaauagaacuugcagucuugcuuuccaacgaaggaauaauaaacagugaagaugagcaucuauuggcacuugagagaaaacuaaagaaaaugcugggucccucugcuguagagauaggaaauggaugcuucgaaaccaaacacaagugcaaccagaccugcuuagacaggauagcugcuggcaccuuuaaugcaggagaauuuucucuccccacuuuugauucacugaacauuacugcugcaucuuuaaaugaugauggauuggauaaccauacuauacugcucuauuacucaacugcugcuucuaguuuggcuguaacauugaugcuagcuauuuuuauuguuuauauggucuccagagacaacguuucaugcuccaucugucuauaa

SEQ ID NO: 59756 - RNA, 1755 nt, Artificial Sequence
  derived and/or modified CDS sequence (wt) from hemagglutinin__InfluenzaB__AGX24293
augaaggcaauaauuguacuacucaugguaguaacauccaaugcagaucgaaucugcacuggaauaacaucuucaaacucaccucacguggucaaaacagccacucaaggggaggucaaugugacuggugugauaccacuaacaacaacaccaacaaaaucuuauuuugcaaaucucaaaggaacaaggaccagagggaaacuaugcccagacugucucaacugcacagaucuggauguggcuuugggcagaccaauguguguggggaccacaccuucggcgaaagccucaauacuccacgaagucagaccuguuacauccgggugcuuuccuauaaugcacgacagaacaaaaaucaggcaacuacccaaucuucucagaggauaugaaaauaucaggcuaucaacccaaaacgucaucgaugcggaaaaggcaccaggaggacccuacagacuuggaaccucaggaucuugcccuaacgcuaccaguaagagcggauuuuucgcaacaauggcuugggcugucccaaaggacaacaacaaaaaugcaacgaacccacuaacaguagaaguaccauacauuuguacagaaggggaagaccaaaucacuguuuggggguuccauucagauaacaaaacccaaaugaagaaccucuauggagacucaaauccucaaaaguucaccucaucugcuaauggaguaaccacacacuauguuucucagauuggcagcuucccagaucaaacagaagacggaggacuaccacaaagcggcaggauuguuguugauuacaugaugcaaaaaccugggaaaacaggaacaauugucuaccaaagagguguuuuguugccucaaaagguguggugcgcgaguggcaggagcaaaguaauaaaaggguccuugccuuuaauuggugaagcagauugccuucaugaaaaauacgguggauuaaacaaaagcaagccuuacuacacaggagaacaugcaaaagccauaggaaauugcccaauaugggugaaaacaccuuugaagcuugccaauggaaccaaauauagaccuccugcaaagcuauuaaaggaaagggguuucuucggagcuauugcugguuuccuagaaggaggaugggaaggaaugauugcaggcuggcacggauacacaucucacggagcacauggaguggcaguggcggcggaccuuaagagcacacaagaagcuauaaacaagauaacaaaaaaucucaauucuuugagugagcuagaaguaaagaaucuucaaagacuaaguggugccauggaugaacuccacaacgaaauacucgagcuggaugagaaaguggaugaucucagagcugacacuauaagcucgcaaauagaacuugcagucuugcuuuccaacgaaggaauaauaaacagugaagaugagcaucuauuggcacuugagagaaaacuaaagaaaaugcugggucccucugcuguagagauaggaaauggaugcuucgaaaccaaacacaagugcaaccagaccugcuuagacaggauagcugcuggcaccuuuaaugcaggagaauuuucucuccccacuuuugauucacugaacauuacugcugcaucuuuaaaugaugauggauuggauaaccauacuauacugcucuauuacucaacugcugcuucuaguuuggcuguaacauugaugcuagcuauuuuuauuguuuauauggucuccagagacaacguuucaugcuccaucugucuauaa

SEQ ID NO: 59757 - RNA, 1755 nt, Artificial Sequence
  derived and/or modified CDS sequence (wt) from hemagglutinin__InfluenzaB__AGX24304
augaaggcaauaauuguacuacucaugguaguaacauccaaugcagaucgaaucugcacuggaauaacaucuucaaacucaccucauguggucaaaacagccacucaaggggaggucaaugugacuggugugauaccacuaacaacaacaccaacaaaaucuuauuuugcaaaucucaaaggaacaaggaccagagggaaacuaugcccagacugucucaacugcacagaucuggauguggcuuugggcagaccaauguguguggggaccacaccuucggcgaaagcuucaauacuccacgaagucagaccuguuacauccgggugcuuuccuauaaugcacgacagaacaaaaaucaggcaacuacccaaucuucucagaggauaugaaaauaucaggcuaucaacccaaaacgucaucgaugcggaaaaggcaccaggaggacccuacagacuuggaaccucaggaucuugcccuaacgcuaccaguaagagcggauuuuucgcaacaauggcuugggcugucccaaaggacaacaacaaaaaugcaacgaacccacuaacaguagaaguaccauacauuuguacagaaggggaagaccaaauuacuguuuggggguuccauucagauaacaaaacccaaaugaagaaccucuauggagacucaaauccucaaaaguucaccucaucugcuaauggaguaaccacacacuauguuucucagauuggcagcuucccagaucaaacagaagacggaggacuaccacaaagcggcaggauuguuguugauuacaugaugcaaaaaccugggaaaacaggaacaauugucuaccaaagagguguuuuguugccucaaaagguguggugcgcgaguggcaggagcaaaguaauaaaaggguccuugccuuuaauuggugaagcagauugccuucaugaaaaauacgguggauuaaacaaaagcaagccuuacuacacaggagaacaugcaaaagccauaggaaauugcccaauaugggugaaaacaccuuugaagcuugccaauggaaccaaauauagaccuccugcaaaacuauuaaaggaaagggguuucuucggagcuauugcugguuuccuagaaggaggaugggaaggaaugauugcaggcuggcacggauacacaucccacggagcacauggaguggcaguggcggcggaccuuaagaguacgcaagaagcuauaaacaagauaacaaaaaaucucaauucuuugagugagcuagaaguaaagaaucuucaaagacuaaguggugcuauggaugaacuccacaacgaaauacucgagcuggaugagaaaguggaugaucucagagcugacacuauaagcucgcaaauagaacuugcagucuugcuuuccaacgaaggaauaauaaacagugaagaugagcauuuauuggcacuugagagaaaauuaaagaaaaugcugggucccucugcuguagagauaggaaauggaugcuucgaaaccaaacacaagugcaaccagaccugcuuagacaggauagcugcuggcaccuuuaaugcaggagaauuuucucuccccacuuuugauucacugaacauuacugcugcaucuuuaaaugaugauggauuggauaaccauacuauacugcucuauuacucaacugcugcuucuaguuuggcuguaacauugaugcuagcuauuuuuauuguuuauauggucuccagagacaacguuucaugcuccaucugucuauaa

SEQ ID NO: 59758 - RNA, 1755 nt, Artificial Sequence; identical to SEQ ID NO: 59329
  derived and/or modified CDS sequence (wt) from hemagglutinin__InfluenzaB__AGX24315

SEQ ID NO: 59759 - RNA, 1755 nt, Artificial Sequence
  derived and/or modified CDS sequence (wt) from hemagglutinin__InfluenzaB__AGX24326
augaaggcaauaauuguacuacucaugguaguaacauccaaugcagaucgaaucugcacuggaauaacaucuucaaacucaccucauguggucaaaacagccacucaaggggaggucaaugugacuggugugauaccacuaacaacaacaccaacaaaaucuuauuuugcaaaucucaaaggaacaaggaccagagggaaacuaugcccagacugucucaacugcacagaucuggauguggcuuugggcagaccaacguguguggggaccacaccuucggcgaaagcuucaauacuccacgaagucagaccuguuacauccgggugcuuuccuauaaugcacgacagaacaaaaaucaggcaacuacccaaucuucucagaggauaugaaaauaucaggcuaucaacccaaaacgucaucgaugcggaaaaggcaccaggaggacccuacagacuuggaaccucaggaucuugcccuaacgcuaccaguaagagcggauuuuucgcaacaauggcuugggcugucccaaaggacaacaacaaaaaugcaacgaacccacuaacaguagaaguaccauacauuuguacagaaggggaagaccaaaucacuguuuggggguuccauucagauaacaaaacccaaaugaagaaccucuauggagacucaaauccucaaaaguucaccucaucugcuaauggaguaaccacacacuauguuucucagauuggcagcuucccagaucaaacagaagacggaggacuaccacaaagcggcaggauuguuguugauuacaugaugcaaaaaccugggaaaacaggaacaauugucuaccaaagagguauuuuguugccucaaaagguguggugcgcgaguggcaggagcaaaguaauaaaaggguccuugccuuuaauuggugaagcagauugccuucaugaaaaauacgguggauuaaacaaaagcaagccuuacuacacaggagaacaugcaaaagccauaggaaauugcccaauaugggugaaaacaccuuugaagcuugccaauggaaccaaauauagaccuccugcaaaacuauuaaaggaaagggguuucuucggagcuauugcugguuuccuagaaggaggaugggaaggaaugauugcaggcuggcacggauacacaucucacggagcacauggaguggcaguggcggcggaccuuaagaguacgcaagaagcuauaaacaagauaacaaaaaaucucaauucuuugagugagcuagaaguaaagaaucuucaaagacuaaguggugccauggaugaacuccacaacgaaauacucgagcuggaugagaaaguggaugaucucagagcugacacuauaagcucgcaaauagaacuugcagucuugcuuuccaacgaaggaauaauaaacagugaagaugagcaucuauuggcacuugagagaaaacuaaagaaaaugcugggucccucugcuguagagauaggaaauggaugcuucgaaaccaaacacaagugcaaccagaccugcuuagacaggauagcugcuggcaccuuuaaugcaggagaauuuucucuccccacuuuugauucacugaacauuacugcugcaucuuuaaaugaugauggauuggauaaccauacuauacugcucuauuacucaacugcugcuucuaguuuggcuguaacauugaugcuagcuauuuuuauuguuuauauggucuccagagacaacguuucaugcuccaucugucuauaa

SEQ ID NO: 59760 - RNA, 1755 nt, Artificial Sequence
  derived and/or modified CDS sequence (wt) from hemagglutinin__InfluenzaB__AGX24337
augaaggcaauaauuguacuacucaugguaguaacauccaaugcagaucgaaucugcacugggauaacaucuucaaacucaccucauguggucaaaacagcuacucaaggggaggucaaugugacuggcgugauaccacugacaacaacaccaacaaaaucuuauuuugcaaaccucaaaggaacaaggaccagagggaaacuaugcccggacugucucaacuguacagaucuggauguggccuugggcaugccaauguguguggggaccacaccuucugcuaaagcuucaauacuccacgaagucagaccuguuacauccgggugcuuuccuauaaugcacgacagaacaaaaaucaggcaacuacccaaucuucucagaggauaugaaaauaucagguuaucaacccagaacguuaucgaugcagaaaaagcaccaggaggacccuacagacuuggaaccucaggaucuugcccuaaugcuaccaguaaaaucggauuuuucgcaacaauggcuugggcugucccaaaggacaacuacaaaaaugcaacgaacccacuaacaguagaaguaccauacauuuguacagaaggggaagaccaaauuacuguuuggggguuccauucagauaacaaaacccaaaugaagaaccucuauggagacucaaauccucaaaaguucaccucaucugcuaauggaguaaccacacauuauguuucucagauuggcgacuucccagaucaaacagaagacggaggacuaccacaaagcggcagaauuguuguugauuacaugaugcaaaaaccugggaaaacaggaacaauugucuaucaaagagguguuuuguugccucaaaagguguggugcgcgaguggcaggagcaaaguaauaaaagggucauugccuuuaauuggugaagcagauugccuucaugaaaaauacgguggauuaaacaaaagcaagccuuacuacacaggagaacaugcaaaagccauaggaaauugcccaauauggguaaaaacaccuuugaagcuugccaauggaaccaaauauagaccuccugcaaaacuauuaaaggaaagggguuucuucggagcuauugcugguuuccuagaaggaggaugggaaggaaugauugcagguuggcacggauacacaucucacggagcacauggaguggcaguggcggcagaccuuaagaguacacaagaagcuauaaauaagauaacaaaaaaucucaauucuuugagugagcuagaaguaaagaaccuucaaagacuaaguggugccauggaugaacuccacaacgaaauacucgagcuggaugagaaaguggaugaucucagagcugacacuauaagcucacaaauagaacuugcagucuugcuuuccaacgaaggaauaauaaacagugaagacgagcaucuauuggcacuugagagaaaacuaaagaaaaugcugggccccucugcuguagacauaggaaauggaugcuucgaaaccaaacacaaaugcaaccagaccugcuuagacaggauagcugcuggcaccuuuaaugcaggagaauuuucucuccccacuuuugauucauugaacauuacugcugcaucuuuaaaugaugauggauuggauaaccauacuauacugcucuauuacucaacugcugcuucuaguuuggcuguaacauuaaugcuagcuauuuuuauuguuuauauggucuccagagacaacguuucaugcuccaucugucuauaa

SEQ ID NO: 59761 - RNA, 1755 nt, Artificial Sequence; identical to SEQ ID NO: 59063
  derived and/or modified CDS sequence (wt) from hemagglutinin__InfluenzaB__AGX24348

SEQ ID NO: 59762 - RNA, 1755 nt, Artificial Sequence; identical to SEQ ID NO: 59756
  derived and/or modified CDS sequence (wt) from hemagglutinin__InfluenzaB__AGX24359

SEQ ID NO: 59763 - RNA, 1755 nt, Artificial Sequence
  derived and/or modified CDS sequence (wt) from hemagglutinin__InfluenzaB__AGX24381
augaaggcaauaauuguacuacucaugguaguaacauccaaugcagaucgaaucugcacugggauaacaucuucaaacucaccucauguggucaaaacagcuacucaaggggaggucaaugugacuggugugauaccacugacaacaacaccaacaaaaucuuauuuugcaaaucucaaaggaacaaggaccagagggaaacuaugcccggacugucucaacuguacagaucuggauguggccuugggcaggccaauguguguggggaccacaccuucugcuaaagcuucaauacuccacgaagucagaccuguuacauccgggugcuuuccuauaaugcacgacagaacaaaaaucaggcaacuacccaaucuucucagaggauaugaaaauaucagguuaucaacccaaaacguuaucgaugcagaaaaagcaccaggaggacccuacagacuuggaaccucaggaucuugcccuaacgcuaccaguaaaaucggauuuuucgcaacaauggcuugggcugucccaaaggacaacuacaaaaaugcaacgaacccacuaacaguagaaguaccauacauuuguacagaaggggaagaccaaauuacuguuuggggguuccauucagauaacaaaacccaaaugaagaaccucuauggagacucaaauccucaaaaguucaccucaucugcuaauggaguaaccacacauuauguuucucagauuggcgacuucccagaucaaacagaagacggaggacuaccacaaagcggcagaauuguuguugauuacaugaugcaaaaaccugggaaaacaggaacaauugucuaucaaagagguguuuuguugccucaaaagguguggugcgcgaguggcaggagcaaaguaauaaaagggucauugccuuuaauuggugaagcagauugccuucaugaaaaauacgguggauuaaacaaaagcaagccuuacuacacaggagaacaugcaaaagccauaggaaauugcccaauauggguaaaaacaccuuugaagcuugccaauggaaccaaauauagaccuccugcaaaacuauuaaaggaaagggguuucuucggagcuauugcugguuuccuagaaggaggaugggaaggaaugauugcagguuggcacggauacacaucucacggagcacauggaguagcaguggcggcagaccuuaagaguacacaagaagcuauaaauaagauaacaaaaaaucucaauucuuugagugagcuagaaguaaagaaccuucaaagacuaaguggugccauggaugaacuccacaacgaaauacucgagcuggaugagaaaguggaugaucucagagcugacacuauaagcucacaaauagaacuugcagucuugcuuuccaacgaaggaauaauaaacagugaagacgagcaucuauuggcacuugagagaaaacuaaagaaaaugcugggucccucugcuguagacauaggaaauggaugcuucgaaaccaaacacaaaugcaaccagaccugcuuagacaggauagcugcuggcaccuuuaaugcaggagaauuuucucuccccacuuuugauucauugaacauuacugcugcaucuuuaaaugaugauggauuggauaaccauacuauacugcucuauuacucaacugcugcuucuaguuuggcuguaacauuaaugcuagcuauuuuuauuguuuauauggucuccagagacaacguuucaugcuccaucugucuauaa

SEQ ID NO: 59764 - RNA, 1755 nt, Artificial Sequence
  derived and/or modified CDS sequence (wt) from hemagglutinin__InfluenzaB__AGX24392
augaaggcaauaauuguacuacucaugguaguaacauccaaugcagaucgaaucugcacuggaauaacaucuucaaacucaccucauguggucaaaacagccacucaaggggaggucaaugugacuggugugauaccacuaacaacaacaccaacaaaaucuuauuuugcaaaucucaaaggaacaaggaccagagggaaacuaugcccagacugucucaacugcacagaucuggauguggcuuugggcagaccaauguguguggggacuacaccuucggcgaaagcuucaauacuccacgaagucagaccuguuacauccgggugcuuuccuauaaugcacgacagaacaaaaaucaggcaacuacccaaucuucucagaggauaugaaaauaucaggcuaucaacccaaaacgucaucgaugcggaaaaggcaccaggaggacccuacagacuuggaaccucaggaucuuguccuaacgcuaccaguaagagcggauuuuucgcaacaauggcuugggcugucccaaaggacaacaacaaaaaugcaacgaacccacuaacaguagaaauaccauacauuuguacagaaggggaagaccaaaucacuguuuggggguuccauucagacaacaaaacccaaaugaagaaccucuauggagacucaaauccucaaaaguucaccucaucugcuaauggaguaaccacacacuauguuucucagauuggcagcuucccagaucaaacagaagacggaggacuaccacaaagcggcaggauuguuguugauuacaugaugcaaaaaccugggaaaacaggaacaauugucuaccaaagagguguuuuguugccucaaaagguguggugcgcgaguggcaggagcaaaguaauaaaaggguccuugccuuuaauuggugaagcagauugccuucaugaaaaauacgguggauuaaacaaaagcaagccuuacuacacaggagaacaugcaaaagccauaggaaauugcccaauaugggugaaaacgccuuugaagcuugccaauggaaccaaauauagaccuccugcaaaacuauuaaaggaaagggguuucuucggagcuauugcugguuuccuagaaggaggaugggaaggaaugauugcaggcuggcacggauacacaucucacggagcacauggaguggcaguggcggcggaccuuaagaguacgcaagaagcuauaaacaagauaacaaaaaaucucaauucuuugagugagcuagaaguaaagaaucuucaaagacuaaguggugccauggaugaacuccacaacgaaauacucgagcuggaugagaaaguggaugaucucagagcugacacuauaagcucgcaaauagaacuugcagucuugcuuuccaacgaaggaauaauaaacagugaagaugagcaucuauuggcacuugagagaaaacuaaagaaaaugcugggucccucugcuguagagauaggaaauggaugcuucgaaaccaaacacaagugcaaccagaccugcuuagacaggauagcugcuggcaccuuuaaugcaggagaauuuucucuccccacuuuugauucacugaacauuacugcugcaucuuuaaaugaugauggauuggauaaccauacuauacugcucuauuacucaacugcugcuucuaguuuggcuguaacauugaugcuagcuauuuuuauuguuuauauggucuccagagacaacguuucaugcuccaucugucuauaa

SEQ ID NO: 59765 - RNA, 1755 nt, Artificial Sequence
  derived and/or modified CDS sequence (wt) from hemagglutinin__InfluenzaB__AGX24403
augaaggcaauaauuguacuacucaugguaguaacauccaaugcagaucgaaucugcacuggaauaacaucuucaaacucaccucauguggucaaaacagccacucaaggggaggucaaugugacuggugugauaccacuaacaacaacaccaacaaaaucuuauuuugcaaaucucaaaggaacaagaaccagagggaaacuaugcccagacugucucaacugcacagaucuggauguggcuuugggcagaccaauguguguggggaccacaccuucggcgaaagcuucaauacuccacgaagucagaccuguuacauccgggugcuuuccuauaaugcacgacagaacaaaaaucaggcaacuacccaaucuucucagaggauaugaaaauaucaggcuaucaacccaaaacgucaucgaugcggaaaaggcaccaggaggacccuacagacuuggaaccucaggaucuugcccuaacgcuaccaguaagagcggauuuuucgcaacaauggcuugggcugucccaaaggacaacaacaaaaaugcaacaaacccacuaacaguagaaguaccauacauuuguacagaaggggaagaccaaaucacuguuuggggguuccauucagauaacaaaacccaaaugaagaaccucuauggagacucaaauccucaaaaguucaccucaucugcuaauggaguaaccacacacuauguuucucagauuggcagcuucccagaucaaacagaagacggaggacuaccacaaagcggcaggauuguuguugauuacaugaugcaaaaaccuggaaaaacaggaacaauuguuuaccaaagagguguuuuguugccucaaaagguguggugcgcgaguggcaggagcaaaguaauaaaaggguccuugccuuuaauuggugaagcagauugccuucaugaaaaauacgguggauuaaacaaaagcaagccuuacuacacaggagaacaugcaaaagccauaggaaauugcccaauaugggugaaaacaccuuugaagcuugccaauggaaccaaauauagaccuccugcaaaacuauuaaaggaaagggguuucuucggagcuauugcugguuuccuagaaggaggaugggaaggaaugauugcaggcuggcacggauacacaucccacggagcacauggaguggcaguggcggcggaccuuaagaguacgcaagaagcuauaaacaagauaacaaaaaaucucaauucuuugagugagcuagaaguaaagaaucuucaaagacuaaguggugcuauggaugaacuccacaacgaaauacucgagcuggaugagaaaguggaugaucucagagcugacacuauaagcucgcaaauagaacuugcagucuugcuuuccaacgaaggaauaauaaacagugaagaugagcauuuauuggcacuugagagaaaauuaaagaaaaugcugggucccucugcuguagagauaggaaauggaugcuucgaaaccaaacacaagugcaaccagaccugcuuagacaggauagcugcuggcaccuuuaaugcaggagaauuuucucuccccacuuuugauucacugaacauuacugcugcaucuuuaaaugaugauggauuggauaaccauacuauacugcucuauuacucaacugcugcuucuaguuuggcuguaacauugaugcuagcuauuuuuauuguuuauauggucuccagagacaacguuucaugcuccaucugucuauaa

SEQ ID NO: 59766 - RNA, 1755 nt, Artificial Sequence
  derived and/or modified CDS sequence (wt) from hemagglutinin__InfluenzaB__AGX24414
augaaggcaauaauuguacuacucaugguaguaacauccaaugcagaucgaaucugcacugggauaacaucuucaaacucaccucauguggucaaaacagcuacucaaggggaggucaaugugacuggcgugauaccacugacaacaacaccaacaaaaucuuauuuugcaaaucucaaaggaacaaggaccagagggaaacuaugcccggacugucucaacuguacagaucuggauguggccuugggcaggccaauguguguggggaccacaccuucugcuaaagcuucaauacuccacgaagucagaccuguuacauccgggugcuuuccuauaaugcacgacagaacaaaaaucaggcaacuacccaaucuucucagaggauaugaaaauaucagguuaucaacccaaaacguuaucgaugcagaaaaagcaccaggaggacccuacagacuuggaaccucaggaucuugcccuaacgcuaccaguaaaaucggauuuuucgcaacaauggcuugggcugucccaaaggacaacuacaaaaaugcaacgaacccacuaacaguagaaguaccauacauuuguacagaaggggaagaccaaauuacuguuuggggguuccauucagauaacaaaacccaaaugaagaaccucuauggagacucaaauccucaaaaguucaccucaucugcuaauggaguaaccacacauuauguuucucagauuggcgacuucccagaucagacagaagacggaggacuaccacaaagcggcagaauuguuguugauuacaugaugcaaaaaccugggaaaacaggaacaauugucuaucaaagagguguuuuguugccucaaaagguguggugcgcgaguggcaggagcaaaguaauaaaagggucauugccuuuaauuggugaagcagauugccuucaugaaaaauacgguggauuaaacaaaagcaagccuuacuacacaggagaacaugcaaaagccauaggaaauugcccaauauggguaaaaacaccuuugaagcuugccaauggaaccaaauauagaccuccugcaaaacuauuaaaggaaagggguuucuucggagcuauugcugguuuccuagaaggaggaugggaaggaaugauugcagguuggcacggauacacaucucacggagcucauggaguggcaguggcggcagaccuuaagaguacacaagaagcuauaaauaagauaacaaaaaaucucaauucuuugagugagcuagaaguaaagaaccuucaaagacuaaguggugccauggaugaacuccacaacgaaauacucgagcuggaugagaaaguggaugaucucagagcugacacuauaagcucacaaauagaacuugcagucuugcuuuccaacgaaggaauaauaaacagugaagacgagcaucuauuggcacuugagagaaaacuaaagaaaaugcugggucccucugcuguagacauaggaaauggaugcuucgaaaccaaacacaaaugcaaccagaccugcuuagacaggauagcugcuggcaccuuuaaugcaggagaauuuucucuccccacuuuugauucauugaacauuacugcugcaucuuuaaaugaugauggauuggauaaccauacuauacugcucuauuacucaacugcugcuucuaguuuggcuguaacauuaaugcuagcuauuuuuauuguuuauauggucuccagagacaacguuucaugcuccaucugucuauaa

SEQ ID NO: 59767 - RNA, 1755 nt, Artificial Sequence
  derived and/or modified CDS sequence (wt) from hemagglutinin__InfluenzaB__AGX24425
augaaggcaauaauuguacuacucaugguaguaacauccaaugcagaucgaaucugcacuggaauaacaucuucaaacucaccucacguggucaaaacagccacucaaggggaggucaaugugacuggugugauaccacuaacaacaacaccaacaaaaucuuauuuugcaaaucucaaaggaacaaggaccagagggaaacuaugcccagacugucucaacugcacagaucuggauguggcuuugggcagaccaauguguguggggaccacaccuucggcgaaagcuucaauacuccacgaagucagaccuguuacauccgggugcuuuccuauaaugcacgacagaacaaaaauuaggcaacuacccaaucuucucagaggauaugaaaauaucaggcuaucaacccaaaacgucaucgaugcggaaaaggcaccaggaggacccuacagacuuggaaccucaggaucuugcccuaacgcuaccaguaagagcggauuuuucgcaacaauggcuugggcugucccaaaggacaacaacaaaaaugcaacgaacccacuaacaguagaaguaccauacauuuguacagaaggggaagaccaaaucacuguuuggggguuccauucagauaacaaaacccaaaugaagaaccucuauggagacucaaauccucaaaaguucaccucaucugcuaauggaguaaccacacacuauguuucucagauuggcagcuucccagaucaaacagaagacggaggacuaccacaaagcggcaggauuguuguugauuacaugaugcaaaaaccugggaaaacaggaacaauugucuaccaaagagguguuuuguugccucaaaagguguggugcgcaaguggcaggagcaaaguaauaaaaggguccuugccuuuaauuggugaagcagauugccuucaugaaaaauacgguggauuaaacaaaagcaagccuuacuacacaggagaacaugcaaaagccauaggaaauugcccaauaugggugaaaacaccuuugaagcuugccaauggaaccaaauauagaccuccugcaaagcuauuaaaggaaagggguuucuucggagcuauugcugguuuccuagaaggaggaugggaaggaaugauugcaggcuggcacggauacacaucucacggagcacauggaguggcaguggcggcggaccuuaagagcacacaagaagcuauaaacaagauaacaaaaaaucucaauucuuugagugagcuagaaguaaagaaucuucaaagacuaaguggugccauggaugaacuccacaacgaaauacucgagcuggaugagaaaguggaugaucucagagcugacacuauaagcucgcaaauagaacuugcagucuugcuuuccaacgaaggaauaauaaacagugaagaugagcaucuauuggcacuugagagaaaacuaaagaaaaugcugggucccucugcuguagagauaggaaauggaugcuucgaaaccaaacacaagugcaaccagaccugcuuagacaggauagcugcuggcaccuuuaaugcaggagaauuuucucuccccacuuuugauucacugaacauuacugcugcaucuuuaaaugaugauggauuggauaaccauacuauacugcucuauuacucaacugcugcuucuaguuuggcuguaacauugaugcuagcuauuuuuauuguuuauauggucuccagagacaacguuucaugcuccaucugucuauaa

SEQ ID NO: 59768 - RNA, 1755 nt, Artificial Sequence
  derived and/or modified CDS sequence (wt) from hemagglutinin__InfluenzaB__AGX24436
augaaggcaauaauuguacuacucaugguaguaacauccaaugcagaucgaaucugcacuggaauaacaucuucaaacucaccucauguggucaaaacagccacucaaggggaggucaaugugacuggugugauaccacuaacaacaacaccaacaaaaucuuauuuugcaaaucucaaaggaacaaggaccagagggaaacuaugcccagacugucucaacugcacagaucuggauguggcuuugggcagaccaauguguguggggaccacaccuucggcgaaagcuucaauacuccacgaagucagaccuguuacauccgggugcuuuccuauaaugcacgacagaacaaaaaucaggcaacuacccaaucuucucagaggauaugaaaauaucaggcuaucaacccaaaacgucaucgaugcggaaaaggcaccaggaggacccuacagacuuggaaccucaggaucuugcccuaacgcuaccaguaagagcggauuuuucgcaacaauggcuugggcugucccaaaggacaacaacaaaaaugcaacgaacccacuaacaguagaaguaccauacauuuguacagaaggggaagaccaaauuacuguuuggggguuccauucagauaacaaaacccaaaugaagaaccucuauggagacucaaauccucaaaaguucaccucaucugcuaauggaguaaccacacacuauguuucucagauuggcagcuucccagaucaaacagaagacggaggacuaccacaaagcggcaggauuguuguugauuacaugaugcaaaaaccugggaaaacaggaacaauugucuaccaaagagguguuuuguugccucaaaagguguggugcgcgaguggcaggagcaaaguaauaaaaggguccuugccuuuaauuggugaagcagauugccuucaugaaaaauacgguggauuaaacaaaagcaagccuuacuacacaggagaacaugcaaaagccauaggaaauugcccaauaugggugaaaacaccuuugaagcuugccaauggaaccaaauauagaccuccugcaaaacuauuaaaggaaagggguuucuucggagcuauugcugguuuccuagaaggaggaugggaaggaaugauugcaggcuggcacggauacacaucccauggagcacauggaguggcaguggcggcggaccuuaagaguacgcaagaagcuauaaacaagauaacaaaaaaucucaauucuuugagugagcuagaaguaaagaaucuucaaagacuaaguggugcuauggaugaacuccacaacgaaauacucgagcuggaugagaaaguggaugaucucagagcugacacuauaagcucgcaaauagaacuugcagucuugcuuuccaacgaaggaauaauaaacagugaagaugagcauuuauuggcacuugagagaaaauuaaagaaaaugcugggucccucugcuguagagauaggaaauggaugcuucgaaaccaaacacaagugcaaccagaccugcuuagacaggauagcugcuggcaccuuuaaugcaggagaauuuucucuccccacuuuugauucacugaacauuacugcugcaucuuuaaaugaugauggauuggauaaccauacuauacugcucuauuacucaacugcugcuucuaguuuggcuguaacauugaugcuagcuauuuuuauuguuuauauggucuccagagacaacguuucaugcuccaucugucuauaa

SEQ ID NO: 59769 - RNA, 1755 nt, Artificial Sequence
  derived and/or modified CDS sequence (wt) from hemagglutinin__InfluenzaB__AGX24447
augaaggcaauaauuguacuacucaugguaguaacauccaaugcagaucgaaucugcacuggaauaacauccucaaacucaccucauguggucaaaacagccacucaaggggaggucaaugugacuggugugauaccacuaacaacaacaccaacaaaaucuuauuuugcaaaucucaaaggaacaaggaccagagggaaacuaugcccagacugucucaacugcacagaucuggauguggcuuugggcagaccaauguguguggggaccacaccuucggcgaaagcuucaauacuccacgaagucagaccuguuacauccgggugcuuuccuauaaugcacgacagaacaaaaaucaggcaacuacccaaucuucucagaggauaugaaaauaucaggcuaucaacccaaaacgucaucgaugcggaaaaggcaccaggaggacccuacagacuuggaaccucaggaucuugcccuaacgcuaccaguaagagcggauuuuucgcaacaauggcuugggcugucccaaaggacaacaacaaaaaugcaacgaacccacuaacaguagaaguaccauacauuuguacagaaggggaagaccaaaucacuguuuggggguuccauucagauaacaaaacccaaaugaagaaccucuauggagacucaaauccucaaaaguucaccucaucugcuaauggaguaaccacacacuauguuucucagauuggcagcuucccagaucaaacagaagacggaggacuaccacaaagcggcaggauuguuguugauuacaugaugcaaaaaccugggaaaacaggaacaauugucuaccaaagagguguuuuguugccucaaaggguguggugcgcgaguggcaggagcaaaguaauaaaaggguccuugccuuuaauuggugaagcagauugccuucaugaaaaauacgguggauuaaacaaaagcaagccuuacuacacaggagaacaugcaaaagccauaggaaauugcccaauaugggugaaaacaccuuugaagcuugccaauggaaccaaauauagaccuccugcaaaacuauuaaaggaaagggguuucuucggggcuauugcugguuuccuagaaggaggaugggaaggaaugauugcaggcuggcacggauacacaucucacggagcacauggaguggcaguggcggcggaccuuaagaguacgcaagaagcuauaaauaagauaacaaaaaaucucaauucuuugagugagcuagaaguaaagaaucuucaaagacuaaguggugccauggaugaacuccacaacgaaauacucgagcuggaugagaaaguggaugaucucagagcugacacuauaagcucgcaaauagaacuugcagucuugcuuuccaacgaaggaauaauaaacagugaagaugagcaucuauuggcacuugagagaaaacuaaagaaaaugcugggucccucugcuguagagauaggaaauggaugcuucgaaaccaaacacaagugcaaccagaccugcuuagacaggauagcugcuggcaccuuuaaugcaggagaauuuucucuccccacuuuugauucacugaacauuacugcugcaucuuuaaaugaugauggauuggauaaccauacuauacugcucuauuacucaacugcugcuucuaguuuggcuguaacauugaugcuagcuauuuuuauuguuuauauggucuccagagacaacguuucaugcuccaucugucuauaa

SEQ ID NO: 59770 - RNA, 1755 nt, Artificial Sequence
  derived and/or modified CDS sequence (wt) from hemagglutinin__InfluenzaB__AGX24458
augaaggcaauaauuguacuacucaugguaguaacauccaaugcagaucgaaucugcacuggaauaacaucuucaaacucaccucauguggucaaaacagccacucaaggggaggucaaugugacuggugugauaccacuaacaacaacaccaacaaaaucuuauuuugcaaaucucaaaggaacaaggaccagagggaaacuaugcccagacugucucaacugcacagaucuggacguggcuuugggcagaccaacguguguggggaccacaccuucggcgaaagcuucaauacuccacgaagucagaccuguuacauccgggugcuuuccuauaaugcacgacagaacaaaaaucaggcaacuacccaaucuucucagaggauaugaaaauaucaggcuaucaacccaaaacgucaucgaugcggaaaaggcaccaggaggacccuacagacuuggaaccucaggaucuugcccuaacgcuaccaguaagagcggauuuuucgcaacaauggcuugggcugucccaaaggacaacaacaaaaaugcaacgaacccacuaacaguagaaguaccauacauuuguacagaaggggaagaccaaaucacuguuuggggguuccauucagauaacaaaacccaaaugaagaaccucuauggagacucaaauccucaaaaguucaccucaucugcuaauggaguaaccacacacuauguuucucagauuggcagcuucccagaucaaacagaagacggaggacuaccacaaagcggcaggauuguuguugauuacaugaugcaaaaaccugggaaaacaggaacaauugucuaccaaagagguauuuuguugccucaaaagguguggugcgcgaguggcaggagcaaaguaauaaaaggguccuugccuuuaauuggugaagcagauugccuucaugaaaaauacgguggauuaaacaaaagcaagccuuacuacacaggagaacaugcaaaagccauaggaaauugcccaauaugggugaaaacaccuuugaagcuugccaauggaaccaaauauagaccuccugcaaaacuauuaaaggaaagggguuucuucggagcuauugcugguuuccuagaaggaggaugggaaggaaugauugcaggcuggcauggauacacaucucacggagcacauggaguggcaguggcggcggaccuuaagaguacgcaagaagcuauaaacaagauaacaaaaaaucucaauucuuugagugagcuagaaguaaagaaucuucaaagacuaaguggugccauggaugaacuccacaacgaaauacucgagcuggaugagaaaguggaugaucucagagcugacacuauaagcucgcaaauagaacuugcagucuugcuuuccaacgaaggaauaauaaacagugaagaugagcaucuauuggcacuugagagaaaacuaaagaaaaugcugggucccucugcuguagagauaggaaauggaugcuucgaaaccaaacacaagugcaaccagaccugcuuagacaggauagcugcuggcaccuuuaaugcaggagaauuuucucuccccacuuuugauucacugaacauuacugcugcaucuuuaaaugaugauggauuggauaaccauacuauacugcucuauuacucaacugcugcuucuaguuuggcuguaacauugaugcuagcuauuuuuauuguuuauauggucuccagagacaacguuucaugcuccaucugucuauaa

SEQ ID NO: 59771 - RNA, 1755 nt, Artificial Sequence
  derived and/or modified CDS sequence (wt) from hemagglutinin__InfluenzaB__AGX24469
augaaggcaauaauuguacuacucaugguaguaacauccaaugcagaucgaaucugcacuggaauaacaucuucaaacucaccucauguggucaaaacagccacucaaggggaggucaaugugacuggugugauaccacuaacaacaacaccaacaaaaucuuauuuugcaaaucucaaaggaacaaggaccagagggaaacuaugcccagacugucucaacugcacagaucuggauguggcuuugggcagaccaacguguguggggaccacaccuucggcgaaagcuucaauacuccacgaagucagaccuguuacauccgggugcuuuccuauaaugcacgacagaacaaaaaucagacaacuacccaaucuucucagaggauaugaaaauaucaggcuaucaacccaaaacgucaucgaugcggaaaaggcaccaggaggacccuacagacuuggaaccucaggaucuugcccuaacgcuaccaguaagagcggauuuuucgcaacaauggcuugggcugucccaaaggacaacaacaaaaaugcaacgaacccacuaacaguagaaguaccauacauuuguacagaaggggaagaccaaaucacuguuuggggguuccauucagauaacaaaacccaaaugaagaaccucuauggagacucaaauccucaaaaguucaccucaucugcuaauggaguaaccacacacuauguuucucagauuggcagcuucccagaucaaacagaagacggaggacuaccacaaagcggcaggauuguuguugauuacaugaugcaaaaaccugggaaaacaggaacaauugucuaccaaagagguauuuuguugccucaaaagguguggugcgcgaguggcaggagcaaaguaauaaaaggguccuugccuuuaauuggugaagcagauugccuucaugaaaaauacgguggauuaaacaaaagcaagccuuacuacacaggagaacaugcaaaagccauaggaaauugcccaauaugggugaaaacaccuuugaagcuugccaauggaaccaaauauagaccuccugcaaaacuauuaaaggaaagggguuucuucggagcuauugcugguuuccuagaaggaggaugggaaggaaugguugcaggcuggcacggauacacaucucacggagcacauggaguggcaguggcggcggaccuuaagaguacgcaagaagcuauaaacaagauaacaaaaaaucucaauucuuugagugagcuagaaguaaagaaucuucaaagacuaaguggugccauggaugaacuccacaacgaaauacucgagcuggaugagaaaguggaugaucucagagcugacacuauaagcucgcaaauagaacuugcagucuugcuuuccaacgaaggaauaauaaacagugaagaugagcaucuauuggcacuugagagaaaacuaaagaaaaugcugggucccucugcuguagagauaggaaauggaugcuucgaaaccaaacacaagugcaaccagaccugcuuagacaggauagcugcuggcaccuuuaaugcaggagaauuuucucuccccacuuuugauucacugaacauuacugcugcaucuuuaaaugaugauggauuggauaaccauacuauacugcucuauuacucaacugcugcuucuaguuuggcuguaacauugaugcuagcuauuuuuauuguuuauauggucuccagagacaacguuucaugcuccaucugucuauaa

SEQ ID NO: 59772 - RNA, 1755 nt, Artificial Sequence; identical to SEQ ID NO: 59329
  derived and/or modified CDS sequence (wt) from hemagglutinin__InfluenzaB__AGX24480

SEQ ID NO: 59773 - RNA, 1755 nt, Artificial Sequence; identical to SEQ ID NO: 59329
  derived and/or modified CDS sequence (wt) from hemagglutinin__InfluenzaB__AGX24491

SEQ ID NO: 59774 - RNA, 1755 nt, Artificial Sequence
  derived and/or modified CDS sequence (wt) from hemagglutinin__InfluenzaB__AGX24502
augaaggcaauaauuguacuacucaugguaguaacauccaaugcagaucgaaucugcacuggaauaacauccucaaacucaccucauguggucaaaacagccacucaaggggaggucaaugugacuggugugauaccacuaacaacaacaccaacaaaaucuuauuuugcaaaucucaaaggaacaaggaccagagggaaacuaugcccagacugucucaacugcacagaucuggauguggcuuugggcagaccaauguguguggggaccacaccuucggcgaaagcuucaauacuccacgaagucagaccuguuacauccgggugcuuuccuauaaugcacgacagaacaaaaaucaggcaacuacccaaucuucucagaggauaugaaaauaucaggcuaucaacccaaaacgucaucgaugcagaaaaggcaccaggaggacccuacagacuuggaaccucaggaucuugcccuaacgcuaccaguaagagcggauuuuucgcaacaauggcuugggcuguccaaaaggacaacaacaaaaaugcaacgaacccacuaacaguagaaguaccauacauuuguacagaaggggaagaccaaaucacuguuuggggguuccauucagauaacaaaacccaaaugaagaaccucuauggagacucaaauccucaaaaguucaccucaucugcuaauggaguaaccacacacuauguuucucagauuggcagcuucccagaucaaacagaagacggaggacuaccacaaagcggcaggauuguuguugauuacaugaugcaaaaaccugggaaaacaggaacaauugucuaccaaagagguguuuuguugccucaaaggguguggugcgcgaguggcaggagcaaaguaauaaaaggguccuugccuuuaauuggugaagcagauugccuucaugaaaaauacgguggauuaaacaaaagcaagccuuacuacacaggagaacaugcaaaagccauaggaaauugcccaauaugggugaaaacaccuuugaagcuugccaauggaaccaaauauagaccuccugcaaaacuauuaaaggaaagggguuucuucggagcuauugcugguuuccuagaaggaggaugggaaggaaugauugcaggcuggcacggauacacaucucacggagcacauggaguggcaguggcggcggaccuuaagaguacgcaagaagcuauaaauaagauaacaaaaaaucucaauucuuugagugagcuagaaguaaagaaucuucaaagacuaaguggugccauggaugaacuccacaacgaaauacucgagcuggaugagaaaguggaugaucucagagcugacacuauaagcucgcaaauagaacuugcagucuugcuuuccaacgaaggaauaauaaacagugaagaugagcaucuauuggcacuugagagaaaacuaaagaaaaugcugggucccucugcuguagagauaggaaauggaugcuucgaaaccaaacacaagugcaaccagaccugcuuagacaggauagcugcuggcaccuuuaaugcaggagaauuuucucuccccacuuuugauucacugaacauuacugcugcaucuuuaaaugaugauggauuggauaaccauacuauacugcucuauuacucaacugcugcuucuaguuuggcuguaacauugaugcuagcuauuuuuauuguuuauauggucuccagagacaacguuucaugcuccaucugucuauaa

SEQ ID NO: 59775 - RNA, 1755 nt, Artificial Sequence
  derived and/or modified CDS sequence (wt) from hemagglutinin__InfluenzaB__AGX24513
augaaggcaauaauuguacuacucaugguaguaacauccaaugcagaucgaaucugcaccgggauaacaucuucaaacucaccucauguggucaaaacagcuacucaaggggaggucaaugugacuggugugauaccacugacaacaacaccaacaaaaucuuauuuugcaaaucucaaaggaacaaagaccagagggaaacuaugcccagacugucucaacuguacagaccuggauguggccuugggcaggccaaugugugugggaaccacaccuucugcgaaagcuucaauacuccacgaagucagaccuguuacauccgggugcuuuccuauaaugcacgacagaacaaaaaucaggcaacuagccaaucuucucagaggauaugaaaauaucagguuaucaacccaaaacguuaucgaugcagaaaaggcaccaggaggacccuacagacuuggaaccucaggaucuugcccuaacgcuaccaguaaaagcggauuuuucgcaacaauggcuugggcugucccaaaggacaacaacaaaaaugcaacgaacccacuaacaguagaaguaccauacauuuguacagaaggggaagaccaaauuacuguuuggggguuccauucagauaacaaaacccaaaugaagaaccucuauggagacucaaauccucaaaaguucaccucaucugcuaauggaguaaccacacauuauguuucucagauuggcggcuucccagaucaaacagaagacggaggacuaccacaaaguggcagaauugucguugauuacaugaugcaaaaaccugggaaaacaggaacaauugucuaucaaagagguguuuuguugccucaaaagguguggugcgcgaguggcaggagcaaaguaauaaaaggguccuugccuuuaauuggugaagcagauugccuucaugaaaaauacgguggauuaaacaaaagcaagccuuacuacacaggagaacaugcaaaagccauaggaaauugcccaauaugggugaaaacaccuuugaagcuugccaauggaaccaaauauagaccuccugcaaaacuauuaaaggaaagggguuucuucggagcuauugcugguuuccuagaaggaggaugggaaggaaugauugcagguuggcacggauacacaucucacggagcacauggaguggcaguugcggcagaccuuaagaguacacaagaagcuauaaacaagauaacaaaaaaucucaacucuuugagugagcuagaaguaaagaaucuucaaagacuaaguggugccauggaugaacuccacaacgaaauacucgagcuggaugagaaaguggaugaucucagagcugacacuauaagcucacaaauagaacuugcagucuugcuuuccaacgaaggaauaauaaacagugaagacgagcaucuauuggcacuugagagaaaacuaaagaaaaugcugggucccucugcuguagacauaggaaauggaugcuucgaaaccaaacacaaaugcaaccagaccugcuuagacaggauagcugcuggcaccuuuaaugcaggagaguuuucucuccccacuuuugauucauugaacauuacugcugcaucuuuaaaugaugauggauuggauaaccauacuauacugcucuauuacucaacugcugcuucuaguuuggcuguaacauugaugcuagcuauuuuuauuguuuauauggucuccagagacaacguuucaugcuccaucugucuauaa

SEQ ID NO: 59776 - RNA, 1755 nt, Artificial Sequence
  derived and/or modified CDS sequence (wt) from hemagglutinin__InfluenzaB__AGX24524
augaaggcaauaauuguacuacucaugguaguaacauccaaugcagaucgaaucugcacuggaauaacauccucaaacucaccucauguggucaaaacagccacucaaggggaggucaaugugacuggugugauaccacuaacaacaacaccaacaaaaucuuauuuugcaaaucucaaaggaacaaggaccagagggaaacuaugcccagacugucucaacugcacagaucuggauguggcuuugggcagaccaauguguguggggaccacaccuucggcgaaagcuucaauacuccacgaagucagaccuguuacauccgggugcuuuccuauaaugcacgacagaacaaaaaucaggcaacuacccaaucuucucagaggauaugaaaauaucaggcuaucaacccaaaacgucaucgaugcggaaaaggcaccaggaggacccuacagacuuggaaccucaggaucuugcccuaacgcuaccaguaagagcggauuuuucgcaacaauggcuugggcugucccaaaggacaacaacaaaaaugcaacgaauccacuaacaguagaaguaccauacauuuguacagaaggggaagaccaaaucacuguuuggggguuccauucagauaacaaaacccaaaugaagaaccucuauggagacucaaauccucaaaaguucaccucaucugcuaauggaguaaccacacacuauguuucucagauuggcagcuucccagaucaaacagaagacggaggacuaccacaaagcggcaggauuguuguugauuacaugaugcaaaaaccugggaaaacaggaacaauugucuaccaaagagguguuuuguugccucaaaggguguggugcgcgaguggcaggagcaaaguaauaaaaggguccuugccuuuaauuggugaagcagauugccuucaugaaaaauacgguggauuaaacaaaagcaagccuuacuacacaggagaacaugcaaaagccauaggaaauugcccaauaugggugaaaacaccuuugaagcuugccaauggaaccaaauauagaccuccugcaaaacuauuaaaggaaagggguuucuucggagcuauugcugguuuccuagaaggaggaugggaaggaaugauugcaggcuggcacggauacacaucucacggagcacauggaguggcaguggcggcggaccuuaagaguacgcaagaagcuauaaauaagauaacaaaaaaucucaauucuuugagugagcuagaaguaaagaaucuucaaagacuaaguggugccauggaugaacuccacaacgaaauacucgagcuggaugagaaaguggaugaucucagagcugacacuauaagcucgcaaauagaacuugcagucuugcuuuccaacgaaggaauaauaaacagugaagaugagcaucuauuggcacuugagagaaaacuaaagaaaaugcugggucccucugcuguagagauaggaaauggaugcuucgaaaccaaacacaagugcaaccagaccugcuuagacaggauagcugcuggcaccuuuaaugcaggagaauuuucucuccccacuuuugauucacugaacauuacugcugcaucuuuaaaugaugauggauuggauaaccauacuauacugcucuauuacucaacugcugcuucuaguuuggcuguaacauugaugcuagcuauuuuuauuguuuauauggucuccagagacaacguuucaugcuccaucugucuauaa

SEQ ID NO: 59777 - RNA, 1755 nt, Artificial Sequence
  derived and/or modified CDS sequence (wt) from hemagglutinin__InfluenzaB__AGX24535
augaaggcaauaauuguacuacucaugguaguaacauccaaugcagaucgaaucugcacugggauaacaucuucaaacucaccucauguggucaaaacagcuacucaaggggaggucaaugugacuggcgugauaccacugacaacaacaccaacaaaaucuuauuuugcaaaccucaaaggaacaaggaccagagggaaacuaugcccggacugucucaacuguacagaucuggauguggccuugggcaggccaauguguguggggaccacaccuucugcuaaagcuucaauacuccacgaagucagaccuguuacauccgggugcuuuccuauaaugcacgacagaacaaaaaucaggcaacuacccaaucuucucagaggauaugaaaauaucagguuaucaacccagaacguuaucgaugcagaaaaagcaccaggaggacccuacagacuuggaaccucaggaucuugcccuaaugcuaccaguaaaaucggauuuuucgcaacaauggcuugggcugucccaaaggacaacuacaaaaaugcaacgaacccacuaacaguagaaguaccauacauuuguacagaaggggaagaccaaauuacuguuuggggguuccauucagauaacaaaacccaaaugaagaaccucuauggagacucaaauccucaaaaguucaccucaucugcuaauggaguaaccacacauuauguuucucagauuggcgacuucccagaucaaacagaagacggaggacuaccacaaagcggcagaauuguuguugauuacaugaugcaaaaaccugggaaaacaggaacaauugucuaucaaagagguguuuuguugccucaaaagguguggugcgcgaguggcaggagcaaaguaauaaaagggucauugccuuuaaucggugaagcagauugccuucaugaaaaauacgguggauuaaacaaaagcaagccuuacuacacaggagaacaugcaaaagccauaggaaauugcccaauauggguaaaaacaccuuugaagcuugccaauggaaccaaauauagaccuccugcaaaacuauuaaaggaaagggguuucuucggagcuauugcugguuuccuagaaggaggaugggaaggaaugauugcagguuggcacggauacacaucucacggagcacauggaguggcaguggcggcagaccuuaagaguacacaagaagcuauaaauaagauaacaaaaaaucucaauucuuugagugagcuagaaguaaagaaccuucaaagacuaaguggugccauggaugaacuccacaacgaaauacucgagcuggaugagaaaguggaugaucucagagcugacacuauaagcgcacaaauagaacuugcagucuugcuuuccaacgaaggaauaauaaacagugaagacgagcaucuauuggcacuugagagaaaacuaaagaaaaugcugggccccucugcuguagacauaggaaauggaugcuucgaaaccaaacacaaaugcaaccagaccugcuuagacaggauagcugcuggcaccuuuaaugcaggagaauuuucucuccccacuuuugauucauugaacauuacugcugcaucuuuaaaugaugauggauuggauaaccauacuauacugcucuauuacucaacugcugcuucuaguuuggcuguaacauuaaugcuagcuauuuuuauuguuuauauggucuccagagacaacguuucaugcuccaucugucuauaa

SEQ ID NO: 59778 - RNA, 1755 nt, Artificial Sequence; identical to SEQ ID NO: 59749
  derived and/or modified CDS sequence (wt) from hemagglutinin__InfluenzaB__AGX24546

SEQ ID NO: 59779 - RNA, 1755 nt, Artificial Sequence
  derived and/or modified CDS sequence (wt) from hemagglutinin__InfluenzaB__AGX24557
augaagacaauaauuguacuacucaugguaguaacauccaaugcagaucgaaucugcacuggaauaacaucuucaaacucaccucauguggucaaaacagccacucaaggggaggucaaugugacuggugugauaccacuaacaacaacaccaacaaaaucuuauuuugcaaaucucaaaggaacaaggaccagagggaaacuaugcccagacugucucaacugcacagaucuugauguggcuuugggcagaccaacguguguggggaccacaccuucggcgaaagcuucaauacuccacgaagucagaccuguuacauccgggugcuuuccuauaaugcacgacagaacaaaaaucaggcaacuacccaaucuucucagaggauaugaaaauaucaggcuaucaacccaaaacgucaucgaugcggaaaaggcaccaggaggacccuacagacuuggaaccucaggaucuugcccuaacgcuaccaguaagagcggauuuuucgcaacaauggcuugggcugucccaaaggacaacaacaaaaaugcaacgaacccacuaacaguagaaguaccauacauuuguacagaaggggaagaccaaaucacuguuuggggguuccauucagauaacaaaacccaaaugaagaaccucuauggagacucaaauccucaaaaguucaccucaucugcuaauggaguaaccacacacuauguuucucagauuggcagcuucccagaucaaacagaagacggaggacuaccacaaagcggcaggauuguuguugauuacaugaugcaaaaaccugggaaaacaggaacaauugucuaccaaagagguauuuuguugccucaaaagguguggugcgcgaguggcaggagcaaaguaauaaaaggguccuugccuuuaauuggugaagcagauugccuucaugaaaaauacgguggauuaaacaaaagcaagccuuacuacacaggagaacaugcaaaagccauaggaaauugcccaauaugggugaaaacaccuuugaagcuugccaauggaaccaaauauagaccuccugcaaaacuauuaaaggaaagggguuucuucggagcuauugcugguuuccuagaaggaggaugggaaggaaugauugcaggcuggcacggauacacaucucacggagcacauggaguggcaguggcggcggaccuuaagaguacgcaagaagcuauaaacaagauaacaaaaaaucucaauucuuugagugagcuagaaguaaagaaucuucaaagacuaaguggugccauggaugaacuccacaacgaaauacucgagcuggaugaaaaaguggaugaucucagagcugacacuauaagcucgcaaauagaacuugcagucuugcuuuccaacgaaggaauaauaaacagugaagaugagcaucuauuggcacuugagagaaaacuaaagaaaaugcugggucccucugcuguagagauaggaaauggaugcuucgaaaccaaacacaagugcaaccagaccugcuuagacaggauagcugcuggcaccuuuaaugcaggagaauuuucucuccccacuuuugauucacugaacauuacugcugcaucuuuaaaugaugauggauuggauaaccauacuauacugcucuauuacucaacugcugcuucuaguuuggcuguaacauugaugcuagcuauuuuuauuguuuauauggucuccagagacaacguuucaugcuccaucugucuauaa

SEQ ID NO: 59780 - RNA, 1755 nt, Artificial Sequence; identical to SEQ ID NO: 59329
  derived and/or modified CDS sequence (wt) from hemagglutinin__InfluenzaB__AGX24579

SEQ ID NO: 59781 - RNA, 1755 nt, Artificial Sequence; identical to SEQ ID NO: 59329
  derived and/or modified CDS sequence (wt) from hemagglutinin__InfluenzaB__AGX24590

SEQ ID NO: 59782 - RNA, 1755 nt, Artificial Sequence
  derived and/or modified CDS sequence (wt) from hemagglutinin__InfluenzaB__AGX24601
augaaggcaauaauuguacuacucaugguaguaacauccaaugcagaucgaaucugcacuggaauaacauccucaaacucaccucauguggucaaaacagccacucaaggggaggucaaugugacuggugugauaccacuaacaacaacaccaacaaaaucuuauuuugcaaaucucaaaggaacaaggaccagagggaaacuaugcccagacugucucaacugcacagaucuggauguggcuuugggcagaccaauguguguggggaccacaccuucggcgaaagcuucaauacuccacgaagucagaccuguuacauccgggugcuuuccuauaaugcacgacagaacaaaaaucaggcaacuacccaaucuucucagaggauaugaaaauaucaggcuaucaacccaaaacgucaucgaugcggaaaaggcaccaggaggacccuacagacuuggaaccucaggaucuugcccuaacgcuaccaguaagagcggauuuuucgcaacaauggcuugggcugucccaaaggacaacaacaaaaaugcaacgaacccacuaacaguagaaguaccauacauuuguacagaaggggaagaccaaaucacuguuuggggguuccauucagauaacaaaacccaaaugaagaaccucuauggagacucaaauccucaaaaguucaccucaucugcuaauggaguaaccacacacuauguuucucagauuggcagcuucccagaucaaacagaagacggaggacuaccacaaagcggcaggauuguuguugauuacaugaugcaaaaaccugggaaaacaggaacaauugucuaccaaagagguguuuuguugccucaaaggguguggugcgcgaguggcaggagcaaaguaauaaaaggguccuugccuuuaauuggugaagcagauugccuucaugaaaaauacgguggauuaaacaaaagcaagccuuacuacacaggagaacaugcaaaagccauaggaaauugcccaauaugggugaaaacaccuuugaagcuugccaauggaaccaaauauagaccuccugcaaaacuauuaaaggaaagggguuucuucggagcuauugcugguuuccuagaaggaggaugggaaggaaugauugcaggcuggcacggauacacaucucacggagcacauggaguggcaguggcggcggaccuuaagaguacgcaagaagcuauaaauaagauaacaaaaaaucucaauucuuugagugagcuagaaguaaagaaucuucaaagacuaaguggugccauggaugaacuccacaacgaaauacucgagcuggaugagaaaguugaugaucucagagcugacacuauaagcucgcaaauagaacuugcagucuugcuuuccaacgaaggaauaauaaacagugaagaugagcaucuauuggcacuugagagaaaacuaaagaaaaugcugggucccucugcuguagagauaggaaauggaugcuucgaaaccaaacacaagugcaaccagaccugcuuagacaggauagcugcuggcaccuucaaugcaggagaauuuucucuccccacuuuugauucacugaacauuacugcugcaucuuuaaaugaugauggauuggauaaccauacuauacugcucuauuacucaacugcugcuucuaguuuggcuguaacauugaugcuagcuauuuuuauuguuuauauggucuccagagacaacguuucaugcuccaucugucuauaa

SEQ ID NO: 59783 - RNA, 1755 nt, Artificial Sequence; identical to SEQ ID NO: 59329
  derived and/or modified CDS sequence (wt) from hemagglutinin__InfluenzaB__AGX24612

SEQ ID NO: 59784 - RNA, 1755 nt, Artificial Sequence; identical to SEQ ID NO: 59756
  derived and/or modified CDS sequence (wt) from hemagglutinin__InfluenzaB__AGX24623

SEQ ID NO: 59785 - RNA, 1755 nt, Artificial Sequence; identical to SEQ ID NO: 59329
  derived and/or modified CDS sequence (wt) from hemagglutinin__InfluenzaB__AGX24634

SEQ ID NO: 59786 - RNA, 1755 nt, Artificial Sequence
  derived and/or modified CDS sequence (wt) from hemagglutinin__InfluenzaB__AGX24656
augaaggcaauaauuguacuacucaugguaguaacauccaaugcagaucgaaucugcacugggauaacaucuucaaacucaccucauguggucaaaacagcuacucaaggggaggucaaugugacuggcgugauaccacugacaacaacaccaacaaaaucuuauuuugcaaaccucaaaggaacaaggaccagagggaaacuaugcccggacugucucaacuguacagaucuggauguggccuugggcaggccaauguguguggggaccacaccuucugcuaaagcuucaauacuccacgaagucagaccuguuacauccgggugcuuuccuauaaugcacgacagaacaaaaaucaggcaacuacccaaucuucucagaggauaugaaaauaucagguuaucaacccagaacguuaucgaugcagaaaaagcaccaggaggacccuacagacuuggaaccucaggaucuugcccuaaugcuaccaguaaaaucggauuuuucgcaacaauggcuugggcugucccaaaggacaacuacaaaaaugcaacgaacccacuaacaguagaaguaccauacauuuguacagaaggggaagaccaaauuacuguuuggggguuccauucagauaacaaaacccaaaugaagaaccucuauggagacucaaauccucaaaaguucaccucaucugcuaauggaguaaccacacauuauguuucucagauuggugacuucccagaucaaacagaagacggaggacuaccacaaagcggcagaauuguuguugauuacaugaugcaaaaaccugggaaaacaggaacaauugucuaucaaagagguguuuuguugccucaaaagguguggugcgcgaguggcaggagcaaaguaauaaaagggucauugccuuuaauuggugaagcagauugccuucaugaaaaauacgguggauuaaacaaaagcaagccuuacuacacaggagaacaugcaaaagccauaggaaauugcccaauauggguaaaaacaccuuugaagcuugccaauggaaccaaauauagaccuccugcaaaacuauuaaaggaaagggguuucuucggagcuauugcugguuuccuagaaggaggaugggaaggaaugauugcagguuggcacggauacacaucucacggagcacauggaguggcaguggcggcagaccuuaagaguacacaagaagcuauaaauaagauaacaaaaaaucucaacucuuugagugagcuagaaguaaagaaccuucaaagacuaaguggugccauggaugaacuccacaacgaaauacucgagcuggaugagaaaguggaugaucucagagcugacacuauaagcgcacaaauagaacuugcagucuugcuuuccaacgaaggaauaauaaacagugaagacgagcaucuauuggcacuugagagaaaacuaaagaaaaugcugggccccucugcuguagacauaggaaauggaugcuucgaaaccaaacacaaaugcaaccagaccugcuuagacaggauagcugcuggcaccuuuaaugcaggagaauuuucucuccccacuuuugauucauugaacauuacugcugcaucuuuaaaugaugauggauuggauaaccauacuauacugcucuauuacucaacugcugcuucuaguuuggcuguaacauuaaugcuagcuauuuuuauuguuuauauggucuccagagacaacguuucaugcuccaucugucuauaa

SEQ ID NO: 59787 - RNA, 1755 nt, Artificial Sequence
  derived and/or modified CDS sequence (wt) from hemagglutinin__InfluenzaB__AGX24667
augaaggcaauaauuguacuacucaugguaguaacauccaaugcagaucgaaucugcacgggaauaacaucuucaaacucaccucauguggucaaaacagccacucaaggggaggucaaugugacuggugugauaccacuaacaacaacaccaacaaaaucuuauuuugcaaaucucaaaggaacaaggaccagagggaaacuaugcccagacugucucaacugcacagaucuggauguggcuuugggcagaccaauguguguggggaccacaccuucggcgaaagcuucaauacuccacgaagucagaccuguuacauccgggugcuuuccuauaaugcacgacagaacaaaaaucaggcaacuacccaaucuucucagaggauaugaaaauaucaggcuaucaacccaaaacgucaucgaugcggaaaaggcaccaggaggacccuacagacuuggaaccucaggaucuugcccuaacgcuaccaguaagagcggauuuuucgcaacaauggcuugggcugucccaaaggacaacaacaaaaaugcaacgaacccacuaacaguagaaguaccauacauuuguacagaaggggaagaccaaaucacuguuuggggguuccauucagauaacaaaacccaaaugaagaaccucuauggagacucaaauccucaaaaguucaccucaucugcuaauggaguaaccacacacuauguuucucagauuggcagcuucccagaucaaacagaagacggaggacuaccacaaagcggcaggauuguuguugauuacaugaugcaaaaaccugggaaaacaggaacaauugucuaccaaagagguguuuuguugccucaaaagguguggugcgcgaguggcaggagcaaaguaauaaaaggguccuugccuuuaauuggugaagcagauugccuucaugaaaaauacgguggauuaaacaaaagcaagccuuacuacacaggagaacaugcaaaagccauaggaaauugcccaauaugggugaaaacaccuuugaagcuugccaauggaaccaaauauagaccuccugcaaaacuauuaaaggaaagggguuucuucggagcuauugcugguuuccuagaaggaggaugggaaggaaugauugcaggcuggcacggauacacaucucacggagcacauggaguggcaguggcggcagaccuuaagaguacgcaagaagcuauaaauaagauaacaaaaaaucucaauucuuugagugagcuagaaguaaagaaucuucaaagacuaaguggugccauggaugaacuccacaacgaaauacucgagcuggaugagaaaguggaugaucucagagcugacacuauaagcucgcaaauagaacuugcagucuugcuuucaaacgaaggaauaauaaacagugaagaugagcaucuauuggcacuugagagaaaacuaaagaaaaugcugggucccucugcuguagagauaggaaauggaugcuucgaaaccaaacacaagugcaaccagaccugcuuagacaggauagcugcuggcaccuuuaaugcaggagaauuuucucuccccacuuuugauucacugaacauuacugcugcaucuuuaaaugaugauggauuggauaaccauacuauacugcucuauuacucaacugcugcuucuaguuuggcuguaacauugaugcuagcuauuuuuauuguuuauauggucuccagagacaacguuucaugcuccaucugucuauaa

SEQ ID NO: 59788 - RNA, 1755 nt, Artificial Sequence
  derived and/or modified CDS sequence (wt) from hemagglutinin__InfluenzaB__AGX24678
augaaggcaauaauuguacuacucaugguaguaacauccaaugcagaucgaaucugcacugggauaacaucuucaaacucaccucauguggucaaaacagcuacucaaggggaggucaaugugacuggcgugauaccacugacaacaacaccaacaaaaucuuauuuugcaaaucucaaaggaacaaggaccagagggaaacuaugcccagacugucucaacuguacagaucuggauguggccuugggcaggccaauguguguggggaccacaccuucugcuaaagcuucaauacuccacgaagucagaccuguuacauccgggugcuuuccuauaaugcacgacagaacaaaaaucaggcaacuacccaaucuucucagaggauaugaaaauaucagguuaucaacccaaaacguuaucgaugcagaaaaagcaccaggaggacccuacagacuuggaaccucaggaucuugcccuaacgcuaccaguaaaaucggauuuuucgcaacaauggcuugggcugucccaaaggacaacuacaaaaaugcaacgaacccacuaacaguagaaguaccauacauuuguacagaaggggaagaccaaauuacuguuuggggguuccauucagauaacaaaacccaaaugaagaaccucuauggagacucaaauccucaaaaguucaccucaucugcuaauggaguaaccacacauuauguuucucagauuggcgacuucccagaucaaacagaagacggaggacuaccacaaagcggcagaauuguuguugauuacaugaugcaaaaaccugggaaaacaggaacaauugucuaucaaagagguguuuuguugccucaaaagguguggugcgcgaguggcaggagcaaaguaauaaaagggucauugccuuuaauuggugaagcagauugccuucaugaaaaauacgguggauuaaacaaaagcaagccuuacuacacaggagaacaugcaaaagccauaggaaauugcccaauauggguaaaaacaccuuugaagcuugccaauggaaccaaauauagaccuccugcaaaacuauuaaaggaaagggguuucuucggagcuauugcugguuuccuagaaggaggaugggaaggaaugauugcagguuggcacggauacacaucucacggagcacauggaguggcaguggcggcagaccuuaagaguacacaagaagcuauaaauaagauaacaaaaaaucucaauucuuugagugagcuagaaguaaagaaccuucaaagacuaaguggugccauggaugaacuccacaacgaaauacucgagcuggaugagaaaguggaugaucucagagcugacacuauaagcucacaaauagaacuugcagucuugcuuuccaacgaaggaauaauaaacagugaagacgagcaucuauuggcacuugagagaaaacuaaagaaaaugcugggucccucugcuguagacauaggaaauggaugcuucgaaaccaaacacaaaugcaaccagaccugcuuagacaggauagcugcuggcaccuuuaaugcaggagaauuuucucuccccacuuuugauucauugaacauuacugcugcaucuuuaaaugaugauggauuggauaaccauacuauacugcucuauuacucaacugcugcuucuaguuuggcuguaacauuaaugcuagcuauuuuuauuguuuauauggucuccagagacaacguuucaugcuccaucugucuauaa

SEQ ID NO: 59789 - RNA, 1755 nt, Artificial Sequence; identical to SEQ ID NO: 59329
  derived and/or modified CDS sequence (wt) from hemagglutinin__InfluenzaB__AGX24689

SEQ ID NO: 59790 - RNA, 1755 nt, Artificial Sequence; identical to SEQ ID NO: 59329
  derived and/or modified CDS sequence (wt) from hemagglutinin__InfluenzaB__AGX24700

SEQ ID NO: 59791 - RNA, 1755 nt, Artificial Sequence; identical to SEQ ID NO: 59329
  derived and/or modified CDS sequence (wt) from hemagglutinin__InfluenzaB__AGX24711

SEQ ID NO: 59792 - RNA, 1755 nt, Artificial Sequence
  derived and/or modified CDS sequence (wt) from hemagglutinin__InfluenzaB__AGX24722
augaaggcaauaauuguacuacucaugguaguaacauccaaugcagaucgaaucugcacuggaauaacaucuucaaacucaccucauguggucaaaacagccacucaaggggaggucaaugugacuggugugauaccacuaacaacaacaccaacaaaaucuuauuuugcaaaucucaaaggaacaaggaccagagggaaacuaugcccagacugucucaacugcacagaucuggauguggcuuugggcagaccaauguguguggggaccacaccuucggcgaaagcuucaauacuccacgaagucagaccuguuacauccgggugcuuuccuauaaugcacgacagaacaaaaaucaggcaacuacccaaucuucucagaggauaugaaaauaucaggcuaucaacccaaaacgucaucgaugcggaaaaggcaccaggaggacccuacagacuuggaaccucaggaucuugcccuaacgcuaccaguaagagcggauuuuucgcaacaauggcuugggcugucccaaaggacaacaacaaaaaugcaacgaacccacuaacaguagaaguaccauacauuuguacagaaggggaagaccaaaucacuguuuggggguuccauucagauaacaaaacccaaaugaagaaccucuauggagacucaaauccucaaaaguucaccucuucugcuaauggaguaaccacacacuauguuucucagauuggcagcuucccagaucaaacagaagacggaggacuaccacaaagcggcaggauuguuguugauuacaugaugcaaaaaccugggaaaacaggaacaauugucuaccaaagagguguuuuguugccucaaaagguguggugcgcgaguggcaggagcaaaguaauaaaaggguccuugccuuuaauuggugaagcagauugccuucaugaaaaauacgguggauuaaacaaaagcaagccuuacuacacaggagaacaugcaaaagccauaggaaauugcccaauaugggugaaaacaccuuugaagcuugccaauggaaccaaauauagaccuccugcaaaacuauuaaaggaaagggguuucuucggagcuauugcugguuuccuagaaggaggaugggaaggaaugauugcaggcuggcacggauacacaucucacggagcacauggaguggcaguggcggcggaccuuaagaguacgcaagaagcuauaaacaagauaacaaaaaaucucaauucuuugagugagcuagaaguaaagaaccuucaaagacuaaguggugccauggaugaacuccacaacgaaauacucgagcuggaugagaaaguggaugaucucagagcugacacuauaagcucgcaaauagaacuugcagucuugcuuuccaacgaaggaauaauaaacagugaagaugagcaucuauuggcacuugagagaaaacuaaagaaaaugcugggucccucugcuguagagauaggaaauggaugcuucgaaaccaaacacaagugcaaccagaccugcuuagacaggauagcugcuggcaccuuuaaugcaggagaauuuucccuccccacuuuugauucacugaacauuacugcugcaucuuuaaaugaugauggauuggauaaccauacuauacugcucuauuacucaacugcugcuucuaguuuggcuguaacauugaugcuagcuauuuuuauuguuuauauggucuccagagacaacguuucaugcuccaucugucuauaa

SEQ ID NO: 59793 - RNA, 1755 nt, Artificial Sequence
  derived and/or modified CDS sequence (wt) from hemagglutinin__InfluenzaB__AGX24733
augaaggcaauaauuguacuacucaugguaguaacauccaaugcagaucgaaucugcacuggaauaacaucuucaaacucaccucauguggucaaaacagccacucaaggggaggucaaugugacuggugugauaccacuaacaacaacaccaacaaaaucuuauuuugcaaaucucaaaggaacaaggaccagagggaaacuaugcccagacugucucaacugcacagaucuggauguggcuuugggcagaccaauguguguggggaccacaccuucggcgaaagcuucaauacuccacgaagucagaccuguuacauccgggugcuuuccuauaaugcacgacagaacaaaaaucaggcaacuacccaaucuucucagaggauaugaaaauaucaggcuaucaacccaaaacgucaucgaugcggaaaaggcaccaggaggacccuacagacuuggaaccucaggaucuugcccuaacgcuaccaguaagagcggauuuuucgcaacaauggcuugggcugucccaaaggacaacaacaaaaaugcaacgaacccacuaacaguagaaguaccauacauuuguacagaaggggaagaccaaauuacuguuuggggguuccauucagauaacaaaacccaaaugaagaaccucuauggagacucaaauccucaaaaguucaccucaucugcuaauggaguaaccacacacuauguuucucagauuggcagcuucccagaucaaacagaagacggaggacuaccacaaagcggcaggauuguuguugauuacaugaugcaaaaaccugggaaaacaggaacaauugucuaccaaagagguguuuuguugccucaaaagguguggugcgcgaguggcaggagcaaaguaauaaaaggguccuugccuuuaauuggugaagcagauugccuucaugaaaaauacgguggauuaaacaaaagcaagccuuacuacacaggagaacaugcaaaagccauaggaaauugcccaauaugggugaaaacaccuuugaagcuugccaauggaaccaaauauagaccuccugcaaaacuauuaaaggaaagggguuucuucggagcuauugcugguuuccuagaaggaggaugggaaggaaugauugcaggcuggcacggauacacaucccacggagcacauggaguggcaguggcggcggaccuuaagaguacgcaagaagcuauaaacaagauaacaaaaaaucucaauucuuugagugagcuagaaguaaagaaucuucaaagacuaaguggugcuauggaugaacuccacaacgaaauacucgagcuggaugagaaaguggaugaucucagagcugacacuauaagcucgcaaauagaacuugcagucuugcuuuccaacgaaggaauaauaaacagugaagaugagcauuuauuggcacuugagagaaaauuaaagaaaaugcugggucccucugcuguagagauaggaaauggaugcuuugaaaccaaacacaagugcaaccagaccugcuuagacaggauagcugcuggcaccuuuaaugcaggagaauuuucucuccccacuuuugauucacugaacauuacugcugcaucuuuaaaugaugauggauuggauaaccauacuauacugcucuauuacucaacugcugcuucuaguuuggcuguaacauugaugcuagcuauuuuuauuguuuauauggucuccagagacaacguuucaugcuccaucugucuauaa

SEQ ID NO: 59794 - RNA, 1755 nt, Artificial Sequence
  derived and/or modified CDS sequence (wt) from hemagglutinin__InfluenzaB__AGX24744
augaaggcaauaauuguacuacucaugguaguaacauccaaugcagaucgaaucugcaccggaauaacaucuucaaacucaccucauguggucaaaacagccacucaaggggaggucaaugugacuggugugauaccacuaacaacaacaccaacaaaaucuuauuuugcaaaucucaaaggaacaaggaccagagggaaacuaugcccagacugucucaacugcacagaucuggauguggcuuugggcagaccaauguguguggggaccacaccuucggcgaaagcuucaauacuccacgaagucagaccuguuacauccgggugcuuuccuauaaugcacgacagaacaaaaaucaggcaacuacccaaucuucucagaggauaugaaaauaucaggcuaucaacccaaaacgucaucgaugcggaaaaggcaccaggaggacccuacagacuuggaaccucaggaucuugcccuaacgcuaccaguaagagcggauuuuucgcaacaauggcuugggcugucccaaaggacaacaacaaaaaugcaacgaacccacuaacaguagaaguaccauacauuuguacagaaggggaagaccaaaucacuguuuggggguuccauucagauaacaaaacccaaaugaagaaccucuauggagacucaaauccucaaaaguucaccucuucugcuaauggaguaaccacacacuauguuucucagauuggcagcuucccagaucaaacagaagacggaggacuaccacaaagcggcaggauuguuguugauuacaugaugcaaaaaccugggaaaacaggaacaauugucuaccaaagagguguuuuguugccucaaaagguguggugcgcgaguggcaggagcaaaguaauaaaaggguccuugccuuuaauuggugaagcagauugccuucaugaaaaauacgguggauuaaacaaaagcaagccuuacuacacaggagaacaugcaaaagccauaggaaauugcccaauaugggugaaaacaccuuugaagcuugccaauggaaccaaauauagaccuccugcaaaacuauuaaaggaaagggguuucuucggagcuauugcugguuuccuagaaggaggaugggaaggaaugauugcaggcuggcacggauacacaucucacggagcacauggaguggcaguggcggcggaccuuaagaguacgcaagaagcuauaaacaagauaacaaaaaaucucaauucuuugagugagcuagaaguaaagaaccuucaaagacuaaguggugccauggaugaacuccacaacgaaauacucgagcuggaugagaaaguggaugaucucagagcugacacuauaagcucgcaaauagaacuugcagucuugcuuuccaacgaaggaauaauaaacagugaagaugagcaucuauuggcacuugagaggaaacuaaagaaaaugcugggucccucugcuguagagauaggaaauggaugcuucgaaaccaaacacaagugcaaccagaccugcuuagacaggauagcugcuggcaccuuuaaugcaggagaauuuucccuccccacuuuugauucacugaacauuacugcugcaucuuuaaaugaugauggauuggauaaccauacuauacugcucuauuacucaacugcugcuucuaguuuggcuguaacauugaugcuagcuauuuuuauuguuuauauggucuccagagacaacguuucaugcuccaucugucuauaa

SEQ ID NO: 59795 - RNA, 1755 nt, Artificial Sequence
  derived and/or modified CDS sequence (wt) from hemagglutinin__InfluenzaB__AGX24755
augaaggcaauaauuguacuacucaugguaguaacauccaaugcagaucgaaucugcacuggaauaacaucuucaaacucaccucauguggucaaaacagccacucaaggggaggucaaugugacuggugugauaccacuaacaacaacaccaacaaaaucuuauuuugcaaaucucaaaggaacaaggaccagagggaaacuaugcccagacugucucaacugcacagaucuggauguggcuuugggcagaccaauguguguggggaccacaccuucggcgaaagcuucaauacuccacgaagucagaccuguuacauccgggugcuuuccuauaaugcacgacagaacaaaaaucaggcaacuacccaaucuucucagaggauaugaaaauaucaggcuaucaacccaaaacgucaucgaugcggaaaaggcaccaggaggacccuacagacuuggaaccucaggaucuugcccuaacgcuaccaguaagagcggauuuuucgcaacaauggcuugggcugucccaaaggacaacaacaaaaaugcaacgaacccacuaacaguagaaguaccauacauuuguacagaaggggaagaccaaaucacuguuuggggguuccauucagauaacaaaacccaaaugaagaaccucuauggagacucaaauccucaaaaguucaccucaucugcuaauggaguaaccacacacuauguuucucagauuggcagcuucccagaucaaacagaagacggaggacuaccacaaagcggcaggauuguuguugauuacaugaugcaaaaaccugggaaaacaggaacaauugucuaccaaagagguguuuuguugccucaaaagguguggugcgcgaguggcaggagcaaaguaauaaaaggguccuugccuuuaauuggugaagcagauugccuucaugaaaaauacgguggauuaaacaaaagcaagccuuacuacacaggagaacaugcaaaagccauaggaaauugcccaauaugggugaaaacaccuuugaagcuugccaauggaaccaaauauagaccuccugcaaaacuauuaaaggaaagggguuucuucggagcuauugcugguuuccuagaaggaggaugggaaggaaugauugcaggcuggcacggauacacaucucacggagcacauggaguggcaguggcggcagaccuuaagaguacgcaagaagcuauaaauaagauaacaaaaaaucucaauucuuugagugagcuagaaguaaagaaucuucaaagacuaaguggugccauggaugaacuccacaacgaaauacucgagcuggaugagaaaguggaugaucucagagcugacacuauaagcucgcaaauagaacuugcagucuugcuuuccaacgaaggaauaauaaacagugaagaugagcaucuauuggcacuugagagaaaacuaaagaaaaugcugggucccucugcuguagagauaggaaauggaugcuucgaaaccaaacacaagugcaaccagaccugcuuagacaggauagcugcuggcaccuuuaaugcaggagaauuuucucuccccacuuuugauucacugaacauuacugcugcaucuuuaaaugaugauggauuggauaaccauacuauacugcucuauuacucaacugcugcuucuaguuuggcuguaacauugaugcuagcuauuuuuauuguuuauauggucuccagagacaacguuucaugcuccaucugucuauaa

SEQ ID NO: 59796 - RNA, 1755 nt, Artificial Sequence; identical to SEQ ID NO: 59329
  derived and/or modified CDS sequence (wt) from hemagglutinin__InfluenzaB__AGX24766

SEQ ID NO: 59797 - RNA, 1755 nt, Artificial Sequence; identical to SEQ ID NO: 59792
  derived and/or modified CDS sequence (wt) from hemagglutinin__InfluenzaB__AGX24777

SEQ ID NO: 59798 - RNA, 1755 nt, Artificial Sequence
  derived and/or modified CDS sequence (wt) from hemagglutinin__InfluenzaB__AGX24788
augaaggcaauaauuguacuacucaugguaguaacauccaaugcagaucgaaucugcacuggaauaacaucuucaaacucaccucacguggucaaaacagccacucaaggggaggucaaugugacuggugugauaccacuaacaacaacaccaacaaaaucuuauuuugcaaaucucaaaggaacaaggaccagagggaaacuaugcccagacugucucaacugcacagaucuggauguggcuuugggcagaccaauguguguggggaccacaccuucggcgaaagcuucaauacuccacgaagucagaccuguuacauccgggugcuuuccuauaaugcacgacagaacaaaaaucaggcaacuacccaaucuucucagaggauaugaaaauaucaggcuaucaacccaaaacgucaucgaugcggaaaaggcaccaggaggacccuacagacuuggaaccucaggaucuugcccuaacgcuaccaguaagagcggauuuuucgcaacaauggcuugggcugucccaaaggacaacaacaaaaaugcaacgaacccacuaacaguagaaguaccauacauuuguacagaaggggaagaccaaaucacuguuuggggguuccauucagauaacaaaacccaaaugaagaaccucuauggagacucaaauccucaaaaguucaccucaucugcuaauggaguaaccacacacuauguuucucagauuggcagcuucccagaucaaacagaagacggaggacuaccacaaagcggcaggauuguuguugauuacaugaugcaaaaaccugggaaaacaggaacaauugucuaccaaagagguguuuuguugccucaaaagguguggugcgcgaguggcaggagcaaaguaauaaaaggguccuugccuuuaauuggugaagcagauugccuucaugaaaaauacgguggauuaaacaaaagcaagccuuacuacacaggagaacaugcaaaagccauaggaaauugcccaauaugggugaaaacaccuuugaagcuugccaauggaaccaaauauagaccuccugcaaagcuauuaaaggaaagggguuucuucggagcuauugcugguuuccuagaaggaggaugggaaggaaugauugcaggcuggcacggauacacaucucacggagcacauggaguggcaguggcggcggaccuuaagagcacacaagaagcuauaaacaagauaacaaaaaaucucaauucuuugagugagcuagaaguaaagaaucuucaaagacuaaguggugccauggaugaacuccacaacgaaauacucgagcuggaugagaaaguggaugaucucagagcugacacuauaagcucgcaaauagaacuugcagucuugcuuuccaacgaaggaauaauaaacagugaagaugagcaucuauuggcacuugagagaaaacuaaagaaaaugcugggucccucugcuguagagauaggaaauggaugcuucgaaaccaaacacaagugcaaccagaccugcuuagacaggauagcugcuggcaccuuuaaugcaggagaauuuucucuccccacuuuugauucacugaacauuacugcugcaucuuuaaaugaugauggauuggauaaccauacuauacugcucuauuacucaacugcugcuucuaguuuggcuguaacauugaugcuagcuauuuuuauuguuuauauggucuccagagacaacguuucaugcuccaucugucuauaa

SEQ ID NO: 59799 - RNA, 1755 nt, Artificial Sequence; identical to SEQ ID NO: 59756
  derived and/or modified CDS sequence (wt) from hemagglutinin__InfluenzaB__AGX24799

SEQ ID NO: 59800 - RNA, 1755 nt, Artificial Sequence; identical to SEQ ID NO: 59329
  derived and/or modified CDS sequence (wt) from hemagglutinin__InfluenzaB__AGX24810

SEQ ID NO: 59801 - RNA, 1755 nt, Artificial Sequence; identical to SEQ ID NO: 59329
  derived and/or modified CDS sequence (wt) from hemagglutinin__InfluenzaB__AGX24821

SEQ ID NO: 59802 - RNA, 1755 nt, Artificial Sequence
  derived and/or modified CDS sequence (wt) from hemagglutinin__InfluenzaB__AGX24832
augaaggcaauaauuguacuacucaugguaguaacauccaaugcagaucgaaucugcacuggaauaacauccucaaacucaccucauguggucaaaacagccacucaaggggaggucaaugugacuggugugauaccacuaacaacaacaccaacaaaaucuuauuuugcaaaucucaaaggaacaaggaccagagggaaacuaugcccagacugucucaacugcacagaucuggauguggcuuugggcagaccaauguguguggggaccacaccuucggcgaaagcuucaauacuccacgaagucagaccuguuacauccgggugcuuuccuauaaugcacgacagaacaaaaaucaggcaacuacccaaucuucucagaggauaugaaaauaucaggcuaucaacccaaaacgucaucgaugcggaaaaggcaccaggaggacccuacagacuuggaaccucaggaucuugcccuaacgcuaccaguaagagcggauuuuucgcaacaauggcuugggcugucccaaaggacaacaacaaaaaugcaacgaacccacuaacaguagaaguaccauacauuuguacagaaggggaagaccaaaucacuguuuggggguuccauucagauaacaaaacccaaaugaagaaccucuauggagacucaaauccucaaaaguucaccucaucugcuaauggaguaaccacacacuauguuucucagauuggcagcuucccagaucaaacagaagacggaggacuaccacaaagcggcaggauuguuguugauuacaugaugcaaaaaccugggaaaacaggaacaauugucuaccaaagagguauuuuguugccucaaaggguguggugcgcgaguggcaggagcaaaguaauaaaaggguccuugccuuuaauuggugaagcagauugccuucaugaaaaauacgguggauuaaacaaaagcaagccuuacuacacaggagaacaugcaaaagccauaggaaauugcccaauaugggugaaaacaccuuugaagcuugccaauggaaccaaauauagaccuccugcaaaacuauuaaaggaaagggguuucuucggagcuauugcugguuuccuagaaggaggaugggaaggaaugauugcaggcuggcacggauacacaucucacggagcacauggaguggcaguggcggcggaccuuaagaguacgcaagaagcuauaaauaagauaacaaaaaaucucaauucuuugagugagcuagaaguaaagaaucuucaaagacuaaguggugccauggaugaacuccacaacgaaauacucgagcuggaugagaaaguggaugaucucagagcugacacuauaagcucgcaaauagaacuugcagucuugcuuuccaacgaaggaauaauaaacagugaagaugagcaucuauuggcacuugagagaaaacuaaagaaaaugcugggucccucugcuguagagauaggaaauggaugcuucgaaaccaaacacaagugcaaccagaccugcuuagacaggauagcugcuggcaccuuuaaugcaggagaauuuucucuccccacuuuugauucacugaacauuacugcugcaucuuuaaaugaugauggauuggauaaccauacuauacugcucuauuacucaacugcugcuucuaguuuggcuguaacauugaugcuagcuauuuuuauuguuuauauggucuccagagacaacguuucaugcuccaucugucuauaa

SEQ ID NO: 59803 - RNA, 1755 nt, Artificial Sequence
  derived and/or modified CDS sequence (wt) from hemagglutinin__InfluenzaB__AGX24843
augaaagcaauaauuguacuacucaugguaguaacauccaaugcagaucgaaucugcacugggauaacaucuucaaacucaccucauguggucaaaacagcuacucaaggggaggucaaugugacuggcgugauaccacugacaacaacaccaacaaaaucuuauuuugcaaaucucaaaggaacaaggaccagagggaaacuaugcccggacugucucaacuguacagaucuggauguggccuugggcaggccgauguguguggggaccacaccuucugcuaaagcuucaauacuccacgaagucagaccuguuacauccgggugcuuuccuauaaugcacgacagaacaaaaaucaggcaacuacccaaucuucucagaggauaugaaaauaucagguuaucaacccaaaacguuaucgaugcagaaaaagcaccaggaggacccuacagacugggaaccucaggaucuugccccaacgcuaccaguaaaaucggauuuuucgcaacaauggcuugggcugucccaaaggacaacuacaaaaaugcaacgaacccacuaacaguagaagugccauacauuuguacagaaggggaagaccaaauuacuguuuggggguuccauucagauaacaaaacccaaaugaagaaccucuauggagacucaaauccucaaaaguucaccucaucugcuaauggaguaaccacacauuauguuucucagauuggcgacuucccagaucaaacagaagacggaggacuaccacaaagcggcagaauuguuguugauuacauggugcaaaaaccugggaaaacaggaacaauugucuaucaaagaggcguuuuguuaccucaaaggguguggugcacgaguggcaggagcaaaguaauaaaagggucauugccuuuaauuggugaagcagauugccuucaugaaaaauacgguggauuaaacaaaagcaagccuuacuacacaggagaacaugcaaaagccauaggaaauugcccaauauggguaaaaacaccuuugaagcuugccaauggaaccaaauauagaccuccugcaaaacuauuaaaggaaagggguuucuucggagcuauugcugguuuccuagaaggaggaugggaaggaaugauugcagguuggcacggauacacaucucacggagcacauggaguggcaguggcggcagaucuuaagaguacacaagaagcuauaaauaagauaacaaaaaaucucaauucuuugagugagcuagaaguaaagaaccuucaaagacuaaguggugccauggaugaacuccacaacgaaauacucgagcuggaugagaaaguggaugaucucagagcugacacuauaagcucacaaauagaacuugcagucuugcuuuccaacgaaggaauaauaaacagugaagacgagcaucuauuggcacuugagagaaaacuaaagaaaaugcugggucccucugcuguagacauaggaaauggaugcuucgaaaccaaacacaaaugcaaccagaccugcuuagacaggauagcugcuggcaccuuuaaugcaggagaauuuucucuccccacuuuugauucauugaacauuacugcugcaucuuuaaaugaugauggauuggauaaccauacuauacugcucuauuacucaacugcugcuucuaguuuggcuguaacauuaaugcuagcuauuuuuauuguuuauauggucuccagagacaacguuucaugcuccaucugucuauaa

SEQ ID NO: 59804 - RNA, 1755 nt, Artificial Sequence
  derived and/or modified CDS sequence (wt) from hemagglutinin__InfluenzaB__AGX24854
augaaggcaauaauuguacuacucaugguaguaacauccaaugcagaucgaaucugcacugggauaacaucuucaaacucaccucauguggucaaaacagcuacucaaggggaggucaaugugacuggcgugauaccacugacaacaacaccaacaaaaucuuauuuugcaaaucucaaaggaacaaggaccagagggaaacuauguccggaaugucucaacuguacagaucuggauguggccuugggcaggccaauguguguggggaccacaccuucugcuaaagcuucaauacuccacgaagucagaccuguuacauccgggugcuuuccuauaaugcaugacagaacaaaaaucaggcaacuacccaaucuucucagaggauaugaaaauaucagguuaucaacccaaaacguuaucgaugcagaaaaagcaccaggaggaccuuacagacuuggaaccucaggaucuugcccuaacgcuaccaguaaaaucggauuuuucgcaacaauggcuugggcugucccaaaggacaacuacaaaaaugcaacgaacccacuaacaguagaaguaccauacauuugugcagaaggggaagaccaaauuacuguuuggggguuccauucagauaacaaaacccaaaugaagaaccucuauggagacucaaauccucaaaaguucaccucaucugcuaauggaguaaccacacauuauguuucucagauuggcgacuuuccagaucaaacagaagacggaggacuaccacaaagcggcagaauuguuguugauuacauggugcaaagaccugggaaaacaggaacaauugucuaucaaagaggcguuuuguugccucaaaagguguggugcgcgaguggcaggagcaaaguaauaaaagggucauugccuuuaauuggugaagcagauugucuucaugaaaaauacgguggauuaaacaaaagcaagccuuacuacacaggagaacaugcaaaagccauaggaaauugcccaauauggguaaaaacaccuuugaagcuugccaauggaaccaaauauagaccuccugcaaaacuauuaaaggaaagggguuucuucggagcuauugcugguuuccuagaaggaggaugggaaggaaugauugcagguuggcacggauacacaucucacggagcacacggaguggcaguggcggcagaccuuaagaguacacaagaagcuauaaauaagauaacaaaaaaucucaauucuuugagugagcuagaaguaaaaaaccuucaaagacuaaguggugccauggaugaacuccacaacgaaauacucgagcuggaugagaaaguggaugaucucagagcugacacuauaagcucacaaauagaacuugcagucuugcuuuccaacgaaggaauaauaaacagugaagacgagcaucuauuggcacuugagagaaaacuaaagaaaaugcugggccccucugcuguagacauaggaaauggaugcuucgaaaccaaacacaaaugcaaccagaccugcuuagacaggauagcugcuggcaccuuuaaugcaggagaauuuucucuccccacuuuugauucauugaacauuacugcugcgucuuuaaaugaugauggauuggauaaccauacuauacugcucuauuacucaacugcugcuucuaguuuggcuguaacauuaaugcuagcuauuuuuauuguuuauauggucuccagagacaacguuucaugcuccaucugucuauaa

SEQ ID NO: 59805 - RNA, 1755 nt, Artificial Sequence
  derived and/or modified CDS sequence (wt) from hemagglutinin__InfluenzaB__AGX24865
augaaggcaauaauuguacuacucaugguaguaacauccaaugcagaucgaaucugcacugggauaacaucuucaaacucaccucauguggucaaaacagcuacucaaggggaggucaaugugacuggcgugauaccacugacaacaacaccaacaaaaucuuauuuugcaaaucucaaaggaacaaggaccagagggaaacuauguccggacugucucaacuguacagaucuggauguggccuugggcaggccaauguguguggggaccacaccuucugcuaaagcuucaauacuccacgaagucagaccuguuacauccgggugcuuuccuauaaugcacgacagaacaaaaaucaggcaacuacccaaucuucucagaggauaugaaaauaucagguuaucaacccaaaacguuaucgaugcagaaaaagcaccaggaggaccuuacagacuuggaaccucaggaucuugcccuaacgcuaccaguaaaaucggauuuuucgcaacaauggcuugggcugucccaaaggacaacuacaaaaaugcaacgaacccacuaacaguagaaguaccauacauuugugcagaaggggaagaccaaauuacuguuuggggguuccauucagauaacaaaacccaaaugaagaaccucuauggagacucaaauccucaaaaguucaccucaucugcuaauggaguaaccacacauuauguuucucagauuggcgacuuuccagaucaaacagaagacggaggacuaccacaaagcggcagaauuguuguugauuacauggugcaaagaccugggaaaacaggaacaauugucuaucaaagaggcguuuuguugccucaaaagguguggugcgcgaguggcaggagcaaaguaauaaaagggucauugccuuuaauuggugaagcagauugccuucaugaaaaauacgguggauuaaacaaaagcaagccuuacuacacaggagaacaugcaaaagccauaggaaauugcccaauauggguaaaaacaccuuugaagcuugccaauggaaccaaauauagaccuccugcaaaacuauuaaaggaaagggguuucuucggagcuauugcugguuuccuagaaggaggaugggaaggaaugauugcagguuggcacggauacacaucucacggagcacacggaguggcaguggcggcagaccuuaagaguacacaagaagcuauaaauaagauaacaaaaaaucucaauucuuugagugagcuagaaguaaaaaaccuucaaagacuaaguggugccauggaugaacuccacaacgaaauacucgagcuggaugagaaaguggaugaucucagagcugacacuauaagcucacaaauagaacuugcagucuugcuuuccaacgaaggaauaauaaacagugaagacgagcaucuauuggcacuugagagaaaacuaaagaaaaugcugggccccucugcuguagacauaggaaauggaugcuucgaaaccaaacacaaaugcaaccagaccugcuuagacaggauagcugcuggcaccuuuaaugcaggagaauuuucucuccccacuuuugauucauugaacauuacugcugcgucuuuaaaugaugauggauuggauaaccauacuauacugcucuauuacucaacugcugcuucuaguuuggcuguaacauuaaugcuagcuauuuuuauuguuuauauggucuccagagacaacguuucaugcuccaucugucuauaa

SEQ ID NO: 59806 - RNA, 1755 nt, Artificial Sequence
  derived and/or modified CDS sequence (wt) from hemagglutinin__InfluenzaB__AGX24876
augaaggcaauaauuguacuacucaugguaguaacauccaaugcagaucgaaucugcacugggauaacaucuucaaacucaccucauguggucaaaacagcuacucaaggggaggucaaugugacuggcgugauaccacugacaacaacaccaacaaaaucuuauuuugcaaaccucaaaggaacaaggaccagagggaaacuaugcccggacugucucaacuguacagaucuggauguggccuugggcaggccaauguguguggggaccacaccuucugcuaaagcuucaauacuccacgaagucagaccuguuacauccgggugcuuuccuauaaugcacgacagaacaaaaaucaggcaacuacccaaucuucucagaggauaugaaaauaucagguuaucaacccagaacguuaucgaugcagaaaaagcaccaggaggacccuacagacuuggaaccucaggaucuugcccuaaugcuaccaguaaaaucggauuuuucgcaacaauggcuugggcugucccaaaggacaacuacaaaaaugcaacgaacucacuaacaguagaaguaccauacauuuguaaagaaggggaagaccaaauuacuguuuggggguuccauucagauaacaaaccccaaaugaagaaccucuauggagacucaaauccucaaaaguucaccucaucugcuaauggaguaaccacacauuauguuucucagguuggcgacuucccagaucaaacagaagacggaggacuaccacaaagcggcagaauuguuguugauuacaugaugcaaaaaccugggagaacaggaacaauugucuaucaaagagguguuuuguugccucaaaagguguggugcgcgaguggcaggagcaaaguaauaaaagggucauugccuuuaauuggugaagcagauugccuucaugagaaauacgguggauuaaacaaaagcaagccuuacuacacaggagaacaugcaaaagccauagggaacugcccaauauggguaaaaacaccuuugaaacuugccaaugggaccaaauauagaccuccugcaaaacuauuaaaggaaagggguuucuucggggcuauugcugguuuccuagaaggaggaugggaaggaaugauugcagguuggcacggauacacaucucacggagcacauggaguggcaguggcggcagaccuuaagaguacacaagaagcuauaaauaagauaacaaaaaaucucaauucuuugagugagcuagaaguaaagaaccuucaaagacuaaguggugccauggaugaacuccacaacgaaauacucgagcuggaugagaaaguggaugaucucagagcugacacuauaagcucacaaauagaacuugcagucuugcuuuccaacgaaggaauaauaaacagugaagacgagcaucuauuggcacuugagagaaaacuaaagaaaaugcugggccccucugcuguagacauaggaaauggaugcuucgaaaccaaacacaaaugcaaccagaccugcuuagacaggauagcugcuggcaccuuuaaugcaggagaauuuucucuccccacuuuugauucauugaacauuacugcugcaucuuuaaaugaugauggauuggauaaccauacuauacugcucuauuacucaacugcugcuucuaguuuggcuguaacauuaaugcuagcuauuuuuauuguuuauauggucuccagagacaacguuucaugcuccaucugucuauaa

SEQ ID NO: 59807 - RNA, 1755 nt, Artificial Sequence
  derived and/or modified CDS sequence (wt) from hemagglutinin__InfluenzaB__AGX24887
augaaggcaauaauuguacuacucaugguaguaacauccaaugcagaucgaaucugcacugggauaacaucuucaaacucaccucauguagucaaaacagcuacucaaggggaggucaaugugacuggcgcgauaccauugacaacaacaccaacaaaaucuuauuuugcaaaucucaaaggaacaaggaccagagggaaacuaugcccggacugucucaacuguacagaucuggauguggccuugggcaggccaauguguguggggaccacaccuucugcuaaagcuucaauacuccacgaagucagaccuguuacauccgggugcuuuccuauaaugcacgacagaacaaaaaucaggcaacuacccaaucuucucagaggauaugaaaauaucagguuaucaacccaaaacguuaucgaugcagaaaaagcaccaggaggacccuacagacuuggaaccucaggaucuugcccuaacgcuaccaguaaaaucggauuuuucgcaacaauggcuugggcugucccaaaggacaacuacaaaaaugcaacgaacccacaaacaguagaaguaccauacauuuguacagaaggggaagaccaaauuacuguuuggggguuccauucagauaacaaaacccaaaugaagaaccucuauggagacucaaauccucaaaaguucaccucaucugcuaauggaguaaccacacauuauguuucucagauuggcgacuucccagaucaaacagaagacggaggacuaccacaaagcggcagaauuguuguugauuacauggugcaaaaaccugggaaaacaggaacaauugucuaucaaagaggcguuuuguugccucaaaagguguggugcgcgaguggcaggagcaaaguaauaaaagggucauugccuuuaauuggugaagcagauugccuucaugaaaaauacgguggauuaaacaaaagcaagccuuacuacacaggagaacaugcaaaagccauaggaaauugcccaauauggguaaaaacaccuuugaagcuugccaauggaaccaaauauagaccuccugcaaaacuauuaaaggaaagggguuucuucggagcuauugcugguuuccuagaaggaggaugggaaggaaugauugcagguuggcacggauacacaucucacggagcacauggaguggcaguggcggcagaccuuaagaguacacaagaagcuauaaauaagauaacaaaaaaucucaauucuuuaagugagcuagaaguaaaaaaccuucaaagacuaaguggugccauggaugaacuccacaacgaaauacucgagcuggaugagaaaguggaugaucucagagcugacacuaugagcucacaaauagaacuugcagucuugcuuuccaacgaaggaauaauaaacagugaagacgagcaucuauuggcacuugagagaaaacuaaagaaaaugcugggucccucugcuguagacauaggaaauggaugcuucgaaaccaaacacaaaugcaaccagaccugcuuagacaggauagcugcuggcaccuuuaaugcaggagaauuuucucuccccacuuuugauucauugaacauuacugcugcaucuuuaaaugaugauggauuggauaaccauacuauacugcucuauuacucaacugcugcuucuaguuuggcuguaacauuaaugcuagcuauuuuuauuguuuauauggucuccagagacaacguuucaugcuccaucugucuauaa

SEQ ID NO: 59808 - RNA, 1755 nt, Artificial Sequence
  derived and/or modified CDS sequence (wt) from hemagglutinin__InfluenzaB__AGX24898
augaaggcaauaauuguacuacucaugguaguaacauccaaugcagaucgaaucugcacugggauaacaucuucaaacucaccucauguggucaaaacagcuacucaaggggaggucaaugugacuggcgugauaccacugacaacaacaccaacaaaaucuuauuuugcaaaucucaaaggaacaaggaccagagggaaacuaugcccggacugucucaacuguacagaucuggauguggccuugggcaggccaauguguguggggaccacaccuucugcuaaagcuucaauacuccacgaggucagaccuguuacauccgggugcuuuccuauaaugcacgacagaacaaaaaucaggcaacuacccaaucuucucagaggauaugaaaagaucagguuaucaacccaaaacguuaucgaugcagaaaaagcaccaggaggacccuacagacuuggaaccucaggaucuugcccuaacgcuaccaguaaaaucggauuuuucgcaacaauggcuugggcugucccaaaggacaacuacaaaaaugcaacgaacccacuaacaguggaaguaccauacauuuguacaggaggggaagaccaaauuacuguuuggggguuccauucagauaacaaaacccaaaugaagagccucuauggagacucaaauccucaaaaguucacaucaucugcuaauggaguaaccacacauuauguuucucagauuggcgacuucccagaucaaacagaagacggaggacuaccacaaagcggcagaauuguuguugauuacaugaugcaaaaaccugggaaaacaggaacaauugucuaucaaagagguguuuuguugccucaaaagguguggugcgcgaguggcaggagcaaaguaauaaaagggucauugcccuuaauuggugaagcagauugccuucaugaaaaauaugguggauuaaacaaaagcaagccuuacuacacaggagaacaugcaaaagccauaggaaauugcccaauauggguaaaaacaccuuugaagcuugccaauggaaccaaauauagaccuccugcaaaacuauugaaggaaagggguuucuucggagcuauugcugguuuccuagaaggaggaugggaaggaaugauugcagguuggcacggauacacaucucacggagcacauggaguggcaguggcggcagaccuuaagaguacacaagaagcuauaaauaagauaacaaaaaaucucaauucuuugagugagcuagaaguaaaaaaccuucaaagacuaaguggugccauggaugaacuccacaacgaaauacucgagcuggaugagaaaguggaugaucucagagcugacacuauaagcucacaaauagaacuugcagucuugcuuuccaacgaaggaauaauaaacagugaagacgagcaucuauuggcacuugagagaaaacuaaagaaaaugcugggucccucugcuguagacauaggaaacggaugcuucgaaaccaaacacaaaugcaaccagaccugcuuagacaggauagcugcuggcaccuuuaaugcaggagaauuuucucuccccacuuuugauucauugaacauuacugcugcaucuuuaaaugaugauggauuggauaaccauacuauacugcucuauuacucaacugcugcuucuaguuuggcuguaacauuaaugcuagcuauuuuuauuguuuauauggucuccagagacaacguuucaugcuccaucugucuauaa

SEQ ID NO: 59809 - RNA, 1758 nt, Artificial Sequence
  derived and/or modified CDS sequence (wt) from hemagglutinin__InfluenzaB__AGX84854
augaaggcaauaauuguacuacucaugguaguaacauccaaugcagaucgaaucugcacugggauaacaucgucaaacucaccacauaucgucaaaacugcuacucaaggggaggucaaugugacugguguaauaccacugacaacaacacccaccaaaucucauuuugcaaaucucaaaggaacagaaaccagggggaaacuaugcccaaaaugccucaacugcacagaucuagacguagccuugggcagaccaaaaugcacggggaaaauacccucggcaagaguuucaauacuccaugaagucagaccuguuacaucugggugcuuuccuauaaugcacgacagaacaaaaauuagacagcugccuaaccuucucagaggauacgaacauaucagguuaucaacucauaacguuaucaaugcagaaaaugcaccaggaggacccuacaaaauuggaaccucagggucuugcccuaacauuaccaauggaaacggauuuuucgcaacaauggcuugggccgucccaaaaaacgacaaaaacaaaacagcaacaaauccauuaacaauagaaguaccauacauuuguacagaaggagaagaccaaauuaccguuuggggguuccacucugacaaugaaacccaaauggcaaagcucuauggggacucaaagccccagaaguucaccucaucugccaacggagugaccacacauuacguuucacagauugguggcuucccaaaucaaacagaagacggaggacuaccacaaagugguagaauuguuguugauuacauggugcaaaaaucugggaaaacaggaacaauuaccuaucaaagggguauuuuauugccucaaaagguguggugcgcaaguggcaggagcaagguaauaaaaggauccuugccuuuaauuggagaagcagauugccuccacgaaaaauacgguggauuaaacaaaagcaagccuuacuacacaggggaacaugcaaaggccauaggaaauugcccaauaugggugaaaacacccuugaagcuggccaauggaaccaaauauagaccuccugcaaaacuauuaaaggaaagggguuucuucggugcuauugcuggcuucuuggaaggaggaugggaaggaaugauugcagguuggcacggauacacaucccauggggcacauggaguagcgguggcagcagaccuuaagagcacucaagaggccauaaacaagauaacaaaaaaucucaacucuuugagugagcuggaaguaaagaaucuucaaagacuaagcggugccauggaugaacuccacaaugaaauacuagaauuagaugagaaaguggaugaucucagagcugauacaauaagcucacaaauagaacucgcaguccugcuuuccaaugaaggaauaauaaacagugaagaugaacaucucuuggcgcuugaaagaaagcugaagaaaaugcugggccccucugcuguagagauagggaauggaugcuuugaaaccaaacacaagugcaaccagaccugucucgacagaauagcugcugguaccuuugaugcaggagaauuuucucuccccacuuuugauucacugaauauuacugcugcaucuuuaaaugacgauggauuggauaaucauacuauacugcuuuacuacucaacugcugccuccaguuuggcuguaacacugaugauagcuaucuuuguuguuuauauggucuccagagacaauguuucuugcuccaucugucuauaa

SEQ ID NO: 59810 - RNA, 1758 nt, Artificial Sequence
  derived and/or modified CDS sequence (wt) from hemagglutinin__InfluenzaB__AGX84865
augaaggcaauaauuguacuacucaugguaguaacauccaaugcagaucgaaucugcacugggauaacaucgucaaacucaccacauaucgucaaaacugcuacucaaggggaggucaaugugacugguguaauaccacugacaacaacacccaccaaaucucauuuugcaaaucucaaaggaacagaaaccagagggaaacuaugcccaaaaugccccaacugcacagaucuggacguagccuugggcagaccaaaaugcacggggaaaauacccucggcaagaguuucaauacuccaugaagucagaccuguuacaucugggugcuuuccuauaaugcacgauagaacaaaaauuagacagcugccuaaccuucuccgaggauacgaacauaucagauuaucaacucauaacguuaucaaugcagaaaaugcaccaggaggacccuacaaaauuggaaccucagggucuugcccuaacguuaccaauggaaacggauuuuucgcaacaauggcuugggccgucccaaaaaacgacaaaaacaaaacagcaacaaauccauuaacaauagaaguaccauacauuuguacagaaggagaagaccaaauuaccguuuggggguuccacucugauaacgagacccaaauggcaaagcucuauggggacucaaagccccagaaguucaccucaucugccaacggagugaccacacauuacguuucacagauugguggcuucccaaaucaaacagaagacggaggacuaccacaaagugguagaauuguuguugauuacauggugcaaaaaucugggaaaacaggaacaauuaccuaucaaagagguauuuuauugccucaaaagguguggugcgcaaguggcaggagcaagguaauaaaaggauccuugccuuuaauuggagaagcagauugccuccacgaaaaauacgguggauuaaacaaaagcaagccuuacuacacaggggaacaugcaaaggccauaggaaauugcccaauaugggugaagacacccuugaagcuggccaauggaaccaaauauagaccuccugcaaaacuauuaaaggaaagggguuucuucggagcuauugcugguuucuuagaaggagggugggaaggaaugauugcagguuggcacggauacacgucccauggggcacauggaguagcgguggcagcagaccuuaagagcacucaagaggccauaaacaagauaacaaaaaaucucaacucuuugagugagcuggaaguaaagaaucuucaaagacuaagcggugccauggaugaacuccacaacgaaauacuagaacuagacgagaaaguggaugaucucagagcugauacaauaagcucacaaauagaacucgcaguccugcuuuccaaugaaggaauaauaaacagugaagaugaacaucucuuggcgcuugaaagaaagcugaagaaaaugcugggcccuucugcuguagaaauagggaauggaugcuuugaaaccaaacacaagugcaaccagaccugucucgacagaauagcugcugguaccuuugaugcaggagaauuuucucuccccaccuuugauucacugaauauuacugcugcaucuuuaaaugacgauggauuggauaaucauaccauacugcuuuacuacucaacugcugccuccaguuuggcuguaacacugaugauagcuaucuuuguuguuuauauggucuccagagacaauguuucuugcuccaucugucuauaa

SEQ ID NO: 59811 - RNA, 1758 nt, Artificial Sequence
  derived and/or modified CDS sequence (wt) from hemagglutinin__InfluenzaB__AGX84876
augaaggcaauaauuguacuacucaugguaguaacauccaaugcagaucgaaucugcacugggauaacaucgucaaacucaccacauaucgucaaaacugcuacucaaggggaggucaaugugacugguguaauaccacugacaacaacacccaccaaaucucauuuugcaaaucucaaaggaacagaaaccagagggaaacuaugcccaaaaugccccaacugcacagaucuggacguagccuugggcagaccaaaaugcacggggaaaauacccucggcaagaguuucaauacuccaugaagucagaccuguuacaucugggugcuuuccuauaaugcacgacagaacaaaaauuagacagcugccuaaccuucuccgaggauacgaacauaucagauuaucaacucauaacguuaucaaugcagaaaaugcaccaggaggacccuacaaaauuggaaccucagggucuugcccuaacguuaccaauggaaacggauuuuucgcaacaauggcuugggccgucccaaaaaacgacaaaaacaaaacagcaacaaauccauuaacaauagaaguaccauacauuuguacagaaggagaagaccaaauuaccguuuggggguuccacucugauaacgagacccaaauggcaaagcucuauggggacucaaagccccagaaguucaccucaucugccaacggagugaccacacauuacguuucacagauugguggcuucccaaaucaaacagaagacggaggacuaccacaaagugguagaauuguuguugauuacauggugcaaaaaucugggaaaacaggaacaauuaccuaucaaagagguauuuuauugccucaaaagguguggugcgcaaguggcaggagcaagguaauaaaaggauccuugccuuuaauuggagaagcagauugccuccacgaaaaauacgguggauuaaacaaaagcaagccuuacuacacaggggaacaugcaaaggccauaggaaauugcccaauaugggugaagacacccuugaagcuggccaauggaaccaaauauagaccuccugcaaaacuauuaaaggaaagggguuucuucggagcuauugcugguuucuuagaaggaggaugggaaggaaugauugcagguuggcacggauacacgucccauggggcacauggaguagcgguggcagcagaccuuaagagcacucaagaggccauaaacaagauaacaaaaaaucucaacucuuugagugagcuggaaguaaagaaucuucaaagacuaagcggugccauggaugaacuccacaacgaaauacuagaacuagacgagaaaguggaugaucucagagcugauacaauaagcucacaaauagaacucgcaguccugcuuuccaaugaaggaauaauaaacagugaagaugaacaucucuuggcgcuugaaagaaagcugaagaaaaugcugggcccuucugcuguagaaauagggaauggaugcuuugaaaccaaacacaagugcaaccagaccugucucgacagaauagcugcugguaccuuugaugcaggagaauuuucucuccccaccuuugauucacugaauauuacugcugcaucuuuaaaugacgauggauuggauaaucauaccauacugcuuuacuacucaacugcugccuccaguuuggcuguaacacugaugauagcuaucuuuguuguuuauauggucuccagagacaauguuucuugcuccaucugucuauaa

SEQ ID NO: 59812 - RNA, 1758 nt, Artificial Sequence; identical to SEQ ID NO: 59810
  derived and/or modified CDS sequence (wt) from hemagglutinin__InfluenzaB__AGX84887

SEQ ID NO: 59813 - RNA, 1758 nt, Artificial Sequence; identical to SEQ ID NO: 59809
  derived and/or modified CDS sequence (wt) from hemagglutinin__InfluenzaB__AGX84898

SEQ ID NO: 59814 - RNA, 1758 nt, Artificial Sequence
  derived and/or modified CDS sequence (wt) from hemagglutinin__InfluenzaB__AGX84920
augaaggcaauaauuguacuacucaugguaguaacauccaaugcagaucgaaucugcacugggauaacaucgucaaacucaccacaugucgucaaaacugcuacucaaggggaggucaaugugacugguguaauaccacugacaacaacacccaccaaaucucauuuugcaaaucucaaaggaacagaaaccagagggaaacuaugcccaaaaugccccaacugcacagaucuggacguagccuugggcagaccaaaaugcacggggaaaauacccucggcaggaguuucaauacuccaugaagucagaccuguuacaucugggugcuuuccuauaaugcacgacagaacaaaaauuagacagcugccuaaccuucuccgaggauacgaacauaucagauuaucaacucauaacguuaucaaugcagaaaaugcaccaggaggacccuacaaaauuggaaccucagggucuugcccuaacguuaccaauggaaacggauuuuucgcaacaauggcuugggccgucccaaaaaacgacaaaaacaaaaccgcaacaaauccauuaacaauagaaguaccauacauuuguacagaaggagaagaccaaauuaccguuuggggguuccacucugauaacgagacccaaauggcaaagcucuauggggacucaaagccccagaaguucaccucaucugccaacggagugaccacacauuacguuucacagauugguggcuucccaaaucaaacagaagacggaggacuaccacaaagugguagaauuguuguugauuacauggugcaaaaaucugggaaaacaggaacaauuaccuaucaaagagguauuuuauugccucaaaagguguggugcgcaaguggcaggagcaagguaauaaaaggauccuugccuuuaauuggagaagcagauugccuccacgaaaaauacgguggauuaaacaaaagcaagccuuacuacacaggggaacaugcaaaggccauaggaaauugcccaauaugggugaagacacccuugaagcuggccaauggaaccaaauauagaccuccugcaaaacuauuaaaggaaagggguuucuucggagcuauugcugguuucuuagaaggaggaugggaaggaaugauugcagguuggcacggauacacgucccauggggcacauggaguagcgguggcagcagaccuuaagagcacucaagaggccauaaacaagauaacaaaaaaucucaacucuuugagugagcuggaaguaaagaaucuucaaagacuaagcggugccauggaugaacuccacaacgaaauacuagaacuagacgagaaaguggaugaucucagagcugauacaauaagcucacaaauagaacucgcaguccugcuuuccaaugaaggaauaauaaacagugaagaugaacaucucuuggcgcuugaaagaaagcugaagaaaaugcugggcccuucugcuguagagauagggaauggaugcuuugaaaccaaacacaagugcaaccagaccugucucgacagaauagcugcugguaccuuugaugcaggagaauuuucucuccccaccuuugauucacugaauauuacugcugcaucuuuaaaugacgauggauuggauaaucauaccauacugcuuuacuacucaacugcugccuccaguuuggcuguaacacugaugauagcuaucuuuguuguuuauauggucuccagagacaauguuucuugcuccaucugucuauag

SEQ ID NO: 59815 - RNA, 1758 nt, Artificial Sequence
  derived and/or modified CDS sequence (wt) from hemagglutinin__InfluenzaB__AGZ59821
augaaggcaauaauuguacuacucaugguaguaacauccaaugcagaucgaaucugcacugggauaacaucgucaaacucaccccauguggucaaaacugcuacucaaggggaggucaaugugacuggugugauaccacugacaacaacacccaccaaaucucauuuugcaaaucucaaaggaacaaaaaccagagggaaacuaugcccaaaaugcuucaacugcacagaucuggacguggccuugggcagaccaaaaugcacggggaacauacccucggcaaaaguuucaauacuccaugaagucagaccuguuacaucugggugcuuuccuauaaugcacgacagaacaaaaguuagacagcugcccaaucuucucagaggauacgaacauaucagguuaucaacucauaacguuaucaaugcagaaaaggcaccaggaggacccuacaaaauuggaaccucagggucuugcccuaacguuaccaauggaaacggauuuuuugcaacaauggcuugggccgucccaaaaaacgacaacaacaaaacagcaacaaauucauuaacaauagaaguaccauacauuuguacagaaggagaagaccaaauuaccguuuggggguuccacucugauaacgaaacccaaauggcaaaacucuauggggacucaaagccccagaaguucaccucaucugccaacggagugaccacacauuacguuucacagauugguggcuucccaaaucaaacagaagacggaggacuaccacaaagugguagaauuguuguugauuacauggugcaaaaaucugggaaaacaggaacaauuaccuaucaaagagguauuuuauugccucaaaaaguguggugcgcaaguggcaggagcaagguaauaaaaggauccuugccuuuaauuggagaagcagauugccuccacgaaaaauacgguggauuaaacaaaagcaagccuuacuacacaggggaacaugcaaaggccauaggaaauugcccaauaugggugaaaacacccuugaagcuggccaauggaaccaaauauagaccuccugcaaaacuauuaaaggaaagggguuucuucggagcuauugcugguuucuuagaaggaggaugggaaggaaugauugcagguuggcacggauacacaucccauggggcacauggaguagcaguggcagcagaccuuaagaguacucaagaagccauaaacaagauaacaaaaaaucucaacucuuugagugagcuggaaguaaagaaucuucaaagacuaagcggugccauggaugaacuccacaacgaaauacuagaacuagacgagaaaguggaugaucucagagcugauacaauaagcucacaaauagaacucgcagucuugcuuuccaaugaaggaauaauaaacagugaagaugagcaucucuuggcgcuugaaagaaagcugaagaaaaugcugggccccucugcuguagagauagggaauggaugcuucgaaaccaaacacaagugcaaccagaccugucucgacagaauagcugcugguaccuuugaugcaggagaauuuucucuccccacuuuugauucacugaauauuacugcugcaucuuuaaaugacgauggauuggauaaucauacuauacugcuuuacuacucaacugcugccuccaguuuggcuguaacauugaugauagcuaucuuuguuguuuauauggucuccagagacaauguuucuugcuccaucugucuauaa

SEQ ID NO: 59816 - RNA, 1758 nt, Artificial Sequence
  derived and/or modified CDS sequence (wt) from hemagglutinin__InfluenzaB__AGZ59832
augaaggcaauaauuguacuacucaugguaguaacauccaaugcagaucgaaucugcacugggauaacaucgucaaacucaccccauguggucaaaacugcuacucaaggggaggucaaugugacuggugugauaccacugacaacaacacccaccaaaucucauuuugcaaaucucaaaggaacaaaaaccagagggaaacuaugcccaaaaugccucaacugcacagaucuggacguggccuugggcagaccaaaaugcacggggaacauacccucggcaaaaguuucaauacuccaugaagucagaccuguuacaucugggugcuuuccuauaaugcacgacagaacaaaaauuagacagcugcccaaccuucucagaggauacgaacauaucagguuaucaacucauaacguuaucaaugcagaaaaggcaccaggaggacccuacaaaauuggaaccucagggucuugcccuaacguuaccaauggaaacggauuuuucgcaacaauggcuugggccgucccaaaaaacgacaacaacaaaacagcaacaaauucauuaacaauagaaguaccauacauuuguacagaaggagaagaccaaauuaccguuuggggguuccacucugauaacgaaacccaaauggcaaaacucuauggggacucaaagccccagaaguucaccucaucugccaacggagugaccacacauuacguuucacagauugguggcuucccaaaucaaacagaagacggaggacuaccacaaagugguagaauuguuguugauuacauggugcaaaaaucugggaaaacaggaacaauuaccuaucaaagagguauuuuauugccucaaaaaguguggugcgcaaguggcaagagcaagguaauaaaaggauccuugccuuuaauuggagaagcagauugccuccacgaaaaauacgguggauuaaacaaaagcaagccuuacuacacaggggaacaugcaaaggccauaggaaauugcccaauaugggugaaaacacccuugaagcuggccaauggaaccaaauauagaccuccugcaaaacuauuaaaggaaagggguuucuucggagcuauugcugguuucuuagaaggaggaugggaaggaaugauugcagguuggcacggauacacaucccauggggcacauggaguagcaguggcagcagaccuuaagagcacucaagaagccauaaacaagauaacaaaaaaucucaacucuuugagugagcuggaaguaaagaaucuucaaagacuaagcggugccauggaugaacuccacaacgaaauacuagaacuagacgagaaaguggaugaucucagagcugauacaauaagcucacaaauagaacucgcaguccugcuuuccaaugaaggaauaauaaacagugaagaugagcaucucuuggcgcuugaaagaaagcugaagaaaaugcugggccccucugcuguagagauagggaauggaugcuucgaaaccaaacacaagugcaaccagaccugucucgacagaauagcugcugguaccuuugaugcaggagaauuuucucuccccacuuuugauucacugaauauuacugcugcaucuuuaaaugaagauggauuggauaaucauacuauacugcuuuacuacucaacugcugccuccaguuuggcuguaacauugaugauagcuaucuuuguuguuuauauggucuccagagacaauguuucuugcuccaucugucuauaa

SEQ ID NO: 59817 - RNA, 1758 nt, Artificial Sequence
  derived and/or modified CDS sequence (wt) from hemagglutinin__InfluenzaB__AGZ59843
augaaggcaauaauuguacuacucaugguaguaacauccaaugcagaucgaaucugcacugggauaacaucgucaaacucaccacauguugucaaaacugcuacucaaggggaggucaaugugaccgguguaauaccacugacaacaacacccaccaaaucucauuuugcaaaucucaaaggaacagaaaccagagggaaacuaugcccaaaaugccucaacugcacagaucuggacguggccuugggcagaccaaaaugcacggggaacauacccucggcaagaguuucaauacuccaugaagucagaccuguuacaucugggugcuuuccuauaaugcacgacagaacaaaaauuagacagcugccuaaccuucucagaggauacgaacauaucagguuaucaacucauaacguuaucaaugcagaaaaugcaccaggaggacccuacaaaauuggaaccucagggucuugcccuaacguuaccaauggaaacggauuuuucgcaacaauggcuugggccgucccaaaaaacgacaacaacaaaacagcaacaaauucauuaacaauagaaguaccauacauuuguacagaaggagaagaccaaauuaccguuuggggguuccacucugauaacgagacccaaauggcaaagcucuauggggacucaaagccccagaaguucaccucaucugccaacggagugaccacacauuacguuucacagauugguggcuucccaaaucaaacagaagacggaggacuaccacaaagugguagaauuguuguugauuacauggugcaaaaaucugggaaaacaggaacaauuaccuaucaaagagguauuuuauugccucaaaagguguggugcgcaaguggcaggagcaagguaauaaaaggauccuugccuuuaauuggagaagcagauugccuccacgaaaaauacgguggguuaaacaaaagcaagccuuacuacacaggggaacaugcaaaggccauaggaaauugcccaauaugggugaaaacacccuugaagcuggccaauggaaccaaauauagaccuccugcaaaacuauuaaaggaaagggguuucuucggagcuauugcugguuucuuagaaggaggaugggaaggaaugauugcagguuggcacggauacacaucccauggggcacauggaguagcgguggcagcagaccuuaagagcacucaagaggccauaaacaagauaacaaaaaaucucaacucuuugagugagcuggaaguaaagaaucuucaaagacuaagcggugccauggaugaacuccacaacgaaauacuagaacuagacgagaaaguggaugaucucagagcugauacaauaagcucacaaauagaacucgcaguccugcuuuccaaugaaggaauaauaaacagugaagaugagcaucucuuggcgcuugaaagaaagcugaagaaaaugcugggccccucugcuguagagauagggaauggaugcuuugaaaccaaacacaagugcaaccagaccugucucgacagaauagcugcugguaccuuugaugcaggagaauuuucucuccccaccuuugauucacugaauauuacugcugcaucuuuaaaugacgauggauuggauaaucauacuauacugcuuuacuacucaacugcugccuccaguuuggcuguaacauugaugauagcuaucuuuauuguuuauauggucuccagagacaauguuucuugcuccaucugucuauaa

SEQ ID NO: 59818 - RNA, 1758 nt, Artificial Sequence
  derived and/or modified CDS sequence (wt) from hemagglutinin__InfluenzaB__AGZ59854
augaaggcaauaauuguacuacucaugguaguaacauccaaugcagaucgaaucugcacugggauaacaucgucaaacucaccacauguugucaaaacugcuacucaaggggaggucaaugugacugguguaauaccacugacaacaacacccaccaaaucucauuuugcaaaucucaaaggaacagaaaccagagggaaacuaugcccaaaaugccucaacugcacagaucuggacguggccuugggcagaccaaaaugcacggggaaaauacccucggcaagaguuucaauacuccaugaagucagaccuguuacaucugggugcuuuccuauaaugcacgacagaacaaaaauuagacagcugccuaaccuucucagaggauacgaacauaucagguuaucaacucauaacguuaucaaugcagaaaaugcaccaggaggacccuacaaaauuggaaccucagggucuugcccuaacguuaccaauggaaacggauuuuuugcaacaauggcuugggcugucccaaaaaacgacaacaacaaaacagcaacaaauucauuaacaauagaaguaccauacauuuguacagagggagaagaccaaauuaccguuuggggguuccacucugauaacgaaacccaaauggcaaagcucuauggggacucaaagccccagaaguucaccucaucugccaacggagugaccacacauuacguuucacagauugguggcuucccaaaucaaacagaagacggaggacuaccacaaagugguagaauuguuguugauuacauggugcaaaaaucugggaaaacaggaacaauuaccuaucaaagagguauuuuauugccucaaaaaguguggugcgcaaguggcaggagcaagguaauaaaaggauccuugccuuuaauuggagaagcagauugccuccacgaaaaauacgguggauuaaacaaaagcaagccuuacuacacaggagaacaugcaaaggccauaggaaauugcccaauaugggugaaaacacccuugaagcuggccaauggaaccaaauauagaccuccugcaaaacuauuaaaggaaagggguuucuucggagcuauugcugguuucuuagaaggaggaugggaaggaaugauugcagguuggcacggauacacaucccauggggcacauggaguagcgguggcagcagaccuuaaaagcacucaagaggccauaaacaagauaacaaaaaaucucaacucuuugagugagcuggaaguaaagaaucuucaaagacuaagcggugccauggaugaacuccacaacgaaauacuagaacuagacgagaaaguggaugaucucagagcugauacaauaagcucacaaauagaacucgcaguccugcuuuccaaugaaggaauaauaaacagugaagaugagcaucucuuggcgcuugaaagaaagcugaagaaaaugcugggccccucugcuguagagauagggaauggaugcuuugaaaccaaacacaagugcaaccagaccugucucgacagaauagcugcugguaccuuugaugcaggagaauuuucucuccccaccuuugauucacugaauauuacugcugcaucuuuaaaugacgauggauuggauaaucauacuauacugcuuuacuacucaacugcugccuccaguuuggcuguaacauugaugauagcuaucuuuguuguuuauauggucuccagagacaauguuucuugcuccaucugucuauaa

SEQ ID NO: 59819 - RNA, 1758 nt, Artificial Sequence
  derived and/or modified CDS sequence (wt) from hemagglutinin__InfluenzaB__AGZ59865
augaaggcaauaauuguacuacucaugguaguaacauccaaugcagaucgaaucugcacugggauaacaucgucaaacucaccacauguugucaaaacugcuacucaaggggaggucaaugugacugguguaauaccacugacaacaacacccaccaaaucucauuuugcaaaucucaaaggaacagaaaccagagggaaacuaugcccaaaaugccucaauugcacagaucuggacguggccuugggcagaccaaaaugcacggggaacauacccucggcaagaguuucaauacuccaugaagucagaccuguuacaucugggugcuuuccuauaaugcacgacagaacaaaaauuagacagcugccuaaccuucuccgaggauacgaacauaucagguuaucaacucauaacguuaucaaugcagaaaaugcaccaggaggacccuacaaaauuggaaccucagggucuugcccuaacguuaccaauggaaacggauuuuucgcaacaauggcuugggccgucccaaaaaacgacaacaacaaaacagcaacaaauucauuaacaauagaaguaccauacauuuguacagaaggagaagaccaaauuaccguuuggggguuccacucugauaacgagacccaaauggcaaagcucuauggggacucaaagccccagaaguucaccucaucugccaacggagugaccacacauuacguuucacagauugguggcuucccaaaucaaacagaagacggaggacuaccacaaagugguagaauuguuguugauuacauggugcaaaaaucugggaaaacaggaacaauuaccuaucaaagagguauuuuauugccucaaaagguguggugcgcaaguggcaggagcaagguaauaaaaggauccuugccuuuaauuggagaagcagauugccuccacgaaaaauacgguggauuaaacaaaagcaagccuuacuacacaggggaacaugcaaaggccauaggaaauugcccaauaugggugaaaacacccuugaagcuggccaauggaaccaaauauagaccuccugcaaaacuauuaaaggaaagggguuucuucggagcuauugcugguuucuuagaaggaggaugggaaggaaugauugcagguuggcacggauacacaucccauggggcacauggaguagcgguggcagcagaccuuaagagcacucaagaggccauaaacaagauaacaaaaaaucucaacucuuugagugagcuggaaguaaagaaucuucaaagacuaagcggugccauggaugaacuccacaacgaaauacuagaacuagacgagaaaguggaugaucucagagcugauacaauaagcucacaaauagaacucgcaguccugcuuuccaaugaaggaauaauaaacagugaagaugagcaucucuuggcgcuugaaagaaagcugaagaaaaugcugggccccucugcuguagagauagggaauggaugcuuugaaaccaaacacaagugcaaccagaccugucucgacagaauagcugcugguaccuuugaugcaggagaauuuucucuccccaccuuugauucacugaauauuacugcugcaucuuuaaaugacgauggauuggauaaucauacuauacuacucuacuacucaacugcugccuccaguuuggcugucacauugaugauagcuaucuuuguuguuuauauggucuccagagacaauguuucuugcuccaucugucuauaa

SEQ ID NO: 59820 - RNA, 1758 nt, Artificial Sequence
  derived and/or modified CDS sequence (wt) from hemagglutinin__InfluenzaB__AGZ59876
augaaggcaauaauuguacuacucaugguaguaacauccaaugcagaucgaaucugcacugggauaacaucgucaaacucaccacauguugucaaaacugcuacucaaggggaggucaaugugacugguguaauaccacugacaacaacacccaccaaaucucauuuugcaaaucucaaaggaacagaaaccagagggaaacuaugcccaaaaugccucaacugcacagaucuggacguggccuugggcagaccaaaaugcacggggaacauacccucggcaagaguuucaauacuccaugaagucagaccuguuacaucugggugcuuuccuauaaugcacgacagaacaaaaauuagacagcugccuaaccuucucagaggauacgaacauaucagguuaucaacucauaacguuaucaaugcagaaaaugcaccaggaggacccuacaaaauuggaaccucagggucuugcccuaacguuaccaauggaaacggauuuuuugcaacaauggcuugggcugucccaaaaaacgacaaaaacaaaacagcaacaaauucauuaacaauagaaguaccauacauuuguacagagggagaagaccaaauuaccguuuggggguuccacucugauaacgaaacccaaauggcaaagcucuauggggacucaaagccccagaaguucaccucaucugccaacggagugaccacacauuacguuucacagauugguggcuucccaaaucaaacagaagacggaggacuaccacaaagugguagaauuguuguugauuacauggugcaaaaaucugggaaaacaggaacaauuaccuaucaaagagguauuuuauugccucaaaaaguguggugcacaaguggcaggagcaagguaauaaaaggauccuugccuuuaauuggagaagcagauugccuccacgaaaaauacgguggauuaaacaaaagcaagccuuacuacacaggggaacaugcaaaggccauaggaaauugcccaauaugggugaaaacacccuugaagcuggccaauggaaccaaauauagaccuccugcaaaacuauuaaaggaaagggguuucuucggagcuauugcugguuucuuagaaggaggaugggaaggaaugauugcagguuggcacggauacacaucccauggggcacauggaguagcgguggcagcagaccuuaaaagcacucaagaggccauaaacaagauaacaaaaaaucucaacucuuugagugagcuggaaguaaaaaaucuucaaagacuaagcggugccauggaugaacuccacaacgaaauacuagaacuagacgagaaaguggaugaucucagagcugauacaauaagcucacaaauagaacucgcaguccugcuuuccaaugaaggaauaauaaacagugaagaugagcaucucuuggcgcuugaaagaaagcugaagaaaaugcugggccccucugcuguagagauagggaauggaugcuuugaaaccaaacacaagugcaaccagaccugucucgacagaauagcugcugguaccuuugaugcaggagaauuuucucuccccaccuuugauucacugaauauuacugcugcaucuuuaaaugacgauggauuggauaaucauacuauacugcuuuacuacucaacugcugccuccaguuuggcuguaacauugaugauagcuaucuuuguuguuuauauggucuccagagacaauguuucuugcuccaucugucuauaa

SEQ ID NO: 59821 - RNA, 1755 nt, Artificial Sequence
  derived and/or modified CDS sequence (wt) from hemagglutinin__InfluenzaB__AGZ59887
augaaggcaauaauuguacuacucaugguaguaacauccaaugcagaucgaaucugcacuggaauaacaucuucaaacucaccucauguggucaaaacagccacucaaggggaggucaaugugacuggugugauaccacuaacaacaacaccaacaaaaucuuauuuugcaaaucucaaaggaacaaggaccagagggaaacuaugcccagacugucucaacugcacagaucuggauguggcuuugggcagaccaauguguguggggacuacaccuucggcgaaagcuucaauacuccacgaagucagaccuguuacauccgggugcuuuccuauaaugcacgacagaacaaaaaucaggcaacuacccaaucuucucagaggauaugaaaauaucaggcuaucaacccaaaacgucaucgaugcggaaaaggcaccaggaggacccuacagacuuggaaccucaggaucuuguccuaacgcuaccaguaagagcggauuuuucgcaacaauggcuugggcugucccaaaggacaacaacaaaaaugcaacgaacccacuaacaguagaaguaccauacauuuguacagaaggggaagaccaaaucacuguuuggggguuccauucagauaacaaaacccaaaugaagaaccucuauggagacucaaauccucaaaaguucaccucaucugcuaauggaguaaccacacacuauguuucucagauuggcagcuucccagaucaaacagaagacggaggacuaccacaaagcggcaggauuguuguugauuacaugaugcaaaaaccugggaaaacaggaacaauugucuaccaaagagguguuuuguugccucaaaagguguggugcgcgaguggcaggagcaaaguaauaaaaggguccuugccuuuaauuggugaagcagauugccuucaugaaaaauacgguggauuaaacaaaagcaagccuuacuacacaggagaacaugcaaaagccauaggaaauugcccaauaugggugaaaacgccuuugaagcuugccaauggaaccaaauauagaccuccugcaaaacuauuaaaggaaagggguuucuucggagcuauugcugguuuccuagaaggaggaugggaaggaaugauugcaggcuggcacggauacacaucucacggagcacauggaguggcaguggcggcggaccuuaagaguacgcaagaagcuauaaacaaaauaacaaaaaaucucaauucuuugagugagcuagaaguaaagaaucuucaaagacuaaguggugccauggaugaacuccacaacgaaauacucgagcuggaugagaaaguggaugaucucagagcugacacuauaagcucgcaaauagaacuugcagucuugcuuuccaacgaaggaauaauaaacagugaggaugagcaucuauuggcacuugagagaaaacuaaagaaaaugcugggucccucugcuguagagauaggaaauggaugcuucgaaaccaaacacaagugcaaccagaccuguuuagacaggauagcugcuggcaccuuuaaugcaggagaauuuucucuccccacuuuugauucacugaacauuacugcugcaucuuuaaaugaugauggauuggauaaccauacuauacugcucuauuacucaacugcugcuucuaguuuggcuguaacauugaugcuagcuauuuuuauuguuuauauggucuccagagacaacguuucaugcuccaucugucuauaa

SEQ ID NO: 59822 - RNA, 1758 nt, Artificial Sequence; identical to SEQ ID NO: 59003
  derived and/or modified CDS sequence (wt) from hemagglutinin__InfluenzaB__AGZ59898

SEQ ID NO: 59823 - RNA, 1758 nt, Artificial Sequence
  derived and/or modified CDS sequence (wt) from hemagglutinin__InfluenzaB__AGZ59909
augaaggcaauaauuguacuacucaugguaguaacauccaaugcagaucgaaucugcacugggauaacaucgucaaacucaccacaugucgucaaaacugcuacucaaggggaggucaaugugacugguguaauaccacugacaacaacacccaccaaaucucauuuugcaaaucucaaaggaacagaaaccagggggaaacuaugcccaaaaugccucaacugcacagaucuggacguagccuugggcagaccaaaaugcacggggaaaauacccucggcaagaguuucaauacuccaugaagucagaccuguuacaucugggugcuuuccuauaaugcacgauagaacaaaaauuagacagcugccuaaccuucuccgaggauacgaacauaucagguuaucaacucauaacguuaucaaugcagaaaaugcaccaggaggacccuacaaaauuggaaccucagggucuugcccuaacauuaccaaugaaaacggauuuuucgcaacaauggcuugggccgucccaaaaaacgacaaaaacaaaacagcaacaaauccauuaacaauagaaguaccauacauuuguacagaaggagaagaccaaauuaccguuuggggguuccacucugacaacgaaacccaaauggcaaagcucuauggggacucaaagccccagaaguucaccucaucugccaacggagugaccacacauuacguuucacagauugguggcuucccaaaucaaacagaagacggaggacuaccacaaagugguagaauuguuguugauuacauggugcaaaaaucugggaaaacaggaacaauuaccuaucaaagagguauuuuauugccucaaaagguguggugcgcaaguggcaggagcaagguaauaaaaggauccuugccuuuaauuggagaagcagauugccuccacgaaaaauacgguggauuaaacaaaagcaagccuuacuacacaggggaacaugcaaaggccauaggaaauugcccaauaugggugaaaacacccuugaagcuggccaauggaaccaaauauagaccuccugcaaaacuauuaaaggaaagggguuucuucggagcuauugcugguuucuuagaaggaggaugggaaggaaugauugcagguuggcacggauacacaucccauggggcacauggaguagcgguggcagcagaccuuaagagcacucaagaggccauaaacaagauaacaaaaaaucucaacucuuugagugagcuggaaguaaagaaucuucaaagacuaagcggugccauggaugaacuccacaacgaaauacuagaacuagaugagaaaguggaugaucucagagcugauacaauaagcucacaaauagaacucgcaguccugcuuuccaaugaaggaauaauaaacagugaagaugaacaucucuuggcgcuugaaagaaagcugaagaaaaugcugggccccucugcuguagagauagggaauggaugcuuugaaaccaaacacaagugcaaccagaccugucucgacagaauagcugcugguaccuuugaugcaggagaauuuucucuccccaccuuugauucacugaauauuacugcugcaucuuuaaaugacgauggauuggauaaucauacuauacugcuuuacuacucaacugcugccuccaguuuggcuguaacacugaugauagcuaucuuuguuguuuauauggucuccagagacaauguuucuugcuccaucugucuauaa

SEQ ID NO: 59824 - RNA, 1758 nt, Artificial Sequence; identical to SEQ ID NO: 59009
  derived and/or modified CDS sequence (wt) from hemagglutinin__InfluenzaB__AGZ59920

SEQ ID NO: 59825 - RNA, 1758 nt, Artificial Sequence; identical to SEQ ID NO: 59003
  derived and/or modified CDS sequence (wt) from hemagglutinin__InfluenzaB__AGZ59931

SEQ ID NO: 59826 - RNA, 1758 nt, Artificial Sequence; identical to SEQ ID NO: 59008
  derived and/or modified CDS sequence (wt) from hemagglutinin__InfluenzaB__AGZ59942

SEQ ID NO: 59827 - RNA, 1758 nt, Artificial Sequence; identical to SEQ ID NO: 59001
  derived and/or modified CDS sequence (wt) from hemagglutinin__InfluenzaB__AGZ59953

SEQ ID NO: 59828 - RNA, 1758 nt, Artificial Sequence
  derived and/or modified CDS sequence (wt) from hemagglutinin__InfluenzaB__AGZ59965
augaaggcaauaauuguacuacucaugguaguaacauccaaugcagaucgaaucugcacugggauaacaucgucaaacucaccacaugucgucaaaacugcuacucaaggggaggucaaugugacugguguaauaccacugacaacaacacccaccaaaucucauuuugcaaaucucaaaggaacagaaaccagggggaaacuaugcccaaaaugccucaacugcacagaucuggacguagccuugggcagaccaaaaugcacggggaaaauacccucggcaagaguuucaauacuccaugaagucagaccuguuacaucugggugcuuuccuauaaugcacgacagaacaaaaauuagacagcugccuaaccuucuccgaggauacgaacauaucagguuaucaacucauaacguuaucaaugcagaaaaugcaccaggaggacccuacaaaauuggaaccucagggucuugcccuaacauuaccaauggaaacggauuuuucgcaacaauggcuugggccgucccaaaaaacgacaaaaacaaaacagcaacaaauccauuaacaauagaaguaccauacauuuguacagaaggagaagaccaaauuaccguuuggggguuccacucugacaacgagacccaaauggcaaagcucuauggggacucaaagccccagaaguucaccucaucugccaacggagugaccacacauuacguuucacagauugguggcuucccaaaucaaacagaagacggaggacuaccacaaagugguagaguuguuguugauuacaugaugcaaaaaucugggaaaacaggaacaauuaccuaucaaagggguauuuuauugccucaaaagguguggugcgcaaguggcaggagcaagguaauaaaaggauccuugccuuuaauuggagaagcagauugccuccacgaaaaauacgguggauuaaacaaaagcaagccuuacuacacaggggaacaugcaaaggccauaggaaauugcccaauaugggugaaaacacccuugaagcuggccaauggaaccaaauauagaccuccugcaaaacuauuaaaggaaagggguuucuucggagcuauugcugguuucuuagaaggaggaugggaaggaaugauugcagguuggcacggauacacaucccauggggcacauggaguagcgguggcagcagaccuuaagagcacucaagaggccauaaacaagauaacaaaaaaucucaacucuuugagugagcuggaaguaaagaaucuucaaagacuaagcggugccauggaugaacuccacaacgaaauacuagaacuagaugagaaaguggaugaucucagagcugauacaauaagcucacaaauagaacucgcaguccugcuuuccaaugaaggaauaauaaacagugaagaugaacaucucuuggcgcuugaaagaaagcugaagaaaaugcugggccccucugcuguagagauagggaauggaugcuuugaaaccaaacacaagugcaaccagaccugucucgacagaauagcugcugguaccuuugaugcaggagaauuuucucuccccaccuuugauucacugaauauuacugcugcaucuuuaaaugacgauggauuggauaaucauacuauacugcuuuacuacucaacugcugccuccaguuuggcuguaacacugaugauagcuaucuuuguuguuuauauggucuccagagacaauguuucuugcuccaucugucuauaa

SEQ ID NO: 59829 - RNA, 1758 nt, Artificial Sequence
  derived and/or modified CDS sequence (wt) from hemagglutinin__InfluenzaB__AGZ59976
augaaggcaauaauuguacuacucaugguaguaacauccaaugcagaucgaaucugcacugggauaacaucgucaaacucaccacaugucgucaaaacugcuacucaaggggaggucaaugugacugguguaauaccacugacaacaacacccaccaaaucucauuuugcaaaucucaaaggaacagaaaccagggggaaacuaugcccaaaaugccucaacugcacagaucuggacguagccuugggcagaccaaaaugcacggggaaaauacccucggcaagaguuucaauacuccaugaagucagaccuguuacaucugggugcuuuccuauaaugcacgacagaacaaaaauuagacagcugccuaaccuucuccgaggauacgaacauaucagguuaucaacucauaacguuaucaaugcagaaaaugcaccaggaggacccuacaaaauuggaaccucagggucuugcccuaacauuaccaauggaaacggauuuuuugcaacaauggcuugggccgucccaaaaaacgacaaaaacaaaacagcaacaaauccauuaacaauagaaguaccauacauuuguacagaaggagaagaccaaauuaccguuuggggguuccacucugacaacgagacccaaauggcaaagcucuauggggacucaaagccccagaaguucaccucaucugccaacggagugaccacacauuacguuucacagauugguggcuucccaaaucaaacagaagacggaggacuaccacaaagugguagaauuguuguugauuacauggugcaaaaaucugggaaaacaggaacaauuaccuaucaaagggguauuuuauugccucaaaagguguggugcgcaaguggcaggagcaagguaauaaaaggauccuugccuuuaauuggagaagcagauugccuccacgaaaaauacgguggauuaaacaaaagcaagccuuacuacacaggggaacaugcaaaggccauaggaaauugcccaauaugggugaaaacacccuugaagcuggccaauggaaccaaauauagaccuccugcaaaacuauuaaaggaaagggguuucuucggagcuauugcugguuucuuagaaggaggaugggaaggaaugauugcagguuggcacggauacacaucccauggggcacauggaguagcgguggcagcagaccuuaagagcacucaagaggccauaaacaagauaacaaaaaaucucaacucuuugagugagcuggaaguaaagaaucuucaaagacuaagcggugccauggaugaacuccacaacgaaauacuagaacuagaugagaaaguggaugaucucagagcugauacaauaagcucacaaauagaacucgcaguccugcuuuccaaugaaggaauaauaaacagugaagaugaacaucucuuggcgcuugaaagaaagcugaagaaaaugcugggccccucugcuguagagauagggaauggaugcuuugaaaccaaacacaagugcaaccagaccugucucgacagaauagcugcugguaccuuugaugcaggagaauuuucucuccccaccuuugauucacugaauauuacugcugcaucuuuaaaugacgauggauuggauaaucauacuauacugcuuuacuacucaacugcugccuccaguuuggcuguaacacugaugauagcuaucuuuguuguuuauauggucuccagagacaauguuucuugcuccaucugucuauaa

SEQ ID NO: 59830 - RNA, 1758 nt, Artificial Sequence; identical to SEQ ID NO: 59001
  derived and/or modified CDS sequence (wt) from hemagglutinin__InfluenzaB__AGZ59987

SEQ ID NO: 59831 - RNA, 1758 nt, Artificial Sequence; identical to SEQ ID NO: 59009
  derived and/or modified CDS sequence (wt) from hemagglutinin__InfluenzaB__AGZ59999

SEQ ID NO: 59832 - RNA, 1758 nt, Artificial Sequence; identical to SEQ ID NO: 59453
  derived and/or modified CDS sequence (wt) from hemagglutinin__InfluenzaB__AGZ60010

SEQ ID NO: 59833 - RNA, 1758 nt, Artificial Sequence; identical to SEQ ID NO: 59395
  derived and/or modified CDS sequence (wt) from hemagglutinin__InfluenzaB__AGZ60021

SEQ ID NO: 59834 - RNA, 1758 nt, Artificial Sequence
  derived and/or modified CDS sequence (wt) from hemagglutinin__InfluenzaB__AGZ60033
augaaggcaauaauuguacuacucaugguaguaacauccaaugcagaucgaaucugcacugggauaacaucgucaaacucaccacaugucgucaaaacugcuacucaaggggaggucaaugugacugguguaauaccacugacaacaacacccaccaaaucucauuuugcaaaucucaaaggaacagaaaccagagggaaacuaugcccaaaaugccccaacugcacagaucuagacguagccuugggcagaccaaaaugcacggggaaaauacccucggcaagaguuucaauacuccaugaagucagaccuguuacaucugggugcuuuccuauaaugcacgacagaacaaaaauuagacagcugccuaaccuucuccgaggauacgaacauaucagauuaucaacucauaacguuaucaaugcagaaaaugcaccaggaggacccuacaaaauuggaaccucagggucuugcccuaacguuaccaauggaaacggauuuuucgcaacaauggcuugggccgucccaaaaaacgacaaaaacaaaacagcaacaaauccauuaacaauagaaguaccauacauuuguacagaaggagaagaccaaauuaccguuuggggguuccacucugauaacgagacccaaauggcaaagcucuauggggacucaaagccccagaaguuuaccucaucugccaacggagugaccacacauuacguuucacagauugguggcuucccaaaucaaacagaagacggaggacuaccacaaagugguagaauuguuguugauuacauggugcaaaaaucugggaaaacaggaacaauuaccuaucaaagagguauuuuauugccucaaaagguguggugcgcaaguggcaggagcaagguaauaaaaggauccuugccuuuaauuggagaagcagauugccuccacgaaaaauacgguggauuaaacaaaagcaagccuuacuacacaggggaacaugcaaaggccauaggaaauugcccaauaugggugaagacacccuugaagcuggccaauggaaccaaauauagaccuccugcaaaacuauuaaaggaaagggguuucuucggagcuauugcugguuucuuagaaggaggaugggaaggaaugauugcagguuggcacggauacacgucccauggggcacauggaguagcgguggcagcagaccuuaagagcacucaagaggccauaaacaagauaacaaaaaaucucaacucuuugagugagcuggaaguaaagaaucuucaaagacuaaguggugccauggaugaacuccacaacgaaauacuagaacuagacgagaaaguggaugaucucagagcugauacaauaagcucacaaauagaacucgcaguccugcuuuccaaugaaggaauaauaaacagugaagaugaacaucucuuggcacuugaaagaaagcugaagaaaaugcugggcccuucugcuguagagauagggaauggaugcuuugaaaccaaacacaagugcaaccagaccugucucgacagaauagcugcugguaccuuugaugcaggagaauuuucucuccccaccuuugauucacugaauauuacugcugcaucuuuaaaugacgauggauuggauaaucauaccauacugcuuuacuacucaacugcugccuccaguuuggcuguaacgcugaugauagccaucuuuguuguuuauauggucuccagagacaauguuucuugcuccaucugucuauaa

SEQ ID NO: 59835 - RNA, 1755 nt, Artificial Sequence
  derived and/or modified CDS sequence (wt) from hemagglutinin__InfluenzaB__AGZ60044
augaaggcaauaauuguacuacucaugguaguaacauccaaugcagaucgaaucugcacugggauaacaucuucaaacucaccucauguggucaaaacagcuacucaaggggaggucaaugugacugguguaauaccacugacaacaacaccaacaaaaucuuauuuugcaaaucucaaaggaacaaggaccagagggaaacuauguccagacugucucaacuguacagaucuagauguggccuugggcagaccaauguguguggggaccacaccuucggcaaaagcuucaauacuccacgaagucagaccuguuacauccgggugcuuuccuauaaugcacgacagaacaaaaaucagacaacuacccaaucuucucagaggauaugaaaauaucagauuaucaacccaaaacguuaucgaugcagaaaaugcaccaggaggacccuacagacuuggaaccucaggaucuugcccuaacgcuaccaguaaaagcggauucuucgcaacaauggcuugggcugucccaaaggacaacaacaaaaaugcaacgaacccacuaacaguagaaguaccauacguuuguacggaaggggaagaccaaauuacuguuuggggguuccauucagauaacaaaacccaaaugaagaaccucuauggagacucaaauccucaaaaguucaccucaucugcuaauggaguaaccacacauuauguuucucagauuggcggcuucccagcucaaacagaagacggaggacuaccacaaagcggcagaauuguuguugauuacauggugcaaaaaccuaggaaaacaggaacaauugucuaucaaagagguguuuuguugccucaaaagguguggugcgcgaguggcaggagcaaaguaauaaaaggguccuugccuuuaauuggugaagcagauugccuucaugaaaaauacgguggauuaaacaaaagcaagccuuacuacacaggagaacaugcaaaagccauaggaaauugcccaauaugggugaaaacaccuuugaagcuugccaauggaaccaaauauagaccuccugcaaaacuauuaaaggaaagggguuucuucggagcuauugcugguuuccuagaaggaggaugggaaggaaugauugcagguuggcacggauacacaucucacggagcacauggaguggcaguggcggcagaccuuaagaguacgcaagaagcuauaaacaagauaacaaaaaaucucaauucuuugagugagcuagaaguaaagaaucuucaaagacuaaguggugccauggaugagcuccacaacgaaauacucgagcuggaugagaaaguggaugaucucagagcugacacuauaagcucgcaaauagaacuugcagucuugcuuuccaaugaaggaauaauaaacagugaagaugagcaucuauuggcacuugagagaaaacuaaagaaaaugcugggucccucugcuguagacauaggaaauggaugcuucgaaaccaaacacaagugcaaccagaccugcuuagacaggauagcugcuggcaccuuuaaugcaggagaauuuucucuccccacuuuugauucacugaacauuacugcugcaucuuuaaaugaugauggauuggauaaccauacuauacugcucuauuacucaacugcugcuucuaguuuggcuguaacauugaugcuagcuauuuuuauuguuuauauggucuccagagacaacguuucaugcuccaucugucuauaa

SEQ ID NO: 59836 - RNA, 1755 nt, Artificial Sequence
  derived and/or modified CDS sequence (wt) from hemagglutinin__InfluenzaB__AGZ60055
augaaggcaauaauuguacuacucaugguaguaacauccaaugcagaucgaaucugcacugggauaacaucuucaaacucaccucauguggucaaaacagcuacucaaggggaggucaaugugacugguguaauaccacugacaacaacaccaacaaaaucuuauuuugcaaaucucaaaggaacaaggaccagagggaaacuauguccagacugucucaacuguacagaucuagauguggccuugggcagaccaaugugugugggaaccacaccuucggcaaaagcuucaauacuccacgaagucagaccuguuacauccgggugcuuuccuauaaugcacgacagaacaaaaaucagacaacuacccaaucuucucagaggauaugaaaauaucagauuaucaacccaaaacguuaucgaugcagaaaaugcaccaggaggacccuacagacuuggaaccucaggaucuugcccuaacgcuaccaguaaaagcggauucuucgcgacaauggcuugggcugucccaaaggacaacaacaaaaaugcaacgaacccacuaacaguagaaguaccauacguuuguacggaaggggaagaccaaauuacuguuuggggguuccauucagauaacaaaacccaaaugaagaaccucuauggagacucaaauccucaaaaguucaccucaucugcuaauggaguaaccacacauuauguuucucagauuggcggcuucccagcucaaacagaagacggaggacuaccacaaagcggcagaauuguuguugauuacauggugcaaaaaccuaggaaaacaggaacaauugucuaucaaagagguguuuuguugccucaaaagguguggugcgcgaguggcaggagcaaaguaauaaaaggguccuugccuuuaauuggugaagcagauugccuucaugaaaaauacgguggauuaaacaaaagcaagccuuacuacacaggagaacaugcaaaagccauaggaaauugcccaauaugggugaaaacaccuuugaagcuugccaauggaaccaaauauagaccuccugcaaaacuauuaaaggaaagggguuucuucggagcuauugcugguuuccuagaaggaggaugggaaggaaugauugcagguuggcacggauacacaucucacggagcacauggaguggcaguggcggcagaccuuaagaguacgcaagaagcuauaaacaagauaacaaaaaaucucaauucuuugagugagcuagaaauaaagaaucuucaaagacuaaguggugccauggaugaacuccacaacgaaauacucgagcuggaugagaaaguggaugaucucagagcugacacuauaagcucgcaaauagaacuugcagucuugcuuuccaaugaaggaauaauaaacagugaagaugagcaucuauuggcacuugagagaaaacuaaagaaaaugcugggucccucugcuguagacauaggaaauggaugcuucgaaaccaaacacaagugcaaccagaccugcuuagacaggauagcugcuggcaccuuuaaugcaggagaauuuucucuccccacuuuugauucacugaacauuacugcugcaucuuuaaaugaugauggauuggauaaccauacuauacugcucuauuacucaacugcugcuucuaguuuggcuguaacauugaugcuagcuauuuuuauuguuuauauggucuccagagacaacguuucaugcuccaucugucuauaa

SEQ ID NO: 59837 - RNA, 1755 nt, Artificial Sequence
  derived and/or modified CDS sequence (wt) from hemagglutinin__InfluenzaB__AGZ60066
augaaggcaauaauuguacuacucaugguaguaacauccaacgcagaucgaaucugcacugggauaacaucuucaaacucaccucauguggucaaaacagccacucaaggggaggucaaugugacuggugugauaccacugacaacaacuccaacaaaaucucauuuugcaaaucucaaaggaacaaggacuagagggaaacuaugcccagauugucucaacugcacagaucuggauguggccuugggcagaccaauguguguggggaccacaccuucggcaaaagcuucaauacuccacgaagucagaccuguuacauccgggugcuuuccuauaaugcacgacagaacaaaaaucaggcaacuacccaaucuucucagaggauaugaaaauaucagguuaucaacccaaaacguuaucgaugcagaaaaggcacuaggaggaccauacagacuuggaaccucaggaucuugcccuaacgcuaccagcaaaagcggauuuuucgcaacaauggccugggcugucccaaaggacaacaacaaaaaugcaacgaacccacuaacaguagaaguaccauacaucuguacagaaggggaagaccaaauuacuguuuggggguuccauucagauaacaaaacucaaaugaaaaaccucuauggagacucaaauccucagaaguucaccucaucugcuaauggaguaaccacacauuauguuucucagauuggcggcuuuccagaucaaacagaagacggaggacuaccacaaagcggcagaauuguuguugauuacauggugcaaaaaccugggaaaacaggaacaauugucuaucaaagagguguuuuguugccucaaaagguguggugcgcaaguggcaggagcaaaguaauaaaaggguccuugccuuuaauuggugaagcagauugccuucaugaaaaauacgguggguuaaacaaaagcaagccuuacuacacaggagaacaugcaaaagccauaggaaauugcccaauaugggugaaaacaccuuugaagcuugccaauggaaccaaauauagaccuccugcaaaacuacuaaaggaaagggguuucuucggagcuauugcugguuuccuagaaggaggaugggaaggaaugauugcagguuggcacggauacacaucccacggagcacauggaguggcaguggcggcagaccuuaagaguacgcaagaagcuauaaacaagauaacaaaaaaucucaauucuuugagugagcuagaaguaaagaaucuucaaagacuaaguggugccauggaugaacuucacaacgaaauacucgagcuggaugagaaaguggaugaucucagagcugacacuauaagcucgcaaauagaacuugcagucuugcuuuccaacgaaggaauaauaaacagugaagaugagcaucuauuggcacuugagagaaaacuaaagaaaaugcugggucccucugcuguagacauaggaaauggaugcuucgaaaccaaacacaagugcaaccagaccugcuuagacaggauagcugcuggcaccuuuaaugcaggagaauuuucucuccccacuuuugauucacugaacauuacugcugcaucuuuaaaugaugauggauuggauaaccauacuauauugcucuauuacucaacugcugcuucuaguuuggcuguaacauugaugcuagcuauuuuuauuguuuauauggucuccagagacaacguuucaugcuccaucugucuauaa

SEQ ID NO: 59838 - RNA, 1755 nt, Artificial Sequence
  derived and/or modified CDS sequence (wt) from hemagglutinin__InfluenzaB__AGZ60077
augaaggcaauaauuguacuacucaugguaguaacauccaaugcagaucgaaucugcacugggauaacaucuucaaacucaccucauguggucaaaacagcuacucaaggggaggucaaugugacuggugugauaccacugacaacaacaccaacaaaaucuuauuuugcaaaccucaaaggaacaaggaccagagggaaacuaugcccagacugucucaacuguacagaucuggauguggccuugggcagcccaauguguguggggaccacaccuucugcgaaagcuucaauacuccacgaagucagaccuguuacauccgggugcuuuccuauaaugcacgacagaacaaaaaucaggcaacuagccaaucuucucagaggauaugaaaauaucagguuaucaacccaaaacguuaucgaugcagaaaaggcaccaggaggacccuacagacuuggaaccucaggaucuugcccuaacgcuaccaguaaaagcggauuuuucgcaacaauggcuugggcugucccaaaggacaacaacaaaaaugcaacgaacccacuaacaguagaaguaccauacauuuguacagaaggggaagaccaaauuacuguuuggggguuccauucagauaacaaaacccaaaugaagaaccucuauggagacucaaauccucaaaaguucaccucaucugcuaauggaguaaccacacauuauguuucucagauuggcggcuucccagaucaaacagaagacggaggacuaccacaaagcggcagaauuguuguugauuacaugaugcaaaaaucugggaaaacaggaacaauugucuaucaaagagguguuuuguugccucaaaagguguggugcgcgaguggcaggagcaaaguaauaaaaggguccuugccuuuaauuggugaagcagauugccuucaugaaaaauacgguggauuaaacaaaagcaagccuuacuacacaggagaacaugcaaaagccauaggaaauugcccaauaugggugaaaacaccuuugaagcuugccaauggaaccaaauauagaccuccugcaaaacuauuaaaggaaagggguuucuucggagcuauugcugguuuccuagaaggaggaugggaaggaaugauugcagguuggcacggauacacaucucacggagcacauggaguggcaguggcggcagaccuuaagaguacacaagaggcuauaaacaagauaacaaaaaaucucaauucuuugagugagcuagaaguaaagaaucuucaaagacuaaguggugccauggaugaacuccacagcgaaauacucgagcuggaugagaaaguggaugaucucagagcugacacuauaagcucacaaauagaacuugcagucuugcuuuccaacgaaggaauaauaaacagugaagacgagcaucuauuggcacuugagagaaaacuaaagaaaaugcugggucccucugcuguagacauaggaaauggaugcuucgaaaccaaacacaaaugcaaccagaccugcuuagacaggauagcugcuggcaccuuuaaugcaggagaauuuucucuccccacuuuugauucauugaacauuacugcugcaucuuuaaaugaugauggauuggauaaccauacuauacugcucuauuacucaacugcugcuucuaguuuggcuguaacauugaugcuagcuauuuuuauuguuuauauggucuccagagacaacguuucaugcuccaucugucuauaa

SEQ ID NO: 59839 - RNA, 1755 nt, Artificial Sequence; identical to SEQ ID NO: 59056
  derived and/or modified CDS sequence (wt) from hemagglutinin__InfluenzaB__AGZ60088

SEQ ID NO: 59840 - RNA, 1755 nt, Artificial Sequence; identical to SEQ ID NO: 59054
  derived and/or modified CDS sequence (wt) from hemagglutinin__InfluenzaB__AGZ60099

SEQ ID NO: 59841 - RNA, 1755 nt, Artificial Sequence
  derived and/or modified CDS sequence (wt) from hemagglutinin__InfluenzaB__AGZ60131
augaaggcaauaauuguacuacucaugguaguaacauccaaugcagaucgaaucugcacuggaauaacaucuucaaacucaccucauguggucaaaacagccacucaaggggaggucaaugugacuggugugauaccacuaacaacaacaccaacaaaaucuuauuuugcaaaucucaaaggaacaaggaccagagggaaacuaugcccagacugucucaacugcacagaucuggauguggcuuugggcagaccaauguguguggggaccacaccuucggcgaaagcuucaauacuccacgaagucagaccuauuacauccgggugcuuuccuauaaugcacgacagaacaaaaaucaggcaacuacccaaucuucucagaggauaugaaaauaucaggcuaucaacccaaaacgucaucgaugcggaaaaggcaccaggaggacccuacagacuuggaaccucaggaucuugcccuaacgcuaccaguaagagcggauuuuucgcaacaauggcuugggcugucccaaaggacaacaacaaaaaugcaacgaacccacuaacaguagaaguaccauacauuuguacagaaggggaagaccaaaucacuguuuggggguuccauucagauaacaaaacccaaaugaagaaccucuauggagacucaaauccucaaaaguucaccucaucugcuaauggaguaaccacacacuauguuucucagauuggcagcuucccagaucaaacagaagacggaggacuaccacaaagcggcaggauuguuguugauuacaugaugcaaaaaccugggaaaacaggaacaauugucuaccaaagagguguuuuguugccucaaaaaguguggugcgcgaguggcaggagcaaaguaauaaaaggguccuugccuuuaauuggugaagcagauugccuucaugaaaaauacgguggauuaaacaaaagcaagccuuacuacacaggagaacaugcaaaagccauaggaaauugcccaauaugggugaaaacaccuuugaagcuugccaauggaaccaaauauagaccuccugcaaaacuauuaaaggaaagggguuucuucggagcuauugcugguuuccuagaaggaggaugggaaggaaugauugcaggcuggcacggauacacaucucacggagcacauggaguggcaguggcggcggaccuuaagaguacgcaagaagcuauaaacaagauaacaaaaaaucucaauucuuugagugagcuagaaguaaagaaucuucaaagacuaaguggugccauggaugaacuccacaacgaaauacucgagcuggaugagaaaguggaugaucucagagcugacacuauaagcucgcaaauagaacuugcagucuugcuuuccaacgaaggaauaauaaacagugaagaugaacaucuauuggcacuugagagaaaacuaaagaaaaugcugggucccucugcuguagagauaggaaauggaugcuucgaaaccaaacacaagugcaaccagaccugcuuagacaggauagcugcuggcaccuuuaaugcaggagaauuuucucuccccacuuuugauucacugaacauuacugcugcaucuuuaaaugaugauggauuggauaaccauacuauacugcucuauuacucaacugcugcuucuaguuuggcuguaacauugaugcuagcuauuuuuauuguuuauauggucuccagagacaacguuucaugcuccaucugucuauaa

SEQ ID NO: 59842 - RNA, 1755 nt, Artificial Sequence; identical to SEQ ID NO: 59056
  derived and/or modified CDS sequence (wt) from hemagglutinin__InfluenzaB__AGZ60142

SEQ ID NO: 59843 - RNA, 1755 nt, Artificial Sequence
  derived and/or modified CDS sequence (wt) from hemagglutinin__InfluenzaB__AGZ60160
augaaggcaauaauuguacuacucaugguaguaacauccaaugcagaucgaaucugcacugggauaacaucuucaaacucaccucauguggucaaaacagcuacucaaggggaagucaaugugacuggugugauaccacugacaacaacaccaacaaaaucuuauuuugcaaaucucaaaggaacaaagaccagagggaaacuaugcccagacugucucaacuguacagaucuggauguggccuugggcaggccaaugugugugggaaccacaccuucugcgaaagcuucaauacuccacgaagucagaccuguuacauccgggugcuuuccuauaaugcacgacagaacaaagaucaggcaacuagccaaucuucucagaggauaugaaaauaucagguuaucaacccaaaacguuaucgaugcagaaaaggcaccaggaggacccuacagacuuggaaccucaggaucuugcccuaacgcuaccaguaaaagcggauuuuuugcaacaauggcuugggcugucccaaaggacaacaacaaaaaugcaacgaacccacuaacaguagaaguaccauacauuuguacagaaggggaagaccaaauuacuguuuggggguuccauucagauaacaaaacccaaaugaagaaccucuauggagacucaaauccucaaaaguucaccucaucugcuaauggaguaaccacacauuauguuucucagauuggcggcuucccagaucaaacagaagacggaggacuaccacaaagcggcagaauugucguugauuacaugaugcaaaaaccugggaaaacaggaacaauugucuaucaaagagguguuuuguugccucaaaagguguggugcgcgaguggcaggagcaaaguaauaaaaggguccuugccuuuaauuggugaagcagauugccuucaugaaaaauacgguggauuaaacaaaagcaagcccuacuacacaggagaacaugcaaaagccauaggaaauugcccaauaugggugaaaacaccuuugaagcuugccaauggaaccaaauauagaccuccugcaaaacuauuaaaggaaagggguuucuucggagcuauugcugguuuccuagaaggaggaugggaaggaaugauugcagguuggcacggguacacaucucacggagcacauggaguggcaguugcggcagaccuuaagaguacacaagaagcuauaaacaagauaacaaaaaaucucaacucuuugagugagcuagaaguaaagaaucuucaaagacuaaguggugccauggaugaacuccacaacgaaauacucgagcuggaugagaaaguggaugaucucagagcugacacuauaagcucacaaauagaacuugcagucuugcuuuccaacgaaggaauaauaaacagugaagacgagcaucuauuggcacuugagagaaaacuaaagaaaaugcugggucccucugcuguagacauaggaaauggaugcuucgaaaccaaacacaaaugcaaccagaccugcuuagacaggauagcugcuggcaccuuuaaugcaggagaguuuucccuccccacuuuugauucauugaacauuacugcugcaucuuuaaaugaugauggauuggauaaccauacuauacugcucuauuacucaacugcugcuucuaguuuggcuguaacauugaugcuagcuauuuuuauuguuuauauggucuccagagacaacguuucaugcuccaucugucuauaa

SEQ ID NO: 59844 - RNA, 1755 nt, Artificial Sequence
  derived and/or modified CDS sequence (wt) from hemagglutinin__InfluenzaB__AGZ60172
augaaggcaauaauuguacuacucaugguaguaacauccaaugcagaucgaaucugcacugggauaacaucuucaaacucaccucauguggucaaaacagcuacucaaggggaggucaaugugacuggcgugauaccacugacaacaacaccaacaaaaucuuauuuugcaaaucucaaaggaacaaggaccagagggaaacuaugcccggacugucucaacuguacagaucuggauguggccuugggcaggccaauguguguggggaccacaccuucugcuaaagcuucaauacuccacgaagucagaccuguuacauccgggugcuuuccuauaaugcacgacagaacaaaaaucaggcaacuacccaaucuucucagaggauaugaaaauaucagguuaucaacccaaaacguuaucgaugcagaaaaagcaccaggaggacccuacagacuuggaaccucaggaucuugcccuaacgcuaccaguaaaaucggauuuuucgcaacaauggcuugggcugucccaaaggacaacuacaaaaaugcaacgaacccacuaacaguagaaguaccauacauuuguacagaaggggaagaccaaauuacuguuuggggguuccauucagauaacaaaacccaaaugaagaaccucuauggagacucaaauccucaaaaguucaccucaucugcuaaugggguaaccacacauuauguuucucagauuggcgacuucccagaucaaacagaagacggaggacuaccacaaagcggcagaauuguuguugauuacaugaugcaaaaaccugggaaaacaggaacaauugucuaucaaagagguguuuuguugccucaaaagguguggugcgcgaguggcaggagcaaaguaauaaaagggucauugccuuuaauuggugaagcagauugccuucaugaaaaauacgguggauuaaacaaaagcaagccuuacuacacaggagaacaugcaaaagccauaggaaauugcccaauauggguaaaaacaccuuugaagcuugccaauggaaccaaauauagaccuccugcaaaacuauuaaaggaaagggguuucuucggagcuauugcugguuuccuagaaggaggaugggaaggaaugauugcagguuggcacggauacacaucucacggagcacauggaguggcaguggcggcagaccuuaagaguacacaagaagcuauaaauaagauaacaaaaaaucucaauucuuugagugagcuagaaguaaagaaccuucaaagacuaaguggugccauggaugaacuccacaacgaaauacucgagcuggaugagaaaguggaugaucucagagcugacacuauaagcucacaaauagaacuugcagucuugcuuuccaacgaaggaauaauaaacagugaagacgagcaucuauuggcacuugagagaaaacuaaagaaaaugcugggucccucugcuguagacauaggaaauggaugcuucgaaaccaaacacaaaugcaaccagaccugcuuagacaggauagcugcuggcaccuuuaaugcaggagaauuuucucuccccacuuuugauucauugaacauuacugcugcaucuuuaaaugaugauggauuggauaaccauacuauacugcucuauuacucaacugcugcuucuaguuuggcuguaacauuaaugcuagcuauuuuuauuguuuauauggucuccagagacaacguuucaugcuccaucugucuauaa

SEQ ID NO: 59845 - RNA, 1755 nt, Artificial Sequence
  derived and/or modified CDS sequence (wt) from hemagglutinin__InfluenzaB__AGZ60183
augaaggcaauaauuguacuacucaugguaguaacauccaaugcagaucgaaucugcacugggauaacaucuucaaacucaccucauguggucaaaacagcuacucaaggggaggucaaugugacuggcgugauaccacugacaacaacaccaacaaaaucuuauuuugcaaaccucaaaggaacaaggaccagagggaaacuaugcccggacugucucaacuguacagaucuggauguggccuugggcaggccaauguguguggggaccacaccuucugcuaaagcuucaauacuccacgaagucagaccuguuacauccgggugcuuuccuauaaugcacgacagaacaaaaaucaggcaacuacccaaucuucucagaggauaugaaaauaucagguuaucaacccagaacguuaucgaugcagaaaaagcaccaggaggacccuacagacuuggaaccucaggaucuugcccuaaugcuaccaguaaaaucggauuuuucgcaacaauggcuugggcugucccaaaggacaacuacaaaaaugcaacgaacccacuaacaguagaaguaccauacauuuguacagaaggggaagaccaaauuacuguuuggggguuccauucagauaacaaaacccaaaugaagaaccucuauggagacucaaauccucaaaaguucaccucaucugcuaauggaguaaccacacauuauguuucucagauuggcgacuucccagaucaaacagaagacggaggacuaccacaaagcggcagaauuguuguugauuacaugaugcaaaaaccugggaaaacaggaacaauugucuaucaaagagguguuuuguugccucaaaagguguggugcgcgaguggcaggagcaaagugauaaaagggucauugccuuuaauuggugaagcagauugccuucaugaaaaauacgguggauuaaacaaaagcaagccuuacuacacaggagaacaugcaaaagccauaggaaauugcccaauauggguaaaaacaccuuugaagcuugccaauggaaccaaauauagaccuccugcaaaacuauuaaaggaaagggguuucuucggagcuauugcugguuuccuagaaggaggaugggaaggaaugauugcagguuggcacggauacacaucucacggagcacauggaguggcaguggcggcagaccuuaagaguacacaagaagcuauaaauaagauaacaaaaaaucucaauucuuugagugagcuagaaguaaagaaccuucaaagacuaaguggugccauggaugaacuccacaacgaaauacucgagcuggaugagaaaguggaugaucucagagcugacacuauaagcucacaaauagaacuugcagucuugcuuuccaacgaaggaauaauaaacagugaagacgagcaucuauuggcacuugagagaaaacuaaagaaaaugcugggccccucugcuguagacauaggaaauggaugcuucgaaaccaaacacaaaugcaaccagaccugcuuagacaggauagcugcuggcaccuuuaaugcaggagaauuuucucuccccacuuuugauucauugaacauuacugcugcaucuuuaaaugaugauggauuggauaaccauacuauacugcucuauuacucaacugcugcuucuaguuuggcuguaacauuaaugcuagcuauuuuuauuguuuauauggucuccagagacaacguuucaugcuccaucugucuauaa

SEQ ID NO: 59846 - RNA, 1755 nt, Artificial Sequence
  derived and/or modified CDS sequence (wt) from hemagglutinin__InfluenzaB__AGZ60194
augaaggcaauaauuguacuacucaugguaguaacauccaaugcagaucgaaucugcacugggauaacaucuucaaacucaccucauguggucaaaacagcuacucaaggggaggucaaugugacuggcgugauaccacugacaacaacaccaacaaaaucuuauuuugcaaaucucaaaggaacaaggaccagagggaaacuaugcccggacugucucaacuguacagaucuggauguggccuugggcaggccaauguguguggggaccacaccuucugcuaaagcuucaauacuccacgaagucagaccuguuacauccgggugcuuuccuauaaugcacgacagaacaaaaaucaggcaacuacccaaucuucucagaggauaugaaaauaucagguuaucaacccagaacguuaucgaugcagaaaaagcaccaggaggacccuacagacuuggaaccucaggaucuugcccuaaugcuaccaguaaaaucggauuuuucgcaacaauggcuugggcugucccaaaggacaacuacaaaaaugcaacgaacccacuaacaguagaaguaccauacauuuguacagaaggggaagaccaaauuacuguuuggggguuccauucagauaacaaaacccaaaugaagaaccucuauggagacucaaauccucaaaaguucaccucaucugcuaauggaguaaccacacauuauguuucucaaauuggcgacuucccagaucaaacagaagacggaggacuaccacaaagcggcagaauuguuguugauuacaugaugcaaaaaacugggaaaacaggaacaauugucuaucaaagagguguuuuguugccucaaaagguguggugcgcgaguggcaggagcaaaguaauaaaagggucauugccuuuaauuggugaagcagauugccuucaugaaaaauacgguggauuaaacaaaagcaagccuuacuacacaggagaacaugcaaaagccauaggaaauugcccaauauggguaaaaacaccuuugaagcuugccaauggaaccaaauauagaccuccugcaaaacuauuaaaggaaagggguuucuucggagcuauugcugguuuccuagaaggaggaugggaaggaaugauugcagguuggcacggauacacaucucacggagcacauggaguggcaguggcggcagaccuuaagaguacacaagaagcuauaaauaagauaacaaaaaaucucaauucuuugagugagcuagaaguaaagaaccuucaaagacuaaguggugccauggaugaacuccacaacgaaauacucgagcuggaugagaaaguggaugaucucagagcugacacuauaagcucacaaauagaacuugcagucuugcuuuccaacgaaggaauaauaaacagugaagacgagcaucuauuggcacuugagagaaaacuaaagaaaaugcugggccccucugcuguagacauaggaaauggaugcuucgaaaccaaacacaaaugcaaccagaccugcuuagacaggauagcugcuggcaccuuuaaugcaggagaauuuucucuccccacuuuugauucauugaacauuacugcugcaucuuuaaaugaugauggauuggauaaccauacuauacugcucuauuacucaacugcugcuucuaguuuggcuguaacauuaaugcuagcuauuuuuauuguuuauauggucuccagagacaacguuucaugcuccaucugucuauaa

SEQ ID NO: 59847 - RNA, 1755 nt, Artificial Sequence
  derived and/or modified CDS sequence (wt) from hemagglutinin__InfluenzaB__AGZ60206
augaaggcaauaauuguacuacucaugguaguaacauccaaugcagaucgaaucugcacugggauaacaucuucaaacucaccucauguggucaaaacagcuacucaaggggaggucaaugugacuggcgugauaccacugacaacaacaccaauaaaaucuuauuuugcaaaccucaaaggaacaaggaccagagggaaacuaugcccggauugucucaacuguacagaucuggauguggccuugggcaggccaauguguguggggaccacaccuucugcuaaagcuucaauacuccacgaagucagaccuguuacauccgggugcuuuccuauaaugcacgacagaacaaaaaucaggcaacuacccaaucuucucagaggauaugaaaauaucagguuaucaacccagaacguuaucgaugcagaaaaagcaccaggaggacccuacagacuuggaaccucaggaucuugcccuaaugcuaccaguaaaaucggauuuuucgcaacaauggcuugggcugucccaaaggacaacuacaaaaaugcaacgaacccacuaacaguagaaguaccauacauuuguacagaaggggaagaccaaauuacuguuuggggguuccauucagauaacaaaacccaaaugaagaaccucuauggagacucaaauccucaaaaguucaccucaucugcuaauggaguaaccacacauuauguuucucagauuggcgacuucccagaucaaacagaagacggaggacuaccacaaagcggcagaauuguuguugauuacaugaugcaaaaacccgggaaaacaggaacaauugucuaucaaagagguguuuuguugccucaaaagguguggugcgcgaguggcaggagcaaaguaauaaaagggucauugccuuuaauuggugaagcagauugccuucaugaaaaauacgguggauuaaacaaaagcaagccuuacuacacaggagaacaugcaaaagccauaggaaauugcccaauauggguaaaaacaccuuugaagcuugccaauggaaccaaauauagaccuccugcaaaacuauuaaaggaaagggguuucuucggagcuauugcugguuuccuagaaggaggaugggaaggaaugauugcagguuggcacggauacacaucucacggagcacauggaguggcaguggcggcagaccuuaagaguacacaagaagcuauaaauaagauaacaaaaaaucucaauucuuugagugagcuagaaguaaagaaccuucaaagacuaaguggugccauggaugaacuccacaacgaaauacucgagcuggaugagaaaguggaugaucucagagcugacacuauaagcucacaaauagaacuugcagucuugcuuuccaacgaaggaauaauaaacagugaagacgagcaucuauuggcacuugagagaaaacuaaagaaaaugcugggccccucugcuguagacauaggaaauggaugcuucgaaaccaaacacaaaugcaaccagaccugcuuagacaggauagcugcuggcaccuuuaaugcaggagaauuuucucuccccacuuuugauucauugaacauuacugcugcaucuuuaaaugaugauggauuggauaaccauacuauacugcucuauuacucaacugcugcuucuaguuuggcuguaacauuaaugcuagcuauuuuuauuguuuauauggucuccagagacaacguuucaugcuccaucugucuauaa

SEQ ID NO: 59848 - RNA, 1755 nt, Artificial Sequence; identical to SEQ ID NO: 59777
  derived and/or modified CDS sequence (wt) from hemagglutinin__InfluenzaB__AGZ60217

SEQ ID NO: 59849 - RNA, 1755 nt, Artificial Sequence
  derived and/or modified CDS sequence (wt) from hemagglutinin__InfluenzaB__AGZ60268
augaaggcaauaauuguacuacucaugguaguaacauccaaugcagaucgaaucugcacugggauaacaucuucaaacucaccucauguggucaaaacagcuacucaaggggaggucaaugugacuggugugauaccacugacaacaacaccaacaaaaucuuauuuugcaaaucucaaagggacaaggaccagagggaaacuaugcccagacugucucaacuguacagaucuggauguggccuugggcaggccaauguguguggggaccacaccuucugcgaaagcuucaauacuccacgaagucagaccuguuacauccgggugcuuuccuauaaugcacgacagaacaaaaaucaggcaacuagccaaucuucucagaggauaugaaaauaucagguuaucaacccaaaacguuaucgaugcagaaaaagcaccaggaggacccuacagacuuggaaccucaggaucuugcccuaacgcuaccaguaaaagcggauuuuucgcaacaauggcuugggcugucccaaaggacaacaacaaaaaugcaacgaacccacuaacaguagaaguaccauacauuuguacagaaggggaagaccaaauuacuguuuggggguuccauucagauaacaaaacccaaaugaagaaccucuauggagacucaaauccucaaaaguucaccucaucugcuaauggaguaaccacacauuauguuucucagaucggcggcuucccagaucaaacagaagacggaggacuaccacaaagcggcagaauugucguugauuacaugaugcaaaaaccugggaaaacaggaacaauugucuaucaaagagguguuuuguugccucaaaagguguggugcgcgaguggcaggagcaaaguaauaaaaggguccuugccuuuaauuggugaagcagauugccuucaugaaaaauacgguggauuaaacaaaagcaagccuuacuacacaggagaacaugcaaaagccauaggaaauugcccaauaugggugaaaacaccuuugaagcuugccaauggaaccaaauauagaccuccugcaaaacuacuaaaggaaagggguuucuucggagcuauugcugguuuccuagaaggaggaugggaaggaaugauugcagguuggcacggauacacaucucacggagcacauggaguggcaguggcggcagaccuuaagaguacacaagaagcuauaaacaagauaacaaaaaaucucaacucuuugagugagcuagaaguaaagaaccuucaaagacuaaguggugccauggaugaacuccacaacgaaauacucgagcuggaugagaaaguggaugaucucagagcugacacuauaagcucacaaauagaacuugcagucuugcuuuccaacgaaggaauaauaaacagugaagaugagcaucuauuggcacuugagagaaaacuaaagaaaaugcugggucccucugcuauagacauaggaaauggaugcuucgaaaccaaacacaaaugcaaccagaccugcuuagacaggauagcugcuggcaccuuuaaugcaggagaauuuucucuccccacuuuugauucauugaacauuacugcugcaucuuuaaaugaugauggauuggauaaccauacuauacugcucuauuacucaacugcugcuucuaguuuggcuguaacauugaugcuagcuauuuuuauuguuuauauggucuccagagacaacguuucaugcuccaucugccuauaa

SEQ ID NO: 59850 - RNA, 1755 nt, Artificial Sequence; identical to SEQ ID NO: 58952
  derived and/or modified CDS sequence (wt) from hemagglutinin__InfluenzaB__AHE37993

SEQ ID NO: 59851 - RNA, 1755 nt, Artificial Sequence; identical to SEQ ID NO: 58943
  derived and/or modified CDS sequence (wt) from hemagglutinin__InfluenzaB__AHE37994

SEQ ID NO: 59852 - RNA, 1755 nt, Artificial Sequence
  derived and/or modified CDS sequence (wt) from hemagglutinin__InfluenzaB__AHE37995
augaaggcaauaauuguacuacucaugguaguaacauccaaugcagaucgaaucugcacugggauaacaucuucaaacucaccucauguggucaaaacagcuacucaaggggaggucaaugugacuggugugauaccacuaacaacaacaccaacaaaaucuuauuuugcaaaucucaaaggaacaaagaccagagggaaacuaugcccagacugucucaacuguacagaucuggauguggccuugggcaggccaaugugugugggaacuacaccuucugcgaaagcuucaauacuucacgaagucagaccuguuacauccgggugcuucccuauaaugcacgacagaacaaaaaucaggcaacuagccaaucuucucagaggauaugaaaauaucagguuaucaacccaaaacguuaucgaugcagaaaaagcaccaggaggacccuacagacuuggaaccucaggaucuugcccuaacgcuaccaguaaaagcggauuuuucgcaacaauggcuugggcugucccaaaggacaacaacaaaaaugcaacgaacccauuaacaguagaaguaccauacauuugugcagaaggagaagaccaaauuacuguuuggggguuccauucagauaacaaaacccaaaugaagaaccucuauggagacucaaauccucaaaaguucaccucaucugcuaauggaguaaccacacauuauguuucucagauuggcggcuucccagaucaaacagaagacggaggacuaccacaaagcggcagaauugucguugauuacaugaugcaaaaaccugggaaaacaggaacaauugucuaucaaagagguguuuuauugccucaaaagguguggugcgcgaguggcaggagcaaaguaauaaaaggguccuugccuuuaauuggugaagcagauugccuucaugaaaaauacgguggauuaaacaaaagcaagccuuacuacacaggagaacaugcaaaagccauaggaaauugcccaauaugggugaaaacaccuuugaagcuugccaauggaaccaaauauagaccuccugcaaaacuauuaaaggaaagggguuucuucggagcuauugcugguuuccuagaaggaggaugggaaggaaugauugcagguuggcacggauacacaucucacggagcacauggaguggcaguugcugcagaccuuaagagcacacaagaagcuauaaacaagauaacaaaaaaucucaacucuuugagugagcuagaaguaaagaaucuucaaaggcuaaguggugccauggaugaacuccacaacgaaauacucgagcuggaugagaaaguggaugaucucagagcugacacuauaaguucacaaauagaacuugcagucuugcuuuccaacgaaggaauaauaaacagugaagaugagcaucuauuggcacuugagagaaaacuaaagaaaaugcugggucccucugcuguagacauaggaaauggaugcuucgaaaccaaacacaaaugcaaccagaccugcuuagacaggauagcugcuggcaccuuuaaugcaggagaauuuucucuccccacuuuugauucauugaacauuacugcugcaucuuuaaaugaugauggauuggauaaccauacuauacugcucuauuacucaacugcugcuucuaguuuggcaguaacauugaugcuagcuauuuuuauuguuuauauggucuccagagacaacguuucaugcuccaucugucuauaa

SEQ ID NO: 59853 - RNA, 1755 nt, Artificial Sequence; identical to SEQ ID NO: 58867
  derived and/or modified CDS sequence (wt) from hemagglutinin__InfluenzaB__AHE37996

SEQ ID NO: 59854 - RNA, 1755 nt, Artificial Sequence; identical to SEQ ID NO: 58930
  derived and/or modified CDS sequence (wt) from hemagglutinin__InfluenzaB__AHE37997

SEQ ID NO: 59855 - RNA, 1755 nt, Artificial Sequence
  derived and/or modified CDS sequence (wt) from hemagglutinin__InfluenzaB__AHE37998
augaaggcaauaauuguacuacucaugguaguaacauccaaugcagaucgaaucugcacugggauaacaucuucaaacucaccucauguggucaaaacagcuacucaaggggaggucaaugugacuggugugauaccacuaacaacaacaccaacaaaaucuuauuuugcaaaucucaaaggaacaaagaccagagggaaacuaugcccagacugucucaacuguacagaucuggauguggccuugggcaggccaaugugugugggaacuacaccuucugcgaaagcuucaauacuucacgaagucagaccuguuacauccgggugcuucccuauaaugcacgacagaacaaaaaucaggcaacuagccaaucuucucagaggauaugaaaauaucagguuaucaacccaaaacguuaucgaugcagaaaaagcaccaggaggacccuacagacuuggaaccucaggaucuugcccuaacgcuaccaguaaaagcggauuuuucgcaacaauggcuugggcugucccaaaggacaacaacaaaaaugcaacgaacccauuaacaguagaaguaccauacauuugugcagaaggagaagaccaaauugcuguuuggggguuccauucagauaacaaaacccaaaugaagaaccucuauggagacucaaauccucaaaaguucaccucaucugcuaauggaguaaccacacauuauguuucucagauuggcggcuucccagaucaaacagaagacggaggacuaccacaaagcggcagaauugucguugauuacaugaugcaaaaaccugggaaaacaggaacaauugucuaucaaagagguguuuuguugccucaaaagguguggugcgcgaguggcaggagcaaaguaauaaaaggguccuugccuuuaauuggugaagcagauugucuucaugaaaaauacgguggauuaaacaaaagcaagccuuacuacacaggagaacaugcaaaagccauaggaaauugcccaauaugggugaaaacaccuuugaagcuugccaauggaaccaaauauagaccuccugcaaaacuauuaaaggaaagggguuucuucggagcuauugcugguuuccuagaaggaggaugggaaggaaugauugcagguuggcacggauacacaucucacggagcacauggaguggcaguugcugcagaccuuaagagcacacaagaagcuauaaacaagauaacaaaaaaucucaacucuuugagugagcuagaaguaaagaaucuucaaaggcuaaguggugccauggaugaacuccacaacgaaauacucgagcuggaugagaaaguggaugaucucagagcugacacuauaagcucacaaauagaacuugcagucuugcuuuccaacgaaggaauaauaaacagugaagaugagcaucuauuggcacuugagagaaaacuaaagaaaaugcugggucccucugcuguagacauaggaaauggaugcuucgaaaccaaacacaaaugcaaccagaccugcuuagacaggauagcugcuggcaccuuuaaugcaggagaauuuucucuccccacuuuugauucauugaacauuacugcugcaucuuuaaaugaugauggauuggauaaccauacuauacugcucuauuacucaacugcugcuucuaguuuggcuguaacauugaugcuagcuauuuuuauuguuuauauggucuccagagacaacguuucaugcuccaucugucuauga

SEQ ID NO: 59856 - RNA, 1755 nt, Artificial Sequence; identical to SEQ ID NO: 58933
  derived and/or modified CDS sequence (wt) from hemagglutinin__InfluenzaB__AHE37999

SEQ ID NO: 59857 - RNA, 1755 nt, Artificial Sequence
  derived and/or modified CDS sequence (wt) from hemagglutinin__InfluenzaB__AHE38000
augaaggcaauaauuguacuacucaugguaguaacauccaaugcagaccgaaucugcacugggauaacaucuucaaacucaccucauguggucaaaacagcuacucaaggggaggucaaugugacuggugugauaccacuaacaacaacaccaacaaaaucuuauuuugcaaaucucaaaggaacaaagaccagagggaaacuaugcccagacugucucaacuguacagaucuggauguggccuugggcaggccaaugugugugggaacuacaccuucugcgaaagcuucaauacuucacgaagucagaccuguuacauccgggugcuucccuauaaugcacgacagaacaaaaaucaggcaacuagccaaucuucucagaggauaugaaaauaucagguuaucaacccaaaacguuauugaugcagaaaaagcaccaggaggacccuacagacuuggaaccucaggaucuugcccuaacgcuaccaguaaaagcggauuuuucgcaacaauggcuugggcugucccaaaggacaacaacaaaaaugcaacgaacccauuaacaguagaaguaccauacauuugugcagaaggagaagaccaaauuacuguuuggggguuccauucagauaacaaaacccaaaugaagaaccucuauggagacucaaauccucaaaaguucaccucaucugcuaauggaguaaccacacauuauguuucucagauuggcggcuucccagaucaaacagaagacggaggacuaccacaaagcggcagaauugucguugauuacaugaugcaaaaaccugguaaaacaggaacaauugucuaucaaagagguguuuuguugccucaaaagguguggugcgcgaguggcaggagcaaaguaauaaaaggguccuugccuuuaauuggugaagcagauugccuucaugaaaaauacgguggauuaaacaaaagcaagccuuacuacacaggagaacaugcaaaagccauaggaaauugcccaauaugggugaaaacaccuuugaagcuugccaauggaaccaaauauagaccuccugcaaaacuauuaaaggaaagggguuucuucggagcuauugcugguuuccuagaaggaggaugggaaggaaugauugcagguuggcacggauacacaucucacggagcacauggaguggcaguugcugcagaccuuaagagcacacaagaagcuauaaacaagauaacaaaaaaucucaacucguugagugagcuagaaguaaagaaucuucaaaggcuaaguggugccauggaugaacuccacaacgaaauacucgagcuggaugagaaaguggaugaucucagagcugacacuauaaguucacaaauagaacuugcagucuugcuuuccaacgaaggaauaauaaacagugaagaugagcaucuauuggcacuugagagaaaacuaaagaaaaugcugggucccucugcuguagacauaggaaauggaugcuucgaaaccaaacacaaaugcaaccagaccugcuuagacaggauagcugcuggcaccuuuaaugcaggagaauuuucucuccccacuuuugauucauugaacauuacugcugcaucuuuaaaugaugauggauuggauaaccauacuauacugcucuauuacucaacugcugcuucuaguuuggcuguaacauugaugcuagcuauuuuuauuguuuauauggucuccagagacaacguuucaugcuccaucugccuauaa

SEQ ID NO: 59858 - RNA, 1755 nt, Artificial Sequence; identical to SEQ ID NO: 58868
  derived and/or modified CDS sequence (wt) from hemagglutinin__InfluenzaB__AHE38001

SEQ ID NO: 59859 - RNA, 1755 nt, Artificial Sequence
  derived and/or modified CDS sequence (wt) from hemagglutinin__InfluenzaB__AHE38002
augaaggcaauaauuguacuacucaugguaguaacauccaaugcagaucgaaucugcacugggauaacaucuucaaacucaccucauguggucaaaacagcuacucaaggggaggucaaugugacuggugugauaccacuaacaacaacaccaacaaaaucuuauuuugcaaaucucaaaggaacaaagaccagagggaaacuaugcccagacugucucaacuguacagaucuggauguggccuugggcaggccaaugugugugggaacuacaccuucugcgaaagcuucaauacuucacgaagucagaccuguuacauccgggugcuucccuauaaugcacgacagaacaaaaaucaggcaacuagccaaucuucucagaggauaugaaaauaucagguuaucaacccaaaacguuaucgaugcaaaaaaagcaccaggaggacccuacagacuuggaaccucaggaucuugcccuaacgcuaccaguaaaagcggauuuuucgcaacaauggcuugggcugucccaaaggacaacaacaaaaaugcaacgaacccauuaacaguagaaguaccauacauuugugcagaaggagaagaccaaauuacuguuuggggguuccauucagauaacaaaacccaaaugaagaaccucuauggagacucaaauccucaaaaguucaccucaucugcuaauggaguaaccacacauuauguuucucagauuggcggcuucccagaucaaacagaagacggaggacuaccacaaagcggcagaauugucguugauuacaugaugcaaaaaccugggaaaacaggaacaauugucuaucaaagagguguuuuguugccucaaaagguguggugcgcgaguggcaggagcaaaguaauaaaaggguccuugccuuuaauuggugaagcagauugccuucaugaaaaauacgguggauuaaacaaaagcaagccuuacuacaccggagaacaugcaaaagccauaggaaauugcccaauaugggugaaaacaccuuugaagcuugccaauggaaccaaauauagaccuccugcaaaacuauuaaaggaaagggguuucuucggagcuauugcugguuuccuagaaggaggaugggaaggaaugauugcagguuggcacggauacacaucucacggagcacauggaguggcaguugcugcagaccuuaagagcacacaagaagcuauaaacaagauaacaaaaaaucucaacucuuugagugagcuagaaguaaagaaucuucaaaggcuaaguggugccauggaugaacuccacaacgaaauacucgagcuggaugagaaaguggaugaucucagagcugacacuauaaguucacaaauagaacuugcagucuugcuuuccaacgaaggaauaauaaacagugaagaugagcaucuauuggcacuugagagaaaacuaaagaaaaugcugggucccucugcuguagacauaggaaauggaugcuucgaaaccaaacacaaaugcaaccagaccugcuuagacaggauagcugcuggcaccuuuaaugcaggagaauuuucucuccccacuuuugauucauugaacauuacugcugcaucuuuaaaugaugauggauuggauaaccauacuauacugcucuauuacucaacugcugcuucuaguuuggcuguaacauugaugcuagcuauuuuuauuguuuauauggucuccagagacaacguuucaugcuccaucugucuauaa

SEQ ID NO: 59860 - RNA, 1755 nt, Artificial Sequence; identical to SEQ ID NO: 58983
  derived and/or modified CDS sequence (wt) from hemagglutinin__InfluenzaB__AHE38003

SEQ ID NO: 59861 - RNA, 1755 nt, Artificial Sequence; identical to SEQ ID NO: 58983
  derived and/or modified CDS sequence (wt) from hemagglutinin__InfluenzaB__AHE38004

SEQ ID NO: 59862 - RNA, 1755 nt, Artificial Sequence
  derived and/or modified CDS sequence (wt) from hemagglutinin__InfluenzaB__AHE38005
augaaggcaauaauuguacuacucaugguaguaacauccaaugcagaucgaaucugcacugggauaacaucuucaaacucaccucauguggucaaaacagcuacucaaggggaggucaaugugacuggugugauaccacuaacaacaacaccgacaaaaucuuauuuugcaaaucucaaaggaacaaagaccagagggaaacuaugcccagacugucucaacuguacagaucuggauguggccuugggcaggccaaugugugugggaacuacaccuucugcgaaagcuucaauacuucacgaagucagaccuguuacauccgggugcuucccuauaaugcacgacagaacaaaaaucaggcaacuagccaaucuucucagaggauaugaaaauauaagguuaucaacccaaaacguuaucgaugcagaaaaagcaccaggaggacccuacagacuuggaaccucaggaucuugcccuaacgcuaccaguaaaagcggauuuuucgcaacaauggcuugggcugucccaaaggacaacaacaaaaaugcaacgaacccauuaacaguagaaguaccauacauuugugcagaaggagaagaccaaauuacuguuuggggguuccauucagauaacaaaacccaaaugaagaaccucuauggagacucaaauccucaaaaguucaccucaucugcuaauggaguaaccacacauuauguuucucagauuggcggcuucccagaucaaacagaagacggaggacuaccacaaagcggcagaauugucguugauuacaugaugcaaaaaccugggaaaacaggaacaauugucuaucaaagagguguuuuguugccucaaaagguguggugcgcgaguggcaggagcaaaguaauaaaaggguccuugccuuuaauuggugaagcagauugccuucaugaaaaauacgguggauuaaacaaaagcaagccuuacuacacaggagaacaugcaaaagccauaggaaauugcccaauaugggugaaaacaccuuugaagcuugccaauggaaccaaauauagaccuccugcaaagcuauuaaaggaaagggguuucuucggagcuauugcugguuuccuagaaggaggaugggaaggaaugauugcagguuggcacggauacacaucucacggagcacauggaguggcaguugcugcagaccuuaagagcacacaagaagcuauaaacaagauaacaaaaaaucucaacucuuugagugagcuagaaguaaagaaucuucaaaggcuaaguggugccauggaugaacuccacaacgaaauacucgagcuggaugagaaaguggaugaucucagagcugacacuauaaguucacaaauagaacuugcagucuugcuuuccaacgaaggaauaauaaacagugaagaugagcaucuauuggcacuugagagaaaacuaaagaaaaugcugggucccucugcuguagacauaggaaauggaugcuucgaaaccaaacacaaaugcaaccagaccugcuuagacaggauagcugcuggcaccuuuaaugcaggagaauuuucucuccccacuuuugauucauugaacauuacugcugcaucuuuaaaugaugauggauuggauaaccauacuauacugcucuauuacucaacugcugcuucuaguuuggcuguaacauugaugcuagcuauuuuuauuguuuauauggucuccagagacaacguuucaugcuccaucugucuauaa

SEQ ID NO: 59863 - RNA, 1755 nt, Artificial Sequence
  derived and/or modified CDS sequence (wt) from hemagglutinin__InfluenzaB__AHE38006
augaaggcaauaauuguacuacucaugguaguaacauccaaugcagaucgaaucugcacugggauaacaucuucaaacucaccucauguggucaaaacagcuacucaaggggaggucaaugugacuggugugauaccacuaacaacaacaccaacaaaaucuuauuuugcaaaucucaaaggaacaaagaccagagggaaacuaugcccagacugucucaacuguacagaucuggauguggccuugggcaggccaaugugugugggagcuacaccuucugcgaaagcuucaauacuucacgaagucagaccuguuacauccgggugcuucccuauaaugcacgacagaacaaaaaucaggcaacuagccaaucuucucaggggauaugaaaauaucagguuaucaacccaaaacguuaucgaugcagaaaaagcaccaggaggacccuacagacuuggaaccucaggaucuugcccuaacgcuaccaguaaaagcggauuuuucgcaacaauggcuugggcugucccaaaggacaacaacaaaaaugcaacgaacccauuaacaguagaaguaccauacauuugugcagaaggagaagaccaaauuacuguuuggggguuccauucagauaacaaaacccaaaugaagaaccucuauggagacucaaauccucaaaaguucaccucaucugcuaauggaguaaccacacauuauguuucucagauuggcggcuucccagaucaaacagaagacggaggacuaccacaaagcggcagaauugucguugauuacaugaugcaaaaaccugggaaaacaggaacaauugucuaucaaagagguguuuuguugccucaaaagguguggugcgcgaguggcaggagcaaaguaauaaaaggguccuugccuuuaauuggugaagcagauugccuccaugaaaaauacgguggauuaaacaaaagcaagccuuacuacacaggagaacaugcaaaagccauaggaaauugcccaauaugggugaaaacaccuuuaaagcuugccaauggaaccaaauauagaccuccugcaaaacuauuaaaggaaagggguuucuucggagcuauugcugguuuccuagaagggggaugggaaggaaugauugcagguuggcacggauacacaucucacggagcacauggaguggcaguugcugcagaccuuaagagcacacaagaagcuauaaacaagauaacaaaaaaucucaacucuuugagugagcuagaaguaaagaaucuucaaaggcuaaguggugccguggaugaacuccacaacgaaauacucgagcuggaugagaaaguggaugaucucagagcugacacuauaaguucacaaauagaacuugcagucuugcuuuccaacgaaggaauaauaaacagugaagaugagcaucuauuggcacuugagagaaaacuaaagaaaaugcugggucccucugcuguagacauaggaaauggaugcuucgaaaccaaacacaaaugcaaccagaccugcuuggacaggauagcugcuggcaccuuuaaugcaggagaauuuucucuccccacuuuugauucauugaacauuacugcugcaucuuuaaaugaugauggauuggauaaccauacuauacugcucuauuacucaacugcugcuucuaguuuggcuguaacauugaugcuagcuauuuuuauuguuuauauggucuccagagacaacguuucaugcuccaucugucuauaa

SEQ ID NO: 59864 - RNA, 1755 nt, Artificial Sequence
  derived and/or modified CDS sequence (wt) from hemagglutinin__InfluenzaB__AHE38007
augaaggcaauaauuguacuacucaugguaguaacauccaaugcagaucgaaucugcacugggauaacaucuucaaacucaccucauguggucaaaacagcuacucaaggggaggucaaugugacuggugugauaccacuaacaacaacaccgacaaaaucuuauuuugcaaaucucaaaggaacaaagaccagagggaaacuaugcccagacugucucaacuguacagaucuggauguggccuugggcaggccaaugugugugggaacuacaccuucugcgaaagcuucaauacuucacgaagucagaccuguuacauccgggugcuucccuauaaugcacgacagaacaaaaaucaggcaacuagccaaucuucucagaggauaugaaaauauaagguuaucaacccaaaacguuaucgaugcagaaaaagcaccaggaggacccuacagacuuggaaccucaggaucuugcccuaacgcuaccaguaaaagcggauuuuucgcaacaauggcuugggcugucccaaaggacaacaacaaaaaugcaacgaacccauuaacaguagaaguaccauacauuugugcagaaggagaagaccaaauuacuguuuggggguuccauucagauaacaaaacccaaaugaagaaccucuauggagacucaaauccucaaaaguucaccucaucugcuaauggaguaaccacacauuauguuucucagauuggcggcuucccagaucaaacagaagacggaggacuaccacaaagcggcagaauugucguugauuacaugaugcaaaaaccugggaaaacaggaacaauugucuaucaaagagguguuuuguugccucaaaagguguggugcgcgaguggcaggagcaaaguaauaaaaggguccuugccuuuaauuggugaagcagauugccuucaugaaaaauacgguggauuaaacaaaagcaagccuuacuacacaggagaacaugcaaaagccauaggaaauugcccaauaugggugaaaacaccuuugaagcuugccaauggaaccaaauauagaccuccugcaaagcuauuaaaggaaagggguuucuucggcgcuauugcugguuuccuagaaggaggaugggaaggaaugauugcagguuggcacggauacacaucucacggagcacauggaguggcaguugcugcagaccuuaagagcacacaagaagcuauaaacaagauaacaaaaaaucucaacucuuugagugagcuagaaguaaagaaucuucaaaggcuaaguggugccauggaugaacuccacaacgaaauacucgagcuggaugagaaaguggaugaucucagagcugacacuauaaguucacaaauagaacuugcagucuugcuuuccaacgaaggaauaauaaacagugaagaugagcaucuauuggcacuugagagaaaacuaaagaaaaugcugggucccucugcuguagacauaggaaauggaugcuucgaaaccaaacacaaaugcaaccagaccugcuuagacaggauagcugcuggcaccuuuaaugcaggagaauuuucucuccccacuuuugauucauugaacauuacugcugcaucuuuaaaugaugauggauuggauaaccauacuauacugcucuauuacucaacugcugcuucuaguuuggcuguaacauugaugcuagcuauuuuuauuguuuauauggucuccagagacaacguuucaugcuccaucugucuauaa

SEQ ID NO: 59865 - RNA, 1755 nt, Artificial Sequence
  derived and/or modified CDS sequence (wt) from hemagglutinin__InfluenzaB__AHE38008
augaaggcaauaauugcacuacucaugguaguaacauccaaugcagaucgaaucugcacugggauaacaucuucaaacucaccucauguggucaaaacagcuacucaaggggaggucaaugugacuggugugauaccacuaacaacaacaccaacaaaaucuuauuuugcaaaucucaaaggaacaaagaccagagggaaacuaugcccagacugucucaacuguacagaucuggauguggccuugggcaggccaaugugugugggaacuacacccucugcgaaagcuucaauacuucacgaagucagaccuguuacauccgggugcuucccuauaaugcacgacagaacaaaaaucaggcaacuagccaaucuucucagaggauaugaaaauaucagguuaucaacccaaaacguuaucgaugcagaaaaagcaccaggaggacccuacagacuuggaaccucaggaucuugcccuaacgcuaccaguaaaagcggauuuuucgcaacaauggcuugggcugucccaaaggacaacaacaaaaaugcaacgaacccauuaacaguagaaguaccauacauuugugcagaaggagaagaccaaauugcuguuuggggguuccauucagauaacaaaacccaaaugaagaaccucuauggagacucaaauccucaaaaguucaccucaucugcuaauggaguaaccacacauuauguuucucagauuggcggcuucccagaucaaacagaagacggaggacuaccacaaagcggcagaauugucguugauuacaugaugcaaaaaccugggaaaacaggaacaauugucuaucaaagagguguuuuguugccucaaaagguguggugcgcgaguggcaggagcaaaguaauaaaaggguccuugccuuuaauuggugaagcagauugucuucaugaaaaauacgguggauuaaacaaaagcaagccuuacuacacaggagaacaugcaaaagccauaggaaauugcccaauaugggugaaaacaccuuugaagcuugccaauggaaccaaauauagaccuccugcaaaacuauuaaaggaaagggguuucuucggagcuauugcugguuuccuagaaggaggaugggaaggaaugauugcagguuggcacggauacacaucucacggagcacauggaguggcaguugcugcagaccuuaagagcacacaagaagcuauaaacaagauaacaaaaaaucucaacucuuugagugagcuagaaguaaagaaucuucaaaggcuaaguggugccauggaugaacuccacaacgaaauacucgagcuggaugagaaaguggaugaucucagagcugacacuauaaguucacaaauagaacuugcagucuugcuuuccaacgaaggaauaauaaacagugaagaugagcaucuauuggcacuugagagaaaacuaaagaaaaugcugggucccucugcuguagacauaggaaauggaugcuucgaaaccaaacacaaaugcaaccagaccugcuuagacaggauagcugcuggcaccuuuaaugcaggagaauuuucucuccccacuuuugauucauugaacauuacugcugcaucuuuaaaugaugauggauuggauaaccauaccauacugcucuauuacucaacugcugcuucuaguuuggcuguaacauuaaugcuagcuauuuuuauuguuuauauggucuccagagacaacguuucaugcuccaucugucuauaa

SEQ ID NO: 59866 - RNA, 1755 nt, Artificial Sequence
  derived and/or modified CDS sequence (wt) from hemagglutinin__InfluenzaB__AHE38009
augaaggcaauaauuguacuacucaugguaguaacauccaaugcagaucgaaucugcacugggauaacaucuucaaacucaccucauguggucaaaacagcuacucaaggggaggucaaugugacuggugugauaccacuaacaacaacaccaacaaaaucuuauuuugcaaaucucaaaggaacaaagaccagagggaaacuaugcccagacugucucaacuguacagaucuggauguggccuugggcaggccaaugugugugggaacuacaccuucugcgaaagcuucaauacuucaugaagucagaccuguuacauccgggugcuucccuauaaugcacgacagaacaaaaaucaggcaacuagccaaucuucucagaggauaugaaaauaucagguuaucaacccaaaacguuaucgaugcagaaaaagcaccaggaggacccuacagacuuggaaccucaggaucuugcccuaacgcuaccaguaaaagcggauuuuucgcaacaauggcuugggcugucccaaaggacaacaacaaaaaugcaacgaacccauuaacaguagaaguaccauacauuugugcagaaggagaagaccaaauugcuguuuggggguuccauucagauaacaaaacccaaaugaagaaccucuauggagacucaaauccucaaaaguucaccucaucugcuaauggaguaaccacacauuauguuucucagauuggcggcuucccagaucaaacagaagacggaggacuaccacaaagcggcagaauugucguugauuacaugaugcaaaaaccugggaaaacaggaacaauugucuaucaaagagguguuuuguugccucaaaagguguggugcgcgaguggcaggagcaaaguaauaaaaggguccuugccuuuaauuggugaagcagauugucuucaugaaaaauacgguggauuaaacaaaagcaagccuuacuacacaggagaacaugcaaaagccauaggaaauugcccaauaugggugaaaacaccuuugaagcuugccaauggaaccaaauauagaccuccugcaaaacuauuaaaggaaagggguuucuucggagcuauugcugguuuccuagaaggaggaugggaaggaaugauugcagguuggcacggauacacaucucacggagcacauggaguggcaguugcugcagaccuuaagagcacacaagaagcuauaaacaagauaacaaaaaaucucaacucuuugagugagcuagaaguaaagaaucuucaaaggcuaaguggugccauggaugaacuccacaacgaaauacucgagcuggaugagaaaguggaugaucucagagcugacacuauaaguucacaaauagaacuugcagucuugcuuuccaacgaaggaauaauaaacagugaagaugagcaucuauuggcacuugagagaaaacuaaagaaaaugcugggucccucugcuguagacauaggaaauggaugcuucgaaaccaaacacaaaugcaaccagaccugcuuagacaggauagcugcuggcaccuuuaaugcaggagaauuuucucuccccacuuuugauucauugaacauuacugcugcaucuuuaaaugaugauggauuggauaaccauaccauacugcucuauuacucaacugcugcuucuaguuuggcuguaacauugaugcuagcuauuuuuauuguuuauauggucuccagagacaacguuucaugcuccaucugucuauaa

SEQ ID NO: 59867 - RNA, 1755 nt, Artificial Sequence
  derived and/or modified CDS sequence (wt) from hemagglutinin__InfluenzaB__AHE38010
augaaggcaauaauuguacuacucaugguaguaacauccaaugcagaucgaaucugcacugggauaacaucuucaaacucaccucauguggucaaaacagcuacucaaggggaggucaaugugacuggugugauaccacuaacaacaacaccaacaaaaucuuauuuugcaaaucucaaaggaacaaagaccagagggaaacuaugcccagacugucucaacuguacagaucuggauguggccuugggcaggccaaugugugugggaacuacaccuucugcgaaagcuucaauacuucacgaagucagaccuguuacauccgggugcuuuccuauaaugcacgacagaacaaaaaucaggcaacuagccaaucuucucagaggauaugaaaauaucagguuaucaacccaaaacguuaucgaugcagaaaaagcaccaggaggacccuacagacuuggaaccucaggaucuugcccuaacgcuaccaguaaaagcggauuuuucgcaacaauggcuugggcugucccaaaggacaacaacaaaaaugcaacgaacccauuaacaguagaaguaccauacauuugugcagaaggagaagaccaaauugcuguuuggggguuccauucagauaacaaaacccaaaugaagaaccucuauggagacucaaauccucaaaaguucaccucaucugcuaauggaguaaccacacauuauguuucucagauuggcggcuucccagaucaaacagaagacggaggacuaccacaaagcggcagaauugucguugauuacaugaugcaaaaaccugggaaaacaggaacaauugucuaucaaagagguguuuuguugccucaaaagguguggugcgcgaguggcaggagcaaaguaauaaaaggguccuugccuuuaauuggugaagcagauugucuucaugaaaaauacgguggauuaaacaaaagcaagccuuacuacacaggagaacaugcaaaagccauaggaaauugcccaauaugggugaaaacaccuuugaagcuugccaauggaaccaaauauagaccuccugcaaaacuauuaaaggaaagggguuucuucggagcuauugcugguuuccuagaaggaggaugggaaggaaugauugcagguuggcacggauacacaucucacggagcacauggaguggcaguugcugcagaccuuaagagcacacaagaagcuauaaacaagauaacaaaaaaucucaacucuuugagugagcuagaaguaaagaaucuucaaaggcuaaguggugccauggaugaacuccacaacgaaauacucgagcuggaugagaaaguggaugaucucagagcugacacuauaaguucacaaauagaacuugcagucuugcuuuccaacgaaggaauaauaaacagugaagaugagcaucuauuggcacuugagagaaaacuaaagaaaaugcugggucccucugcuguagacauaggaaauggaugcuucgaaaccaaacacaaaugcaaccagaccugcuuagacaggauagcugcuggcaccuuuaaugcaggagaauuuucucuccccacuuuugauucauugaacauuacugcugcaucuuuaaaugaugauggauuggauaaccauaccauacugcucuauuacucaacugcugcuucuaguuuggcuguaacauugaugcuagcuauuuuuauuguuuauauggucuccagagacaacguuucaugcuccaucugucuauaa

SEQ ID NO: 59868 - RNA, 1755 nt, Artificial Sequence; identical to SEQ ID NO: 58871
  derived and/or modified CDS sequence (wt) from hemagglutinin__InfluenzaB__AHE38012

SEQ ID NO: 59869 - RNA, 1755 nt, Artificial Sequence
  derived and/or modified CDS sequence (wt) from hemagglutinin__InfluenzaB__AHE38013
augaaggcaauaauuguacuacucaugguaguaacauccaaugcagaucgaaucugcacugggauaacaucuucaaacucaccucauguggucaaaacagcuacucaaggggaggucaaugugacuggugugauaccacuaacaacaacaccaacaaaaucuuauuuugcaaaucucaaaggaacaaagaccagagggaaacuaugcccagacugucucaacuguacagaucuggauguggccuugggcaggccaaugugugugggaacuacaccuucugcgaaagcuucaauacuucacgaagucagaccuguuacauccgggugcuucccuauaaugcacgacagaacaaagaucaggcaacuagccaaucuucucagaggauaugaaaauaucagguuaucaacccaaaauguuaucgaugcagaaaaagcaccaggaggacccuacagacuuggaaccucaggaucuugcccuaacgcuaccaguaaaagcggauuuuucgcaacaauggcuugggcugucccaaaggacaacaacaaaaaugcaacgaacccauuaacaguagaaguaccauacauuugugcagaaggagaagaccaaauuacuguuuggggguuccauucagauaacaaaacccaaaugaagaaccucuauggagacucaaauccucaaaaguucaccucaucugcuaauggaguaaccacacauuauguuucucagauuggcggcuucccagaucaaacagaagacggaggacuaccacaaagcggcagaauugucguugauuacaugaugcaaaaaccugggaaaacaggaacaauugucuaucaaagagguguuuuguugccucaaaagguguggugcgugaguggcaggagcaaaguaauaaaaggguccuugccuuuaauuggugaagcagauugccuucaugaaaaauacgguggauuaaacaaaagcaagccuuacuacacaggagaacaugcaaaagccauaggaaauugcccaauaugggugaaaacaccuuugaagcuugccaauggaaccaaauauagaccuccugcaaaacuauuaaaggaaagggguuucuucggagcuauugcugguuuccuagaaggaggaugggaaggaaugauugcagguuggcacggauacacaucucacggagcacauggaauggcaguugcugcagaccuuaagagcacacaagaagcuauaaacaagauaacaaaaaaucucaacucguugagugagcuagaaguaaagaaucuucaaaggcuaaguggugccauggaugaacuccacaacgaaauacucgagcuggaugagaaaguggaugaucucagagcugacacuauaaguucacaaauagaacuugcagucuugcuuuccaacgaaggaauaauaaacagugaagaugagcaucuauuggcacuugagagaaaacuaaagaaaaugcugggucccucugcuguagacauaggaaauggaugcuucgaaaccaaacacaaaugcaaccagaccugcuuagacaggauagcugcuggcaccuuuaaugcaggagaauuuucucuccccacuuuugauucauugaacauuacugcugcaucuuuaaaugaugauggauuggauaaccauacuauacugcucuauuacucaacugcugcuucuaguuuggcuguaacauugaugcuagcuauuuuuauuguuuauauggucuccagagacaacguuucaugcuccaucugccuauaa

SEQ ID NO: 59870 - RNA, 1755 nt, Artificial Sequence
  derived and/or modified CDS sequence (wt) from hemagglutinin__InfluenzaB__AHE38014
augaaggcaauaauuguacuacucaugguaguaacauccaaugcagaucgaaucugcacugggauaacaucuucaaacucaccucauguggucaaaacagcuacucaaggggaggucaaugugacuggugugauaccacuaacaacaacaccaacaaaaucuuauuuugcaaaucucaaaggaacaaagaccagagggaaacuaugcccagacugucucaacuguacagaucuggauguggccuuaggcagaccaaugugugugggaacuacaccuucugcgaaagcuucaauacuucacgaagucagaccuguuacauccgggugcuucccuauaaugcacgacagaacaaaaaucaggcaacuagccaaucuucucagaggauaugaaaauaucagguuaucaacccaaaacguuaucgaugcagaaaaagcaccaggaggacccuacagacuuggaaccucaggaucuugcccuaacgcuacuaguaaaagcggauuuuucgcaacaauggcuugggcugucccaaaggacaacaacaaaaaugcaacgaacccauuaacaguagaaguaccauacauuugugcagaaggagaagaccaaauuacuguuuggggguuccauucagauaacaaaacccaaaugaagaaccucuauggagacucaaauccucaaaaguucaccucaucugcuaauggaguaaccacacauuauguuucucagauuggcggcuucccagaucaaacagaagacggaggacuaccacaaagcggcagaauugucguugauuacaugaugcaaaaaccugggaaaacaggaacaauugucuaucaaagagguguuuuguugccucaaaagguguggugcgcgaguggcaggagcaaaguaauaaaaggguccuugccuuuaauuggugaagcagauugccuucaugaaaaauacgguggauuaaacaaaagcaagccuuacuacacaggagaacaugcaaaagccauaggaaauugcccaauaugggugaaaacaccuuugaagcuugccaauggaaccaaauauagaccuccugcaaaacuauuaaaggaaagggguuucuucggagcuauugcugguuuccuagaaggaggaugggaaggaaugauugcagguuggcacggauacacaucucacggagcacauggaguggcaguugcugcagaccuuaagagcacacaagaagcuauaaacaagauaacaaaaaaucucaacucuuugagugagcuagaaguaaagaaucuucaaaggcuaaguggugccauggaugaacuccacaacgaaauacucgagcuggaugagaaaguggaugaucucagagcugacacuauaaguucacaaauagaacuugcagucuugcuuuccaacgaaggaauaauaaacagugaagaugagcaucuauuggcacuugagagaaaacuaaagaaaaugcugggucccucugcuguagacauaggaaauggaugcuucgaaaccaaacacaaaugcaaccagaccugcuuagacaggauagcugcuggcaccuuuaaugcaggagaauuuucucuccccacuuuugauucauugaacauuacugcugcaucuuuaaaugaugauggauuggauaaccauacuauacugcucuauuacucaacugcugcuucuaguuuggcuguaacauugaugcuagcuauuuuuauuguuuauauggucuccagagacaacguuucaugcuccaucugucuauaa

SEQ ID NO: 59871 - RNA, 1758 nt, Artificial Sequence
  derived and/or modified CDS sequence (wt) from hemagglutinin__InfluenzaB__AHE38015
augaaggcaauaauuguacuacucaugguaguaacauccaaugcagaucgaaucugcacugggauaacaucgucaaacucaccacaugucgucaaaacugcuacucaaggggaggucaaugugaccgguguaauaccacugacaacaacacccaccaaaucucauuuugcaaaucucaaaggaacagaaaccagggggaaacuaugcccaaaaugccucaacugcacagaucuggacguagccuugggcagaccaaaaugcacggggaaaauacccucggcaagaguuucaauacuccaugaagucagaccuguuacaucugggugcuuuccuauaaugcacgauagaacaaaaauuagacagcugccuaaccuucuccgaggcuacgaacauaucagguuaucaacucacaacguuaucaaugcagaaaaugcaccaggaggacccuacaaaauuggaaccucagggucuugcccuaacguuaccaauggaaacggauucuucgcaacaauggcuugggccgucccaaaaaacgacaaaaacaaaacagcaacaaauccauuaacaauagaagugccauacauuuguacagaaggagaagaccaaauuaccguuuggggguuccacucugacaacgaaacccaaauggcaaagcucuauggggacucaaagccccagaaguucaccucaucugccaacggagugaccacacauuacguuucacagauugguggcuucccaaaucaaacagaagacggaggacuaccacaaagugguagaauuguuguugauuacauggugcaaaaaucugggaaaacaggaacaauuaccuaucaaagagguauuuuauugccucaaaagguguggugcgcaaguggcaggagcaagguaauaaaaggauccuugccuuuaauuggagaagcagauugccuccacgaaaaauacgguggauuaaacaaaagcaagccuuacuacacaggggaacaugcaaaggccauaggaaauugcccaauaugggugaaaacacccuugaagcuggccaauggaaccaaauauagaccuccugcaaaacuauuaaaggaaagggguuucuucggagcuauugcugguuucuuagaaggaggaugggaaggaaugauugcagguuggcacggauacacaucccauggggcacauggaguagcgguggcagcugaccuuaagagcacucaagaggccauaaacaagauaacaaaaaaucucaacucuuugagugagcuggaaguaaagaaucuucaaagacuaagcggugccauggaugaacuccacaacgaaauacuagaacuagaugagaaaguggaugaucucagagcugauacaauaagcucacaaauagaacucgcaguccugcuuuccaaugaaggaauaauaaacagugaagaugaacaucucuuggcgcuugaaagaaagcugaagaaaaugcugggccccucugcuguagagauagggaauggaugcuuugaaaccaaacacaaaugcaaccagaccugucucgacagaauagcugcugguaccuuugaugcaggagaauuuucucuccccaccuuugauucacugaauauuacugcugcaucuuuaaaugacgauggauuggauaaucauacuauacugcuuuacuacucaacugcugccuccaguuuggcuguaacacugaugauagcuaucuuuguuguuuauauggucuccagagacaauguuucuugcuccaucugucuauaa

SEQ ID NO: 59872 - RNA, 1758 nt, Artificial Sequence
  derived and/or modified CDS sequence (wt) from hemagglutinin__InfluenzaB__AHE38016
augaaggcaauaauuguacuacucaugguaguaacauccaaugcagaucgaaucugcacugggauaacaucgucaaacucaccacaugucgucaaaacugcuacucaaggggaggucaaugugaccgguguaauaccacugacaacaacacccaccaaaucucauuuugcaaaucucaaaggaacagaaaccagggggaaacuaugcccaaaaugccucaacugcacagaucuggacguagccuugggcagaccaaaaugcacggggaaaauacccucggcaagaguuucaauacuccaugaagucagaccuguuacaucugggugcuuuccuauaaugcacgauagaacaaaaauuagacagcugccuaaccuucuccgaggauacgaacauaucagguuaucaacucacaauguuaucaaugcagaaaaugcaccaggaggacccuacaaaauuggaaccucagggucuugcccuaacguuaccaauggaaacggauucuucgcaacaauggcuugggccgucccaaaaaacgacaaaaacaaaacagcaacaaauccauuaacaauagaaguaccauacauuuguacagaaggagaagaccaaauuaccguuuggggguuccacucugacaacgagacccaaauggcaaagcucuauggggacucaaagccccagaaguucaccucaucugccaacggagugaccacacauuacguuucacaaauugguggcuucccaaaucaaacagaagacggaggacuaccacaaagugguagaauuguuguugauuacauggugcaaaaaucugggaaaacaggaacaauuaccuaucaaagagguauuuuauugccucaaaagguguggugcgcaaguggcaagagcaagguaauaaaaggauccuugccuuuaauuggagaagcagauugccuccacgaaaaauacgguggguuaaacaaaagcaagccuuacuacacaggggaacaugcaaaggccauaggaaauugcccaauaugggugaaaacacccuugaagcuggccaauggaaccaaauauagaccuccugcaaaacuauuaaaggaaagggguuucuucggagcuauugcugguuucuuagaaggaggaugggaaggaaugauugcagguuggcacggauacacaucccacggggcacauggaguagcgguggcagcugaccuuaagagcacucaagaggccauaaacaagauaacaaaaaaucucaacucuuugagugagcuggaaguaaagaaucuucaaagacuaagcggugccauggaugaacuccacaacgaaauacuagaacuagaugagaaaguggaugaucucagagcugauacaauaagcucacaaauagaacuagcaguccugcuuuccaaugaaggaauaauaaacagugaagaugaacaucucuuggcgcuugaaagaaagcugaagaaaaugcugggccccucugcuguagagauagggaauggaugcuuugaaaccaaacacaagugcaaccagaccugucucgacagaauagcugcugguaccuuugaugcaggagaauuuucucuccccaccuuugauucacugaauauuacugcugcaucuuuaaaugacgauggauuggauaaucauauuauacugcuuuacuacucaacugcugcuuccaguuuggcuguaacacugaugauagcuaucuuuguuguuuauauggucuccagagacaauguuucuugcuccaucugucuauaa

SEQ ID NO: 59873 - RNA, 1758 nt, Artificial Sequence; identical to SEQ ID NO: 58976
  derived and/or modified CDS sequence (wt) from hemagglutinin__InfluenzaB__AHE38017

SEQ ID NO: 59874 - RNA, 1758 nt, Artificial Sequence; identical to SEQ ID NO: 58899
  derived and/or modified CDS sequence (wt) from hemagglutinin__InfluenzaB__AHE38018

SEQ ID NO: 59875 - RNA, 1758 nt, Artificial Sequence
  derived and/or modified CDS sequence (wt) from hemagglutinin__InfluenzaB__AHE38019
augaaggcaauaauuguacuacucaugguaguaacauccaaugcagaucgaaucugcacuggaauaacaucgucaaacucaccacaugucgucaaaacugcuacucaaggggaggucaaugugaccgguguaauaccacugacaacaacacccaccaaaucucauuuugcaaaucucaaaggaacagaaaccagggggaaacuaugcccaaaaugccuuaacugcacagaucuggacguagccuugggcagaccaaaaugcacggggaaaauacccucggcaagaguuucaauacuccaugaagucagaccuguuacaucugggugcuuuccuauaaugcacgauagaacaaaaauuagacagcugccuaaccuucuccgaggauacgaacauaucagguuaucaacucacaacguuaucaaugcagaaaaugcaccaggaggacccuacaaaauuggaaccucagggucuugcccuaacguuaccaauggaaacggauucuucgcaacaauggcuugggccgucccaaaaaacgacaaaaacaaaacagaaacaaauccauuaacaauagaaguaccauacauuuguacagaaggagaagaccaaauuaccguuuggggguuccacucugacaacgagacccaaauggcaaagcucuauggggacucaaagccccagaaguucaccucaucugccaacggagugaccacacauuacguuucacagauugguggcuucccaaaucaaacagaagacggaggacuaccacaaagugguagaauuguuguugauuacauggugcaaaaaucugggaaaacaggaacaauuaccuaucaaagagguauuuuauugccucaaaagguguggugcgcaaguggcaggagcaagguaauaaaaggauccuugccuuuaauuggagaagcagauugccuccacgaaaaauacgguggauuaaacaaaagcaagccuuacuacacaggggaacaugcaaaggccauaggaaauugcccaauaugggugaaaacacccuugaagcuggccaauggaaccaaauauagaccuccugcaaaacuauuaaaggaaagggguuucuucggagcuauugcugguuucuuagaaggaggaugggaaggaaugauugcagguuggcacggauacacaucccauggggcacauggaguagcgguggcagcugaccuuaagagcacucaagaggccauaaacaagauaacaaaaaaucucaacucuuugagugagcuggaaguaaagaaucuucaaagacuaagcggugccauggaugaacuccacaaugaaauacuagaacuagaugagaaaguggaugaucucagagcugauacaauaagcucacaaauagaacucgcaguccugcuuuccaaugaaggaauaauaaacagugaagaugaacaucucuuggcgcuugaaagaaagcugaagaaaaugcugggccccucugcuguagagauagggaauggaugcuuugaaaccaaacacaagugcaaccagaccugucucgacagaauagcugcugguaccuuugaugcaggagaauuuucucuccccaccuuugauucacugaauauuacugcugcaucuuuaaaugacgauggauuggauaaucauacuauacugcuuuacuauucaacugcugccuccaguuuggcuguaacacugaugauagcuaucuuuguuguuuauauggucuccagagacaauguuucuugcuccaucugucuauaa

SEQ ID NO: 59876 - RNA, 1758 nt, Artificial Sequence
  derived and/or modified CDS sequence (wt) from hemagglutinin__InfluenzaB__AHE38020
augaaggcaauaauuguacuacucaugguaguaacauccaaugcagaucgaaucugcacugggauaacaucgucaaacucaccacaugucgucaaaacugcuacucaaggggaggucaaugugaccgguguaauaccacugacaauaacacccaccaaaucucauuuugcaaaucucaaaggaacagaaaccagggggaaacuaugcccaaaaugccucaacugcacagaucuggacguagccuugggcagaccaaaaugcacagggaaaauacccucggcaagaguuucaauacuccaugaagucagaccuguuacaucugggugcuuuccuauaaugcacgauagaacaaaaauuagacagcugccuaaccuucuccgaggauacgaacauaucagguuaucaacucacaacguuaucaaugcagaagaugcaccaggaggacccuacaaaauuggaaccucagggucuugcccuaacguuaccaauggaaacggauucuucgcaacaauggcuugggccgucccaaaaaacgacaaaaacaaaacagcaacaaauccauuaacaauagaaguaccauacauuuguacagaaggagaagaccaaauuaccguuuggggguuccacucugacaacgagacccaaauggcaaagcucuauggggacucaaagccccagaaguucaccucaucugccaacggagugaccacacauuacguuucacagauugguggcuucccaaaucaaacagaagacggaggacuaccacaaagugguagaauuguuguugauuacauggugcaaaaaucuggaaaaacaggaacaauuaccuaucaaagagguauuuuauugccucaaaagguguggugcgcaaguggcaggagcaagguaauaaaaggauccuugccuuuaauuggagaagcagauugccuccacgaaaaauacgguggauuaaacaaaagcaagccuuacuacacaggggaacaugcaaaggccauaggaaauugcccaauaugggugaaaacacccuugaagcuggccaauggaaccaaauauagaccuccugcaaaacuauuaaaggaaagggguuucuucggagcuauugcugguuucuuagaaggaggaugggaaggaaugauugcagguuggcacggauacacaucccauggggcacauggaguagcgguggcagcugaccuuaagagcacucaagaggccauaaacaagauaacaaaaaaucucaacucuuugagugagcuggaagugaagaaucuucaaagacuaagcggugccauggaugaacuccacaacgaaauacuagaacuagaugagaaaguggaugaucucagagcugauacaauaagcucacaaauagaacucgcaguccugcuuuccaaugaaggaauaauaaacagugaagaugaacaucucuuggcgcuugaaagaaagcugaagaaaaugcugggccccucugcuguagagauagggaacggaugcuuugaaaccaaacauaagugcaaccagaccugucucgacagaauagcugcugguaccuuugaugcaggagaauuuucucuccccaccuuugauucacugaauauuacugcugcaucuuuaaaugacgauggauuggauaaucauacuauacugcuuuacuacucaacugcugccuccaguuuggcuguaacacugaugauagcuaucuuuguuguuuauauggucuccagagacaauguuucuugcuccaucugucuauaa

SEQ ID NO: 59877 - RNA, 1758 nt, Artificial Sequence
  derived and/or modified CDS sequence (wt) from hemagglutinin__InfluenzaB__AHE38021
augaaggcaauaauuguacuacucaugguaguaacauccaaugcagaucgaaucugcacugggauaacaucaucaaacucaccacaugucgucaaaacugcuacucaaggggaggucaaugugaccgguguaauaccacugacaacaacacccaccaaaucucauuuugcaaaucucaaagggacagaaaccagggggaaacucugcccaaaaugccucaacugcacagaucuggacguagccuugggcagaccaaaaugcacggggaaaauacccucggcaagaguuucaauacuccaugaagucagaccuguuacaucugggugcuuuccuauaaugcacgauagaacaaaaauuagacagcugccuaaccuucuccgaggauacgaacauaucagguuaucaacucacaacguuaucaaugcagaaaaugcaccaggaggacccuacaaaauuggaaccucagggucuugcccuaacguuaccaauggaaacggauucuucgcaacaauggcuugggccgucccaaaaaacgacaaaaacaagacagcaacaaauccauuaacaauagaaguaccauacauuuguacagaaggagaagaccaaauuaccguuuggggauuccacucugacaacgagacccaaauggcaaagcucuauggggacucaaauccccagaaguucaccucaucugccaacggagugaccacacauuacguuucacagauugguggcuucccaaaucaaacagaagacggaggacuaccacaaagugguagaauuguuguugauuacauggugcaaaaaucugggaaaacaggaacaauuaccuaucaaagagguauuuuauugccucaaaagguguggugcgcaaguggcaggagcaagguaauaaaaggauccuugccuuuaauuggagaagcagauugccuccacgaaaaauacgguggguuaaacaaaagcaagccuuacuacacaggggaacaugcaaaggccauaggaaauugcccaauaugggugaaaacacccuugaagcuggccaauggaaccaaauauagaccuccugcaaaacuauuaaaggaaagggguuucuucggagcuauugcugguuucuuagaaggaggaugggaaggaaugauugcagguuggcacggauacacaucccauggggcacauggaguagcgguggcagcugaccuuaagagcacucaagaggccauaaacaagauaacaaaaaaucucaacucuuugagugagcuggaaguaaagaaucuucaaagacuaagcggugccauggaugaacuccacaacgaaauacuagaacuagaugagaaaguggaugaucucagagcugauacaauaagcucacaaauagaacucgcaguccugcuuuccaaugaaggaauaauaaacagugaagaugaacaucucuuggcgcuugaaagaaagcugaagaaaaugcugggccccucugcuguagagauagggaauggaugcuuugaaaccaaacacaagugcaaucagaccugucucgacagaauagcugcugguaccuuugaugcaggagaauuuucucuccccacuuuugauucacugaauauuacugcugcaucuuuaaaugacgauggauuggauaaucauacuauacugcuuuacuacucaacugcugccuccaguuuggcuguaacacugaugauagcuaucuuuguuguuuauauggucuccagagacaauguuucuugcuccaucugucuauaa

SEQ ID NO: 59878 - RNA, 1758 nt, Artificial Sequence; identical to SEQ ID NO: 58899
  derived and/or modified CDS sequence (wt) from hemagglutinin__InfluenzaB__AHE38022

SEQ ID NO: 59879 - RNA, 1752 nt, Artificial Sequence
  derived and/or modified CDS sequence (wt) from hemagglutinin__InfluenzaB__AHL91189
augaaggcaauaauuguacuacucaugguagcaacauccaacgcagaucgaaucugcacugggauaacaucuucaaacucaccucauguggucaaaacagcuacucaaggggaagucaaugugacuggugugauaucacugacaacaacaccaacaaaaucucauuuugcaaaucucaaaggaacaaagaccagagggaaacuaugcccaaacugucucaacuguacagaucuggauguggccuugggcagaccaauauguauagggaccauaccuucggcaaaagcuucaauacuccacgaagucagaccuguuacauccgggugcuuuccuauaaugcacgacagaacaaaaaucagacaacuacccaaucuucucagaggauaugaacauaucagauugucaacccauaacguuaucaaugcagaaagggcaccgggaggacccuacagacuuggaaccucaggaucuugcccuaacguuaccaguagaagcggauucuucgcaacaauggcuugggcugucccaagggacaacaaaacagcaacgaacccacuaacaguagaaguaccauacauuuguacaaaaggagaagaccaaauuacuguuuggggguuccauucugauaacaaaacccaaaugaaaaaccucuauggagacucaaacccucaaaaguucaccucaucugccaauggaguaaccacacauuauguuucucagauugguggcuucccaaaucaaacagaagacggagggcuaccacaaagcggcagaauuguuguugauuacauggugcaaaaaccugggaaaacaggaacaauugucuaucaaagagguguuuuguugccucaaaaaguguggugugcaaguggcaggagcaagguaauaaaaggguccuugccuuuaauuggugaagcagauugccuucacgaaaaauacgguggauuaaacaaaagcaagccuuacuacacaggagaacaugcaaaagccauaggaaauugcccaauaugggugaaaacaccuuugaagcuugccaauggaaccaaauauagaccucccgcaaaacuauuaaaggaaagggguuucuucggagcuauugcugguuucuuagaaggaggaugggaaggaaugauugcagguuggcacggauacacaucucauggagcacaugggguggcaguggcagcagaccuuaagaguacgcaagaagccauaaacaagauaacaaaaaaucucaauucuuuaagugagcuagaaguaaagaaucuucaaagacuaaguggugccauggaugaacuccacaacgaaauacucgagcuggaugagaaaguggaugaucucagagcugacacaauaagcucgcaaauagagcuugcagucuugcuuuccaaugaaggaauaauaaacagugaagaugagcaucuauuggcacuugaaagaaaacuaaagaaaaugcugggucccucugcuguagacauagggaauggaugcuucgaaaccaaacacaagugcaaccagaccugcuuagacaggauagcugcuggcaccuuuaaugcaggagaauuuucucuucccacuuuugauucacugaauauuacugcugcaucuuuaaaugaugauggauuggauaaucauacuauacugcucuacuacucaacugcugcuucuaguuuggcuguaacauugaugauagcuauuuuuauuguuuauauggucuccagagacaauguuucuugcuccaucugucuauag

SEQ ID NO: 59880 - RNA, 1752 nt, Artificial Sequence
  derived and/or modified CDS sequence (wt) from hemagglutinin__InfluenzaB__AHL91200
augaaggcaauaauuguacuacucaugguaguaacauccaacgcagaucgaaucugcacugggauaacaucuucaaacucaccucauguggucaaaacagccacucaaggggaagucaaugugacuggugugauaccacugacaacaacaccaacaaaaucucauuuugcaaaucucaaaggaacaaagaccagagggaaacuaugcccaaacugucucaacuguacagaucuggauguggccuugggcagaccaauguguauagggaccauaccuucagcaaaagcuucaauacuccacgaagucagaccuguuacauccgggugcuuuccuauaaugcacgacagaacaaaaaucagacagcuacccaaucuucucagaggauaugaacauaucagauuaucaacccauaacguuaucaacgcagaaagggcaccaggaggacccuacagacuuggaaccucagggucuugcccuaauguuaccaguagaagcggauucuucgcaacaauggcuugggcugucccaagggacaacaaaacagcaacgaacccacuaacaguagaaguaccauacauuuguacaaaaggagaagaccaaauuacuguuuggggguuccauucugauaacaaaacccaaaugaaaaaccucuauggagacucaaauccucaaaaguucaccucaucugccaauggaguaaccacacauuauguuucucagauuggugacuucccaaaucaaacagaagacggagggcuaccacaaagcggcagaauuguuguugauuacauggugcaaaaaccugggaaaacaggaacaauugucuaucaaagagguguuuuguugccucaaaagguguggugugcaaguggcaggagcaagguaauaaaaggguccuugccuuuaauuggugaagcagauugccuucacgaaaaauacgguggauuaaacaaaagcaagccuuacuacacaggagaacaugcaaaagccauaggaaauugcccaauaugggugaaaacaccuuugaagcuugccaauggaaccaaauauagaccucccgcaaaacuauuaaaggaaagggguuucuucggagcuauugcugguuucuuagaaggaggaugggaaggaaugauugcagguuggcacggauacacaucucauggagcacaugggguggcaguggcagcagaccuuaagaguacgcaagaagccauaaacaagauaacaaaaaaucucaauucuuugagugagcuagaaguaaagaaucuucaaagacuaaguggugccauggaugaacuccacaacgaaauacucgagcuggaugagaaaguggaugaucucagagcugacacaauaagcucgcaaauagagcuugcagucuugcuuuccaaugaaggaauaauaaacagugaagaugagcaucuauuagcacuugaaagaaaacuaaagaaaaugcugggucccucugcuguagacauagggaauggaugcuucgaaaccaaacacaagugcaaccagaccugcuuagacaggauagcugcuggcaccuuuaaugcaggagaauuuucucuucccacuuuugauucacuaaauauuacugcugcaucuuuaaaugaugauggauuggauaaucauacuauacugcucuacuacucaacugcugcuucuaguuuggcuguaacauugaugauagcuauuuuuauuguuuauauggucuccagagacaauguuucuuguuccaucugucuauag

SEQ ID NO: 59881 - RNA, 1752 nt, Artificial Sequence
  derived and/or modified CDS sequence (wt) from hemagglutinin__InfluenzaB__AHL91211
augaaggcaauaauuguacuacucaugguagcaacauccaacgcagaucgaaucugcacugggauaacaucuucaaacucaccucauguggucaaaacagcuacucaaggggaagucaaugugacuggugugauaucacugacaacaacaccaacaaaaucucauuuugcaaaucucaaaggaacaaagaccagagggaaacuaugcccaaacugucucaacuguacagaucuggauguggccuugggcagaccaauguguauagggaccauaccuucggcaaaagcuucaauacuccacgaagucagaccuguuacauccgggugcuuuccuauaaugcacgacagaacaaaaaucagacaacuacccaaucuucucaggggauaugaacauaucagauuaucaacccauaacguuaucaaugcagaaagggcaccgggaggacccuacagacuuggaaccucaggaucuugcccuaauguuaccaguagaagcggauucuucgcaacaauggcuugggcugucccaagggacaacaaaacagcaacgaacccacuaacaguagaaguaccauacauuuguacaaaaggagaagaccaaauuacuguuuggggguuccauucugauaacaaaacccaaaugaaaaaccucuauggagacucaaacccucaaaaguucaccucaucugccaauggaguaaccacacauuauguuucucagauugguggcuucccaaaucaaacagaagacggagggcuaccacaaagcggcagaauuguuguugauuacauggugcaaaaaccugggaaaacaggaacaauugucuaucaaagagguguuuuguugccucaaaagguguggugugcaaguggcaggagcaagguaauaaaaggguccuugccuuuaauuggugaagcagauugccuucacgaaaaauacgguggauuaaacaaaagcaagccuuacuacacaggagaacaugcaaaagccauaggaaauugcccaauaugggugaaaacaccuuugaagcuugccaauggaaccaaauauagaccuccagcaaaacuauuaaaggaaagggguuucuucggugcuauugcugguuucuuagaaggaggaugggaaggaaugauugcagguuggcacggauacacaucucauggagcacaugggguggcaguggcagcagaccuuaagaguacgcaagaagccauaaacaagauaacaaaaaaucucaauucuuugagugagcuagaaguaaagaaucuucaaagacuaaguggugccauggaugaacuccacaacgaaauacucgagcuggaugagaaaguggaugaucucagagcugacacaauaagcucgcaaauagagcuugcagucuugcuuuccaaugaaggaauaauaaacagugaagaugagcaucuauuggcacuugagagaaaacuaaagaaaaugcugggucccucugcuguagacauagggaauggaugcuucgaaaccaaacacaagugcaaccagaccugcuuagacaggauagcugcuggcaccuuuaaugcaggagaauuuucucuucccacuuuugauucacugaauauuacugcugcaucuuuaaaugaugauggauuggauaaucauacuauacugcucuacuacucaacugcugcuucuaguuuggcuguaacauugaugauagcuauuuuuauuguuuauauggucuccagagacaauguuucgugcuccaucugucuauag

SEQ ID NO: 59882 - RNA, 1755 nt, Artificial Sequence
  derived and/or modified CDS sequence (wt) from hemagglutinin__InfluenzaB__AHL91222
augaaggcaauaauuguacuacucaugguaguaacauccaaugcagaucgaaucugcacugggauaacaucuucaaacucaccucauguggucaaaacagcuacucaaggggaggucaaugugacuggugugauaccacugacaacaacaccaacaaaaucucauuuugcaaaucucaaaggaacaaagaccagagggaaacuaugcccaaacugucucaacugcacagaucuggauguggccuugggcagaccaauguguguggggaccacaccuucggcaaaagcuucaauacuccacgaagucagaccuguuacauccgggugcuuuccuauaaugcacgacagaacaaaaaucagacagcuacccaaucuucucagaggauaugaaaauaucagauuaucaacccaaaacguuaucaaugcagaaaaggcaccaggaggacccuacagacuuggaaccucaggaucuugcccuaacgcuaccaguagaagcggauuuuucgcaacaauggcuugggcugucccaagggacaacaacaaaacagcaacgaauccacuaacaguagaagugccauacguuuguacagaaggagaagaccaaauuacuguuuggggguuccauucugauaacaaaacccaaaugaaaaaccucuauggagacucaaauccucaaaaguucaccucaucugcuaauggaguaaccacacauuauguuucucagauuggcggcuucccagaucaaacagaagacggagggcuaccacaaagcggcagaauuguuguugauuacauggugcaaaaaccugggaaaacaggaacaauugucuaucaaagagguguuuuguugccucaaaagguguggugcgcgaguggcaggagcaaaguaauaaaaggguccuugccuuuaauuggugaagcagauugccuucacgaaaaauacgguggauuaaacaaaagcaagccuuacuacacaggagaacaugcaaaagccauaggaaauugcccaauaugggugaaaacaccuuugaagcuugccaauggaaccaaauauagaccuccugcaaaacuauuaaaggaaagggguuucuucggagcuauugcugguuucuuagaaggaggaugggaaggaaugauugcagguuggcacggauacacaucucacggagcacauggaguggcaguggcagcagaccuuaagaguacgcaagaagccauaaacaagauaacaaaaaaucucaauucuuugagugagcuagaaguaaagaaucuucaaagacuaaguggugccauggaugaacuccacaacgaaauacucgagcuggaugagaaaguggaugaucucagagcugacacuauaagcucgcaaauagaacuugcagucuugcuuuccaacgaaggaauaauaaacagugaagaugagcaucuauuggcacuugagagaaaacuaaagaaaaugcugggucccucugcuguagacauagggaauggaugcuucgaaaccaaacacaagugcaaccagaccugcuuagacaggauagcugcuggcaccuuuaaugcaggagaauuuucucuccccacuuuugauucacugaauauuacugcugcaucuuuaaaugaugauggauuggauaaccauacuauacugcucuacuacucaacugcugcuucuaguuuggcuguaacauugaugauagcuauuuuuauuguuuauauggucuccagagacaauauuucaugcuccaucugucuauaa

SEQ ID NO: 59883 - RNA, 1755 nt, Artificial Sequence
  derived and/or modified CDS sequence (wt) from hemagglutinin__InfluenzaB__AHL91244
augaaggcaauaauuguacuacucaugguaguaacaucuaaugcagaucgaaucugcacugggauaacaucgucaaacucaccucauguggucaaaacagcuacucaaggggaggucaaugugacuggugugauaccacugacaacaacaccaacaaaaucucauuuugcaaaucucaaaggaacaaagaccagagggaaacuaugcccaaccugucucaacugcacagaucuggauguggccuugggcagaccaauguguguggggaccacaccuucggcaaaagcuucaauacuccacgaagucagaccuguuacauccggaugcuuuccuauaaugcacgacagaacaaaaaucagacagcuacccaaucuucucagaggauaugaaaaaaucagauuaucaacccaaaacguuaucaacgcagaaaaggcaccaggaggacccuacagacuuggaaccucaggaucuugcccuaacgcuaccaguagaagcggauuuuucgcaacaauggcuugggcugucccaagggacaacaacaaaacagcaacgaauccacuaacaguagaaguaccauacauuuguacaaaagaagaagaccaaauuacuguuuggggguuccauucugauaacaaaacccaaaugaaaaaccucuauggagacucaaauccucaaaaguucaccucaucugcuaauggaguaaccacacauuauguuucucagauuggcggcuucccagaucaaacagaagacggagggcuaccacaaagcggcagaauuguuguugauuacauggugcaaaaaccugggaaaacaggaacaauugucuaucaaagagguguuuuguugccucaaaagguguggugcgcgaguggcaggagcaaaguaauaaaaggguccuugccuuuaauuggugaagcagauugccuucacgaaaaauacgguggauuaaacaaaagcaagccuuacuacacaggagaacaugcaaaagccauaggaaauugcccaauaugggugaaaacaccuuugaagcuugccaauggaaccaaauauagaccuccugcaaaacuauuaaaggaaagggguuucuucggagcuauugcugguuucuuagaaggaggaugggaaggaaugauugcagguuggcacggguacacaucucacggagcacauggaguggcaguggcagcagaccuuaagaguacgcaagaagccauaaacaagauaacaaaaaaucucaauucuuugagugaacuagaaguaaagaaucuucaaagacuaaguggugccauggaugaacuccacaacgaaauacucgagcuggaugagaaaguggaugaucucagagcugacacaauaagcucacaaauagaacuugcagucuugcuuuccaacgaaggaauaauaaacagugaagaugagcaucuauuggcacuugagagaaaacuaaagaaaaugcugggucccucugcuguagacauagggaauggaugcuucgaaaccaaacacaagugcaaccagaccugcuuagacaggauagcugcuggcacuuuuaaugcaggagaauuuucucuucccacuuuugauucacugaauauuacugcugcaucuuuaaaugaugauggauuggauaaccauacuauacugcucuacuacucaacugcugcuucuaguuuggcuguaacauugaugauagcuauuuuuauuguuuauauggucuccagagacaauguuucuugcuccaucugucuauaa

SEQ ID NO: 59884 - RNA, 1755 nt, Artificial Sequence
  derived and/or modified CDS sequence (wt) from hemagglutinin__InfluenzaB__AHL91255
augaaggcaauaauuguacuacucaugguaguaacauccaaugcagaucgaaucugcacugggauaacaucuucaaacucaccucauguggucaaaacagcuacucaaggggaggucaaugugacuggugugauaccacugacaacaacaccaacaaaaucucauuuugcaaaucucaaaggaacaaagaccagagggaaacuaugcccaaacugucucaacugcacagaucuggauguggccuugggcagaccaauguguguggggaccacaccuucggcaaaagcuucaauacuccacgaagucagaccuguuacauccgggugcuuuccuauaaugcacgacagaacaaaaaucagacagcuacccaaucuucucagaggauaugaaaauaucagauuaucaacccaaaacguuaucaaugcagaaaaggcaccaggaggacccuacagacuuggaaccucaggaucuugcccuaacgcuaccaguagaagcggauuuuucgcaacaauggcuugggcugucccaagggacaacaacaaaacagcaacgaauccacuaacaguagaaguaccauacguuuguacagaaggagaagaccaaauuacuguuuggggguuccauucugauaacaaaacccaaaugaaaaaccucuauggagacucaaauccucaaaaguucaccucaucugcuaauggaguaaccacacauuauguuucucagauuggcggcuucccagaucaaacagaagacggagggcuaccacaaagcggcagaauuguuguugauuacauggugcaaaaaccugggaaaacaggaacaauugucuaucaaagagguguuuuguugccucaaaagguguggugcgcgaguggcaggagcaaaguaauaaaaggguccuugccauuaauuggugaagcagauugccuucacgaaaaauacgguggauuaaacaaaagcaagccuuacuacacaggagaacaugcaaaagccauaggaaauugcccaauaugggugaaaacaccuuugaagcuugccaauggaaccaaauauagaccuccugcaaaacuauuaaaagaaagggguuucuucggagcuauugcugguuucuuagaaggaggaugggaaggaaugauugcagguuggcacggauacacaucucacggagcacauggaguggcaguggcagcagaccuuaagaguacgcaagaagccauaaacaagauaacaaaaaaucucaauucuuugagugagcuagaaguaaagaaucuucaaagacuaaguggugccauggaugaacuccacaacgaaauacucgagcuggaugagaaaguggaugaucucagagcugacacuauaagcucgcaaauagaacuugcagucuugcuuuccaacgaaggaauaauaaacagugaagaugagcaucuauuggcacuugagagaaaacuaaagaaaaugcugggucccucugcuguagacauagggaauggaugcuucgaaaccaaacacaagugcaaccagaccugcuuggacaggauagcugcuggcaccuuuaaugcaggagaauuuucucuccccacuuuugauucacugaauauuacugcugcaucuuuaaaugaugauggauuggauaaccauacuauacugcucuacuacucaacugcugcuucuaguuuggcuguaacauugaugauagcuauuuuuauuguuuauauggucuccagagacaauguuucaugcuccaucugucuauaa

SEQ ID NO: 59885 - RNA, 1755 nt, Artificial Sequence; identical to SEQ ID NO: 59884
  derived and/or modified CDS sequence (wt) from hemagglutinin__InfluenzaB__AHL91266

SEQ ID NO: 59886 - RNA, 1752 nt, Artificial Sequence
  derived and/or modified CDS sequence (wt) from hemagglutinin__InfluenzaB__AHL91277
augaaggcaauaauuguacuacucaugguaguaacauccaacgcagaucgaaucugcacugggauaacaucuucaaacucaccucauguggucaaaacagcuacucaaggggaagucaaugugacuggugugauaccacugacaacaacaccaacaaaaucucauuuugcaaaucucaaaggaacaaagaccagagggaaacuaugcccaaacugucucaacugcacagaucuggauguggccuugggcagaccaauguguauagggaucacaccuucggcaaaagcuucaauacuccacgaagucagaccuguuacauccgggugcuuuccuauaaugcacgacagaacaaaaaucagacagcuacccaaucuucucagaggauaugaacauaucagauuaucaacccauaacguuaucaacgcagaaagggcaccaggaggacccuacagacuuggaaccucaggaucuugcccuaacguuaccaguagaagcggauucuucgcaacaauggcuugggcugucccaagggacaacaaaacagcaacgaacccacuaacaguagaaguaccauacauuuguacaaaaggagaagaccaaauuacuguuuggggguuccauucugauaacaaaacccaaaugaaaaaccucuauggagacucaaauccucaaaaguucaccucaucugccaauggaauaaccacacauuauguuucucagauugguggcuucccaaaucaaacagaagacggagggcuaccacaaagcggcagaauuguuguugauuacauggugcaaaaaccugggaaaacaggaacaauugucuaucaaagagguguuuuguugccucaaaagguguggugugcaaguggcaggagcaagguaauaaaaggguccuugccuuuaauuggugaagcagauugccuucacgaaaaauacgguggauuaaacaaaagcaagccuuacuacacaggagaacaugcaaaagccauaggaaauugcccaauaugggugaaaacaccuuuaaagcuugccaauggaaccaaauauagaccucccgcaaaacuauuaaaggaaagggguuucuucggagcuauugcugguuucuuagaaggaggaugggaaggaaugauugcagguuggcacggauacacaucucauggagcacaugggguggcaguggcagcagaccuuaagaguacgcaagaagccauaaacaagauaacaaaaaaucucaauucuuugagugagcuagaagugaagaaucuucaaagacuaaguggugccauggaugaacuccacaacgaaauacucgagcuggaugagaaaguggaugaucucagagcugacacaauaagcucgcaaauagagcuugcagucuugcuuuccaaugaaggaauaauaaacagugaagaugagcaucuauuggcacuugagagaaaacuaaagaaaaugcugggucccucugcuguagacauagggaauggaugcuucgaaaccaaacacaagugcaaccagaccugcuuggacaggauagcugcuggcaccuuuaaugcaggagaauuuucucuucccacuuuugauucacugaauauuacugcugcaucuuuaaaugaugauggauuggauaaucauacuauacugcucuacuacucaacugcggcuucuaguuuggcuguaacauugaugauagcuauuuuuauuguuuauauggucuccagagacaauguuucuugcuccaucugucuauag

SEQ ID NO: 59887 - RNA, 1755 nt, Artificial Sequence
  derived and/or modified CDS sequence (wt) from hemagglutinin__InfluenzaB__AHL91299
augaaggcaauaauuguacuacucaugguaguaacauccaaugcagaucgaaucugcacugggauaacaucgucaaacucaccucauguggucaaaacagcuacucaaggggaggucaaugugacuggugugauaccacugacaacaacaccaacaagaucucauuuugcaaaucucaaaggaacaaagaccagagggaaacuaugcccaaccugucucaacugcacagaucuggauguggccuugggcagaccaauguguguggggaccacaccuucggcaaaagcuucaauacuccacgaagucagaccuguuacauccggaugcuuuccuauaaugcacgacagaacaaaaaucagacagcuacccaaucuucucagaggauaugaaaaaaucagauuaucaacccaaaacguuaucaacgcagaaaaggcaccaggaggacccuacagacuuggaaccucaggaucuugcccuaacgcuaccaguagaagcggauuuuucgcaacaauggcuugggcugucccaagggacaacaacaaaacagcaacgaauccacuaacaguagaaguaccauacaucuguacaaaagaagaagaccaaauuacuguuuggggguuccauucugauaacaaaacccaaaugaaaaaccucuauggagacucaaauccucaaaaguucaccucaucugcuaauggaguaaccacacauuauguuucucagauuggcggcuucccggaucaaacagaagacggagggcuaccacaaagcggcagaauuguuguugauuacauggugcaaaaaccugggaaaacaggaacaauugucuaucaaagagguauuuuguugccucaaaagguguggugcgcgaguggcaggagcaaaguaauaaaaggguccuugccuuuaauuggugaagcagauugccuucacgaaaaauacgguggauuaaacaaaagcaagccuuacuacacaggagaacaugcaaaagccauaggaaauugcccaauaugggugaaaacaccuuugaagcuugccaauggaaccaaauauagaccuccugcaaaacuauuaaaggaaagggguuucuucggagcuauugcugguuucuuagaaggaggaugggaaggaaugauugcagguuggcacggauacacaucucacggagcacauggaguggcaguggcagcagaccuuaagaguacgcaagaagccauaaacaagauaacaaaaaaucucaauucuuugagugagcuagaaguaaagaaucuucaaagacuaaguggugccauggaugaacuccacaacgaaauacucgagcuggaugagaaaguggaugaucucagagcugacacaauaagcucacaaauagaacuugcagucuugcuuuccaacgaaggaauaauaaacagugaagaugagcaucuauuggcacuugagagaaaacuaaagaaaaugcugggucccucugcuguagacauagggaauggaugcuucgaaaccaaacacaagugcaaccagaccugcuuagacaggauagcugcuggcaccuuuaaugcaggagaauuuucucuucccacuuuugauucacugaauauuacugcugcaucuuuaaaugaugauggauuggauaaccauacuauacugcucuacuacucaacugcugcuucuaguuuggcuguaacauugaugauagcuauuuuuauuguuuauaugaucuccagagacaauguuucuugcuccaucugucuauaa

SEQ ID NO: 59888 - RNA, 1755 nt, Artificial Sequence
  derived and/or modified CDS sequence (wt) from hemagglutinin__InfluenzaB__AHL91310
augaaggcaauaauuguacuacucaugguaguaacauccaaugcagaucgaaucugcacugggauaacaucgucaaacucaccucauguggucaaaacagcuacucaaggggaggucaaugugacuggugugauaccacugacaacaacaccaacaaaaucucauuuugcaaaucucaaaggaacaaagaccagagggaaacuaugcccaaccugucucaacugcacagaucuggauguggccuugggcagaccaauguguguggggaccacaccuucggcaaaagcuucaauacuccacgaagucagaccuguuacauccggaugcuuuccuauaaugcacgacagaacaaaaaucagacagcuacccaaucuucucagaggauaugaaaaaaucagauuaucaacccaaaacguuaucaacgcagaaaaggcaccaggaggacccuacagacuuggaaccucaggaucuugcccuaacgcuaccaguagaagcggauuuuucgcaacaauggcuugggcugucccaagggacaacaacaaaacagcaacgaauccacuaacaguagaaguaccauacaucuguacaaaagaagaagaccaaauuacuguuuggggguuccauucugauaacaaaacccaaaugaaaaaccucuauggagacucaaauccucaaaaguucaccucaucugcuaauggaguaaccacacauuauguuucucagauuggcggcuucccggaucaaacagaagacggagggcuaccacaaagcggcagaauuguuguugauuacauggugcaaaaaccugggaaaacaggaacaauugucuaucaaagagguauuuuguugccucaaaagguguggugcgcgaguggcaggagcaaaguaauaaaaggguccuugccuuuaauuggugaagcagauugccuucacgaaaaauacgguggauuaaacaaaagcaagccuuacuacacaggagaacaugcaaaagccauaggaaauugcccaauaugggugaaaacaccuuugaagcuugccaauggaaccaaauauagaccuccugcaaaacuauuaaaggaaagggguuucuucggagcuauugcugguuucuuagaaggaggaugggaaggaaugauugcagguuggcacggauacacaucucacggagcacauggaguggcaguggcagcagaucuuaagaguacgcaagaagccauaaacaagauaacaaaaaaucucaauucuuugagugagcuagaaguaaagaaucuucaaagacuaaguggugccauggaugaacuccacaacgaaauacucgagcuggaugagaaaguggaugaucucagagcugacacaauaagcucacaaauagaacuugcagucuugcuuuccaacgaaggaauaauaaacagugaagaugagcaucuauuggcacuugagagaaaacuaaagaaaaugcugggucccucugcuguagacauagggaauggaugcuucgaaaccaaacacaagugcaaccagaccugcuuagacaggauagcugcuggcaccuuuaaugcaggagaauuuucucuucccacuuuugauucacugaauauuacugcugcaucuuuaaaugaugauggauuggauaaccauacuauacugcucuacuacucaacugcugcuucuaguuuggcuguaacauugaugauagcuauuuuuauuguuuauaugaucuccagagacaauguuucuugcuccaucugucuauaa

SEQ ID NO: 59889 - RNA, 1755 nt, Artificial Sequence
  derived and/or modified CDS sequence (wt) from hemagglutinin__InfluenzaB__AHL91321
augaaggcaauaauuguacuacucaugguaguaacauccaaugcagaucgaaucugcacugggauaacaucgucaaacucaccucauguggucaaaacagcuacucaaggggaggucaaugugacugguguuauaccacugacaacaacaccaacaaaaucucauuuugcaaaucucaaaggaacaaagaccagagggaaacuaugcccaaccugucucaacugcacagaucuggauguggccuugggcagaccaauguguguggggaccacaccuucggcaaaagcuucaauacuccacgaagucagaccuguuacauccggaugcuuuccuauaaugcacgacagaacaaaaaucagacagcuacccaaucuucucagaggauaugaaaaaaucagauuaucaacccaaaacguuaucaacgcagaaaaggcaccaggaggacccuacaggcuuggaaccucaggaucuugcccuaacgcuaccaguagaagcggauuuuucgcaacaauggcuugggcugucccaagggacaacaacaaaacagcaacgaauccacuaacaguagaaguaccauacauuuguacaaaagaagaagaccaaauuacuguuuggggguuccauucugauaacaaaacccaaaugaaaaaccucuauggagacucaaauccucaaaaguucaccucaucugcuaauggaguaaccacacauuauguuucucagauuggcggcuucccggaucaaacagaagacggagggcuaccacaaagcggcagaauuguuguugauuacauggugcaaaaaccugggaaaacaggaacaauugucuaucaaagagguguuuuguugccucaaaagguguggugcgcgaguggcaggagcaaaguaauaaaaggguccuugccuuuaauuggugaagcagauugccuucacgaaaaauacgguggauuaaacaaaagcaagccuuacuacacaggagaacaugcaaaagccauaggaaauugcccaauaugggugaaaacaccuuugaagcuugccaauggaaccaaauauagaccuccugcaaaacuauuaaaggaaaaggguuucuucggagcuauugcugguuucuuagaaggaggaugggaaggaaugauugcagguuggcacggauacacaucucacggagcacauggaguggcaguggcagcagaccuuaagaguacgcaagaagccauaaacaagauaacaaaaaaucucaauucuuugagugagcuagaaguaaagaaucuucaaagacuaaguggugccauggaugaacuccacaacgaaauacucgagcuggaugagaaaguggaugaucucagagcugacacaauaaguucacaaauagaacuugcagucuugcuuuccaacgaaggaauaauaaacagugaagaugagcaucuauuggcacuugagagaaaacuaaagaaaaugcugggucccucugcuguagacauagggaauggaugcuucgaaaccaaacacaagugcaaccagaccugcuuagacaggauagcugcuggcaccuuuaaugcaggagaauuuucucuucccacuuuugauucacugaauauuacugcugcaucuuuaaaugaugauggauuggauaaccauacuauacugcucuacuacucaacugcugcuucuaguuuggcuguaacauugaugauagcuauuuuuauuguuuauauggucuccagagacaauguuucuugcuccaucugucuauaa

SEQ ID NO: 59890 - RNA, 1755 nt, Artificial Sequence
  derived and/or modified CDS sequence (wt) from hemagglutinin__InfluenzaB__AHL91332
augaaggcaauaauuguacuacucaugguaguaacauccaaugcagaucgaaucugcacugggauaacaucgucaaacucaccucauguggucaaaacagcuacucaaggggaggucaaugugacuggugugauaccacugacaacaacaccaacaaaaucucauuuugcaaaucucaaaggaacaaagaccagagggaaacuaugcccaaccugucucaacugcacagaucuggauguggccuugggcagaccaauguguguggggaccacaccuucggcaaaagcuucaauacuccacgaagucagaccuguuacauccggaugcuuuccuauaaugcacgacagaacaaaaaucagacagcuacccaaucuucucagaggauaugaaaaaaucagauuaucaacccaaaacguuaucaacgcagaaaaggcaccaggaggacccuacagacuuggaaccucaggaucuugcccuaacgcuaccaguagaagcggauuuuucgcaacaauggcuugggcugucccaagggacaacaacaaaacagcaacgaauccacuaacaguagaaguaccauacaucuguacaaaagaagaagaccaaauuacuguuuggggguuccauucugauaacaaaacccaaaugaaaaaccucuauggagacucaaauccucaaaaguucaccucaucugcuaauggaguaaccacacauuauguuucucagauuggcggcuucccggaucaaacagaagacggagggcuaccacaaagcggcagaauuguuguugauuacauggugcaaaaaccugggaaaacaggaacaauugucuaucaaagagguauuuuauugccucaaaagguguggugcgcgaguggcaggagcaaaguaauaaaaggguccuugccuuuaauuggugaagcagauugccuucacgaaaaauacgguggauuaaacaaaagcaagccuuacuacacaggagaacaugcaaaagccauaggaaauugcccaauaugggugaaaacaccuuugaagcuugccaauggaaccaaauauagaccuccugcaaaacuauuaaaggaaagggguuucuucggagcuauugcugguuucuuagaaggaggaugggaaggaaugauugcagguuggcacggauacacaucucacggagcacauggaguggcaguggcagcagaccuuaagaguacgcaagaagccauaaacaagauaacaaaaaaucucaauucuuugagugagcuagaaguaaagaaucuucaaagacuaaguggugccauggaugaacuccacaacgaaauacucgagcuggaugagaaaguggaugaucucagagcugacacaauaagcucacaaauagaacuugcagucuugcuuuccaacgaaggaauaauaaacagugaagaugagcaucuauuggcacuugagagaaaacuaaagaaaaugcugggucccucugcuguagacauagggaauggaugcuucgaaaccaaacacaagugcaaccagaccugcuuagacaggauagcugcuggcaccuuuaaugcaggagaauuuucucuucccacuuuugauucacugaauauuacugcugcaucuuuaaaugaugauggauuggauaaccacacuauacugcuuuacuacucaacugcugcuucuaguuuggcuguaacauugaugauagcuauuuuuauuguuuauaugaucuccagagacaauguuucuugcuccaucugucuauaa

SEQ ID NO: 59891 - RNA, 1755 nt, Artificial Sequence; identical to SEQ ID NO: 59890
  derived and/or modified CDS sequence (wt) from hemagglutinin__InfluenzaB__AHL91343

SEQ ID NO: 59892 - RNA, 1755 nt, Artificial Sequence; identical to SEQ ID NO: 59890
  derived and/or modified CDS sequence (wt) from hemagglutinin__InfluenzaB__AHL91354

SEQ ID NO: 59893 - RNA, 1755 nt, Artificial Sequence; identical to SEQ ID NO: 58491
  derived and/or modified CDS sequence (wt) from hemagglutinin__InfluenzaB__AHL91365

SEQ ID NO: 59894 - RNA, 1755 nt, Artificial Sequence
  derived and/or modified CDS sequence (wt) from hemagglutinin__InfluenzaB__AHL91376
augaaggcaauaauuguacuacucaugguaguaacauccaaugcagaucgaaucugcacugggauaacaucgucaaacucaccucauguggucaaaacagcuacucaaggggaggucaaugugacuggugugauaccacugacagcaacaccaacaaaaucucauuuugcaaaucucaaaggaacaaagaccagagggaaacuaugcccaaccugucucaacugcacagaucuggauguggccuuaggcagaccaaugugugugggggucacaccuucggcaaaagcuucaauacuccacgaagucagaccuguuacauccggaugcuuuccuauaaugcacgacagaacaaaaaucagacagcuacccaaucuucucagaggauaugaaaaaaucagauuaucaacucaaaacguuaucaacgcagaaaaggcaccaggaggacccuacagacuuggaaccucaggaucuugcccuaacgcuaccaguagaagcggauuuuucgcaacaauggcuugggcugucccaagggacaacaacaaaacagcaacgaauccacuaacaguagaaguaccacacaucuguacaaaagaagaagaccaaauuacuguuuggggguuccauucugauaacaaaacccaaaugaaaaaccucuauggagacucaaauccucaaaaguucaccucaucugcuaauggaguaaccacacauuauguuucucagauuggcggcuucccggaucaaacagaagacggagggcuaccacaaagcggcagaauuguuguugauuacauggugcaaaaaccugggaaaacaggaacaauugucuaucaaagagguauuuuguugccucaaaagguguggugcgcgaguggcaggagcaaaguaauaaaaggguccuugccuuuaauuggugaagcagauugccuccacgaaaaauacgguggauuaaacaaaagcaagccuuacuacacaggagaacaugcaaaagccauaggaaauugcccaauaugggugaaaacaccuuugaagcuugccaauggaaccaaauauagaccuccugcaaaacuauuaaaggaaagggguuucuucggagcuauugcugguuucuuagaaggaggaugggaaggaaugauugcagguuggcacggauacacaucucacggagcacauggaguggcaguggcagcagaccuuaagaguacgcaagaagccauaaacaagauaacaaaaaaucucaauucuuugagugagcuagaaguaaagaaucuucaaagacuaaguggugccauggaugaacuccacaacgaaauacucgagcuggaugagaaaguggaugaucucagagcugacacaauaagcucacaaauagaacuugcagucuugcuuuccaacgaaggaauaauaaacagugaagaugagcaucuauuggcacuugagagaaaacuaaagaaaaugcugggucccucugcuguagacauagggaauggaugcuucgaaaccaaacacaagugcaaccagaccugcuuagacaggauagcugcuggcaccuuuaaugcaggagaauuuucucuucccacuuuugauucacugaauauuacugcugcaucuuuaaaugaugauggauuggauaaccauacuauacugcucuacuacucaacugcugcuucuaguuuggcuguaacauugaugauagcuauuuuuauuguuuauaugaucuccagagacaauguuucuugcuccaucugucuauaa

SEQ ID NO: 59895 - RNA, 1755 nt, Artificial Sequence
  derived and/or modified CDS sequence (wt) from hemagglutinin__InfluenzaB__AHL91387
augaaggcaauaauuguacuacucaugguaguaacauccaaugcagaucgaaucugcacugggauaacaucgucaaacucaccucauguggucaaaacagcuacucaaggggaggucaaugugacuggugugauaccacugacaacaacaccagcaaaaucucauuuugcaaaucucaaaggaacaaagaccagagggaaacuaugcccaacuugucucaacugcacagaucuggauguggccuuaggcagaccaaugugugugggggucacaccuucggcaaaagcuucaauacuccacgaagucagaccuguuacauccggaugcuuuccuauaaugcacgacagaacaaaaaucagacagcuacccaaucuucucagaggauaugaaaaaaucagauuaucaacccaaaacguuaucaacgcagaaaaggcaccaggaggacccuacagacuuggaaccucaggaucuugcccuaacgcuaccaguagaagcggauuuuucgcaacaauggcuugggcuguuccaagggacaacaacaaaacagcaacgaauccacuaacaguagaaguaccacacaucuguacaaaagaagaagaccaaauuacuguuuggggguuccauucugauaacaaaacccaaaugaaaaaccucuauggagacucaaauccucaaaaguucaccucaucugcuaauggaguaaccacacauuauguuucucagauugguggcuucccggaucaaacagaagauggagggcuaccacaaagcggcagaauuguuguugauuacauggugcaaaaaccugggaaaacaggaacaauugucuaucaaagagguauuuuguugccucaaaagguguggugcgcgaguggcaggagcaaaguaauaaaaggguccuugccuuuaauuggugaagcagauugccuucacgaaaaauacgguggauuaaacaaaagcaagccuuacuacacaggagaacaugcaaaagccauaggaaauugcccaauaugggugaaaacaccuuugaagcuugccaauggaaccaaauauagaccaccugcaaaacuauuaaaggaaagggguuucuucggagcuauugcugguuucuuagaagggggaugggaaggaaugauugcagguuggcacggauacacaucucacggagcacauggaguggcaguggcagcagaccuuaagaguacgcaagaagccauaaacaagauaacaaaaaaucucaauucuuugagcgagcuagaaguaaagaaucuucaaagacuaaguggugccauggaugaacuccacaacgaaauacucgagcuggaugagaaaguggaugaucucagagcugacacaauaagcucacaaauagaacuugcagucuugcuuuccaacgaaggaauaauaaacagugaagaugagcaucuauuggcacuugagagaaaacuaaagaaaaugcugggucccucugcuguagacauagggaauggaugcuucgaaaccaaacacaagugcaaccagaccugcuuagacaggauagcugcuggcaccuuuaaugcaggagaauuuucucuucccacuuuugauucacugaauauuacugcugcaucuuuaaaugaugauggauuggauaaccauacuauacugcucuacuacucaacugcugcuucuaguuuggcuguaacauugaugauagcuauuuuuauuguuuauaugaucuccagagacaauguuucuugcuccaucugucuauaa

SEQ ID NO: 59896 - RNA, 1755 nt, Artificial Sequence
  derived and/or modified CDS sequence (wt) from hemagglutinin__InfluenzaB__AHL91409
augaaggcaauaauuguacuacucaugguaguaacauccaaugcagaucgaaucugcacugggauaacaucgucagacucaccucauguggucaaaacagcuacucaaggggaggucaaugugacuggugcgauaccacugacaacaacaccaacaaaaucuuauuuugcaaaucucaaaggaacaaagaccagagggaaacuaugcccaaccugucucaacugcacagaucuggauguggccuugggcagaccaauguguguggggaucacaccuucggcaaaagcuucaauacuccacgaagucagaccuguuacauccggaugcuuuccuauaaugcacgacagaacaaaaaucagacagcuacccaaucuucucagaggauaugaaaaaaucagauuaucaacccaaaacguuaucaacgcagaaaaggcaccaggaggacccuacagacuuggaacuucaggaucuugcccuaacgcuaccaguagaagcggauuuuucgcaacaauggcuugggcugucccaagggacaacaacaaaacagcaacgaauccacuaacaguagaaguaccacacaucuguacaaaagaagaagaccaaauuacuguuuggggguuccauucugauaacaaaacccaaaugaaaaaccucuauggagacucaaauccucaaaaguucaccucaucugcuaauggaauaaccacacauuauguuucucagauuggcggcuucccggaucaaacagaagacggagggcuaccacaaagcggcagaauuguuguugauuacauggugcaaaaaccugggaaaacaggaacaauugucuaucaaagagggauuuuguugccucaaaagguguggugcgcgaguggcaggagcaaaguaauaaaaggguccuugccuuuaauuggugaagcagauugccuucacgaaaaauacgguggauuaaacaaaagcaagccuuacuacacaggagaacaugcaaaagccauaggaaauugcccaauaugggugaaaacaccuuugaagcuugccaauggaaccaaauauagaccuccugcaaaacuauuaaaggaaagggguuucuucggagcuauugcugguuucuuagaaggaggaugggaaggaaugguugcagguuggcacggauacacaucucacggagcacauggaguggcaguggcagcagaccuuaagaguacgcaagaagccauaaacaagauaacaaaaaaucucaauucuuugagugagcuagaaguaaagaaucuucaaagacuaaguggugccauggaugaacuccauaacgaaauacucgagcuggaugagaaaguggaugaucucagagcugacacaauaagcucacaaauagaacuugcagucuugcuuuccaacgaaggaauaauaaacagugaagaugagcaucuauuggcacuugagagaaaacuaaagaaaaugcugggucccucugcuguggacauagggaauggaugcuucgaaaccaaacacaagugcaaccagaccugcuuagacaggauagcugcuggcaccuuuaaugcaggagaauuuucucuucccacuuuugauucacugaacauuacugcugcaucuuuaaaugaugauggauuggauaaccauacuauacugcucuacuacucaacugcugcuucuaguuuggcuguaacauugaugauagcuauuuuuauuguuuauaugaucuccagagacaauguuucuugcuccaucugucuauaa

SEQ ID NO: 59897 - RNA, 1755 nt, Artificial Sequence
  derived and/or modified CDS sequence (wt) from hemagglutinin__InfluenzaB__AHL91431
augaaggcaauaauuguacuacucaugguaguaacauccaaugcagaucgaaucugcacugggauaacaucgucaaacucaccucauguggucaaaacagcuacucaaggggaggucaaugugacuggugcgauaccacugacaacaacaccaacaaaaucucauuuugcaaaucucaaaggaacaaagaccagagggaaacuaugcccaaccugucucaacugcacagaucuggauguggccuugggcagaccaauguguguggggaucacaccuucggcaaaagcuucaauacuccacgaagucagaccuguuacauccggaugcuuuccuauaaugcacgacagaacaaaaaucagacagcuacccaaucuucucagaggauaugaaaaaaucagauuaucaacccaaaacguuaucaacgcagaaaaggcaccaggaggacccuacagacuuggaacuucaggaucuugcccuaacgcuaccaguaaaagcggauuuuucgcaacaauggcuugggcugucccaagggacaacaacaaaacagcaacgaauccacuaacaguagaaguaccacacaucuguacaaaagaagaagaccaaauuacuguuuggggguuccauucugauaacaaaacccaaaugaaaaaccucuauggagacucaaauccucaaaaguucaccucaucugcuaauggaauaaccacacauuauguuucucagauugggggcuucccggaccaaacagaagacggagggcuaccacaaagcggcagaauuguuguugauuacauggugcaaaaaccugggaaaacaggaacaauugucuaucaaagagggauuuuguugccucaaaagguguggugcgcgaguggcaggagcaaaguaauaaaaggguccuugccuuuaauuggugaagcugauugccuucacgaaaaauacgguggauuaaacaaaagcaagccuuacuacacaggagaacaugcaaaagccauagggaauugcccaauaugggugaaaacaccuuugaagcuugccaauggaaccaaauauagaccuccugcaaaacuauuaaaggaaagggguuucuucggagcuauugcugguuucuuagaaggaggaugggaaggaaugauugcagguuggcacggauacacaucucacggagcacacggaguggcaguggcagcagaccuuaagaguacgcaagaagccauaaacaagauaacaaaaaaucucaauuuuuugagugagcuagaaguaaagaaccuucaaagacuaaguggugccauggaugaacuccauaacgaaauacucgagcuggaugagaaaguggaugaucucagagcugacacaauaaguucacaaauagaacuugcagucuugcuuuccaacgaaggaauaauaaacagugaagaugagcaucuauuggcacuugagagaaaacuaaagaaaaugcugggucccucugcuguagacauagggaauggaugcuucgaaaccaaacacaagugcaaccagaccugcuuagacaggauagcugcuggcaccuuuaaugcaggagaauuuucucuucccacuuuugauucacugaacauuacugcugcaucuuuaaaugaugauggauuggauaaccauacuauacugcucuacuacucaacugcugcuucuaguuuggcuguaacauugaugauagcuauuuuuauuguuuauaugaucuccagagacaauguuucuugcuccaucugucuauaa

SEQ ID NO: 59898 - RNA, 1755 nt, Artificial Sequence
  derived and/or modified CDS sequence (wt) from hemagglutinin__InfluenzaB__AHL91442
augaaggcaauaauuguacuacucaugguaguaacauccaaugcagaucgaaucugcacugggauaacaucgucaaacucaccucauguggucaaaacagcuacucaaggggaggucaaugugacuggugcgauaccacugacaacaacaccaacaaaaucucauuuugcaaaucucaaaggaacaaagaccagaggaaagcuaugcccaaccugucucaacugcacagaucuggauguggccuugggcagaccaauguguguggggaucacaccuucggcaaaagcuucaauacuccacgaagucagaccuguuacauccggaugcuuuccuauaaugcacgacagaacaaaaaucagacagcuacccaaucuucucagaggauaugaaaaaaucagauuaucaacccaaaacguuaucaacgcagaaacggcaccaggaggacccuacagacuuggaacuucaggaucuugcccuaacgcuaccaguaaaagcggauuuuucgcaacaauggcuugggcugucccaagggacaacaacaaaacagcaacgaauccacuaacgguagaaguaccacacaucuguacaaaagaagaagaccaaauuacuguuuggggguuccauucugauaacaaaacccaaaugaaaaaccucuauggagacucaaauccucaaaaguucaccucaucagcuaaugggauaaccacacauuauguuucucagauuggcggcuucccggaccaaacagaagacggagggcuaccacaaagcggcagaauuguuguugauuacauggugcaaaaaccugggaaaacaggaacaauugucuaucaaagagggauuuuguugccucaaaagguguggugcgcgaguggcaggagcaaaguaauaaaaggguccuugccuuuaauuggugaagcagauugccuucacgaaaaauacgguggauugaacaaaagcaagccuuacuacacaggagaacaugcaaaagccauaggaaauugcccaauaugggugaaaacaccuuugaagcuugccaauggaaccaaauauagaccuccugcaaaacuauuaaaggaaagggguuucuucggagcuauugcugguuucuuagaaggaggaugggaaggaaugauugcagguuggcacggauacacaucucacggagcacauggaguggcaguggcagcagaccuuaagaguacgcaagaagccauaaacaaaauaacaaaaaaucucaauucuuugagugagcuagaaguaaagaaccuucaaagacuaaguggugccauggaugaacuccauaacgaaauacucgagcuggaugagaaaguggaugaucucagggcugacacaauaagcucacaaauagaacuugcagucuugcuuuccaacgaaggaauaauaaacagugaagaugagcaucuauuggcacuugagagaaaacuaaagaaaaugcugggucccucugcuguagacauagggaauggaugcuucgaaaccaaacacaagugcaaccagaccugcuuagacaggauagcugcuggcaccuuuaaugcaggagaauuuucucuucccacuuuugauucacugaacauuacugcugcaucuuuaaaugaugauggauuggauaaccauacuauacugcucuacuacucaacugcugcuucuaguuuggcuguaacauugaugauagcuauuuuuauuguuuauaugaucuccagagacaauguuucuugcuccaucugucuauaa

SEQ ID NO: 59899 - RNA, 1755 nt, Artificial Sequence
  derived and/or modified CDS sequence (wt) from hemagglutinin__InfluenzaB__AHL91453
augaaggcaauaauuguacuacucaugguaguaacauccaaugcagaucgaaucugcacugggauaacaucgucaaacucaccucauguggucaaaacagcuacucaaggggaggucaaugugacuggugcgauaccacugacaacaacaccaacaaaaucucauuuugcaaaucucaaaggaacaaagaccagagggaaacuaugcccaaccugucucaacugcacagaucuggauguggccuugggcagaccaauguguguggggaucacaccuucggcaaaagcuucaauacuccacgaagucagaccuguuacauccggaugcuuuccuauaaugcacgacagaacaaaaaucagacaguuacccaaucuucucagaggauaugaaaaaaucagauuaucaacccaaaacguuaucaacgcagaaaaggcaccaggaggacccuacagacuuggaacuucaggaucuugcccuaacgcuaccaguaaaagcggauuuuucgcaacaauggcuugggcugucccaagggacaacaacaaaacagcaacgaauccacuaacaauagaaguaccacacgucuguacaaaagaagaagaccaaauuacuguuuggggguuccauucugauaacaaaacccaaaugaaaaaccucuauggagacucaaauccucaaaaguucaccucgucugcuaauggaauaaccacacauuauguuucucagauugggggcuucccggaccaaacagaagacggagggcuaccacaaagcggcagaauuguuguugauuacauggugcaaaaaccugggaaaacaggaacaauugucuaucaaagagggauuuuguugccucaaaagguguggugcgcgaguggcaggagcaaaguaauaaaaggguccuugccuuuaauuggugaagcagauugccuucacgaaaaauacgguggauuaaacaaaagcaagccuuacuacacaggagaacaugcaaaagccauagggaauugcccaauaugggugaaaacaccuuugaagcuugccaauggaaccaaauauagaccuccggcaaaacuauuaaaggaaagggguuucuucggagcuauugcugguuucuuagaaggaggaugggaaggaaugauugcagguuggcacggauacacaucucacggagcacacggaguggcaguggcagcagaccuuaagaguacgcaagaagccauaaacaagauaacaaaaaaucucaauucuuugagugagcuagaaguaaagaaccuucaaagacuaaguggugccauggaugaacuccauaacgaaauacucgagcuggaugagaaaguggaugaucucagagcugacacaauaagcucacaaauagaacuugcagucuugcuuuccaacgaaggaauaauaaacagugaagaugagcaucuauuggcacuugagagaaaacuaaagaaaaugcugggucccucugcuguagacauagggaauggaugcuucgaaaccaaacacaagugcaaccagaccugcuuagacaggauagcugcuggcaccuuuaaugcaggagaauuuucucuucccacuuuugauucacugaacauuacugcugcaucuuuaaaugaugauggauuggauaaccauacuauacugcucuacuacucaacugcugcuucuaguuuggcuguaacauugaugauagcuauuuuuauuguuuauaugaucuccagagacaauguuucuugcuccaucugucuauaa

SEQ ID NO: 59900 - RNA, 1755 nt, Artificial Sequence
  derived and/or modified CDS sequence (wt) from hemagglutinin__InfluenzaB__AHL91464
augaaggcaauaauuguacuacucaugguaguaacauccaaugcagaucgaaucugcacugggauaacaucgucaaacucaccucauguggucaaaacagcuacucaaggggaggucaaugugacuggugcgauaccacugacaacaacaccaacaaaaucucauuuugcaaaucucaaaggaacaaagaccagagggaaacuaugcccaaccugucucaacugcacagauuuggauguggccuugggcagaccaauguguguggggaucacaccuucggcaaaagcuucaauacuccaugaagucagaccuguuacauccggaugcuuuccuauaaugcacgacagaacaaaaaucagacagcuacccaaucuucucagaggauaugaaaaaaucagauuaucaacacaaaacguuaucaacgcagaaaaggcaccaggaggacccuacagacuuggaacuucaggaucuugcccuaacgcuaccaguaaaagcggauuuuucgcaacaauggcuugggcugucccaagggacaacaacaaaacagcaacgaauccacuaacaguagaaguaccacacaucuguacaaaagaagaagaccaaauuacuguuuggggguuccauucugauaacaaaacccaaaugaaaaaccucuauggagacucaaauccccaaaaguucaccucaucugcuaauggaauaaccacacauuauguuucucagaucggcggcuucccggaccaaacagaagacggaggccuaccacaaagcggcagaauuguuguugauuacauggugcaaaaaccugggaaaacaggaacaauugucuaucaaagagggauuuuguugccucaaaagguguggugcgcgaguggcaggagcaaaguaauaaaaggguccuugccuuuaauuggugaagcagauugccuucacgaaaaauacgguggauuaaacaaaagcaagccuuacuacacaggagaacaugcaaaagccauagggaauugcccaauaugggugaaaacaccuuugaagcuugccaauggaaccaaauauagaccuccugcaaaacuauuaaaggaaagggguuucuucggagcuauugcugguuucuuagaaggaggaugggaaggaaugauugcagguuggcacggguacacaucucacggagcacacggaguggcaguggcagcagaccuuaagaguacgcaagaagccauaaacaagauaacaaaaaaucucaauucuuugagugagcuagaaguaaagaaccuucaaagacuaaguggugccauggaugaacuccauaacgaaauacucgagcuggaugagaaaguggaugaucucagagcugacacaauaagcucacaaauagaacuugcagucuugcuuuccaacgaaggaauaauaaacagugaagaugagcaucuauuggcacuugagagaaaacuaaagaaaaugcugggucccucugcuguagacauagggaauggaugcuucgaaaccaaacacaagugcaaccagaccugcuuagacaggauagcugcuggcaccuuuaaugcaggagaauuuucucuucccacuuuugauucacugaacauuacugcugcaucuuuaaaugaugauggauuggauaaccauacuauacugcucuacuacucaacugcugcuucuaguuuggcuguaacauugaugauagcuauuuuuauuguuuauaugaucuccagagacaauguuucuugcuccaucugucuauaa

SEQ ID NO: 59901 - RNA, 1755 nt, Artificial Sequence
  derived and/or modified CDS sequence (wt) from hemagglutinin__InfluenzaB__AHL91475
augaaggcaauaauuguacuacucaugguaguaacauccaaugcagaucgaaucugcacugggauaacaucgucaaacucaccucauguggucaaaacagcuacucaaggggaggucaaugugacuggugcgaucccacugacaacaacaccaacaaaaucucauuuugcaaaucucaaaggaacaaagaccagagggaaacuaugcccaaccuguuucaacugcaccgaucuggauguggccuugggcagaccaauguguguggggaucacaccuucggcaaaagcuucaauacuccacgaagucagaccuguuacauccggaugcuuuccuauaaugcacgacagaacaaaaaucagacagcuacccaaucuucucagaggauaugaaaaaaucagauuaucaacccaaaacguuaucgacgcagaaaaggcaccaggaggacccuacagacuuggaacuucaggaucuugcccuaacgcuaccaguaaaagcggauuuuucgcaacaauggcuugggcugucccaagggacaacaacaaaacagcaacgaauccacuaacaguagaagugccacacaucuguacaaaagaagaagaccaaauuacuguuuggggguuccauucugauaacaaaacccaaaugaaaaaccucuauggagacucaaauccucaaaaguucaccucaucugcuaauggaauaaccacacauuauguuucucagauugggggcuucccggaccaaacagaagacggagggcuaccacaaagcggcagaauuguuguugauuacauggugcaaaaaccugggaaaacaggaacaauugucuaucaaagagggauuuuguugccucaaaagguguggugcgcgaguggcaggagcaaaguaauaaaaggguccuugccuuuaauuggugaagcugauugccuucacgaaaaauacgguggauuaaacaaaagcaagccuuacuacacaggagaacaugcaaaagccauagggaauugcccaauaugggugaaaacaccuuugaagcuugccaauggaaccaaauauagaccuccugcaaaauuauuaaaggaaagggguuucuuuggagcuauugcugguuucuuagaaggaggaugggaaggaaugauugcagguuggcacggauacacaucucacggagcacacggaguggcaguggcagcagaccuuaagaguacgcaagaagccauaaacaagauaacaaaaaaucucaauucuuugagugagcuagaaguaaagaaccuucaaagacuaaguggugccauggaugaacuccauaacgaaauacucgagcuggaugagaaaguggaugaucucagagcugacacaauaaguucacaaauagaacuugcagucuugcuuuccaaugaaggaauaauaaacagugaagaugagcaucuauuggcacuugagagaaaacuaaagaaaaugcugggucccucugcuguagacauagggaauggaugcuucgaaaccaaacacaagugcaaccagaccugcuuagacaggauagcugcuggcaccuuuaaugcaggagaauuuucucuucccacuuuugauucacugaacauuacugcugcaucuuuaaaugaugauggauuggauaaccauacuauacugcucuacuacucaacugcugcuucuaguuuggcuguaacauugaugauagcuauuuuuauuguuuauaugaucuccagagacaauguuucuugcuccaucugucuauaa

SEQ ID NO: 59902 - RNA, 1755 nt, Artificial Sequence; identical to SEQ ID NO: 59898
  derived and/or modified CDS sequence (wt) from hemagglutinin__InfluenzaB__AHL91486

SEQ ID NO: 59903 - RNA, 1755 nt, Artificial Sequence; identical to SEQ ID NO: 59898
  derived and/or modified CDS sequence (wt) from hemagglutinin__InfluenzaB__AHL91497

SEQ ID NO: 59904 - RNA, 1755 nt, Artificial Sequence; identical to SEQ ID NO: 59898
  derived and/or modified CDS sequence (wt) from hemagglutinin__InfluenzaB__AHL91530

SEQ ID NO: 59905 - RNA, 1755 nt, Artificial Sequence
  derived and/or modified CDS sequence (wt) from hemagglutinin__InfluenzaB__AHL91541
augaaggcaauaauuguacuacucaugguaguaacauccaaugcagaucgaaucugcacugggauaacaucgucaaacucaccucauguggucaaaacagcuacucaaggggaggucaaugugacuggugcgauaccacugacaacaacaccaacaaaaucucauuuugcaaaucucaaaggaacaaagaccagagggaaacuaugcccaaccugucucaacugcacagaucuggauguggccuugggcagaccaauguguguggggaucacaccuucggcaaaagcuucaauacuccacgaagucagaccuguuacauccggaugcuuuccuauaaugcacgacagaacaaaaaucagacagcuacccaaucuucucagaggauaugaaaaaaucagauuaucaacccaaaacguuaucaacgcagaaaaggcaccaggaggacccuacagacuuggaacuucaggaucuugcccuaacgcuaccaguaaaagcggauuuuucgcaacaauggcuugggcugucccaagggacaacaacaaaacagcaacgaauccacuaacaguagaaguaccacacaucuguacaaaagaagaagaccaaauuacuguuuggggguuccauucugauaacaaaacccaaaugaaaaaccucuauggagacucaaauccucaaaaguucaccucaucugcuaauggaauaaccacacauuauguuucucagauugggggcuucccggaccaaacagaagacggagggcuaccacaaagcggcagaauuguuguugauuacauggugcaaaaaccugggaaaacaggaacaauugucuaucaaagagggauuuuguugccucaaaagguguggugcgcgaguggcaggagcaaaguaauaaaaggguccuugccuuuaauuggugaagcugauugccuucacgaaaaauacgguggauuaaacaaaagcaagccuuacuacacaggagaacaugcaaaagccauagggaauugcccaauaugggugaaaacaccuuugaagcuugccaauggaaccaaauauagaccuccugcaaaacuauuaaaggaaagggguuucuucggagcuauugcugguuucuuagaaggaggaugggaaggaaugauugcagguuggcacggauacacaucucacggagcacacggaguggcaguggcagcagaccuuaagaguacgcaagaagccauaaacaagauaacaaaaaaucucaauucuuugagugagcuagaaguaaagaaccuucaaagacuaaguggugccauggaugaacuccauaacgaaauacucgagcuggaugagaaaguggaugaucucagagcugacacaauaaguucacaaauagaacuugcagucuugcuuuccaacgaaggaauaauaaacagugaagaugagcaucuauuggcacuugagagaaaacuaaagaaaaugcugggucccucugcuguagacauagggaauggaugcuucgaaaccaaacacaagugcaaccagaccugcuuagacaggauagcugcuggcaccuuuaaugcaggagaauuuucucuucccacuuuugauucacugaacauuacugcugcaucuuuaaaugaugauggauuggauaaccauacuauacugcucuacuacucaacugcugcuucuaguuuggcuguaacauugaugauagcuauuuuuauuguuuauaugaucuccagagacaauguuucuugcuccaucugucuauaa

SEQ ID NO: 59906 - RNA, 1755 nt, Artificial Sequence; identical to SEQ ID NO: 59898
  derived and/or modified CDS sequence (wt) from hemagglutinin__InfluenzaB__AHL91552

SEQ ID NO: 59907 - RNA, 1755 nt, Artificial Sequence
  derived and/or modified CDS sequence (wt) from hemagglutinin__InfluenzaB__AHL91574
augaaggcaauaauuguacuacucaugguaguaacauccaaugcagaucgaaucugcacugggauaacaucgucaaacucaccucauguggucaaaacagcuacucaaggggaggucaaugugacuggugcgauaccacugacaacaacaccaacaaaaucucauuuugcaaaucucaaaggaacaaagaccagaggaaagcuaugcccaaccugucucaacugcacagaucuggauguggccuugggcagaccaauguguguggggaucacaccuucggcaaaagcuucaauacuccacgaagucagaccuguuacauccggaugcuuuccuauaaugcacgacagaacaaaaaucagacagcuacccaaucuucucagaggauaugaaaaaaucagauuaucaacccaaaacguuaucaacgcagaaacggcaccaggaggacccuacagacuuggaacuucaggaucuugcccuaacgcuaccaguaaaagcggauuuuucgcaacaauggcuugggcugucccaagggacaacaacaaaacagcaacgaauccacuaacgguagaaguaccacacaucuguacaaaagaagaagaccaaauuacuguuuggggguuccauucugauaacaaaacccaaaugaaaaaccucuauggagacucaaauccucaaaaguucaccucaucagcuaaugggauaaccacacauuauguuucucagauuggcggcuucccggaccaaacagaagacggagggcuaccacaaagcggcagaauuguuguugauuacauggugcaaaaaccugggaaaacaggaacaauugucuaucaaagagggauuuuguugccucaaaagguguggugcgcgaguggcaggagcaaaguaauaaaaggguccuugccuuuaauuggugaagcagauugccuucacgaaaaauacgguggauugaacaaaagcaagccuuacuacacaggagaacaugcaaaagccauaggaaauugcccaauaugggugaaaacaccuuugaagcuugccaauggaaccaaauauagaccuccugcaaaacuauuaaaggaaagggguuucuucggagcuauugcugguuucuuagaaggaggaugggaaggaaugauugcagguuggcacggauacacaucucacggagcacauggaguggcaguggcagcagaccuuaagaguacgcaagaagccauaaacaaaauaacaaaaaaucucaauucuuugagugagcuagaaguaaagaaccuucaaagacuaaguggugccauggaugaacuccauaacgaaauacucgagcuggaugagaaaguggaugaucucagggcugacacaauaagcucacaaauagaacuugcagucuugcuuuccaacgaaggaauaauaaacagugaagaugagcaucuauuggcacuugagagaaaacuaaagaaaaugcugggucccucugcuguagacauagggaauggaugcuucgaaaccaaacacaagugcaaccagaccugcuuagacaggauagcugcuggcaccuuuaaugcaggggaauuuucucuucccacuuuugauucacugaacauuacugcugcaucuuuaaaugaugauggauuggauaaccauacuauacugcucuacuacucaacugcugcuucuaguuuggcuguaacauugaugauagcuauuuuuauuguuuauaugaucuccagagacaauguuucuugcuccaucugucuauaa

SEQ ID NO: 59908 - RNA, 1755 nt, Artificial Sequence
  derived and/or modified CDS sequence (wt) from hemagglutinin__InfluenzaB__AHL91585
augaaggcaauaauuguacuacucaugguaguaacauccaaugcagaucgaaucugcacugggauaacaucgucaaacucaccucauguggucaaaacagcuacucaaggggaggucaaugugacuggugcgauaccacugacaacaacaccaacaaaaucucauuuugcaaaucucaaaggaacaaagaccagagggaaacuaugcccaaccugucucaacugcacagaucuggauguggccuugggcagaccaauguguguggggaucacaccuucggcaaaagcuucaauacuccacgaagucagaccuguuacauccggaugcuuuccuauaaugcacgacagaacaaaaaucagacagcuacccaaucuucucagaggauaugaaaaaaucagauuaucaacccaaaacguuaucaacgcagaaaaggcaccaggaggacccuacagacuuggaacuucaggaucuugcccuaacgcuaccaguaaaagcggauuuuucgcaacaauggcuugggcuguuccaagggacaacaacaaaacagcaacgaauccacuaacaguagaaguaccacacaucuguacaaaagaagaagaccaaauuacuguuuggggguuccauucugauaacaaaacccaaaugaaaaaccucuauggagacucaaauccucaaaaguucaccucaucugcuaauggaaugaccacacauuauguuucucagauugggggcuucccggaccaaacagaagacggagggcuaccacaaagcggcagaauuguuguugauuacauggugcaaaaaccugggaaaacaggaacaauugucuaucaaagagggauuuuguugccucaaaagguguggugcgcgaguggcaggagcaaaguaauaaaaggguccuugccuuuaauuggugaagcugauugccuucacgaaaaauacgguggauuaaacaaaagcaagccuuacuacacaggagaacaugcaaaagccauagggaauugcccaauaugggugaaaacaccuuugaagcuugccaauggaaccaaauauagaccuccugcaaaacuauuaaaggaaagggguuucuucggagcuauugcugguuucuuagaaggaggaugggaaggaaugauugcagguuggcacggauacacaucucacggagcacacggaguggcaguggcagcagaccuuaagaguacgcaagaagccauaaacaagauaacaaaaaaucucaauucuuugagugagcuagaaguaaagaaccuucaaagacuaaguggugccauggaugaacuccauaacgaaauacucgagcuggaugagaaaguggaugaucucagagcugacacaauaaguucacaaauagaacuugcagucuugcuuuccaacgaaggaauaauaaacagugaagaugagcaucuguuggcacuugagagaaaacuaaagaaaaugcugggucccucugcuguagacauagggaauggaugcuucgaaaccaaacacaagugcaaccagaccugcuuagacaggauagcugcuggcaccuuuaaugcaggagaauuuucucuucccacuuuugauucacugaacauuacugcugcaucuuuaaaugaugauggauuggauaaccauacuauacugcucuacuacucaacugcugcuucuaguuuggcuguaacauugaugauagcuauuuuuauuguuuauaugaucuccagagacaauguuucuugcuccaucugucuauaa

SEQ ID NO: 59909 - RNA, 1755 nt, Artificial Sequence
  derived and/or modified CDS sequence (wt) from hemagglutinin__InfluenzaB__AHL91596
augaaggcaauaauuguacuacucaugguaguaacauccaaugcagaucgaaucugcacugggauaacaucgucaaacucaccucauguggucaaaacagcuacucaaggggaggucaaugugacuggugcgauaccacugacaacaacaccaacaaaaucucauuuugcaaaucucaaaggaacaaagaccagagggaaacuaugcccaaccugucucaacugcacagaucuggauguggccuugggcagaccaauguguguggggaucacaccuucggcaaaagcuucaauacuccacgaagucagaccuguuacauccggaugcuuuccuauaaugcacgacagaacaaaaaucagacagcuacccaaucuucucagaggauaugaaaaaaucagauuaucaacccaaaacguuaucaacgcagaaaaggcaccaggaggacccuacagacuuggaacuucaggaucuuguccuaacgcuaccaguaaaagcggauuuuucgcaacaauggcuugggcugucccaagggacaacaacaaaacagcaacgaauccacuaacaguagaaguaccacacaucuguacaaaagaagaagaccaaauuacuguuuggggguuccauucugauaacaaaacccaaaugaaaaaccucuauggagacucaaauccucaaaaguucaccucaucugcuaauggaauaaccacacauuauguuucucagauugggggcuucccggaccaaacagaagacggagggcuaccacaaagcggcagaauuguuguugauuacauggugcaaaaaccugggaaaacaggaacaauugucuaucaaagagggauuuuauugccucaaaagguguggugcgcgaguggcaggagcaaaguaauaaaaggguccuugccuuuaauuggugaagcagauugccuucacgaaaaauacgguggauuaaacaaaagcaagccuuacuacacaggagaacaugcaaaagccauagggaauugcccaauaugggugaaaacaccuuugaagcuugccaauggaaccaaauauagaccuccugcaaaaauauuaaaggaaagggguuucuucggagcuauugcugguuucuuagaaggaggaugggaaggaaugauugcagguuggcacggauacacaucucacggagcacacggaguggcaguggcagcagaccuuaagaguacgcaagaagccauaaacaagauaacaaaaaaucucaauucuuugagugagcuagaaguaaagaaccuucaaagacuaaguggugccauggaugaacuccauaacgaaauacucgagcuggaugagaaaguggaugaucucagagcugacacaauaaguucacaaauagaacuugcagucuugcuuuccaaugaaggaauaauaaacagugaagaugagcaucuauuggcacuugagagaaaacuaaagaaaaugcugggucccucugcuguagacauagggaauggaugcuucgaaaccaaacacaagugcaaccagaccugcuuagacaggauagcugcuggcaccuuuaaugcaggagaauuuucucuucccacuuuugauucacugaacauuacugcugcaucuuuaaaugaugauggauuggauaaccauacuauacugcucuacuacucaacugcugcuucuaguuuggcuguaacauugaugauagcuauuuuuauuguuuauaugaucuccagagacaauguuucuugcuccaucugucuauaa

SEQ ID NO: 59910 - RNA, 1755 nt, Artificial Sequence
  derived and/or modified CDS sequence (wt) from hemagglutinin__InfluenzaB__AHL91607
augaaggcaauaauuguacuacucaugguaguaacauccaaugcagaucgaaucugcacugggauaacaucgucaaacucaccucauguggucaaaacagcuacucaaggggaggucaaugugacuggugcgauaccacugacaacaacaccaacaaaaucucauuuugcaaaucucaaaggaacaaagaccagagggaaacuaugcccaaccugucucaacugcacagaucuggauguggccuugggcagaccaauguguguggggaucacaccuucggcaaaagcuucaauacuccacgaagucagaccuguuacauccggaugcuuuccuauaaugcacgacagaacaaaaaucagacagcuacccaaucuucucagaggauaugaaaaaaucagauuaucaacccaaaacguuaucaacgcagaaaaggcaccaggaggacccuacagacuuggaacuucaggaucuuguccuaacgcuaccaguaaaagcggauuuuucgcaacaauggcuugggcugucccaagggacaacaacaaaacagcaacgaauccacuaacaguagaaguaccacacaucuguacaaaagaagaagaccaaauuacuguuuggggguuccauucugauaacaaaacccaaaugaaaaaccucuauggagacucaaauccucaaaaguucaccucaucugcuaauggaauaaccacacauuauguuucucagauugggggcuucccggaccaaacagaagacggagggcuaccacaaagcggcagaauuguuguugauuacauggugcaaaaaccugggaaaacaggaacaauugucuaucaaagagggauuuuguugccucaaaagguguggugcgcgaguggcaggagcaaaguaauaaaaggguccuugccuuuaauuggugaagcagauugccuucacgaaaaauacgguggauuaaacaaaagcaagccuuacuacacaggagaacaugcaaaagccauagggaauugcccaauaugggugaaaacaccuuugaagcuugccaauggaaccaaauauagaccuccugcaaaaauauuaaaggaaagggguuucuucggagcuauugcugguuucuuagaaggaggaugggaaggaaugauugcagguuggcacggauacacaucucacggagcacacggaguggcaguggcagcagaccuuaagaguacgcaagaagccauaaacaagauaacaaaaaaucucaauucuuugagugagcuagaaguaaagaaccuucaaagacuaaguggugccauggaugaacuccauaacgaaauacucgagcuggaugagaaaguggaugaucucagagcugacacaauaaguucacaaauagaacuugcagucuugcuuuccaaugaaggaauaauaaacagugaagaugagcaucuauuggcacuugagagaaaacuaaagaaaaugcugggucccucugcuguagacauagggaauggaugcuucgaaaccaaacacaagugcaaccagaccugcuuagacaggauagcugcuggcaccuuuaaugcaggagaauuuucucuucccacuuuugauucacugaacauuacugcugcaucuuuaaaugaugauggauuggauaaccauacuauacugcucuacuacucaacugcugcuucuaguuuggcuguaacauugaugauagcuauuuuuauuguuuauaugaucuccagagacaauguuucuugcuccaucugucuauaa

SEQ ID NO: 59911 - RNA, 1755 nt, Artificial Sequence
  derived and/or modified CDS sequence (wt) from hemagglutinin__InfluenzaB__AHL91618
augaaggcaauaauuguacuacucaugguaguaacauccaaugcagaucgaaucugcacugggauaacaucgucaaacucaccucauguggucaaaacagcuacucaaggggaggucaaugugacuggugcgauaccacugacaacaacaccaacaaaaucucauuuugcaaaucuuaaaggaacaaagaccagaggaaagcuaugcccaaccugucucaacugcacagaucuggauguggccuugggcagaccaauguguguggggaucacaccuucggcaaaagcuucaauacuccacgaagucagaccuguuacauccggaugcuuuccuauaaugcacgacagaacaaaaaucagacagcuacccaaucuucucagaggauaugaaaaaaucagauuaucaacccaaaacguuaucaacgcagaaacggcaccaggaggacccuacagacuuggaacuucaggaucuugcccuaacgcuaccaguaaaagcggauuuuucgcaacaauggcuugggcugucccaagggacaacaacaaaacagcaacgaauccacuaacgguagaaguaccacacaucuguacaaaagaagaagaccaaauuacuguuuggggguuccauucugauaacaaaacccaaaugaaaaaccucuauggagacucaaauccucaaaaguucaccucaucagcuaaugggauaaccacacauuauguuucucagauuggcggcuucccggaccaaacagaagacggagggcuaccacaaagcggcagaauuguuguugauuacauggugcaaaaaccugggaaaacaggaacaauugucuaccaaagagggauuuuguugccucaaaagguguggugcgcgaguggcaggagcaaaguaauaaaaggguccuugccuuuaauuggugaagcagauugccuucacgaaaaauacgguggauugaacaaaagcaagccuuacuacacaggagaacaugcaaaagccauaggaaauugcccaauaugggugaaaacaccuuugaagcuugccaauggaaccaaauauagaccuccugcaaaacuauuaaaggaaagggguuucuucggagcuauugcugguuucuuagaaggaggaugggaaggaaugauugcagguuggcacggauacacaucucacggagcgcauggaguggcaguggcagcagaccuuaagaguacgcaagaagccauaaacaaaauaacaaaaaaucucaauucuuugagugagcuagaaguaaagaaccuucaaagacuaaguggugccauggaugaacuccauaacgaaauacucgagcuggaugagaaaguggaugaucucagggcugacacaauaagcucacaaauagaacuugcagucuugcuuuccaacgaaggaauaauaaacagugaagaugagcaucuauuggcacuugagagaaaacuaaagaaaaugcugggucccucugcuguagacauagggaauggaugcuucgaaaccaaacacaagugcaaccagaccugcuuagacaggauagcugcuggcaccuuuaauguaggagaauuuucucuucccacuuuugauucacugaacauuacugcugcaucuuuaaaugaugauggauuggauaaccauacuauacugcucuacuacucaacugcugcuucuaguuuggcuguaacauugaugauagcuauuuuuauuguuuauaugaucuccagagacaauguuucuugcuccaucugucuauaa

SEQ ID NO: 59912 - RNA, 1755 nt, Artificial Sequence
  derived and/or modified CDS sequence (wt) from hemagglutinin__InfluenzaB__AHL91629
augaaggcaauaauuguacuacucaugguaguaacauccaaugcagaucgaaucugcacugggauaacaucgucaaacucaccucauguggucaaaacagcuacucaaggggaggucaaugugacuggugcgauaccacugacaacaacaccaacaaaaucucauuuugcaaaucucaaaggaacaaagaccagagggaaacuaugcccaaccuguuucaacugcaccgaucuggauguggccuugggcagaccaauguguguggggaucacaccuucggcaaaagcuucaauacuccacgaagucagaccuguuacauccggaugcuuuccuauaaugcacgacagaacaaaaaucagacagcuacccaaucuucucagaggauaugaaaaaaucagauuaucaacccaaaacguuaucgacgcagaaaaggcaccaggaggacccuacaaacuuggaacuucaggaucuugcccuaacgcuaccaguaaaagcggauuuuucgcaacaauggcuugggcugucccgagggacaacaacaaaacagcaacgaauccacuaacaguagaaguaccacacaucuguacaaaagaagaagaccaaauuacuguuuggggguuccauucugauaacaaaacccaaaugaaaaaccucuauggagacucaaauccucaaaaguucaccucaucugcuaauggaauaaccacacauuauguuucucagauugggggcuucccggaccaaacagaagacggagggcuaccacaaagcggcagaauuguuguugauuacauggugcaaaaaccugggaaaacaggaacaauugucuaucaaagagggauuuuguugccucaaaagguguggugcgcgaguggcaggagcaaaguaauaaaaggguccuugccuuuaauuggugaagcugauugccuucacgaaaaauacgguggauuaaacaaaagcaagccuuacuacacaggagaacaugcaaaagccauagggaauugcccaauaugggugaaaacaccuuugaagcuugccaauggaaccaaauauagaccuccugcaaaacuauuaaaggaaagggguuucuuuggagcuauugcugguuucuuagaaggaggaugggaaggaaugauugcagguuggcacggauacacaucucacggagcacacggaguggcaguggcagcagaccuuaagagcacgcaagaagccauaaacaagauaacaaaaaaucucaauucuuugagugagcuagaaguaaagaaccuucaaagacuaaguggugccauggaugaacuccauaacgaaauacucgagcuggaugagaaaguggaugaucucagagcugacacaauaaguucacaaauagaacuugcagucuugcuuuccaaugaaggaauaauaaacagugaagaugagcaucuauuggcacuugagagaaaacuaaagaaaaugcugggucccucugcuguagacauagggaauggaugcuucgaaaccaaacacaagugcaaccagaccugcuuagacaggauagcugcuggcaccuuuaaugcaggagaauuuucucuucccacuuuugauucacugaacauuacugcugcaucuuuaaaugaugauggauuggauaaccauacuauacugcucuacuacucaacugcugcuucuaguuuggcuguaacauugaugauagcuauuuuuauuguuuauaugaucuccagagacaauguuucuugcuccaucugucuauaa

SEQ ID NO: 59913 - RNA, 1755 nt, Artificial Sequence; identical to SEQ ID NO: 59912
  derived and/or modified CDS sequence (wt) from hemagglutinin__InfluenzaB__AHL91640

SEQ ID NO: 59914 - RNA, 1755 nt, Artificial Sequence
  derived and/or modified CDS sequence (wt) from hemagglutinin__InfluenzaB__AHL91651
augaaggcaauaauuguacuacucaugguaguaacauccaaugcagaucgaaucugcacugggauaacaucgucaaacucaccucauguggucaaaacagcuacucaaggggaggucaaugugacuggugcgauaccacugacaacaacaccaacaaaaucucauuuugcaaaucucaaaggaacaaagaccagagggaaacuaugcccaaccuguuucaacugcaccgaucuggauguggccuugggcagaccaauguguguggggaucacaccuucggcaaaagcuucaauacuccacgaagucagaccuguuacauccggaugcuuuccuauaaugcacgacagaacaaaaaucagacagcuacccaaucuucucagaggauaugaaaaaaucagauuaucaacccaaaacguuaucgacgcagaaaaggcaccaggaggacccuacagacuuggaacuucaggaucuugcccuaacgcuaccaguaaaagcggauuuuucgcaacaauggcuugggcugucccaaggggcaacaacaaaacagcaacgaauccacuaacaguagaaguaccacacaucuguacaaaagaagaagaccaaauuacuguuuggggguuccauucugauaacaaaacccaaaugaaaaaccucuauggagacucaaauccucaaaaguucaccucaucugcuaauggaauaaccacacauuauguuucucagauugggggcuucccggaccaaacagaagacggagggcuaccacaaagcggcagaauuguuguugauuacauggugcaaaaaccugggaaaacaggaacaauugucuaucaaagagggauuuuguugccucaaaagguguggugcgcgaguggcaggagcaaaguaauaaaaggguccuugccuuuaauuggugaagcugauugccuucacgaaaaauacgguggauuaaacaaaagcaaaccuuacuacacaggagaacaugcaaaagccauagggaauugcccaauaugggugaaaacaccuuugaagcuugccaauggaaccaaauauagaccuccugcaaaacuauuaaaggaaagggguuucuuuggagcuauugcugguuucuuagaaggaggaugggaaggaaugauugcagguuggcacggauacacaucucacggagcacacggaguggcaguggcagcagaccuuaagaguacgcaagaagccauaaacaagauaacaaaaaaucucaauucuuugagugagcuagaaguaaagaaccuucaaagacuaaguggugccauggaugaacuccauaacgaaauacucgagcuggaugagaaaguggaugaucucagagcugacacaauaaguucacaaauagaacuugcagucuugcuuuccaaugaaggaauaauaaacagugaagaugagcaucuauuggcacuugagagaaaacuaaagaaaaugcugggucccucugcuguagacauagggaauggaugcuucgaaaccaaacacaagugcaaccagaccugcuuagacaggauagcugcuggcaccuuuaaugcaggagaauuuucucuucccacuuuugauucacugaacauuacugcugcaucuuuaaaugaugauggauuggauaaccauacuauacugcucuacuacucaacugcugcuucuaguuuggcuguaacauugaugauagcuauuuuuauuguuuauaugaucuccagagacaauguuucuugcuccaucugucuauaa

SEQ ID NO: 59915 - RNA, 1752 nt, Artificial Sequence
  derived and/or modified CDS sequence (wt) from hemagglutinin__InfluenzaB__AHL91662
augaaggcaauaauuguacuacucaugguaguaacauccaaugcagaucgaaucugcacugggauaacaucgucaaacucaccucauguggucaaaacagcuacucaaggggaggucaaugugacuggugcgauaccacugacaacaacaccaacaaaaucucauuuugcaaaucucaaaggaacaaagaccagaggaaagcuaugcccaaccugucucaacugcacagaucuggauguggccuugggcagaccaauguguguggggaucacaccuucggcaaaagcuucaauacuccacgaagucagaccuguuacauccggaugcuuuccuauaaugcacgacagaacaaaaaucagacagcuacccaaucuucucagaggauaugaaaaaaucagauuaucaacccaaaacguuaucaacgcagaaacggcaccaggaggacccuacagacuuggaacuucaggaucuugcccuaacgcuaccaguaaaagcggauuuuucgcaacaauggcuugggcugucccaagggacaacaacaaaacagcaacgaauccacuaacgguagaaguaccacacaucuguacaaaagaagaagaccaaauuacuguuuggggguuccauucugauaacaaaacccaaaugaaaaaccucuauggagacucaaauccucaaaaguucaccucaucagcuaaugggauaaccacacauuauguuucucagauuggcggcuucccggaccaaacagaagacggagggcuaccacaaagcggcagaauuguuguugauuacauggugcaaaaaccugggaaaacaggaacaauugucuaucaaagagggauuuuguugccucaaaagguguggugcgcgaguggcaggagcaaaguaauaaaaggguccuugccuuuaauuggugaagcagauugccuucacgaaaaauacgguggauugaacaaaagcaagccuuacuacacaggagaacaugcaaaagccauaggaaauugcccaauaugggugaaaacaccuuugaagcuugccaauggaaccaaauauagaccuccugcaaaacuauuaaaggaaagggguuucuucggagcuauugcugguuucuuagaaggaggaugggaaggaaugauugcagguuggcacggauacacaucucacggagcacauggaguggcaguggcagcagaccuuaagaguacgcaagaagccauaaacaaaauaacaaaaaaucucaauucuuugagugagcuagaaguaaagaaccuucaaagacuaaguggugccauggaugaacuccauaacgaaauacucgagcuggaugagaaaguggaugaucucagggcugacacaauaagcucacaaauagaacuugcagucuugcuuuccaacgaaggaauaauaaacagugaagaugagcaucuauuggcacuugagagaaaacuaaagaaaaugcugggucccucugcuguagacauagggaauggaugcuucgaaaccaaacacaagugcaaccagaccugcuuagacaggauagcugcuggcaccuuuaaugcaggagaauuuucucuucccacuuuugauucacugaacauuacugcugcaucuuuaaaugauggauuggauaaccauacuauacugcucuacuacucaacugcugcuucuaguuuggcugugacauugaugauagcuauuuuuauuguuuauaugaucuccagagacaauguuucuugcuccaucugucuauaa

SEQ ID NO: 59916 - RNA, 1755 nt, Artificial Sequence
  derived and/or modified CDS sequence (wt) from hemagglutinin__InfluenzaB__AHL91673
augaaggcaauaauuguacuacucaugguaguaacauccaaugcagaucgaaucugcacugggauaacaucgucaaacucaccucauguggucaaaacagcuacucaaggggaggucaaugugacuggugcgauaccacugacaacaacaccaacaaaaucucauuuugcaaaucucaaaggaacaaagaccagagggaaacuaugcccaaccuguuucaacugcaccgaucuggauguggccuugggcagaccaauguguguggggaucacaccuucggcaaaagcuucaauacuccacgaagucagaccuguuacauccggaugcuuuccuauaaugcacgacagaacaaaaaucagacagcuacccaaucuucucagaggauaugaaaaaaucagauuaucaacccaaaacguuaucgacgcagaaaaggcaccaggaggacccuacagacuuggaacuucaggaucuugcccuaacgcuaccaguaaaagcggauuuuucgcaacaauggcuugggcugucccgagggacaacaacaaaacagcaacgaauccacuaacaguagaaguaccacacaucuguacaaaagaagaagaccaaauuacuguuuggggguuccauucugauaacaaaacccaaaugaaaaaccucuauggagacucaaauccucaaaaguucaccucaucugcuaauggaauaaccacacauuauguuucucagauugggggcuucccggaccaaacagaagacggagggcuaccacaaagcggcagaauuguuguugauuacauggugcaaaaaccugggaaaacaggaacaauugucuaucaaagagggauuuuguugccucaaaagguguggugcgcgaguggcaggagcaaaguaauaaaaggguccuugccuuuaauuggugaagcugauugccuucacgaaaaauacgguggauuaaacaaaagcaagccuuacuacacaggagaacaugcaaaagccauagggaauugcccaauaugggugaaaacaccuuugaagcuugccaauggaaccaaauauagaccuccugcaaaacuauuaaaggaaagggguuucuuuggagcuauugcugguuucuuagaaggaggaugggaaggaaugauugcagguuggcacggauacacaucucacggagcacacggaguggcaguggcagcagaccuuaagagcacgcaagaagccauaaacaagauaacaaaaaaucucaauucuuugagugagcuagaaguaaagaaccuucaaagacuaaguggugccauggaugaacuccauaacgaaauacucgagcuggaugagaaaguggaugaucucagagcugacacaauaaguucacaaauagaacuugcagucuugcuuuccaaugaaggaauaauaaacagugaagaugagcaucuauuggcacuugagagaaaacuaaagaaaaugcugggucccucugcuguagacauagggaauggaugcuucgaaaccaaacacaagugcaaccagaccugcuuagacaggauagcugcuggcaccuuuaaugcaggagaauuuucucuucccacuuuugauucacugaacauuacugcugcaucuuuaaaugaugauggauuggauaaccauacuauacugcucuacuacucaacugcugcuucuaguuuggcuguaacauugaugauagcuauuuuuauuguuuauaugaucuccagagacaauguuucuugcuccaucugucuauaa

SEQ ID NO: 59917 - RNA, 1755 nt, Artificial Sequence
  derived and/or modified CDS sequence (wt) from hemagglutinin__InfluenzaB__AHL91684
augaaggcaauaauuguacuacucaugguaguaacauccaaugcagaucgaaucugcacugggauaacaucgucaaacucaccucauguggucaaaacagcuacucaaggggaggucaaugugacuggugcgauaccacugacaacaacaccaacaaaaucucauuuugcaaaucucaaaggaacaaagaccagagggaaacuaugcccaaccugucucaacugcacagaucuggauguggccuugggcagaccaauguguguggggaucacaccuucggcaaaagcuucaauacuccacgaagucagaccuguuacauccggaugcuuuccuauuaugcacgacagaacaaaaaucagacagcuacccaaucuucucagaggauaugaaaaaaucagauuaucaacccaaaacguuaucaacgcagaaaaggcaccaggaggacccuacagacuuggaacuucaggaucuugcccuaacgcuaccaguaaaagcggauuuuucgcaacaauggcuugggcugucccaagggacaacaacaaaacagcaacgaauccacuaacaauagaaguaccacacaucuguacaaaagaagaagaccaaauuacuguuuggggguuccauucugauaacaaaacccaaaugaaaaaccucuauggagacucaaauccucaaaaguucaccucgucugcuaauggaauaaccacacauuauguuucucagauugggggcuucccggaccaaacggaagacggagggcuaccacaaagcggcagaauuguuguugauuacauggugcaaaaaccugggaaaacaggaacaauugucuaucaaagagggauuuuguugccucaaaagguguggugcgcgaguggcaggagcaaaguaauaaaaggguucuugccuuuaauuggugaagcagauugccuucacgaaaaauacgguggauuaaacaaaagcaagccuuacuacacaggagaacaugcaaaagccauagggaauugcccaauaugggugaaaacaccuuugaagcuugccaauggaaccaaauauagaccuccggcaaaacuauuaaaggaaagggguuucuucggagcuauugcugguuucuuagaaggaggaugggaaggaaugauugcagguuggcacggauacacaucucacggagcacacggaguggcaguggcagcagaccuuaagaguacgcaagaagccauaaacaagauaacaaaaaaucucaauucuuugagugagcuagaaguaaagaaccuucaaagacuaaguggugccauggaugaacuccauaacgaaauacucgagcuggaugagaaaguggaugaucucagagcugacacaauaagcucacaaauagaacuugcagucuugcuuuccaacgaaggaauaauaaacagugaagaugagcaucuauuggcacuugagagaaaacuaaagaaaaugcugggucccucugcuguagacauagggaauggaugcuucgaaaccaaacacaagugcaaccagaccugcuuagacaggauagcugcuggcaccuuuaaugcaggagaauuuucucuucccacuuuugauucacugaacauuacugcugcaucuuuaaaugaugauggauuggauaaccauacuauacugcucuacuacucaacugcugcuucuaguuuggcuguaacauugaugauagcuauuuuuauuguuuauaugaucuccagagacaauguuucuugcuccaucugucuauaa

SEQ ID NO: 59918 - RNA, 1755 nt, Artificial Sequence
  derived and/or modified CDS sequence (wt) from hemagglutinin__InfluenzaB__AHL91695
augaaggcaauaauuguacuacucaugguaguaacauccaaugcagaucgaaucugcacugggauaacaucgucaaacucaccucauguggucaaaacagcuacucaaggggaggucaaugugacuggugcgauaccacugacaacaacaccaacaaaaucucauuuugcaaaucucaaaggaacaaagaccagagggaaacuaugcccaaccuguuucaacugcaccgaucuggauguggccuugggcagaccaauguguguggggaucacaccuucggcaaaagcuucaauacuccacgaagucagaccuguuacauccggaugcuuuccuauaaugcacgacagaacaaaaaucagacagcuacccaaucuucucagaggauaugaaaaaaucagauuaucaacccaaaacguuaucgacgcagaaaaggcaccaggaggacccuacagacuuggaacuucaggaucuugcccuaacgcuaccaguaaaagcggauuuuucgcaacaauggcuugggcugucccaaggggcaacaacaaaacagcaacgaauccacuaacaguagaaguaccacacaucuguacaaaagaagaagaccaaauuacuguuuggggguuccauucugauaacaaaacccaaaugaaaaaccucuauggagacucaaauccucaaaaguucaccucaucugcuaauggaauaaccacacauuauguuucucagauugggggcuucccggaccaaacagaagacggagggcuaccacaaagcggcagaauuguuguugauuacauggugcaaaaaccugggaaaacaggaacaauugucuaucaaagagggauuuuguugccucaaaagguguggugcgcgaguggcaggagcaaaguaauaaaaggguccuugccuuuaauuggugaagcugauugccuucacgaaaaauacgguggauuaaacaaaagcaagccuuacuacacaggagaacaugcaaaagccauagggaauugcccaauaugggugaaaacaccuuugaagcuugccaauggaaccaaauauagaccuccugcaaaacuauuaaaggaaagggguuucuuuggagcuauugcugguuucuuagaaggaggaugggaaggaaugauugcagguuggcacggauacacaucucacggagcacacggaguggcaguggcagcagaccuuaagaguacgcaagaagccauaaacaagauaacaaaaaaucucaauucuuugagugagcuagaaguaaagaaccuucaaagacuaaguggugccauggaugaacuccauaacgaaauacucgagcuggaugagaaaguggaugaucucagagcugacacaauaaguucacaaauagaacuugcagucuugcuuuccaaugaaggaauaauaaacagugaagaugagcaucuauuggcacuugagagaaaacuaaagaaaaugcugggucccucugcuguagacauagggaauggaugcuucgaaaccaaacacaagugcaaccagaccugcuuagacaggauagcugcuggcaccuuuaaugcaggagaauuuucucuucccacuuuugauucacugaacauuacugcugcaucuuuaaaugaugauggauuggauaaccauacuauacugcucuacuacucaacugcugcuucuaguuuggcuguaacauugaugauagcuauuuuuauuguuuauaugaucuccagagacaauguuucuugcuccaucugucuauaa

SEQ ID NO: 59919 - RNA, 1755 nt, Artificial Sequence
  derived and/or modified CDS sequence (wt) from hemagglutinin__InfluenzaB__AHL91706
augaaggcaauaauuguacuacucaugguaguaacauccaaugcagaucgaaucugcacugggauaacaucgucaaacucaccucauguggucaaaacagcuacucaaggggaggucaaugugacuggugcgauaccacugacaacaacaccaacaaaaucucauuuugcaaaucucaaaggaacaaagaccagagggaaacuaugcccaaccuguuucaacugcaccgaucuggauguggccuugggcagaccaauguguguggggaucacaccuucggcaaaagcuucaauacuccacgaagucagaccuguuacauccggaugcuuuccuauaaugcacgacagaacaaaaaucagacagcuacccaaucuucucagaggauaugaaaaaaucagauuaucaacccaaaacguuaucgacgcagaaaaggcaccaggaggacccuacagacuuggaacuucaggaucuugcccuaacgcuaccaguaaaagcggauuuuucgcaacaauggcuugggcugucccaagggacaacaacaaaacagcaacgaauccacuaacaguagaaguaccacacaucuguacaaaagaagaagaccaaauuacuguuuggggguuccauucugauaacaaaacccaaaugaaaaaccucuauggagacucaaauccucaaaaguucaccucaucugcuaauggaauaaccacacauuauguuucucaaauugggggcuucccggaccaaacagaagacggagggcuaccacaaagcggcagaauuguuguugauuacauggugcaaaaaccugggaaaacaggaacaauugucuaucaaagagggauuuuguugccucaaaagguguggugcgcgaguggcaggagcaaaguaauaaaaggguccuugccuuuaauuggugaagcugauugccuucacgaaaaauacgguggauuaaacaaaagcaagccuuacuacacaggagaacaugcaaaagccauagggaauugcccaauaugggugaaaacaccuuugaagcuugccaauggaaccaaauacagaccuccugcaaaacuauuaaaggaaagggguuucuuuggagcuauugcugguuucuuagaaggaggaugggaaggaaugauugcagguuggcacggauacacaucucacggagcacacggaguggcaguggcagcagaccuuaagaguacgcaagaagccauaaacaagauaacaaaaaaucucaauucuuugagugagcuagaaguaaagaaccuucaaagacuaaguggugccauggaugaacuccauaacgaaauacucgagcuggaugagaaaguggaugaucucagagcugacacaauaaguucacaaauagaacuugcagucuugcuuuccaaugaaggaauaauaaacagugaagaugagcaucuauuggcacuugagagaaaacuaaagaaaaugcugggucccucugcuguagacauagggaauggaugcuucgaaaccaaacacaagugcaaccagaccugcuuagacaggauagcugcuggcaccuuuaaugcaggagaauuuucucuucccacuuuugauucacugaacauuacugcugcaucuuuaaaugaugauggauuggauaaccauacuauacugcucuacuacucaacugcugcuucuaguuuggcuguaacauugaugauagcuauuuuuauuguuuauaugaucucuagagacaauguuucuugcuccaucugucuauaa

SEQ ID NO: 59920 - RNA, 1758 nt, Artificial Sequence
  derived and/or modified CDS sequence (wt) from hemagglutinin__InfluenzaB__AHL91717
augaaggcaauaauuguacuacucaugguaguaacauccaaugcagaucgaaucugcacugggauaacaucgucaaacucaccccauguggucaaaacugcuacucaaggggaggucaaugugacuggugugauaccacugacaacaacacccaccaaaucucauuuugcaaaucucaaaggaacaaaaaccagagggaaacuaugcccaaaaugccucaacugcacagaucuggacguggccuugggcagaccaaaaugcacggggaacauacccucggcaaaaguuucaauacuccaugaagucagaccuguuacaucugggugcuuuccuauaaugcacgacagaacaaaaauuagacagcugcccaaucuucucagaggauacgaacauaucagguuaucaacucauaacguuaucaaugcagaaaaggcaccaggaggacccuacaaaauuggaaccucagggucuugcccuaacguuaccaauggaaacggauuuuucgcaacaauggcuugggccgucccaaaaaacgacaacaacaaaacagcaacaaauucauuaacaauagaaguaccauacauuuguacagaaggagaagaccaaauuaccguuuggggguuccacucugauaacgaaacccaaauggcaaaacucuauggggacucaaagccccagaaguucaccucaucugccaacggagugaccacacauuacguuucacagauugguggcuucccaaaucaaacagaagacggaggacuaccacaaagugguagaauuguuguugauuacauggugcaaaaaucugggaaaacaggaacaauuaccuaucaaagagguauuuuauugccucaaaaaguguggugcgcaaguggcaggagcaagguaauaaaaggauccuugccuuuaauuggagaagcagauugccuccacgaaaaauacgguggauuaaacaagagcaagccuuacuacacaggggaacaugcaaaggccauaggaaauugcccaauaugggugaaaacacccuugaagcuggccaauggaaccaaauauagaccuccugcaaaacuauuaaaggaaagggguuucuucggagcuauugcugguuucuuagaaggaggaugggaaggaaugauugcagguuggcacggauacacaucccauggggcacauggaguagcaguggcagcagaccuuaagaguacucaagaagccauaaacaagauaacaaaaaaucucaacucuuugagugagcuggaaguaaagaaucuucaaagacuaagcggugccauggaugaacuccacaacgaaauacuagaacuagacgagaaaguggaugaucucagagcugauacaauaagcucacaaauagaacucgcagucuugcuuuccaaugaaggaauaauaaacagugaagaugagcaucucuuggcgcuugaaagaaagcugaagaaaaugcugggccccucugcuguagagauagggaauggaugcuucgaaaccaaacacaagugcaaccagaccugucucgacagaauagcugcugguaccuuugaugcaggagaauuuucucuccccacuuuugauucacugaauauuacugcugcaucuuuaaaugacgauggauuggauaaucauacuauacugcuuuacuacucaacugcugccuccaguuuggcuguaacauugaugauagcuaucuuuguuguuuauauggucuccagagacaauguuucuugcuccaucugucuauaa

SEQ ID NO: 59921 - RNA, 1758 nt, Artificial Sequence
  derived and/or modified CDS sequence (wt) from hemagglutinin__InfluenzaB__AHL91728
augaaggcaauaauuguacuacucaugguaguaacauccaaugcagaucgaaucugcacugggauaacaucgucaaacucaccccauguggucaaaacugcuacucaaggggaggucaaugugacuggugugauaccacugacaacaacacccaccaaaucucauuuugcaaaucucaaaggaacaaaaaccagagggaaacuaugcccaaaaugccucaacugcacagaucuggacguggccuugggcagaccaaaaugcacggggaacauacccucggcaaaaguuucaauacuccaugaagucagaccuguuacaucugggugcuuuccuauaaugcacgacagaacaaaaauuagacagcugcccaaccuucucagaggauacgaacauaucagguuaucaacucauaacguuaucaaugcagaaaaagcaccaggaggacccuacaaaauuggaaccucagggucuugcccuaacguuaccaauggaaacggauuuuucgcaacaauggcuugggccgucccaaaaaacgacaacaacaaaacagcaacaaauucauuaacaauagaaguaccauacauuuguacagaaggagaagaccaaauuaccguuuggggguuccacucugauaacgaaacccaaauggcaaaacucuauggggacucaaagccccagaaguucaccucaucugccaacggagugaccacacauuacguuucacagauugguggcuucccaaaucaaacagaagacggaggacuaccacaaagugguagaauuguuguugauuacauggugcaaaaaucugggaaaacaggaacaauuaccuaucaaagagguauuuuauugccucaaaaaguguggugcgcaaguggcaggagcaagguaauaaaaggauccuugccuuuaauuggagaagcagauugccuccacgaaaaauacgguggauuaaacaaaagcaagccuuacuacacaggggaacaugcaaaggccauaggaaauugcccaauaugggugaaaacacccuugaagcuggccaauggaaccaaauauagaccuccugcaaaacuauuaaaggaaagggguuucuucggagcuauugcugguuucuuagaaggaggaugggaaggaaugauugcagguuggcacggauacacaucccauggggcacauggaguagcaguggcagcagaccuuaagagcacucaagaagccauaaacaagauaacaaaaaaucucaacucuuugagugagcuggaaguaaagaaucuucaaagacuaagcggugccauggaugaacuccacaacgaaauacuagaacuagacgagaaaguggaugaucucagagcugauacaauaagcucacaaauagaacucgcaguccugcuuuccaaugaaggaauaauaaacagugaagaugagcaucucuuggcgcuugaaagaaagcugaagaaaaugcugggccccucugcuguagagauagggaauggaugcuucgaaaccaaacacaagugcaaccagaccugucucgacagaauagcugcugguaccuuugaugcaggagaauuuucucuccccacuuuugauucacugaauauuacugcugcaucuuuaaaugacgauggauuggauaaucauacuauacugcuuuacuacucaacugcugccuccaguuuggcuguaacauugaugauagcuaucuuuguuguuuauauggucuccagagacaauguuucuugcuccaucugucuauaa

SEQ ID NO: 59922 - RNA, 1758 nt, Artificial Sequence; identical to SEQ ID NO: 59071
  derived and/or modified CDS sequence (wt) from hemagglutinin__InfluenzaB__AHL91739

SEQ ID NO: 59923 - RNA, 1755 nt, Artificial Sequence
  derived and/or modified CDS sequence (wt) from hemagglutinin__InfluenzaB__AHL91750
augaaggcaauaauuguacuacucaugguaguaacauccaaugcagaucgaaucugcacugggauaacaucgucaaacucaccucauguggucaaaacagcuacucaaggggaggucaaugugacuggugcgauaccacugacaacaacaccaacaaaaucucauuuugcaaaucucaaaggaacaaaaaccagagggaaacuaugcccaaccuguuucaacugcaccgaucuggauguggccuuaggcagaccaauguguguggggaucacaccuucggcaaaagcuucaauacuccacgaagucagaccuguuacauccggaugcuuuccuauaaugcacgacagaacaaaaaucagacagcuacccaaucuccucagaggauaugaaaaaaucagauuaucaacccaaaacguuaucgacgcagaaaaggcaccaggagggcccuacagacuuggaacuucaggaucuugcccuaacgcuaccaguaaaagcggauuuuucgcaacaauggcuugggcugucccaagggacaacaacaaaacagcaacgaauccacuaacaguagaaguaccacacaucuguacaaaagaagaagaccaaauuacuguuuggggguuccauucugauaacaaaacccaaaugaaaaaccucuauggagacucaaauccucaaaaguucaccucaucugcuaauggaauaaccacacauuauguuucucagauugggggcuucccggaccaaacagaagacggagggcuaccacaaagcggcagaauuguuguugauuacauggugcaaaaaccugggaaaacaggaacaauugucuaucaaagagggauuuuguugccucaaaagguguggugcgcgaguggcaggagcaaaguaauaaaaggauccuugccuuuaauuggugaagcugauugccuucacgaaaaauacgguggauuaaacaaaagcaagccuuacuacacaggagaacaugcaaaagccauagggaauugcccaauaugggugaaaacaccuuugaagcuugccaauggaaccaaauauagaccuccugcaaaacuauuaaaggaaagggguuucuuuggagcuauugcugguuucuuagaaggaggaugggaaggaaugauugcagguuggcacggauacacaucucacggagcacacggaguggcaguggcagcagaccuuaagaguacgcaagaagccauaaacaagauaacaaaaaaucucaauucuuugagugagcuagaaguaaagaaccuucaaagauuaaguggugccauggaugaacuccauaacgaaauacucgagcuggaugagaaaguggaugaucucagagcugacacaauaaguucacaaauagaacuugcagucuugcuuuccaaugaaggaauaauaaacagugaagaugagcaucuauuggcacuugagagaaaacuaaagaaaaugcugggucccucugcuguagacauagggaauggaugcuucgaaaccaaacacaagugcaaccagaccugcuuagacaggauagcugcuggcaccuuuaaugcaggagaauuuucucuucccacuuuugauucacugaacauuacugcugcaucuuuaaaugaugauggauuggauaaccauacuauacugcucuacuacucaacugcugcuucuaguuuggcuguaacauugaugauagcuauuuuuauuguuuauaugaucuccagagacaauguuucuugcuccaucugucuauaa

SEQ ID NO: 59924 - RNA, 1758 nt, Artificial Sequence; identical to SEQ ID NO: 59084
  derived and/or modified CDS sequence (wt) from hemagglutinin__InfluenzaB__AHL91761

SEQ ID NO: 59925 - RNA, 1758 nt, Artificial Sequence
  derived and/or modified CDS sequence (wt) from hemagglutinin__InfluenzaB__AHL91772
augaaggcaauaauuguacuacucaugguaguaacauccaaugcagaucgaaucugcacugggauaacaucgucaaacucaccccauguggucaaaacugcuacucaaggggaggucaaugugacuggugugauaccacugacaacaacacccaccaaaucucauuuugcaaaucucaaaggaacaaaaaccagagggaaacuaugcccaaaaugccucaacugcacagaucuggacguggccuugggcagaccaaaaugcacggggaacauacccucggcaaaaguuucaauacuccaugaagucagaccuguuacaucugggugcuuuccuauaaugcacgacagaacaaaaauuagacagcugcccaaccuucucagaggauacgaacauaucagguuaucaacucauaacguuaucaaugcagaaaaggcaccaggaggacccuacaaaauuggaaccucagggucuugcccuaacauuaccaauggaaacggauuuuucgcaacaauggcuugggccgucccaaaaaacgacaacaacaaaacagcaacaaauucauuaacaauagaaguaccauacauuuguacagaaggagaagaccaaauuaccguuuggggguuccacucugauaacgaaacccaaauggcaaaacucuauggggacucaaagccccagaaguucaccucaucugccaacggagugaccacacauuacguuucacagauugguggcuucccaaaucaaacagaagacggaggacuaccacaaagugguagaauuguuguugauuacauggugcaaaaaucugggaaaacaggaacaauuaccuaucaaagagguauuuuauugccucaaaaaguguggugcgcaaguggcaggagcaagguaauaaaaggauccuuaccuuuaauuggagaagcagauugccuccacgaaaaauacgguggauuaaacaaaagcaagccuuacuacacaggggaacaugcaaaggccauaggaaauugcccaauaugggugaaaacacccuugaagcuggccaauggaaccaaauauagaccuccugcaaaacuauuaaaggaaagggguuucuucggagcuauugcugguuucuuagaaggaggaugggaaggaaugauugcagguuggcacggauacacaucccauggggcacauggaguagcaguggcagcagaccuuaagagcacucaagaagccauaaacaagauaacaaaaaaucucaacucuuugagugagcuggaaguaaagaaucuucaaagacuaagcggugccauggaugaacuccacaacgaaauacuagaacuagacgagaaaguggaugaucucagagcugauacaauaagcucacaaauagaacucgcaguccugcuuuccaaugaaggaauaauaaacagugaagaugagcaucucuuggcgcuugaaagaaagcugaagaaaaugcugggccccucugcuguagagauagggaauggaugcuucgaaaccaaacacaagugcaaccagaccugucucgacagaauagcugcugguaccuuugaugcaggagaauuuucucuccccacuuuugauucacugaauauuacugcugcaucuuuaaaugacgauggauuggauaaucauacuauacugcuuuacuacucaacugcugccuccaguuuggcuguaacauugaugauagcuaucuuuguuguuuauauggucuccagagacaauguuucuugcuccaucugucuauaa

SEQ ID NO: 59926 - RNA, 1758 nt, Artificial Sequence; identical to SEQ ID NO: 59925
  derived and/or modified CDS sequence (wt) from hemagglutinin__InfluenzaB__AHL91783

SEQ ID NO: 59927 - RNA, 1758 nt, Artificial Sequence; identical to SEQ ID NO: 59925
  derived and/or modified CDS sequence (wt) from hemagglutinin__InfluenzaB__AHL91794

SEQ ID NO: 59928 - RNA, 1758 nt, Artificial Sequence
  derived and/or modified CDS sequence (wt) from hemagglutinin__InfluenzaB__AHL91805
augaaggcaauaauuguacuacucaugguaguaacauccaaugcagaucgaaucugcacugggauaacaucgucaaacucaccccauguggucaaaacugcuacucaaggggaggucaaugugacuggugugauaccacugacaacaacacccaccaaaucucauuuugcaaaucucaaaggaacaaaaaccagagggaaacuaugcccaaaaugcuucaacugcacagaucuggacguggccuugggcagaccaaaaugcacggggaacauacccucggcagaaguuucaauacuccaugaagucagaccuguuacaucugggugcuuuccuauaaugcacgacagaacaaaaauuagacagcugcccaaccuucucagaggauacgaacauaucagguuaucaacucauaacguuaucaaugcagaaaaggcaccaggaggacccuacaaaauuggaaccucagggucuugcccuaacguuaccaauggaaacggauuuuucgcaacaauggcuugggccgucccaaaaaacgacaacaacaaaacagcaacaaauucauuaacaauagaaguaccauacauuuguacagaaggagaagaccaaauuaccguuuggggguuccacucugauaacgaaacccaaauggcaaaacucuauggggacucaaagccccagaaguucaccucaucugccaacggagugaccacacauuacguuucacagauugguggcuucccaaaucaaacagaagacggaggacuaccacaaagugguagaauuguuguugauuacauggugcaaaaaucugggaaaacaggaacaauuaccuaucaaagagguauuuuauugccucaaaaaguguggugcgcaaguggcaggagcaagguaauaaaaggauccuugccuuuaauuggagaagcagauugccuccacgaaaaauacgguggauuaaacaaaagcaagccuuacuacacaggggaacaugcaaaggccauaggaaauugcccaauaugggugaaaacacccuugaagcuggccaauggaaccaaauauagaccuccugcaaaacuauuaaaggaaagggguuucuucggagcuauugcugguuucuuagaaggaggaugggaaggaaugauugcagguuggcacggauacacaucccauggggcacauggaguagcaguggcagcagaccuuaagagcacucaagaagccauaaacaagauaacaaaaaaucucaacucuuugagugagcuggaaguaaagaaucuucaaagacuaagcggugccauggaugaacuccacaacgaaauacuagaacuagacgagaaaguggaugaucucagagcugauacaauaagcucacaaauagaacucgcaguccugcuuuccaaugaaggaauaauaaacagugaagaugagcaucucuuggcgcuugaaagaaagcugaagaaaaugcugggccccucugcuguagagauagggaauggaugcuucgaaaccaaacacaagugcaaccagaccugucucgacagaauagcugcugguaccuuugaugcaggagaauuuucucuccccacuuuugauucacugaauauuacugcugcaucuuuaaaugacgauggauuggauaaucauacuauacugcuuuacuacucaacugcugccuccaguuuggcuguaacauugaugauagcuaucuuuguuguuuauauggucuccagagacaauguuucuugcuccaucugucuauaa

SEQ ID NO: 59929 - RNA, 1758 nt, Artificial Sequence; identical to SEQ ID NO: 58431
  derived and/or modified CDS sequence (wt) from hemagglutinin__InfluenzaB__AHL91816

SEQ ID NO: 59930 - RNA, 1758 nt, Artificial Sequence
  derived and/or modified CDS sequence (wt) from hemagglutinin__InfluenzaB__AHL91827
augaaggcaauaauuguacuacucaugguaguaacauccaaugcagaucgaaucugcacugggauaacaucgucaaacucaccccauguggucaaaacugcuacucaaggggaggucaaugugacuggugugauaccacugacaacaacacccaccaaaucucauuuugcaaaucucaaaggaacaaaaaccagagggaaacuaugcccaaaaugccucaacugcacagaucuggacguggccuugggcagaccaaaaugcacggggaacauacccucggcagaaguuucaauacuccaugaagucagaccuguuacaucugggugcuuuccuauaaugcacgacagaacaaaaauuagacagcugcccaaccuucucagaggauacgaacauaucagguuaucaacucauaacguuaucaaugcagaaaaggcaccaggaggacccuacaaaauuggaaccucagggucuugcccuaacguuaccaauggaaacggauuuuucgcaacaauggcuugggccgucccaaaaaacgacaacaacaaaacagcaacaaauucauuaacaauagaaguaccauacauuuguacagaaggagaagaccaaauuaccguuuggggguuccacucugauaacgaaacccaaauggcaaaacucuauggggacucaaagccccagaaguucaccucaucugccaacggagugaccacacauuacguuucacagauugguggcuucccaaaucaaacagaagacggaggacuaccacaaagugguagaauuguuguugauuacauggugcaaaaaucugggaaaacaggaacaauuaccuaucaaagagguauuuuauugccucaaaaaguguggugcgcaaguggcaggagcaagguaauaaaaggauccuugccuuuaauuggagaagcagauugccuccacgaaaaauacgguggauuaaacaaaagcaagccuuacuacacaggggaacaugcaaaggccauaggaaauugcccaauaugggugaaaacacccuugaagcuggccaauggaaccaaauauagaccuccugcaaaacuauuaaaggaaagggguuucuucggagcuauugcugguuucuuagaaggaggaugggaaggaaugaucgcagguuggcacggauacacaucccauggggcacauggaguagcaguggcagcagaccuuaagagcacucaagaagccauaaacaagauaacaaaaaaucucaacucuuugagugagcuggaaguaaagaaucuucaaagacuaagcggugccauggaugaacuccacaacgaaauacuagaacuagacgagaaaguggaugaucucagagcugauacaauaagcucacaaauagaacucgcaguccugcuuuccaaugaaggaauaauaaacagugaagaugagcaucucuuagcgcuugaaagaaagcugaagaaaaugcugggccccucugcuguagagauagggaauggaugcuucgaaaccaaacacaagugcaaccagaccugucucgacagaauagcugcugguaccuuugaugcaggagaauuuucucuccccacuuuugauucacugaauauuacugcugcaucuuuaaaugacgauggauuggauaaucauacuauacugcuuuacuacucaacugcugccuccaguuuggcuguaacauugaugauagcuaucuuuguuguuuauauggucuccagagacaauguuucuugcuccaucugucuauaa

SEQ ID NO: 59931 - RNA, 1755 nt, Artificial Sequence; identical to SEQ ID NO: 59542
  derived and/or modified CDS sequence (wt) from hemagglutinin__InfluenzaB__AHL91838

SEQ ID NO: 59932 - RNA, 1755 nt, Artificial Sequence
  derived and/or modified CDS sequence (wt) from hemagglutinin__InfluenzaB__AHL91849
augaaggcaauaauuguacuacucaugguaguaacauccaaugcagaucgaaucugcacugggauaacaucuucaaacucaccucauguagucaaaacagcuacucaaggggaggucaaugugacugguguaauaccacugacaacaacaccaacaaaaucuuauuuugcaaaucucaaaggaacaagaaccagagggaaacuauguccagacugucucaacuguacagaucuggauguggccuugggcagaccaaugugugugggaaccacaccuucggcaaaagcuucaauacuccacgaagccagaccuguuacauccgggugcuuuccuauaaugcacgacagaacaaaaaucagacaacuacccaaucuucucagaggauaugaaaauaucagauuaucaacucaaaacguuaucgaugcagaaaaugcaccaggaggacccuacagacuuggaaccucaggaucuugcccuaacgcuaccaguaaaaguggauuuuucgcaacaauggcuugggcugucccaaaggacaacaacaaaaaugcaacgaacccacuaacaguagaaguaccauacauuuguaaagaaggggaagaccaaauuacuguuugggguuuccauucagauaacaaaacccaaaugaagaaccucuauggagacucaaauccucaaaaguucaccucaucugcuaauggaguaaccacacauuauguuucucagauuagcggcuucccagcucaaacagaagacggaggacuaccacaaagcggcagaauuguuguugauuacauggugcaaaaaccuaggaaaacaggaacaauugucuaucaaagagguguuuuguugccucaaaagguguggugcgcgaguggcaggagcaaaguaauaaaaggguccuugccuuuaauuggugaagcagauugccuucaugaaaaauacgguggauuaaacaaaagcaagccuuacuacacaggagaacaugcaaaagccauaggaaauugcccaauaugggugaagacaccuuugaagcuugccaauggaaccaaauauagaccuccugcaaaacuauuaaaggaaagggguuucuucggagcuauugcugguuuccuagaaggaggaugggaaggaaugauugcagguuggcacggauacacaucucacggagcacauggaguggcaguggcggcagaccuuaagaguacgcaagaagcuauaaacaagauaacaaaaaaucucaauucuuugagugagcuagaaguaaagaaucuucaaagacuaaguggugccauggaugaacuccacaacgaaauacucgagcuggaugagaaaguggaugaucucagagcugacacuauaagcucgcaaauagaacuugcagucuugcuuuccaaugaaggaauaauaaacagugaagaugagcaucuauuggcacuugagagaaaacuaaagaaaaugcugggucccucugcuguagacauaggaaauggaugcuucgaaaccaaacacaagugcaaccagaccugcuuagacaggauagcugcuggcaccuuuaaugcaggagaauuuucucuccccacuuuugauucacugaacauuacugcugcaucuuuaaaugaugauggauuggauaaccauacuauacugcucuauuacucaacugcugcuucuaguuuggcuguaacauugaugcuagcuauuuuuauuguuuauauggucuccagagacaacguuucaugcuccaucugucuauaa

SEQ ID NO: 59933 - RNA, 1755 nt, Artificial Sequence
  derived and/or modified CDS sequence (wt) from hemagglutinin__InfluenzaB__AHL91860
augaaggcaauaauuguacuacucaugguaguaacauccaaugcagaucgaaucugcacugggauaacaucuucaaacucaccucauguggucaaaacagcuacucaaggggaggucaaugugacuggugugauaccacuaacaacaacaccaacaaaaucuuauuuugcaaaucucaaaggaacaaggaccagagggaaacuaugcccagacugucucaacuguacagaucuggauguggccuugggcagaccaauguguguggggaccacaccuucggcgaaagcuucaauacuccacgaagucagaccuguuacauccgggugcuuuccuauaaugcacgacagaacaaaaaucaggcaacuacccaaucuucucagaggauaugaaaauaucagguuaucaacccaaaacgucaucgaugcagaaaaggcaccaggaggacccuacagacuuggaaccucaggaucuugcccuaacgcuaccaguaaaagcggauuuuucgcaacaauggcuugggcugucccaaaggacaacaacaaaaaugcaacgaacccacuaacaguagagauaccauacauuuguacagaaggggaagaccaaaucacuguuuggggguuccauucagauaacaaaacccaaaugaagaaccucuauggagacucaaauccucaaaaguucaccucaucugcuaauggaguaaccacacacuauguuucucagauuggcggcuucccagaucaaacagaagacggaggacuaccacaaagcggcaggauuguuguugauuacaugaugcaaaaaccugggaaaacaggaacaauugucuaccaaagagguguuuuguugccucaaaagguguggugcgcgaguggcaggagcaaaguaauaaaaggguccuugccuuuaauuggugaagcagauugccuucaugaaaaauacgguggauuaaacaaaagcaagccuuacuacacaggagaacaugcaaaagccauaggaaauugcccaauaugggugaaaacaccuuugaagcuugccaauggaaccaaauauagaccuccugcaaaacuauuaaaggaaagggguuucuucggagcuauugcugguuuccuagaaggaggaugggaaggaaugauugcaggcuggcacggauacacaucucacggagcacauggaguggcaguggcggcggaccuuaagaguacgcaagaagcuauaaacaagauaacaaaaaaucucaauucuuugagugagcuagaaguaaagaaucuucaaagacuaaguggugccauggaugaacuccacaacgaaauacucgagcuggaugagaaaguggaugaucucagagcugacacuauaagcucgcaaauagaacuugcagucuugcuuuccaacgaaggaauaauaaacagugaagaugagcaucuauuggcacuugagagaaaacuaaagaaaaugcugggucccucugcuguagagauaggaaauggaugcuucgaaaccaaacacaagugcaaccagaccugcuuagacaggauagcugcuggcaccuuuaaugcaggagaauuuucucuccccacuuuugauucacugaacauuacugcugcaucuuuaaaugaugauggauuggauaaccaugcuauacugcucuauuacucaacugcugcuucuaguuuggcuguaacauugaugcuagcuauuuuuauuguuuauauggucuccagagacaacguuucaugcuccaucugucuauaa

SEQ ID NO: 59934 - RNA, 1755 nt, Artificial Sequence
  derived and/or modified CDS sequence (wt) from hemagglutinin__InfluenzaB__AHL91871
augaaggcaauaauuguacuacucaugguaguaacauccaaugcagaucgaaucugcacugggauaacaucuucaaacucaccucauguggucaaaacagcuacucaaggggaggucaaugugacuggugugauaccacuaacaacaacaccaacaaaaucuuauuuugcaaaucucaaaggaacaaggaccagagggaaacuaugcccagacugucucaacuguacagaucuggauguggccuugggcagaccaauguguguggggaccacaccuucggcgaaagcuucaauacuccacgaagucagaccuguuacauccgggugcuuuccuauaaugcacgacagaacaaaaaucaggcaacuacccaaucuucucagaggauaugaaaauaucagguuaucaacccaaaacgucaucgaugcagaaaaggcaccaggaggacccuacagacuuggaaccucaggaucuugcccuaacgcuaccaguaaaagcggauuuuucgcaacaauggcuugggcugucccaaaggacaacaacaaaaaugcaacgaacccacuaacaguagagauaccauacauuuguacagaaggggaagaccaaaucacuguuuggggguuccauucagauaacaaaacccaaaugaagaaccucuauggagacucaaauccucaaaaguucaccucaucugcuaauggaguaaccacacacuauguuucucagauuggcggcuucccagaucaaacagaagacggaggacuaccacaaagcggcaggauuguuguugauuacaugaugcaaaaaccugggaaaacaggaacaauugucuaccaaagagguguuuuguugccucaaaagguguggugcgcgaguggcaggagcaaaguaauaaaaggguccuugccuuuaauuggugaagcagauugccuucaugaaaaauacgguggauuaaacaaaagcaagccuuacuacacaggagaacaugcaaaagccauaggaaauugcccaauaugggugaaaacaccuuugaagcuugccaauggaaccaaauauagaccuccugcaaaacuauuaaaggaaagggguuucuucggagcuauugcugguuuccuagaaggaggaugggaaggaaugauugcaggcuggcacggauacacaucucacggagcacauggaguggcaguggcggcggaccuuaagaguacgcaagaagcuauaaacaagauaacaaaaaaucucaauucuuugagugagcuagaaguaaagaaucuucaaagacuaaguggugccauggaugaacuccacaacgaaauacucgagcuggaugagaaaguggaugaucucagagcugacacuauaagcucgcaaauagaacuugcagucuugcuuuccaacgaaggaauaauaaacagugaagaugagcaucuauuggcacuugagagaaaacuaaagaaaaugcugggucccucugcuguagagauaggaaauggaugcuucgaaaccaaacacaagugcaaccagaccugcuuagacaggauagcugcuggcaccuuuaaugcaggagaauuuucucuccccacuuuugauucacugaacauuacugcugcaucuuuaaaugaugauggauuggauaaccauacuauacugcucuauuacucaacugcugcuucuaguuuggcuguaacauugaugcuagcuauuuuuauuguuuauauggucuccagagacaacguuucaugcuccaucugucuauaa

SEQ ID NO: 59935 - RNA, 1755 nt, Artificial Sequence; identical to SEQ ID NO: 58667
  derived and/or modified CDS sequence (wt) from hemagglutinin__InfluenzaB__AHL91882

SEQ ID NO: 59936 - RNA, 1755 nt, Artificial Sequence
  derived and/or modified CDS sequence (wt) from hemagglutinin__InfluenzaB__AHL91904
augaaggcaauaauuguacuacucaugguaguaacauccaaugcagaucgaaucugcacugggauaacaucuucaaacucaccucauguggucaaaacagcuacucaaggggaggucaaugugacuggugugauaccacugacaacaacaccaacaaaaucuuauuuugcaaaucucaaaggaacaaggaccagagggaaacuaugcccagacugucucaacuguacagaucuggauguggccuugggcaggccaauguguguggggaccacaccuucugcgaaagcuucaauacuccacgaagucagaccuguuacauccgggugcuuuccuauaaugcacgacagaacaaaaaucaggcaacuagccaaucuucucagaggauaugaaaauaucagguuaucaacccaaaacguuaucgaugcagaaaaggcaccaggaggacccuacagacuuggaaccucaggaucuugcccuaacgcuaccaguaaaagcggauuuuucgcaacaauggcuugggcugucccaaaggacaacaacaaaaaugcaacgaacccacuaacaguagaaguaccauacauuuguacagaaggggaagaccaaauuacuguuuggggguuccauucagauaacaaaacucaaaugaagaaccucuauggagacucaaauccucaaaaguucaccucaucugcuaauggaguaaccacacauuauguuucucagauuggcggcuucccagaucaaacagaagacggaggacuaccacaaagcggcagaauuguuguugauuacaugaugcaaaaacaugggaaaacaggaacaauugucuaucaaagagguguuuuguugccucaaaagguguggugcgcgagugguaggagcaaaguaauaaaaggguccuugccuuuaauuggugaagcagacugccuucaugaaaaauacgguggauuaaacaaaagcaagccuuacuacacaggagaacaugcaaaagccauaggaaauugcccaauaugggugaaaacaccuuugaagcuugccaauggaaccaaauauagaccuccugcaaaacuauuaaaggaaagggguuucuucggagcuauugcugguuuccuagaaggaggaugggaaggaaugauugcagguuggcacggauacacaucucacggagcacauggaguggcaguggcggcagaccuuaagaguacacaagaagcuauaaacaagauaacaaaaaaucucaauucuuugagugagcuagaaguaaagaaucuucaaagacuaaguggugccauggaugaacuccacaacgaaauacucgagcuggaugagaaaguggaugaucucagagcugacacuauaagcucacaaauagaacuugcagucuugcuuuccaacgaaggaauaauaaacagugaagacgagcaucuauuggcacuugagagaaaacuaaagaaaaugcugggucccucugcuguagacauaggaaauggaugcuucgaaaccaaacacaaaugcaaccagaccugcuuagacaggauagcugcuggcaccuuuaaugcaggagaauuuucucuccccacuuuugauucauugaacauuacugcugcaucuuuaaaugaugauggauuggauaaccauacuauacugcucuauuacucaacugcugcuucuaguuuggcuguaacauugaugcuagcuauuuuuauuguuuauauggucuccagagacaacguuucaugcuccaucugucuauaa

SEQ ID NO: 59937 - RNA, 1755 nt, Artificial Sequence
  derived and/or modified CDS sequence (wt) from hemagglutinin__InfluenzaB__AHL91915
augaaggcaauaauuguacuacucaugguaguaacauccaaugcagaucgaaucugcacugggauaacaucuucaaacucaccucauguggucaaaacagcuacucaaggggaggucaaugugacuggugugauaccacugacaacaacaccaacaaaaucuuauuuugcaaaucucaaaggaacaagaaccagagggaaacuaugcccagacugucucaacuguacagaucuggauguggccuugggcaggccaauguguguggggaccacaccuucugcgaaagcuucaauacuccacgaagucagaccuguuacauccgggugcuuuccuauaaugcacgacagaacaaaaaucaggcaacuacccaaucuucucagaggauaugaaaauaucagguuaucaacccaaaacguuaucgaugcagaaaaggcaccaggaggacccuacagacuuggaaccucaggaucuugcccuaacgcuaccaguaaaagcggauuuuucgcaacaauggcuugggcugucccaaaggacaacuacaaaaaugcaacgaacccacuaacaguagaaguaccauacauuuguacagaaggggaagaccaaauuacuguuuggggguuccauucagauaacaaaacccaaaugaagaaccucuauggagacucaaauccucaaaaguucaccucaucugcuaauggaguaaccacacauuauguuucucagauuggcggcuucccagaucaaacagaagacggaggacuaccacaaagcggcagaauuguuguugauuacaugaugcaaaaaccugggaaaacaggaacaauugucuaucaaagagguguuuuguugccucaaaagguguggugcgcgaguggcaggagcaaaguaauaaaaggguccuugccuuuaauuggugaagcagauugccuucaugaaaaauacgguggauuaaacaaaagcaagccuuacuacacaggagaacaugcaaaagccauaggaaauugcccaauauggguaaaaacaccuuugaagcuugccaauggaaccaaauauagaccuccugcaaaacuauuaaaggaaagggguuucuucggagcuauugcugguuuccuagaaggaggaugggaaggaaugauugcagguuggcacggauacacaucucacggagcacauggaguggcaguggcggcagaccuuaagaguacacaagaagcuauaaacaagauaacaaaaaaucucaauucuuugagugagcuagaaguaaagaaucuucaaagacuaaguggugccauggaugaacuccacaacgaaauacucgagcuggaugagaaaguggaugaucucagagcugacacuauaagcucacaaauagaacuugcagucuugcuuuccaacgaaggaauaauaaacagugaagacgagcaucuauuggcacuugagagaaaacuaaagaaaaugcugggucccucugcuguagacauaggaaauggaugcuucgaaaccaaacacaaaugcaaccagaccugcuuagacaggauagcugcuggcaccuuuaaugcaggagaauuuucucuccccacuuuugauucauugaacauuacugcugcaucuuuaaaugaugauggauuggauaaccauacuauacugcucuauuacucaacugcugcuucuaguuuggcuguaacauugaugcuagcuauuuuuauuguuuauauggucuccagagacaacguuucaugcuccaucugucuauaa

SEQ ID NO: 59938 - RNA, 1755 nt, Artificial Sequence; identical to SEQ ID NO: 59036
  derived and/or modified CDS sequence (wt) from hemagglutinin__InfluenzaB__AHL91926

SEQ ID NO: 59939 - RNA, 1755 nt, Artificial Sequence
  derived and/or modified CDS sequence (wt) from hemagglutinin__InfluenzaB__AHL91937
augaaggcaauaauuguacuacucaugguaguaacauccaaugcagaucgaaucugcacugggauaacaucuucaaacucaccucauguggucaaaacagcuacucaaggggaggucaaugugacuggugugauaccacugacaacaacaccaacaaaaucuuauuuugcaaaucucaaaggaacaaggaccagagggaaacuaugcccagacugucucaacuguacagaucuggauguggccuugggcaggccaauguguguggggaccacaccuucugcgaaagcuucaauacuccacgaagucagaccuguuacauccgggugcuuuccuauaaugcacgacagaacaaaaaucaggcaacuagccaaucuucucagaggauaugaaaauaucagguuaucaacccaaaacguuaucgaugcagaaaaggcaccaggaggacccuacagacuuggaaccucaggaucuugcccuaacgcuaccaguaaaagcggauuuuucgcaacaauggcuugggcugucccaaaggacaacaacaaaaaugcaacgaacccacuaacaguagaaguaccauacauuuguacagaaggggaagaccaaauuacuguuuggggguuccauucagauaacaaaacccaaaugaagaaccucuauggagacucaaauccucaaaaguucaccucaucugcuaauggaguaaccacacauuauguuucucagauuggcggcuucccagaucaaacagaagacggaggacuaccacaaagcggcagaauuguuguugauuacaugaugcaaaaaccugggaaaacaggaacaauugucuaucaaagagguguuuuguugccucaaaagguguggugcgcgaguggcaggagcaaaguaauaaaaggguccuugccuuuaauuggugaagcagauugccuucaugaaaaauacgguggauuaaacaaaagcaagccuuacuacacaggagaacaugcaaaagccauaggaaauugcccaauaugggugaaaacaccuuugaagcuugccaauggaaccaaauauagaccuccugcaaaacuauuaaaggaaagggguuucuucggagcuauugcugguuuccuagaaggaggaugggaaggaaugauugcagguuggcacggauacacaucccacggagcacauggaguggcaguggcggcagaccuuaagaguacacaagaagcuauaaacaagauaacaaaaaaucucaauucuuugagugagcuagaaguaaagaaucuucaaagacuaaguggugccauggaugaacuccacagcgaaauacucgagcuggaugagaaaguggaugaucucagagcugacacuauaagcucacaaauagaacuugcagucuugcuuuccaacgaaggaauaauaaacagugaagacgagcaucuauuggcacuugagagaaaacuaaagaaaaugcugggucccucugcuguagacauaggaaauggaugcuucgaaaccaaacacaaaugcaaccagaccugcuuagacaggauagcugcuggcaccuuuaaugcaggagaauuuucucuccccacuuuugauucauugaacauuacugcugcaucuuuaaaugaugauggauuggauaaccauacuauacugcucuauuacucaacugcugcuucuaguuuggcuguaacauugaugcuagcuauuuuuauuguuuauauggucuccagagacaacguuucaugcuccaucugucuauaa

SEQ ID NO: 59940 - RNA, 1755 nt, Artificial Sequence
  derived and/or modified CDS sequence (wt) from hemagglutinin__InfluenzaB__AHL91948
augaaggcaauaauuguacuacucaugguaguaacauccaaugcagaucggaucugcacugggauaacaucuucaaacucaccucauguggucaaaacagcuacucaaggggaggucaaugugacuggugugauaccacugacaacaacaccaacaaaaucuuauuuugcaaaucucaaaggaacaaggaccagagggaaacuaugcccagacugucucaacuguacagaucuggauguggccuugggcaggccaauguguguggggaccacaccuucugcgaaagcuucaauacuccacgaagucagaccuguuacauccgggugcuuuccuauaaugcacgacagaacaaaaaucaggcaacuagccaaucuucucagaggauaugaaaauaucagguuaucaacccaaaacguuaucgaugcagaaaaggcaccaggaggacccuacagacuuggaaccucaggaucuugcccuaacgcuaccaguaaaagcggauuuuucgcaacaauggcuugggcugucccaaaggacaacaacaaaaaugcaacgaacccacuaacaguagaaguaccauacauuuguacagaaggggaagaccaaauuacuguuuggggguuccauucagauaacaaaacccaaaugaagaaccucuauggagacucaaauccucaaaaguucaccucaucugcuaauggaguaaccacacauuauguuucucagauuggcggcuucccagaucaaacagaagacggaggacuaccacaaagcggcagaauuguuguugauuacaugaugcaaaaaccugggaaaacaggaacaauugucuaucaaagagguguuuuguugccucaaaagguguggugcgcgaguggcaggagcaaaguaauaaaaggguccuugccuuuaauuggugaagcagauugccuucaugaaaaauacgguggauuaaacaaaagcaagccuuacuacacaggagaacaugcaaaagccauaggaaauugcccaauaugggugaaaacaccuuugaagcuugccaauggaaccaaauauagaccuccugcaaaacuauuaaaggaaagggguuucuucggagcuauugcugguuuccuagaaggaggaugggaaggaaugauugcagguuggcacggauacacaucucacggagcacauggaguggcaguggcggcagaccuuaagaguacacaagaagcuauaaacaagauaacaaaaaaucucaauucuuugagugagcuagaaguaaagaaucuucaaagacuaaguggugccauggaugaacuccacaacgaaauacucgagcuggaugagaaaguggaugaucucagagcugacacuauaagcucacaaauagaacuugcagucuugcuuuccaacgaaggaauaauaaacagugaagacgagcauuuauuggcacuugagagaaaacuaaagaaaaugcugggucccucugcuguagacauaggaaauggaugcuucgaaaccaaacacaaaugcaaccagaccugcuuagacaggauagcugcuggcaccuuuaaugcaggagaauuuucucuccccacuuuugauucauugaacauuacugcugcaucuuuaaaugaugauggauuggauaaccauacuauacugcucuauuacucaacugcugcuucuaguuuggcuguaacauugaugcuagcuauuuuuauuguuuauauggucuccagagacaacguuucaugcuccaucugucuauaa

SEQ ID NO: 59941 - RNA, 1758 nt, Artificial Sequence
  derived and/or modified CDS sequence (wt) from hemagglutinin__InfluenzaB__AHL91959
augaaggcaauaauuguacuacucaugguaguaacauccaaugcagaucgaaucugcacugggauaacaucgucaaacucaccccauguggucaaaacugcuacucaaggggaggucaaugugacuggugugauaccacugacaacaacacccaccaaaucucauuuugcaaaucucaaaggaacaaaaaccagagggaaacuaugcccaaaaugccucaacugcacagaucuggacguggccuugggcagaccaaaaugcacggggaacauacccucggcagaaguuucaauacuccaugaagucagaccuguuaccucugggugcuuuccuauaaugcacgacagaacaaaaauuagacagcugcccaaccuucucagaggauacgaacauaucagauuaucaacucauaacguuaucaaugcagaaaaggcaccaggaggacccuacaaaauuggaaccucagggucuugcccuaauguuaccaauggaaacggauuuuucgcaacaauggcuugggccgucccaaaaaacgacaacaacaaaacagcaacaaauucauuaacaauagaaguaccauacauuuguacagaaggagaagaccaaauuaccauuuggggguuccacucugauaacgaaacccaaauggcaaaacucuauggggacucaaagccccagaaguucaccucaucugccaacggagugaccacacauuacguuucacagauugguggcuucccaaaucaaacagaagauggaggacuaccacaaagugguagaauuguuguugauuacauggugcaaaaaucugggaaaacaggaacaauuaccuaucaaagagguauuuuauugccucaaaaaguguggugcgcaaguggcaggagcaagguaauaaaaggauccuugcccuuaauuggagaagcagauugccuccacgaaaaauacgguggauuaaacaaaagcaagccuuacuacacaggggaacaugcaaaggccauaggaaauugcccaauaugggugaaaacacccuugaagcuggccaauggaaccaaauauagaccuccugcaaaacuauuaaaggaaagggguuucuucggagcuauugcugguuucuuagaaggaggaugggaaggaaugauugcagguuggcacggauacacaucccauggggcacauggaguagcaguggcagcagaccuuaagagcacucaagaagccauaaacaagauaacaaaaaaucucaacucuuugagugagcuggaaguaaagaaucuucaaagacuaagcggugccauggaugaacuccacaacgaaauacuagaacuagacgagaaaguggaugaucucagagcugauacaauaagcucacaaauagaacucgcaguccugcuuuccaaugaaggaauaauaaacagugaagaugagcaucucuuggcgcuugaaagaaagcugaagaaaaugcugggccccucugcuguagagauagggaauggaugcuucgaaaccaaacacaagugcaaccagaccugucuugacagaauagcugcugguaccuuugaugcaggagaauuuucucuccccacuuuugauucacugaauauuacugcugcaucuuuuaaugacgauggauuggauaaucauacuauacugcuuuacuacucaacugcugccuccaguuuggcuguaacauugaugauagcuaucuuuguuguuuauauggucuccagagacaauguuucuugcuccaucugucuauaa

SEQ ID NO: 59942 - RNA, 1758 nt, Artificial Sequence
  derived and/or modified CDS sequence (wt) from hemagglutinin__InfluenzaB__AHL91970
augaaggcaauaauuguacuacucaugguaguaacauccaaugcagaucgaaucugcacugggauaacaucgucaaacucaccccauguggucaaaacugcuacucaaggggaggucaaugugacuggugugauaccacugacaacaacacccaccaaaucucauuuugcaaaucucaaaggaacaaaaaccagagggaaacuaugcccaaaaugccucaacugcacagaucuggacguggccuugggcagaccaaaaugcacggggaacauacccucggcagaaguuucaauacuccaugaagucagaccuguuaccucugggugcuuuccuauaaugcacgacagaacaaaaauuagacagcugcccaaccuucucagaggauacgaacauaucagauuaucaacucauaacgucaucaaugcagaaaaggcaccaggaggacccuacaaaauuggaaccucagggucuugcccuaauguuaccaauggaaacggauuuuucgcaacaauggcuugggccgucccaaaaaacgacaacaacaaaacagcaacaaauucauuaacaauagaaguaccauacauuuguacagaaggagaagaccaaauuaccauuuggggguuccacucugauaacgaaacccaaauggcaaaacucuauggggacucaaagccccagaaguucaccucaucugccaacggagugaccacacauuacguuucacagauugguggcuucccaaaucaaacagaagacggaggacuaccacaaagugguagaauuguuguugauuacauggugcaaaaaucugggaaaacaggaacaauuaccuaucaaagagguauuuuauugccucaaaaaguguggugcgcaaguggcaggagcaagguaauaaaaggauccuugcccuuaauuggagaagcagauugccuccacgaaaaauacgguggauuaaacaaaagcaagccuuacuacacaggggaacaugcaaaggccauaggaaauugcccaauaugggugaaaacacccuugaagcuggccaauggaaccaaauauagaccuccugcaaaacuauuaaaggaaagggguuucuucggagcuauugcugguuucuuagaaggaggaugggaaggaaugauugcagguuggcacggauacacaucccauggggcacauggaguagcaguggcagcagaccuuaagagcacucaagaagccauaaacaagauaacaaaaaaucucaacucuuugagugagcuggaaguaaagaaucuucaaagacuaagcggugccauggaugaacuccacaacgaaauacuagaacuagacgagaaaguggaugaucucagagcugauacaauaagcucacaaauagaacucgcaguccugcuuuccaaugaaggaauaauaaacagugaagaugagcaucucuuggcgcuugaaagaaagcugaagaaaaugcugggccccucugcuguagagauagggaauggaugcuucgaaaccaaacacaagugcaaccagaccugucuugacagaauagcugcugguaccuuugaugcaggagaauuuucucuccccacuuuugauucacugaauauuacugcugcaucuuuaaaugacgauggauuggauaaucauacuauacugcuuuacuacucaacugcugccuccaguuuggcuguaacauugaugauagcuaucuuuguuguuuauauggucuccagagacaauguuucuugcuccaucugucuguag

SEQ ID NO: 59943 - RNA, 1755 nt, Artificial Sequence
  derived and/or modified CDS sequence (wt) from hemagglutinin__InfluenzaB__AHL91991
augaaggcaauaauuguacuacucaugguaguaacauccaaugcagaucgaaucugcacugggauaacaucuucaaacucaccucauguggucaaaacagcuacucaaggggaggucaaugugacuggugugauaccacugacaacaacaccaacaaaaucuuauuuugcaaaucucaaaggaacaaggaccagagggaaacuaugcccagacugucucaacuguacagaccuggauguggccuugggcaggccaauguguguggggaccacaccuucugcgaaagcuucaauacuccacgaagucagaccuguuacauccgggugcuuuccuauaaugcacgacagaacaaaaaucagacaacuagccaaucuucucagaggauaugaaaauaucagguuaucaacccaaaacguuaucgaugcagaaaaggcaccaggaggacccuacagacuuggaaccucaggaucuugcccuaacgcuaccaauaaaagcggauuuuucgcaacaauggcuugggcugucccuaaggacaacaacaaaaaugcaacgaacccacuaacaguagaaguaccauacauuuguacagaaggggaagaccaaauuacuguuuggggguuccauucagauaacaaaacccaaaugaagaaccucuauggagacucaaauccucaaaaguucaccucaucugcuaauggaguaaccacacauuauguuucucagauuggcggcuucccagaucaaacagaagacggaggacuaccacaaagcggcagaauuguuguugauuacaugaugcaaaaaccugggaaaacaggaacaauugucuaucaaagagguguuuuguugccucaaaagguguggugcgcgaguggcaggagcaaaguaauaaaaggguccuugccuuuaauuggugaagcagauugccuucaugaaaaauaugguggauuaaacaaaagcaagccuuacuacacaggagaacaugcaaaagccauaggaaauugcccaauaugggugaaaacaccuuugaagcuugccaauggaaccaaauauagaccuccugcaaaacuauuaaaggaaagggguuucuucggagcuauugcugguuuccuagaaggaggaugggaaggaaugauugcagguuggcacggauacacaucucacggagcacauggaguagcaguggcggcagaccuuaagaguacacaagaagcuauaaacaagauaacaaaaaaucucaauucuuugagugagcuagaaguaaagaaucuucaaagacuaaguggugccauggaugaacuccacaacgaaauacucgagcuggaugagaaaguggaugaucucagagcugacacuauaagcucacaaauagaacuugcagucuugcuuuccaacgaaggaauaauaaacagugaagacgagcaucuauuggcacuugagagaaaacuaaagaaaaugcugggucccucugcuguagacauaggaaauggaugcuucgaaaccaaacacaaaugcaaccagaccugcuuagacaggauagcugcuggcaccuuuaaugcaggagaauuuucucuccccacuuuugauucauugaacauuacugcugcaucuuuaaaugaugauggauuggauaaccauacuauacugcucuauuacucaacugcugcuucuaguuuggcuguaacauugaugcuagcuauuuuuauuguuuauauggucuccagagacaacguuucaugcuccaucugucuauaa

SEQ ID NO: 59944 - RNA, 1758 nt, Artificial Sequence
  derived and/or modified CDS sequence (wt) from hemagglutinin__InfluenzaB__AHL92002
augaaggcaauaauuguacuacucaugguaguaacauccaaugcagaucgaaucugcacugggauaacaucgucaaacucaccacauguugucaaaacugcuacucaaggggaggucaaugugacugguguaauaccacugacaacaacacccaccaaaucucauuuugcaaaucucaaaggaacagaaaccagagggaaacuaugcccaaaaugccucaacugcacagaucuggacguggccuugggcagaccaaaaugcacggggaacauacccucggcaagaguuucaauacuccaugaagucagaccuguuacaucugggugcuuuccuauaaugcacgacagaacaaaaauuagacagcugccuaaccuucucagaggauacgaacauaucagguuaucaacucauaacguuaucaaugcagaaaaugcaccaggaggacccuacaaaauuggaaccucagggucuugcccuaacguuaccaauggaaacggauuuuucgcaacaauggcuugggccgucccaaaaaacgacaacaacaaaacagcaacaaauucauuaacaauagaaguaccauacauuuguacagaaggagaagaccaaauuaccguuuggggguuccacucugauaacgagacccaaauggcaaagcucuauggggacucaaagccccagaaguucaccucaucugccaacggagugaccacacauuacguuucacagauugguggcuucccaaaucaaacagaagacggaggacuaccacaaagugguagaauuguuguugauuacauggugcaaaaaucugggaaaacaggaacaauuaccuaucaaagagguauuuuauugccucaaaagguguggugcgcaaguggcaggagcaagguaauaaaaggauccuugccuuuaauuggagaagcagauugccuccacgaaaaauacgguggauuaaacaaaagcaagccuuacuacacaggggaacaugcaaaggccauaggaaauugcccaauaugggugaaaacacccuugaagcuggccaauggaaccaaauauagaccuccugcaaaacuauuaaaggaaagggguuucuucggagcuauugcugguuucuuagaaggaggaugggaaggaaugauugcagguuggcacggauacacuucccauggggcacauggaguagcgguggcagcagaccuuaagagcacucaagaggccauaaacaagauaacaaaaaaucucaacucuuugagugagcuggaaguaaagaaucuucaaagacuaagcggugccauggaugaacuccacaacgaaauacuagaacuagacgagaaaguggaugaucucagagcugauacaauaagcucacaaauagaacucgcaguccugcuuuccaaugaaggaauaauaaacagugaagaugagcaucucuuggcgcuugaaagaaagcugaagaaaaugcugggccccucugcuguagagauagggaauggaugcuuugaaaccaaacacaagugcaaccagaccugucucgacagaauagcugcugguaccuuugaugcaggagaauuuucucuccccaccuuugauucacugaauauuacugcugcaucuuuaaaugacgauggauuggauaaucauacuauacugcuuuacuacucaacugcugccuccaguuuggcuguaacauugaugauagcuaucuuuguuguuuauauggucuccagagacaauguuucuugcuccaucugucuauaa

SEQ ID NO: 59945 - RNA, 1758 nt, Artificial Sequence; identical to SEQ ID NO: 59944
  derived and/or modified CDS sequence (wt) from hemagglutinin__InfluenzaB__AHL92013

SEQ ID NO: 59946 - RNA, 1758 nt, Artificial Sequence
  derived and/or modified CDS sequence (wt) from hemagglutinin__InfluenzaB__AHL92024
augaaggcaauaauuguacuacucaugguaguaacauccaaugcagaucgaaucugcacugggauaacaucgucaaacucaccacauguugucaaaacugcuacucaaggggaggucaaugugacugguguaauaccacugacaacaacacccaccaaaucucauuuugcaaaucucaaaggaacagaaaccagagggaaacuaugcccaaaaugccucaacugcacagaucuggacguggccuugggcagaccaaaaugcacggggaacauacccucggcaagaguuucaauacuccaugaagucagaccuguuacaucugggugcuuuccuauaaugcacgacagaacaaaaauuagacagcugccuaaccuucucagaggauacgaacauaucagguuaucaacucauaacguuaucaaugcagaaaaugcaccaggaggacccuacaaaauuggaaccucagggucuugcccuaacguuaccaauggaaacggauuuuucgcaacaauggcuugggccgucccaaaaaacgacaacaacaaaacagcaacaaauucauuaacaauagaaguaccauacauuuguacagaaggagaagaccaaauuaccguuuggggguuccacucugauaacgagacccaaauggcaaagcucuauggggacucaaagccccagaaguucaccucaucugccaauggagugaccacacauuacguuucacagauugguggcuucccaaaucaaacagaagacggaggacuaccacaaagugguagaauuguuguugauuacauggugcaaaaaucugggaaaacaggaacaauuaccuaucaaagagguauuuuauugccucaaaagguguggugcgcaaguggcaggagcaagguaauaaaaggauccuugccuuuaauuggagaagcagauugccuccacgaaaaauacgguggauuaaacaaaagcaagccuuacuacacaggggaacaugcaaaggccauaggaaauugcccaauaugggugaaaacacccuugaagcuggccaauggaaccaaauauagaccuccugcaaaacuauuaaaggaaagggguuucuucggagcuauugcugguuucuuagaagggggaugggaaggaaugauugcagguuggcacggauacacaucccauggggcacauggaguagcgguggcagcagaccuuaagagcacucaagaggccauaaacaagauaacaaaaaaucucaacucuuugagugagcuggaaguaaagaaucuucaaagacuaagcggugccauggaugaacuccacaacgaaauacuagaacuagacgagaaaguggaugaucucagagcugauacaauaagcucacaaauagaacucgcaguccugcuuuccaaugaaggaauaauaaacagugaagaugagcaucucuuggcgcuugaaagaaagcugaagaaaaugcugggccccucugcuguagagauagggaauggaugcuuugaaaccaaacacaagugcaaccagaccugucucgacagaauagcugcugguaccuuugaugcaggagaauuuucucuccccaccuuugauucacugaauauuacugcugcaucuuuaaaugacgauggauuggauaaucauacuauacugcuuuacuacucaacugcugccuccaguuuggcuguaacauugaugauagcuaucuuuguuguuuauauggucuccagagacaauguuucuugcuccaucugucuauaa

SEQ ID NO: 59947 - RNA, 1758 nt, Artificial Sequence
  derived and/or modified CDS sequence (wt) from hemagglutinin__InfluenzaB__AHL92035
augaaggcaauaauuguacuacucaugguaguaacauccaaugcagaucgaaucugcacugggauaacaucgucaaacucaccacauguugucaaaacugcuacucaaggggaggucaaugugacugguguaauaccacugacaacaacacccaccaaaucucauuuugcaaaucucaaaggaacagaaaccagagggaaacuaugcccaaaaugccucaacugcacagaucuggacguggccuugggcagaccaaaaugcacggggaacauacccucggcaagaguuucaauacuccaugaagucagaccuguuacaucugggugcuuuccuauaaugcacgacagaacaaaaauuagacagcugccuaaccuucucagaggauacgaacauaucagguuaucaacucauaacguuaucaaugcagaaaaugcaccaggaggacccuacaaaauuggaaccucagggucuugcccuaacguuaccaauggaaacggauuuuucgcaacaauggcuugggccgucccaaaaaacgacaacaacaaaacagcaacaaauucauuaacaauagaaguaccauacauuuguacagaaggagaagaccaaauuaccguuuggggguuccacucugauaacgaaacccaaauggcaaagcucuauggggacucaaagccccagaaguucaccucaucugccaacggagugaccacacauuacguuucacagauugguggcuucccaaaucaaacagaagacggaggacuaccacaaagugguagaauuguuguugauuacauggugcaaaaaucugggaaaacaggaacaauuaccuaucaaagagguauuuuauugccucaaaaaguguggugcgcaaguggcaggagcaagguaauaaaaggauccuugccuuuaauuggagaagcagauugccuccacgaaaaauacgguggauuaaacaaaagcaagccuuacuacacaggggaacaugcaaaggccauaggaaauugcccaauaugggugaaaacacccuugaagcuggccaauggaaccaaauauagaccuccugcaaaacuauuaaaggaaagggguuucuucggagcuauugcugguuucuuagaaggaggaugggaaggaaugauugcagguuggcacggauacacaucccauggggcacauggaguagcgguggcagcagaccuuaaaagcacucaagaggccauaaacaagauaacaaaaaaucucaacucuuugagugagcuggaaguaaagaaucuucaaagacuaagcggugccauggaugaacuccacaacgaaauacuagaacuagacgagaaaguggaugaucucagagcugauacaauaagcucacaaauagaacucgcaguccugcuuuccaaugaaggaauaauaaacagugaagaugagcaucucuuggcgcuugaaagaaagcugaagaaaaugcugggccccucugcuguagagauagggaauggaugcuuugaaaccaaacacaagugcaaccagaccugucucgacagaauagcugcugguaccuuugaugcaggagaauuuucucuccccaccuuugauucacugaauauuacugcugcaucuuuaaaugacgauggauuggauaaucauacuauacugcuuuacuacucaacugcugccuccaguuuggcuguaacauugaugauagcuaucuuuguuguuuauauggucuccagagacaauguuucuugcuccaucugucuauaa

SEQ ID NO: 59948 - RNA, 1758 nt, Artificial Sequence
  derived and/or modified CDS sequence (wt) from hemagglutinin__InfluenzaB__AHL92046
augaaggcaauaauuguacuacucaugguaguaacauccaaugcagaucgaaucugcacugggauaacaucgucaaacucaccacauguugucaaaacugcuacucaaggggaggucaaugugacugguguaauaccacugacaacaacacccaccaaaucucauuuugcaaaucucaaaggaacagaaaccagagggaaacuaugcccaaaaugccucaacugcacagaucuggacguggccuugggcagaccaaaaugcacggggaacauacccucggcaagaguuucaauacuccaugaagucagaccuguuacaucugggugcuuuccuauaaugcacgacagaacaaaaauuagacagcugccuaaccuucucagaggauacgaacauaucagguuaucaacucauaacguuaucaaugcagaaaaugcaccaggaggacccuacaaaauuggaaccucagggucuugcccuaacguuaccaauggaaacggauuuuucgcaacaauggcuugggccgucccaaaaaacgacaacaacaaaacagcaacaaauucauuaacaauagaaguaccauacauuuguacagaaggagaagaccaaauuaccguuuggggguuccacucugauaacgagacccaaauggcaaagcucuauggggacucaaagccccagaaguucaccucaucugccaacggagugaccacacauuacguuucacagauugguggcuucccaaaucaaacagaagacggaggacugccacaaagugguagaauuguuguugauuacauggugcaaaaaucugggaaaacaggaacaauuaccuaucaaagagguauuuuauugccucaaaagguguggugcgcaaguggcagaagcaagguaauaaaaggauccuugccuuuaauuggagaagcagauugccuccacgaaaaauacgguggauuaaacaaaagcaagccuuacuacacaggggaacaugcaaaggccauaggaaauugcccaauaugggugaaaacacccuugaagcuggccaauggaaccaaauauagaccuccugcaaaacuauuaaaggaaagggguuucuucggagcuauugcugguuucuuagaaggaggaugggaaggaaugauugcagguuggcacggauacacaucccauggggcacauggaguagcgguggcagcagaccuuaaaagcacucaagaggccauaaacaagauaacaaaaaaucucaacucuuugagugagcuggaaguaaagaaucuucaaagacuaagcggugccauggaugaacuccacaacgaaauacuagaacuagacgagaaaguggaugaucucagagcugauacaauaagcucacaaauagaacucgcaguccugcuuuccaaugaaggaauaauaaacagugaagaugagcaucucuuggcgcuugaaagaaagcugaagaaaaugcugggccccucugcuguagagauagggaauggaugcuuugaaaccaaacacaagugcaaccagaccugucucgacagaauagcugcugguaccuuugaugcaggagaauuuucucuccccaccuuugauucacugaauauuacugcugcaucuuuaaaugacgauggauuggauaaucauacuauacugcuuuacuacucaacugcugccuccaguuuggcuguaacauugaugauagcuaucuuuguuguuuauauggucuccagagacaauguuucuugcuccaucugucuauaa

SEQ ID NO: 59949 - RNA, 1758 nt, Artificial Sequence; identical to SEQ ID NO: 59245
  derived and/or modified CDS sequence (wt) from hemagglutinin__InfluenzaB__AHL92057

SEQ ID NO: 59950 - RNA, 1758 nt, Artificial Sequence
  derived and/or modified CDS sequence (wt) from hemagglutinin__InfluenzaB__AHL92068
augaaggcaauaauuguacuacucaugguaguaacauccaaugcagaucgaaucugcacugggauaacaucgucaaacucaccacauguugucaaaacugcuacucaaggggaggucaaugugacugguguaauaccacugacaacaacacccaccaaaucucauuuugcaaaucucaaaggaacagaaaccagagggaaacuaugcccaaaaugccucaacugcacagaucuggacguggccuugggcagaccaaaaugcacggggaacauacccucggcaagaguuucaauacuccaugaagucagaccuguuacaucugggugcuuuccuauaaugcacgacagaacaaaaauuagacagcugccuaaccuucucagaggauacgaacauaucagguuaucaacucauaacguuaucaaugcagaaaaugcaccaggaggacccuacaaaauuggaaccucagggucuugcccuaacauuaccaauggaaacggauuuuucgcaacaauggcuugggccgucccaaaaaacgacaacaacaaaacagcaacaaauucauuaacaauagaaguaccauacauuuguacagaaggagaagaccaaauuaccguuuggggguuccacucugauaacgagacccaaauggcaaagcucuauggggacucaaagccccagaaguucaccucaucugccaacggagugaccacacauuacguuucacagguugguggcuucccaaaucaaacagaagacggaggacuaccacaaagugguagaauuguuguugauuacauggugcaaaaaucugggaaaacaggaacaauuaccuaucaaagagguauuuuauugccucaaaagguguggugcgcaaguggcaggagcaagguaauaaaaggauccuugccuuuaauuggagaagcagauugccuccacgaaaaauacgguggauuaaacaaaagcaagccuuacuacacaggggaacaugcaaaggccauaggaaauugcccaauaugggugaaaacacccuugaagcuggccaauggaaccaaauauagaccuccugcaaaacuauuaaaggaaagggguuucuucggagcuauugcugguuucuuagaaggaggaugggaaggaaugauugcagguuggcacggauacacaucccauggggcacauggaguugcgguggcagcagaccuuaagagcacucaagaggccauaaacaagauaacaaaaaaucucaacucuuugagugagcuggaaguaaagaaucuucaaagacugagcggugccauggaugaacuccacaacgaaauacuagaacuagacgagaaaguggaugaucucagagcugauacaauaagcucacaaauagaacucgcaguccugcuuuccaaugaaggaauaauaaacagugaagaugagcaucucuuggcgcuugaaagaaagcugaagaaaaugcugggccccucugcuguagagauagggaauggaugcuuugaaaccaaacacaagugcaaccagaccugucucgacagaauagcugcugguaccuuugaugcaggagaauuuucucuccccaccuuugauucacugaauauuacugcugcaucuuuaaaugacgauggauuggauaaucauacuauacugcuuuacuacucaacugcugccuccaguuuggcuguaacauugaugauagcuaucuuuguuguuuauauggucuccagagacaauguuucuugcuccaucugucuauaa

SEQ ID NO: 59951 - RNA, 1758 nt, Artificial Sequence
  derived and/or modified CDS sequence (wt) from hemagglutinin__InfluenzaB__AHL92079
augaaggcaauaauuguacuacucaugguaguaacauccaaugcagaucgaaucugcacugggauaacaucgucaaacucaccacauguugucaaaacugcuacucaaggggaggucaaugugacugguguaauaccacugacaacaacacccaccaaaucucauuuugcaaaucucaaaggaacagaaaccagagggaaacuaugcccaaaaugccucaacugcacagaucuggacguggccuugggcagaccaaaaugcacggggaacauacccucggcaagaguuucaauacuccaugaagucagaccuguuacaucugggugcuuuccuauaaugcacgacagaacaaaaauuagacagcugccuaaccuucucagaggauacgaacauaucagguuaucaacucauaacguuaucaaugcagaaaaugcaccaggaggacccuacaaaauuggaaccucagggucuugcccuaacauuaccaauggaaacggauuuuucgcaacaauggcuugggccgucccaaaaaacgacaacaacaaaacagcaacaaauucauuaacaauagaaguaccauacauuuguacagaaggagaagaccaaauuaccguuuggggguuccacucugauaacgagacccaaauggcaaagcucuauggggacucaaagccccagaaguucaccucaucugccaacggagugaccacacauuacguuucacagauugguggcuucccaaaucaaacagaagacggaggacuaccacaaagugguagaauuguuguugauuacauggugcaaaaaucugggaaaacaggaacaauuaccuaucaaagagguauuuuauugccucaaaagguguggugcgcaaguggcaggagcaagguaauaaaaggauccuugccuuuaauuggagaagcagauugccuccacgaaaaauacgguggauuaaacaaaagcaagccuuacuacacaggggaacaugcaaaggccauaggaaauugcccaauaugggugaaaacacccuugaagcuggccaauggaaccaaauauagaccuccugcaaaacuauuaaaggaaagggguuucuucggagcuauugcugguuucuuagaaggaggaugggaaggaaugauugcagguuggcacggauacacaucccauggggcacauggaguugcgguggcagcagaccuuaagagcacucaagaggccauaaacaagauaacaaaaaaucucaacucuuugagugagcuggaaguaaagaaucuucaaagacuaagcggugccauggaugaacuccacaacgaaauacuagagcuagacgagaaaguggaugaucucagagcugauacaauaagcucacaaauagaacucgcaguccugcuuuccaaugaaggaauaauaaacagugaagaugagcaucucuuggcgcuugaaagaaagcugaagaaaaugcugggccccucugcuguagagauagggaauggaugcuuugaaaccaaacacaagugcaaccagaccugucucgacagaauagcugcugguaccuuugaugcaggagaauuuucucuccccacuuuugauucacugaauauuacugcugcaucuuuaaaugacgauggauuggauaaucauacuauacugcuuuacuacucaacugcugccuccaguuuggcuguaacauugaugauagcuaucuuuguuguuuauauggucuccagagacaauguuucuugcuccaucugucuauaa

SEQ ID NO: 59952 - RNA, 1758 nt, Artificial Sequence
  derived and/or modified CDS sequence (wt) from hemagglutinin__InfluenzaB__AHL92090
augaaggcaauaauuguacuacucaugguaguaacauccaaugcagaucgaaucugcacugggauaacaucgucaaacucaccacauguugucaaaacugcuacucaaggggaggucaaugugacugguguaauaccacugacaacaacacccaccaaaucucauuuugcaaaucucaaaggaacagaaaccagagggaaacuaugcccaaaaugccucaacugcacagaucuggacguggccuugggcagaccaaaaugcacggggaacauacccucggcaagaguuucaauacuccaugaagucagaccuguuacaucugggugcuuuccuauaaugcacgacagaacaaaaauuagacagcugccuaaccuucucagaggauacgaacauaucagguuaucaacucauaacguuaucaaugcagaaaaugcaccaggaggacccuacaaaauuggaaccucagggucuugcccuaacauuaccaauggaaacggauuuuucgcaacaauggcuugggccgucccaaaaaacgacaacaacaaaacagcaacaaauucauuaacaauagaaguaccauacauuuguacagaaggagaagaccaaauuaccguuuggggguuccacucugauaacgagacccaaauggcaaagcucuauggggacucaaagccccagaaguucaccucaucugccaacggagugaccacacauuacguuucacagauugguggcuucccaaaucaaacagaagacggaggacuaccacaaagugguagaauuguuguugauuacauggugcaaaaaucugggaaaacaggaacaauuaccuaucaaagagguauuuuauugccucaaaagguguggugcgcaaguggcaggagcaagguaauaaaaggauccuugccuuuaauuggagaagcagauugccuccacgaaaaauacgguggauuaaacaaaagcaagccuuacuacacaggggaacaugcaaaggccauaggaaauugcccaauaugggugaaaacacccuugaagcuggccaauggaaccaaauauagaccuccugcaaaacuauuaaaggaaagggguuucuucggagcuauugcugguuucuuagaaggaggaugggaaggaaugauugcagguuggcacggauacacaucccauggggcacauggaguugcgguggcagcagaccuuaagagcacucaagaggccauaaacaagauaacaaaaaaucucaacucuuugagugagcuggaaguaaagaaucuucaaagacuaagcggugccauggaugaacuccacaacgaaauacuagagcuagacgagaaaguggaugaucucagagcugauacaauaagcucacaaauagaacucgcaguccugcuuuccaaugaaggaauaauaaacagugaagaugagcaucucuuggcgcuugaaagaaagcugaagaaaaugcugggccccucugcuguagagauagggaauggaugcuuugaaaccaaacacaagugcaaccagaccugucucgacagaauagcugcugguaccuuugaugcaggagaauuuucucuccccaccuuugauucacugaauauuacugcugcaucuuuaaaugacgauggauuggauaaucauacuauacugcuuuacuacucaacugcugccuccaguuuggcuguaacauugaugauagcuaucuuuguuguuuauauggucuccagagacaauguuucuugcuccaucugucuauaa

SEQ ID NO: 59953 - RNA, 1758 nt, Artificial Sequence
  derived and/or modified CDS sequence (wt) from hemagglutinin__InfluenzaB__AHL92101
augaaggcaauaauuguacuacucaugguaguaacauccaaugcagaucgaaucugcacugggauaacaucgucaaacucaccacauguugucaaaacugcuacucaaggggaggucaaugugacugguguaauaccacugacgacaacacccaccaaaucucauuuugcaaaucucaaaggaacagaaaccagagggaaacuaugcccaaaaugccucaacugcacagaucuggacguggccuugggcagaccaaaaugcacggggaacauacccucggcaagaguuucaauacuccaugaagucagaccuguuacaucugggugcuuuccuauaaugcacgacagaacaaaaauuagacagcugccuaaccuucucagaggauacgaacauaucagguuaucaacucauaacguuaucaaugcagaaaaugcaccaggaggacccuacaaaauuggaaccucagggucuugcccuaacguuaccaauggaaacggauuuuucgcaacaauggcuugggccgucccaaaaaacgauaacaacaaaacagcaacaaauucauuaacaauagaaguaccauacauuuguacagaaggagaagaccaaauuaccguuuggggguuccacucugauaacgaaacccaaauggcaaagcucuauggggacucaaagccccagaaguucaccucaucugccaacggagugaccacacauuacguuucacagauugguggcuucccaaaucaaacagaagacggaggacuaccacaaagugguagaauuguuguugauuacauggugcaaaaaucugggaaaacuggaacaauuaccuaucaaagagguauuuuauugccucaaaaaguguggugcgcaaguggcaggagcaagguaauaaaaggauccuugccuuuaauuggagaagcagauugccuccacgaaaaauacgguggauuaaacaaaagcaagccuuacuacacaggggaacaugcaaaggccauaggaaauugcccaauaugggugaaaacacccuugaagcuggccaauggaaccaaauauagaccuccugcaaaacuauuaaaggaaagggguuucuucggagcuauugcugguuucuuagaaggaggaugggaaggaaugauugcagguuggcacggauacacaucccauggggcacauggaguagcgguggcagcagaccuuaaaagcacucaagaggccauaaacaagauaacaaaaaaucucaacucuuugagugagcuggaaguaaagaaucuucaaagacuaagcggugccauggaugaacuccacaacgaaauacuagaacuagacgagaaaguggaugaucucagagcugauacaauaagcucacaaauagaacucgcaguccugcuuuccaaugaaggaauaauaaacagugaagaugagcaucucuuggcgcuugaaagaaagcugaagaaaaugcugggccccucugcuguagagauagggaauggaugcuuugaaaccaaacacaagugcaaccagaccugucucgacagaauagcugcugguaccuuugaugcaggagaauuuucucuccccaccuuugauucacuaaauauuacugcugcaucuuuaaaugacgauggauuggauaaucauacuauacugcuuuacuacucaacugcugccuccaguuuggcuguaacauugaugauagcuaucuuuguuguuuauauggucuccagagacaauguuucuugcuccaucugucuauaa

SEQ ID NO: 59954 - RNA, 1755 nt, Artificial Sequence
  derived and/or modified CDS sequence (wt) from hemagglutinin__InfluenzaB__AHL92112
augaaggcaauaauuguacuacucaugguaguaacauccaaugcagaucgaaucugcacuggaauaacaucuucaaacucaccucauguggucaaaacagccacucaaggggaggucaaugugacuggugugauaccacuaacaacaacaccaacaaaaucuuauuuugcaaaucucaaaggaacaaggaccagagggaaacuaugcccagacugucucaacugcacagaucuggauguggcuuugggcagaccaauguguguggggaccacaccuucggcgaaagcuucaauacuccacgaagucagaccuguuacauccgggugcuuuccuauaaugcacgacagaacaaaaaucaggcaacuacccaaucuucucagaggauaugaaaauaucaggcuaucaacccaaaacgucaucgaugcggaaaaggcaccaggaggacccuacagacuuggaaccucaggaucuugcccuaacgcuaccaguaagagcggauuuuucgcaacaauggcuugggcugucccaaaggacaacaacaaaaaugcaacgaacccacuaacaguagaaguaccauacauuuguacagaaggggaagaccaaaucacuguuuggggguuccauucagauaacaaaacccaaaugaagaaccucuauggagacucaaauccucaaaaguucaccucaucugcuaauggaguaaccacacacuauguuucucagauuggcagcuucccagaucaaacagaagacggaggacuaccacaaagcggcaggauuguuguugauuacaugaugcaaaaaccugggaaaacaggaacaauugucuaccaaagagguguuuuguugccucaaaagguguggugcgcgaguggcaggagcaaaguaauaaaaggguccuugccuuuaauuggugaagcagauugccuucaugaaaaauacgguggauuaaacaaaagcaagccuuacuacacaggagaacaugcaaaagccauaggaaauugcccaauaugggugaaaacaccuuugaagcuugccaauggaaccaaauauagaccuccugcaaaacuauuaaaggaaagggguuucuucggagcuauugcugguuuccuagaaggaggaugggaaggaaugauugcaggcuggcacggauacacaucucacggagcacauggaguggcaguggcggcggaccuuaagaguacgcaagaagcuauaaacaagauaacaaaaaaucucaauucuuugagugagcuagaaguaaagaaucuucaaagacuaaguggugccauggaugaacuccacaacgaaauacucgagcuggaugagaaaguggaugaucucagagcugacacuauaagcucgcaaauagaacuugcagucuugcuuuccaacgaaggaauaauaaacagugaagaugagcaucuauuggcacuugagagaaaacuaaagaaaaugcugggucccucugcuguagagauaggaaauggaugcuucgaaaccaaacacaagugcaaccagaccugcuuagacaggauagcugcuggcaccuuuaaugcaggagaauuuucucuccccacuuuugauucacugaacauuacugcugcaucuuuaaaugaugauggauuggauaaccauacuauacugcucuauuacucaacugcugcuucuaguuuggcuguaacauugaugcuagcuauuuuuauuguuuauauggucuccagagacaacguuucaugcuccaucugucuauaa

SEQ ID NO: 59955 - RNA, 1758 nt, Artificial Sequence
  derived and/or modified CDS sequence (wt) from hemagglutinin__InfluenzaB__AHL92123
augaaggcaauaauuguacuacucaugguaguaacauccaaugcagaucgaaucugcacugggauaacaucgucaaacucaccacauguugucaaaacugcuacucaaggggaggucaaugugacugguguaauaccacugacaacaacacccaccaaaucucauuuugcaaaucucaaaggaacagaaaccagagggaaacuauguccaaaaugccucaacugcacagaucuggacguggccuugggcagaccaaaaugcacggggaacauacccucggcaagaguuucaauacuccaugaagucagaccuguuacaucugggugcuuuccuauaaugcacgacagaacaaaaauuagacagcugccuaaccuucucagaggauacgaacauaucagguuaucaacucauaacguuaucaaugcagaaaaugcaccaggaggacccuacaaaauuggaaccucagggucuuguccuaacguuaccaauggaaacggauuuuucgcaacaauggcuugggccgucccaaaaaacgacaacaacaaaacagcaacaaauucauuaacaauagaaguaccauacauuuguacagaaggagaagaccaaauuaccguuuggggguuccacucugauaacgagacccaaauggcaaagcucuauggggacucaaagccccagaaguucaccucaucugccaacggagugaccacacauuacguuucacagauugguggcuucccaaaucaaacagaagacggaggacuaccacaaagugguagaauuguuguugauuacauggugcaaaaaucugggaaaacaggaacaauuaccuaucaaagagguauuuuauugccucaaaagguguggugcgcaaguggcaggagcaagguaauaaaaggauccuugccuuuaauuggagaagcagauugccuccacgaaaaauacgguggauuaaacaaaagcaagccuuacuacacaggggaacaugcaaaggccauaggaaauugcccaauaugggugaaaacacccuugaagcuggccaauggaaccaaauauagaccuccugcaaaacuauuaaaggaaagggguuucuucggagcuauugcugguuucuuagaaggaggaugggaaggaaugauugcagguuggcacggauacacaucccauggggcacauggaguagcgguggcagcagaccuuaagagcacucaagaggccauaaacaagauaacaaaaaaucucaacucuuugagugagcuggaaguaaagaaucuucaaagacuaagcggugccauggaugaacuccacaacgaaauacuagaacuagacgagaaaguggaugaucucagagcugauacaauaagcucacaaauagaacucgcaguccugcuuuccaaugaaggaauaauaaacagugaagaugagcaucucuuggcgcuugaaagaaagcugaagaaaaugcugggccccucugcuguagagauagggaauggaugcuuugaaaccaaacacaagugcaaccagaccugucucgacagaauagcugcugguaccuuugaugcaggagaauuuucucuccccaccuuugauucacugaauauuacugcugcaucuuuaaaugacgauggauuggauaaucauacuauacugcuuuacuacucaacugcugccuccaguuuggcuguaacauugaugauagcuaucuuuguuguuuauauggucuccagagacaauguuucuugcuccaucugucuauaa

SEQ ID NO: 59956 - RNA, 1758 nt, Artificial Sequence
  derived and/or modified CDS sequence (wt) from hemagglutinin__InfluenzaB__AHL92134
augaaggcaauaauuguacuacucaugguaguaacauccaaugcagaucgaaucugcacugggauaacaucgucaaacucaccacauguugucaaaacugcuacucaaggggaggucaaugugacugguguaauaccacugacaacaacacccaccaaaucucauuuugcaaaucucaaaggaacagaaaccagagggaaacuaugcccaaaaugccucaacugcacagaucuggacguggccuugggcagaccaaaaugcacggggaacauacccucggcaagaguuucaauacuccaugaagucagaccuguuacaucugggugcuuuccuauaaugcacgacagaacaaaaauuagacagcugccuaaccuucucagaggauacgaacauaucagguuaucaacucauaacguuaucaaugcagaaaaugcaccaggaggacccuacaaaauuggaaccucagggucuugcccuaacauuaccaauggaaacggauuuuucgcaacaauggcuugggccgucccaaaaaacgacaacaacaaaacagcaacaaauucauuaacaauagaaguaccauacauuuguacagaaggagaagaccaaauuaccguuuggggguuccacucugauaacgagacccaaauggcaaagcucuauggggacucaaagccccagaaguucaccucaucugccaacggagugaccacacauuacguuucacagauugguggcuucccaaaucaaacagaagacggaggacuaccacaaagugguagaauuguuguugauuacauggugcaaaaaucugggaaaacaggaacaauuaccuaucaaagagguauuuuauugccucaaaagguguggugcgcaaguggcaggagcaagguaauaaaaggauccuugccuuuaauuggagaagcagauugccuccacgaaaaauacgguggauuaaacaaaagcaagccuuacuacacaggggaacaugcaaaggccauaggaaauugcccaauaugggugaaaacacccuugaagcuggccaauggaaccaaauauagaccuccugcaaaacuauuaaaggaaagggguuucuucggagcuauugcugguuucuuagaaggaggaugggaaggaaugauugcagguuggcacggauacacaucccauggggcacauggaguugcgguggcagcagaccuuaagagcacucaagaggccauaaacaagauaacaaaaaaucucaacucuuugagugagcuggaaguaaagaaucuucaaagacuaagcggugccauggaugaacuccacaacgaaauacuagaacuagacgagaaaguggaugaucucagagcugauacaauaagcucacaaauagaacucgcaguccugcuuuccaaugaaggaauaauaaacagugaagaugagcaucucuuggcgcuugaaagaaagcugaagaaaaugcugggccccucugcuguagagauagggaauggaugcuuugaaaccaaacacaagugcaaccagaccugucucgacagaauagcugcugguaccuuugaugcaggagaauuuucucuccccaccuuugauucacugaauauuacugcugcaucuuuaaaugacgauggauuggauaaucauacuauacugcuuuacuacucaacugcugccuccaguuuggcuguaacauugaugauagcuaucuuuguuguuuauauggucuccagagacaauguuucuugcuccaucugucuauaa

SEQ ID NO: 59957 - RNA, 1758 nt, Artificial Sequence; identical to SEQ ID NO: 59956
  derived and/or modified CDS sequence (wt) from hemagglutinin__InfluenzaB__AHL92145

SEQ ID NO: 59958 - RNA, 1758 nt, Artificial Sequence; identical to SEQ ID NO: 59947
  derived and/or modified CDS sequence (wt) from hemagglutinin__InfluenzaB__AHL92156

SEQ ID NO: 59959 - RNA, 1758 nt, Artificial Sequence; identical to SEQ ID NO: 59952
  derived and/or modified CDS sequence (wt) from hemagglutinin__InfluenzaB__AHL92167

SEQ ID NO: 59960 - RNA, 1758 nt, Artificial Sequence; identical to SEQ ID NO: 59947
  derived and/or modified CDS sequence (wt) from hemagglutinin__InfluenzaB__AHL92178

SEQ ID NO: 59961 - RNA, 1758 nt, Artificial Sequence
  derived and/or modified CDS sequence (wt) from hemagglutinin__InfluenzaB__AHL92189
augaaggcaauaauuguacuacucaugguaguaacauccaaugcagaucgaaucugcacugggauaacaucgucaaacucaccacauguugucaaaacugcuacucaaggggaggucaaugugacugguguaauaccacugacaacaacacccaccaaaucucauuuugcaaaucucaaaggaacagaaaccagagggaaacuaugcccaaaaugccucaacugcacagaucuagauguggccuugggcagaccaaaaugcacggggaacauacccucggcaagaguuucaauacuccaugaagucagaccuguuacaucugggugcuuuccuauaaugcacgacagaacaaaaauuagacagcugccuaaccuucucagaggauacgaacauaucagguuaucaacucauaacguuaucaaugcagaaaaugcaccaggaggacccuacaaaauuggaaccucagggucuugcccuaacguuaccaauggaaacggauuuuucgcaacaauggcuugggccgucccaaaaaacgacaacaacaaaacagcaacaaauucauuaacaauagaaguaccauacauuuguacagaaggagaagaccaaauuaccguuuggggguuccacucugauaacgaaacccaaauggcaaagcucuauggggacucaaagccccagaaguucaccucaucugccaacggagugaccacacauuacguuucacagauugguggcuucccaaaucaaacagaagacggaggacuaccacaaagugguagaauuguuguugauuacauggugcaaaaaucugggaaaacaggaacaauuaccuaucaaagagguauuuuauugccucaaaaaguguggugcgcaaguggcaggagcaagguaauaaaaggauccuugccuuuaauuggagaagcagauugccuccacgaaaaauacgguggauuaaacaaaagcaagccuuacuacacaggggaacaugcaaaggccauaggaaauugcccaauaugggugaaaacacccuugaagcuggccaauggaaccaaauauagaccuccugcaaaacuauuaaaggaaagggguuucuucggagcuauugcugguuucuuagaaggaggaugggaaggaaugauugcagguuggcacggauacacaucccauggggcacauggaguagcgguggcagcagaccuuaaaagcacucaagaggccauaaacaagauaacaaaaaaucucaacucuuugagugagcuggaaguaaagaaucuucaaagacuaagcggugccauggaugaacuccacaacgaaauacuagaacuagacgagaaaguggaugaucucagagcugauacaauaagcucacaaauagaacucgcaguccugcuuuccaaugaaggaauaauaaacagugaagaugagcaucucuuggcgcuugaaagaaagcugaagaaaaugcugggccccucugcuguagagauagggaauggaugcuuugaaaccaaacacaagugcaaccagaccugucucgacagaauagcugcugguaccuuugaugcaggagaauuuucucuccccaccuuugauucacugaauauuacugcugcaucuuuaaaugacgauggauuggauaaucauacuauacugcuuuacuacucaacugcugccuccaguuuggcuguaacauugaugauagcuaucuuuguuguuuauauggucuccagagacaauguuucuugcuccaucugucuauaa

SEQ ID NO: 59962 - RNA, 1755 nt, Artificial Sequence; identical to SEQ ID NO: 59954
  derived and/or modified CDS sequence (wt) from hemagglutinin__InfluenzaB__AHL92200

SEQ ID NO: 59963 - RNA, 1758 nt, Artificial Sequence
  derived and/or modified CDS sequence (wt) from hemagglutinin__InfluenzaB__AHL92211
augaaggcaauaauuguacuacucaugguaguaacauccaaugcagaucgaaucugcacugggauaacaucgucaaacucaccacauguugucaaaacugcuacucaaggggaggucaaugugacugguguaauaccacugacaacaacacccaccaaaucucauuuugcaaaucucaaaggaacagaaaccagagggaaacuauguccaaaaugccucaacugcacagaucuggacguggccuugggcagaccaaaaugcacggggaacauacccucggcaagaguuucaauacuccaugaagucagaccuguuacaucugggugcuuuccuauaaugcacgacagaacaaaaauuagacagcugccuaaccuucucagaggauacgaacauaucagguuaucaacucauaacguuaucaaugcagaaaaugcaccaggaggacccuacaaaauuggaaccucagggucuuguccuaacguuaccaauggaaacggauuuuucgcaacaauggcuugggccgucccaaaaaacgacaacaacaaaacagcaacaaauucauuaacaauagaaguaccauacauuuguacagaaggagaagaccaaauuaccguuuggggguuccacucugauaacgagacccaaauggcaaagcucuauggggacucaaagccccagaaguucaccucaucugccaacggagugaccacacauuacguuucacagauugguggcuucccaaaucaaacagaagacggaggacuaccacaaagugguagaauuguuguugauuacauggugcaaaaaucugggaaaacaggaacaauuaccuaucaaagagguauuuuauugccucaaaagguguggugcgcaaguggcaggagcaagguaauaaaaggauccuugccuuuaauuggagaagcagauugccuccacgaaaaauacgguggauuaaacaaaagcaagccuuacuacacaggggaacaugcaaaggccauaggaaauugcccaauaugggugaaaacacccuugaagcuggccaauggaaccaaauauagaccuccugcaaaacuauuaaaggaaagggguuucuucggagcuauugcugguuucuuagaaggaggaugggaaggaaugauugcagguuggcacggauacacaucccauggggcacauggaguagcgguggcagcagaccuuaagagcacucaagaggccauaaacaagauaacaaaaaaucucaacucuuugagugagcuggaaguaaagaaucuucaaagacuaagcggugccauggaugaacuccacaacgaaauacuagaacuagacgagaaaguggaugaucucagagcugauacaauaagcucacaaauagaacucgcaguccugcuuuccaaugaaggaauaauaaacagugaagaugagcaucucuuggcgcuugaaagaaagcugaagaaaaugcugggccccucugcuguagagauagggaauggaugcuuugaaaccaaacacaagugcaaccagaccugucucgacagaauagcugcugguaccuuugaugcaggagaauuuucucuccccaccuuugauucacugaauauuacugcugcaucuuuaaaugacgauggauuggauaaucauacuauacugcuuuacuauucaacugcugccuccaguuuggcuguaacauugaugauagcuaucuuuguuguuuauauggucuccagagacaauguuucuugcuccaucugucuauaa

SEQ ID NO: 59964 - RNA, 1758 nt, Artificial Sequence
  derived and/or modified CDS sequence (wt) from hemagglutinin__InfluenzaB__AHL92222
augaaggcaauaauuguacuacucaugguaguaacaucuaaugcagaucgaaucugcacugggauaacaucgucaaacucaccacauguugucaaaacugcuacucaaggggaggucaaugugacugguguaauaccacugacaacaacacccaccaaaucucauuuugcaaaucucaaaggaacagaaaccagagggaaacuaugcccaaaaugccucaacugcacagaucuggacguggccuugggcagaccaaaaugcacggggaacauacccucggcaagaguuucaauacuccaugaagucagaccuguuacaucugggugcuuuccuauaaugcacgacagaacaaaaauuagacagcugccuaaccuucucagaggauacgaacauaucagguuaucaacucauaacguuaucaaugcagaaaaugcaccaggaggacccuacaaaauuggaaccucagggucuugcccuaacguuaccaauggaaacggauuuuucgcaacaauggcuugggccgucccaaaaaacgacaacaacaaaacagcaacaaauucauuaacaauagaaguaccauacauuuguacagaaggagaagaccaaauuaccguuuggggguuccacucugauaacgagacccaaauggcaaagcucuauggggacucaaagccccagaaguucaccucaucugccaacggagugaccacacauuacguuucacagauugguggcuucccaaaucaaacagaagacggaggacuaccacaaagugguagaauuguuguugauuacauggugcaaaaaucugggaaaacaggaacaauuaccuaucaaagagguauuuuauugccucaaaagguguggugcgcaaguggcaggagcaagguaauaaaaggaucccugccuuuaauuggagaagcagauugccuccacgaaaaauacgguggauuaaacaaaagcaagccuuauuacacaggggaacaugcaaaggccauaggaaauugcccaauaugggugaaaacacccuugaagcuggccaauggaaccaaauauagaccuccugcaaaacuauuaaaggaaagggguuucuucggagcuauugcugguuucuuagaaggaggaugggaaggaaugauugcagguuggcacggauacacaucccauggggcacauggaguagcgguggcagcagaccuuaagagcacucaagaggccauaaacaagauaacaaaaaaucucaacucuuugagugagcuggaaguaaagaaucuucaaagacuaagcggugccauggaugaacuccacaacgaaauacuagaacuagacgagaaaguggaugaucucagagcugauacaauaagcucacaaauagaacucgcaguccugcuuuccaaugaaggaauaauaaacagugaagaugagcaucucuuggcgcuugaaagaaagcugaagaaaaugcugggccccucugcuguagagauagggaauggaugcuuugaaaccaaacacaagugcaaccagaccugucucgacagaauagcugcugguaccuuugaugcaggagaauuuucucuccccaccuuugauucacugaauauuacugcugcaucuuuaaaugacgauggauuggauaaucauacuauacugcuuuauuacucaacugcugccuccaguuuggcuguaacauugaugauagcuaucuuuguuguuuauauggucuccagagacaauguuucuugcuccaucugucuauaa

SEQ ID NO: 59965 - RNA, 1755 nt, Artificial Sequence
  derived and/or modified CDS sequence (wt) from hemagglutinin__InfluenzaB__AHL92233
augaaggcaauaauuguacuacucaugguaguaacauccaaugcagaucgaaucugcacuggaauaacaucuucaaacucaccucauguggucaaaacagccacucaaggggaggucaaugugacuggugugauaccacuaacaacaacaccaacaaaaucuuauuuugcaaaucucaaaggaacaaggaccagagggaaacuaugcccagacugucucaacugcacagaucuggauguggcuuugggcagaccaauguguguggggaccacaccuucggcgaaagcuucaauacuccacgaagucagaccuauuacauccgggugcuuuccuauaaugcacgacagaacaaaaaucaggcaacuacccaaucuucucagaggauaugaaaauaucaggcuaucaacccaaaacgucaucgaugcggaaaaggcaccaggaggacccuacagacuuggaaccucaggaucuugcccuaacgcuaccaguaagagcggauuuuucgcaacaauggcuugggcugucccaaaggacaacaacaaaaaugcaacgaacccacuaacaguagaaguaccauacauuuguacagaaggggaagaccaaaucacuguuuggggguuccauucagauaacaaaacccaaaugaagaaccucuauggagacucaaauccucaaaaguucaccucaucugcuaauggaguaaccacacacuauguuucucagauuggcagcuucccagaucaaacagaagacggaggacuaccacaaagcggcaggauuguuguugauuacaugaugcaaaaaccugggaaaacaggaacaauugucuaccaaagagguguuuuguugccucaaaagguguggugcgcgaguggcaggagcaaaguaauaaaaggguccuugccuuuaauuggugaagcagauugccuucaugaaaaauacgguggauuaaacaaaagcaagccuuacuacacaggagaacaugcaaaagccauaggaaauugcccaauaugggugaaaacaccuuugaagcuugccaauggaaccaaauauagaccuccugcaaaacuauuaaaggaaagggguuucuucggagcuauugcugguuuccuagaaggaggaugggaaggaaugauugcaggcuggcacggauacacaucucacggagcacauggaguggcaguggcggcggaccuuaagaguacgcaagaagcuauaaacaagauaacaaaaaaucucaauucuuugagugagcuagaaguaaagaaucuucaaagacuaaguggugccauggaugaacuccacaacgaaauacucgagcuggaugaaaaaguggaugaucucagagcugacacuauaagcucgcaaauagaacuugcagucuugcuuuccaacgaaggaauaauaaacagugaagaugagcaucuauuggcacuugagagaaaacuaaagaaaaugcugggucccucugcuguagagauaggaaauggaugcuucgaaaccaaacacaagugcaaccagaccugcuuagacaggauagcugcuggcaccuuuaaugcaggagaauuuucucuccccacuuuugauucacugaacauuacugcugcaucuuuaaaugaugauggauuggauaaccauacuauacugcucuauuacucaacugcugcuucuaguuuggcuguaacauugaugcuagcuauuuuuauuguuuauauggucuccagagacaacguuucaugcuccaucugucuauaa

SEQ ID NO: 59966 - RNA, 1758 nt, Artificial Sequence
  derived and/or modified CDS sequence (wt) from hemagglutinin__InfluenzaB__AHL92244
augaaggcaauaauuguacuacucaugguaguaacauccaaugcagaucgaaucugcacugggauaacaucgucaaacucaccacauguugucaaaacugcuacucaaggggaggucaaugugacugguguaauaccacugacaacaacacccaccaaaucucauuuugcaaaucucaaaggaacagaaaccagagggaaacuaugcccaaaaugccucaacugcacagaucuggacguggccuugggcagaccaaaaugcacggggaacauacccucggcaagaguuucaauacuccaugaagucagaccuguuacaucugggugcuuuccuauaaugcacgacagaacaaaaauuagacagcugccuaaccuucucagaggauacgaacauaucagguuaucaacucauaacguuaucaaugcagaaaaugcaccaggaggacccuacaaaauuggaaccucagggucuugcccuaacauuaccaauggaaacggauuuuucgcaacaauggcuugggccgucccaaaaaacgacaacaacaaaacagcaacaaauucauuaacaauagaaguaccauacauuuguacagaaggagaagaccaaauuaccguuuggggguuccacucugauaacgagacccaaauggcaaagcucuauggggacucaaagccccagaaguucaccucaucugccaacggagugaccacacauuacguuucacagauugguggcuucccaaaucaaacagaagacggaggacuaccacaaagugguagaauuguuguugauuacauggugcaaaaaucugggaaaacaggaacaauuaccuaucaaagagguauuuuauugccucaaaagguguggugcgcaaguggcaggagcaagguaauaaaaggauccuugccuuuaauuggagaagcagauugccuccacgaaaaauacgguggauuaaacaaaagcaagccuuacuacacaggggaacaugcaaaggccauaggaaauugcccaauaugggugaaaacacccuugaagcuggccaauggaaccaaauauagaccuccugcaaaacuauuaaaggaaagggguuucuucggagcuauugcugguuucuuagaaggaggaugggaaggaaugauugcagguuggcacggauacacaucccauggggcacauggaguagcgguggcagcagaccuuaagagcacucaagaggccauaaacaagauaacaaaaaaucucaacucuuugagugagcuggaaguaaagaaucuucaaagacuaagcggugccauggaugaacuccacaacgaaauacuagaacuagacgagaaaguggaugaucucagagcugauacaauaagcucacaaauagaacucgcaguccugcuuuccaaugaaggaauaauaaacagugaagaugagcaucucuuggcgcuugaaagaaagcugaagaaaaugcugggccccucugcuguagagauagggaauggaugcuuugaaaccaaacacaagugcaaccagaccugucucgacagaauagcugcugguaccuuugaugcaggagaauuuucucuccccaccuuugauucacugaauauuacugcugcaucuuuaaaugacgauggauuggauaaucauacuauacugcuuuacuacucaacugcugccuccaguuuggcuguaacauugaugauagcuaucuuuguuguuuauauggucuccagagacaauguuucuugcuccaucugucuauaa

SEQ ID NO: 59967 - RNA, 1758 nt, Artificial Sequence
  derived and/or modified CDS sequence (wt) from hemagglutinin__InfluenzaB__AHL92255
augaaggcaauaauuguacuacucaugguaguaacauccaaugcagauagaaucugcacugggauaacaucgucaaacucaccacauguugucaaaacugcuacucaaggggaggucaaugugacugguguaauaccacugacaacaacacccaccaaaucucauuuugcaaaucucaaaggaacagaaaccagagggaaacuaugcccaaaaugccucaacugcacagaucuggacguggccuugggcagaccaaaaugcacggggaacauacccucggcaagaguuucaauacuccaugaagucagaccuguuacaucugggugcuuuccuauaaugcacgacagaacaaaaauuagacagcugccuaaccuucucagaggauacgaacauaucagguuaucaacucauaacguuaucaaugcagaaaaugcaccaggaggacccuacaaaauuggaaccucagggucuugcccuaacguuaccaauggaaacggauuuuucgcaacaauggcuugggccgucccaaaaaacgacaacaacaaaacagcaacaaauucauuaacaauagagguaccauacauuuguacagaaggagaagaccaaauuaccguuuggggguuccacucugauaacgagacccaaauggcaaagcucuauggggacucaaagccccagaaguucaccucaucugccaacggagugacaacacauuacguuucacagauugguggcuucccaaaucaaacagaagacggaggacuaccacaaagugguagaauuguuguugauuacauggugcaaaaaucugggaaaacaggaacaauuaccuaucaaagagguauuuuauugccucaaaagguguggugcgcaaguggcaggagcaagguaauaaaaggauccuugccuuuaauuggagaagcagauugccuccacgaaaaauacgguggauuaaacaaaagcaagccuuacuauacaggggaacaugcaaaggccauaggaaauugcccaauaugggugaaaacacccuugaagcuggccaauggaaccaaauauagaccuccugcaaaacuauuaaaggaaagggguuucuucggagcuauugcugguuucuuagaaggaggaugggaaggaaugauugcagguuggcacggauacacaucccauggggcacauggaguagcgguggcagcagaccuuaagagcacucaagaggccauaaacaagauaacaaaaaaucucaacucuuugagugagcuggaaguaaagaaucuucaaagacuaagcggugccauggaugaacuccacaacgaaauacuagaacuagacgagaaaguggaugaucucagagcugauacaauaagcucacaaauagaacucgcaguccugcuuuccaaugaaggaauaauaaacagugaagaugagcaucucuuggcgcuugaaagaaagcugaagaaaaugcugggccccucugcuguagagauagggaauggaugcuuugaaaccaaacacaagugcaaccagaccugucucgacagaauagcugcugguaccuuugaugcaggagaauuuucucuccccaccuuugauucacugaauauuacugcugcaucuuuaaaugacgauggauuggauaaucauacuauacugcuuuacuacucaacugcugccuccaguuuggcuguaacauugaugauagcuaucuuuguuguuuauauggucuccagagacaauguuucuugcuccaucugucuauaa

SEQ ID NO: 59968 - RNA, 1758 nt, Artificial Sequence
  derived and/or modified CDS sequence (wt) from hemagglutinin__InfluenzaB__AHL92266
augaaggcaauaauuguacuacucaugguaguaacauccaaugcagaucgaaucugcacugggauaacaucgucaaacucaccacauguugucaaaacugcuacucaaggggaggucaaugugacugguguaauaccacugacaacaacacccaccaaaucucauuuugcaaaucucaaaggaacagaaaccagagggaaacuauguccaaaaugccucaacugcacagaucuggacguggccuugggcagaccaaaauguacggggaacauacccucggcaagaguuucaauacuccaugaagucagaccuguuacaucugggugcuuuccuauaaugcacgacagaacaaaaauuagacagcugccuaaccuucucagaggauacgaacauaucagguuaucaacucauaacguuaucaaugcagaaaaugcaccaggaggacccuacaaaauuggaaccucagggucuuguccuaacguuaccaauggaaacggauuuuucgcaacaauggcuugggccgucccaaaaaacgacaacaacaaaacagcaacaaauucauuaacaauagaaguaccauacauuuguacagaaggagaagaccaaauuaccguuuggggguuccacucugauaacgagacccaaauggcaaagcucuauggggacucaaagccccagaaguucaccucaucugccaauggagugaccacacauuacguuucacagauugguggcuucccaaaucaaacagaagacggaggacuaccacaaagugguagaauuguuguugauuacauggugcaaaaaucugggaaaacaggaacaauuaccuaucaaagagguauuuuauugccucaaaagguguggugcgcaaguggcaggagcaagguaauaaaaggauccuugccuuuaauuggagaagcagauugccuccacgaaaaauacgguggauuaaacaaaagcaagccuuacuacacaggggaacaugcaaaggccauaggaaauugcccaauaugggugaaaacacccuugaagcuggccaauggaaccaaauauagaccuccugcaaaacuauuaaaggaaagggguuucuucggagcuauugcugguuucuuagaaggaggaugggaaggaaugauugcagguuggcacggauacacaucccauggggcacauggaguagcgguggcagcagaccuuaagagcacucaagaggccauaaacaagauaacaaaaaaucucaacucuuugagugagcuggaaguaaagaaucuucaaagacuaagcggugccauggaugaacuccacaacgaaauacuagaacuagacgagaaaguggaugaucucagagcugauacaauaagcucacaaauagaacucgcaguccugcuuuccaaugaaggaauaauaaacagugaagaugagcaucucuuggcgcuugaaagaaagcugaagaaaaugcugggccccucugcuguagagauagggaauggaugcuuugaaaccaaacacaagugcaaccagaccugucucgacagaauagcugcugguaccuuugaugcaggagaauuuucucuccccaccuuugauucacugaauauuacugcugcaucuuuaaaugacgauggauuggauaaucauacuauacugcuuuacuacucaacugcugccuccaguuuggcuguaacauugaugauagcuaucuuuguuguuuauauggucuccagagacaauguuucuugcuccaucugucuauaa

SEQ ID NO: 59969 - RNA, 1758 nt, Artificial Sequence
  derived and/or modified CDS sequence (wt) from hemagglutinin__InfluenzaB__AHL92277
augaaggcaauaauuguacuacucaugguaguaacauccaaugcagaucgaaucugcacugggauaacaucgucaaacucaccacauguugucaaaacugcuacucaaggggaggucaaugugacugguguaauaccacugacaacaacacccaccaaaucucauuuugcaaaucucaaaggaacagaaaccagagggaaacuaugcccaaaaugccucaacugcacagaucuggacguggccuugggcagaccaaaaugcacggggaacauacccucggcaagaguuucaauacuccaugaagucagaccuguuacaucugggugcuuuccuauaaugcacgacagaacaaaaauuagacagcugccuaaccuucucagaggauacgaacauaucagguuaucaacucauaacguuaucaaugcagaaaaugcaccaggaggacccuacaaaauuggaaccucagggucuugcccuaacguuaccaauggaaacggauuuuucgcaacaauggcuugggccgucccaaaaaacgacaacaacaaaacagcaacaaauucauuaacaauagaaguaccauacauuuguacagaaggagaagaccaaauuaccguuuggggguuccacucugauaacgagacccaaauggcaaagcucuauggggacucaaagccccagaaguucaccucaucugccaacggagugaccacacauuacguuucacagauugguggcuucccaaaucaaacagaagacggaggacuaccacaaagugguagaauuguuguugauuacauggugcaaaaaucugggaaaacaggaacaauuaccuaucaaagagguauuuuauugccucaaaagguguggugcgcaaguggcaggagcaagguaauaaaaggauccuugccuuuaauuggagaagcagauugccuccacgaaaaauacgguggauuaaacaaaagcaagccuuacuacacaggggaacaugcaaaggccauaggaaauugcccaauaugggugaaaacacccuugaagcuggccaauggaaccaaauauagaccuccugcaaaacuauuaaaggaaagggguuucuucggagcuauugcugguuucuuagaaggaggaugggaaggaaugauugcagguuggcacggauacacaucccauggggcacauggaguagcgguggcagcagaccuuaagagcacucaagaggccauaaacaagauaacaaaaaaucucaacucuuugagugagcuggaaguaaagaaucuucaaagacuaagcggugccauggaugaacuccacaacgaaauacuagaacuagacgagaaaguggaugaucucagagcugauacaauaagcucacaaauagaacucgcaguccugcuuuccaaugaaggaauaauaaacagugaagaugagcaucucuuggcgcuugaaagaaagcugaagaaaaugcugggccccucugcuguagagauagggaauggaugcuuugaaaccaaacacaagugcaaccagaccugucucgacagaauagcuacugguaccuuugaugcaggagaauuuucucuccccaccuuugauucacugaauauuacugcugcaucuuuaaaugacgauggauuggauaaucauacuauacugcuuuacuacucaacugcugccuccaguuuggcuguaacauugaugauagcuaucuuuguuguuuauauggucuccagagacaauguuucuugcuccaucugucuauaa

SEQ ID NO: 59970 - RNA, 1758 nt, Artificial Sequence
  derived and/or modified CDS sequence (wt) from hemagglutinin__InfluenzaB__AHL92288
augaaggcaauaauuguacuacucaugguaguaacauccaaugcagaucgaaucugcacugggauaacaucgucaaacucaccacauguugucaaaacugcuacucaaggggaggucaaugugacugguguaauaccacugacaacaacacccaccaaaucucauuuugcaaaucucaaaggaacagaaaccagagggaaacuaugcccaaaaugccucaacugcacagaucuggacguggccuugggcagaccaaaaugcacggggaacauacccucggcaagaguuucaauacuccaugaagucagaccuguuacaucugggugcuuuccuauaaugcacgacagaacaaaaauuagacagcugccuaaccuucucagaggauacgaacauaucagguuaucaacucauaacguuaucaacgcagaaaaugcaccaggaggacccuacaaaauuggaaccucagggucuugcccuaauguuaccaauggaaacggauuuuucgcaacaauggcuugggccgucccaaaaaacgacaacaacaaaacagcaacaaauucauuaacaauagaaguaccauacauuuguacagaaggagaagaccaaauuaccguuuggggguuccacucugauaacgaaacccaaauggcaaagcucuauggggacucaaagccccagaaguucaccucaucugccaauggagugaccacacauuacguuucacagauugguggcuucccaaaucaaacagaagacggaggacuaccacaaagugguagaauuguuguugauuacauggugcaaaaaucugggaaaacaggaacaauuaccuaucaaagagguauuuuauugccucaaaaaguguggugcgcaaguggcaggagcaagguaauaaaaggauccuugccuuuaauuggagaagcagauugccuccacgaaaaauacgguggauuaaacaaaagcaagccuuacuacacaggggaacaugcaaaggccauaggaaauugcccaauaugggugaaaacacccuugaagcuggccaauggaaccaaauauagaccuccugcaaaacuauuaaaggaaagggguuucuucggagcuauugcugguuucuuagaaggaggaugggaaggaaugauugcagguuggcacggauacacaucccauggggcacauggaguagcgguggcagcagaccuuaaaagcacucaagaggccauaaacaagauaacaaaaaaucucaacucuuugagugagcuggaaguaaagaaucuucaaagacuaagcggugccauggaugaacuccacaacgaaauacuagaacuagacgagaaaguggaugaucucagagcugauacaauaagcucacaaauagaacucgcaguccugcuuuccaaugaaggaauaauaaacagugaagaugagcaucucuuggcgcuugaaagaaagcugaagaaaaugcugggccccucugcuguagagauagggaauggaugcuuugaaaccaaacacaagugcaaccagaccugucucgacagaauagcugcugguaccuuugaugcaggagaauuuucucuccccaccuuugauucacugaauauuacugcugcaucuuuaaaugacgauggauuggauaaucauacuauacugcuuuacuacucaacugcugccuccaguuuggcuguaacauugaugauagcuaucuuuguuguuuauauggucuccagagacaauguuucuugcuccaucugucuauaa

SEQ ID NO: 59971 - RNA, 1758 nt, Artificial Sequence; identical to SEQ ID NO: 59970
  derived and/or modified CDS sequence (wt) from hemagglutinin__InfluenzaB__AHL92299

SEQ ID NO: 59972 - RNA, 1755 nt, Artificial Sequence
  derived and/or modified CDS sequence (wt) from hemagglutinin__InfluenzaB__AHL92310
augaaggcaauaauuguacuacucaugguaguaacauccaaugcagaucgaaucugcacugggauaacaucuucaaacucaccucauguggucaaaacagcuacucaaggggaggucaaugugacuggugugauaccacuaacaacaacaccaacaaaaucuuauuuugcaaaucucaaaggaacaaggaccagagggaaacuaugcccagacugucucaacuguacagaucuggauguggccuugggcagaccaauguguguggggaccacaccuucugcgaaagcuucaauacuccacgaaaucagaccuguuacauccgggugcuuuccuauaaugcacgacaggacaaaaaucaggcaacuagccaaucuucucagaggauaugaaaauaucagguuaucaacccaaaacguuaucgaugcagaaaaggcaccaggaggacccuacagacuuggaaccucaggaucuugcccuaacgcuaccaguaaaagcggauuuuucgcaacaauggcuugggcugucccaaaggacaacaacaaaaacgcaacgaacccacuaacaguagaaguaccauacauuuguacagaaggggaagaccaaauuacuguuuggggguuccauucagauaacaaaacccaaaugaagaaccucuauggagacucaaauccucaaaaguucaccucaucugcuaauggaguaaccacacauuauguuucucagauuggcggcuucccagaucaaacagaagacggaggacuaccacaaagcggcagaauugucguugauuacaugaugcaaaaaccugggaaaacaggaacaauugucuaucaaagagguguuuuguugccucaaaagguguggugcgcgaguggcaggagcaaaguaauaaaaggguccuugccuuuaauuggugaagcagauugccuucaugaaaaauacgguggauuaaacaaaagcaagccuuacuacacaggagaacaugcaaaagccauaggaaauugcccaauaugggugaaaacaccuuugaagcuugccaauggaaccaaauauagaccuccugcaaaacuauuaaaggaaagggguuucuucggagcuauugcugguuuccuagaaggaggaugggaaggaaugauugcagguuggcacggauacacaucucacggagcacauggaguggcaguugcggcagaccuuaagaguacacaagaagcuauaaacaagauaacaaaaaaucucaacucuuugagugagcuagaaguaaagaaucuucaaagacuaaguggugccauggaugaacuccacaacgaaauacucgagcuggaugagaaaguggaugaucucagagcugacacuauaagcucacaaauagaacuugcaguuuugcuuuccaacgaaggaauaauaaacagugaagacgagcaucuauuggcacuugagagaaaacuaaagaaaaugcugggucccucugcuguagacauaggaaauggaugcuucgaaaccaaacacaaaugcaaccagaccugcuuagacaggauagcugcuggcaccuuuaaugcaggagaauuuucucuccccacuuuugauucauugaacauuacugcugcaucuuuaaaugaugauggauuggauaaccauacuauacugcucuauuacucaacugcugcuucuaguuuggcuguaacauugaugcuagccauuuuuauuguuuauauggucuccagagacaacguuucaugcuccaucugucuauaa

SEQ ID NO: 59973 - RNA, 1755 nt, Artificial Sequence
  derived and/or modified CDS sequence (wt) from hemagglutinin__InfluenzaB__AHL92321
augaaggcaauaauuguacuacucaugguaguaacauccaaugcagaucgaaucugcacuggaauaacaucuucaaacucaccucauguggucaaaacagccacucaaggggaggucaaugugacuggugugauaccacuaacaacaacaccaacaaaaucuuauuuugcaaaucucaaaggaacaaggaccagagggaaacuaugcccagacugucucaacugcacagaucuggauguggcuuugggcagaccaauguguguggggaccacaccuucggcgaaagcuucaauacuccacgaagucagaccuguuacauccgggugcuuuccuauaaugcacgacagaacaaaaaucaggcaacuacccaaucuucucagaggauaugaaaauaucaggcuaucaacccaaaacgucaucgaugcggaaaaggcaccaggaggaccuuacagacuuggaaccucaggaucuugcccuaacgcuaccaguaagagcggauuuuucgcaacaauggcuugggcugucccaaaggacaacaacaaaaaugcaacgaacccacuaacaguagaaguaccauacauuuguacagaaggggaagaccaaaucacuguuuggggguuccauucagauaacaaaacccaaaugaagaaccucuauggagacucaaauccucaaaaguucaccucaucugcuaauggaguaaccacacacuauguuucucagauuggcagcuucccagaucaaacagaagacggaggacuaccacaaagcggcaggauuguuguugauuacaugaugcaaaaaccugggaaaacaggaacaauugucuaccaaagagguguuuuguugccucaaaagguguggugcgcgaguggcaggagcaaaguaauaaaaggguccuugccuuuaauuggugaagcagauugccuucaugaaaaauacgguggauuaaacaaaagcaagccuuacuacacaggagaacaugcaaaagccauaggaaauugcccaauaugggugaaaacaccuuugaagcuugccaauggaaccaaauauagaccuccugcaaaacuauuaaaggaaagggguuucuucggagcuauugcugguuuccuagaaggaggaugggaaggaaugauugcaggcuggcacggauacacaucucacggagcacauggaguggcaguggcggcggaccuuaagagcacgcaagaagcuauaaacaagauaacaaaaaaucucaauucuuugagugagcuagaaguaaagaaucuucaaagacuaaguggugccauggaugaacuccacaacgaaauacucgagcuggaugagaaaguggaugaucucagagcugacacuauaagcucgcaaauagaacuugcaguccugcuuuccaacgaaggaauaauaaacagugaagaugagcaucuauuggcacuugagagaaaacuaaagaaaaugcugggucccucugcuguagagauaggaaauggaugcuucgaaaccaaacacaagugcaaccagaccugcuuagacaggauagcugcuggcaccuuuaaugcaggagaauuuucucuccccacuuuugauucacugaacauuacugcugcaucuuuaaaugaugauggauuggauaaccauacuauacugcucuauuacucaacugcugcuucuaguuuggcuguaacauugaugcuagcuauuuuuauuguuuauauggucuccagagacaacguuucaugcuccaucugucuauaa

SEQ ID NO: 59974 - RNA, 1755 nt, Artificial Sequence; identical to SEQ ID NO: 58579
  derived and/or modified CDS sequence (wt) from hemagglutinin__InfluenzaB__AHL92332

SEQ ID NO: 59975 - RNA, 1755 nt, Artificial Sequence
  derived and/or modified CDS sequence (wt) from hemagglutinin__InfluenzaB__AHL92354
augaaggcaauaauuguacuacucaugguaguaacauccaaugcagaucgaaucugcacugggauaacaucuucaaacucaccucauguggucaaaacagcuacucaaggggaggucaaugugacuggugugauaccacuaacaacaacaccaacaaaaucuuauuuugcaaaucucaaaggaacaaggaccagagggaaacuaugcccagacugucucaacuguacagaucuggauguggccuugggcagaccaauguguguggggaucacaccuucugcgaaagcuucaauacuccacgaagucagaccuguuacauccgggugcuuuccuauaaugcacgauagaacaaaaaucaggcaacuagccaaucuucucagaggauaugaaaauaucagguuaucaacccaaaacguugucgaugcagaaaaggcaccaggaggacccuacagacuuggaaccucaggaucuugcccuaacgcuaccaguaaaagcggauuuuucgcaacaauggcuugggcugucccaaaggacaacaacaaaaacgcaacgaacccacuaacaguagaaguaccauacauuuguacagaaggggaagaccaaauuacuguuuggggguuccauucagauaacaaaacccaaaugaagaaccucuauggagacucaaauccucaaaaguucaccucaucugcuaauggaguaaccacacauuauguuucucagauuggcgguuucccagaucaaacagaagacggaggacuaccacaaagcggcagaauugucguugauuacaugaugcaaaaaccugggaaaacaggaacaauugucuaucaaagagguguuuuguugccucaaaagguguggugcgcgaguggcaggagcaaaguaauaaaaggguccuugccuuuaauuggugaagcagauugccuucaugaaaaauacgguggauuaaacaaaagcaagcccuacuacacaggagaacaugcaaaagcuauaggaaauugcccaauaugggugaaaacaccuuugaagcuugccaauggaaccaaauauagaccuccugcaaaacuauuaaaggaaagggguuucuucggagcuauugcugguuuucuagaaggaggaugggaaggaaugauugcagguuggcacggauacacaucucacggagcacauggaguggcaguugcggcagaccuuaagaguacacaagaagcuauaaacaagauaacaaaaaaucucaacucuuugagugagcuagaaguaaagaaucuucaaagacuaaguggugccauggaugaacuucacaacgaaauacucgagcuggaugagaaaguggaugaucucagagcugacacuauaagcucacaaauagaacuugcaguuuugcuuuccaacgaaggaauaauaaacagugaagacgagcaucuauuggcacuugagagaaaacuaaagaaaaugcugggucccucugcuguggacauaggaaauggaugcuucgaaaccaaacacaaaugcaaccagaccugcuuagacaggauagcugcuggcaccuuuaaugcaggagaauuuucucuccccacuuuugauucauugaacauuacugcugcaucuuuaaaugaugauggguuggauaaccauacuauacugcucuauuacucaacugcugcuucuaguuuggcuguaacauugaugcuagccauuuuuauuguuuauauggucuccagagacaacguuucaugcuccaucugucuauaa

SEQ ID NO: 59976 - RNA, 1755 nt, Artificial Sequence; identical to SEQ ID NO: 59975
  derived and/or modified CDS sequence (wt) from hemagglutinin__InfluenzaB__AHL92365

SEQ ID NO: 59977 - RNA, 1755 nt, Artificial Sequence
  derived and/or modified CDS sequence (wt) from hemagglutinin__InfluenzaB__AHL92376
augaaggcaauaauuguacuacucaugguaguaacauccaaugcagaucgaaucugcacugggauaacaucuucaaacucaccucauguggucaaaacagcuacucaaggagaggucaaugugacuggcgugauaccacugacaacaacaccaacaaaaucuuauuuugcaaaccucaaaggaacaaggaccagagggaaacuaugcccggacugucucaacuguacagaucuggauguggccuugggcaggccaauguguguggggaccacaccuucugcuaaagcuucaauacuccacgaagucagaccuguuacauccgggugcuuuccuauaaugcacgacagaacaaaaaucaggcaacuacccaaucuucucagaggauaugaaaauaucagguuaucaacccagaacguuaucgaugcagaaaaagcaccaggaggacccuacagacuuggaaccucaggaucuugcccuaaugcuaccaguaaaaucggauuuuucgcaacaauggcuugggcugucccaaaggacaacuacaaaaaugcaacgaacccacuaacaguagaaguaccauacauuuguacagaaggggaagaccaaauuacuguuuggggguuccauucagauaacaaaacccaaaugaagaaccucuauggagacucaaauccucaaaaguucaccucaucugcuaauggaguaaccacacauuauguuucucagauuggcgacuucccagaucaaacagaagacggaggacuaccacaaagcggcagaauuguuguugauuacaugaugcaaaaaccugggaaaacaggaacaauugucuaucaaagagguguuuuguugccucaaaagguguggugcgcgaguggcaggagcaaaguaauaaaagggucauugccuuuaauuggugaagcagauugccuucaugaaaaauacgguggauuaaacaaaagcaagccuuacuacacaggagaacaugcaaaagccauaggaaauugcccaauauggguaaaaacaccuuugaagcuugccaauggaaccaaauauagaccuccugcaaaacuauuaaaggaaagggguuucuucggagcuauugcugguuuccuagaaggaggaugggaaggaaugauugcagguuggcacggauacacaucucacggagcacauggaguggcaguggcggcagaccuuaagaguacacaagaagcuauaaauaagauaacaaaaaaucucaauucuuugagugagcuagaaguaaagaaccuucaaagacuaaguggugccauggaugaacuccacaacgaaauacucgagcuggaugagaaaguggaugaucucagagcugacacuauaagcucacaaauagaacuugcagucuugcuuuccaacgaaggaauaauaaacagugaagacgagcaucuauuggcacuugagagaaaacuaaagaaaaugcugggccccucugcuguagacauaggaaauggaugcuucgaaaccaaacacaaaugcaaccagaccugcuuagacaggauagcugcuggcaccuuuaaugcaggagaauuuucucuccccacuuuugauucauugaacauuacugcugcaucuuuaaaugaugauggauuggauaaccauacuauacugcucuauuacucaacugcugcuucuaguuuggcuguaacauuaaugcuagcuauuuuuauuguuuauauggucuccagagacaacguuucaugcuccaucugucuauaa

SEQ ID NO: 59978 - RNA, 1755 nt, Artificial Sequence
  derived and/or modified CDS sequence (wt) from hemagglutinin__InfluenzaB__AHL92387
augaaggcaauaauuguacuacucaugguaguaacauccaaugcagaucgaaucugcacugggauaacaucuucaaacucaccucauguggucaaaacagcuacucaaggggaggucaaugugacuggcgugauaccacugacaacaacaccaacaaaaucuuauuuugcaaaccucaaaggaacaaggaccagagggaaacuaugcccggacugucucaacuguacagaucuggauguggccuugggcaggccaauguguguggggaccacaccuucugcuaaagcuucaauacuccacgaagucagaccuguuacauccgggugcuuuccuauaaugcacgacagaacaaaaaucaggcaacuacccaaucuucucagaggauaugaaaauaucagguuaucaacccagaacguuaucgaugcagaaaaagcaccaggaggacccuacagacuuggaaccucaggaucuugcccuaaugcuacuaguaaaaucggauuuuucgcaacaauggcuugggcugucccaaaggacaacuacaaaaaugcaacgaacccacuaacaguagaaguaccauacauuuguacagaaggggaagaccaaauuacuguuuggggguuccauucagauaacaaaacccaaaugaagaaccucuauggagacucaaauccucaaaaguucaccucaucugcuaauggaguaaccacacauuauguuucucagauuggcgacuucccagaucaaacagaagacggaggacuaccacaaagcggcagaauuguuguugauuacaugaugcaaaaaccugggaaaacaggaacaauugucuaucaaagagguguuuuguugccucaaaagguguggugcgcgaguggcaggagcaaaguaauaaaagggucauugccuuuaauuggugaagcagauugccuucaugaaaaauacgguggauuaaacaaaagcaagccuuacuacacaggagaacaugcaaaagccauaggaaauugcccaauauggguaaaaacaccuuugaagcuugccaauggaaccaaauauagaccuccugcaaaacuauuaaaggaaagggguuucuucggagcuauugcugguuuccuagaaggaggaugggaaggaaugauugcagguuggcacggauacacaucucacggagcacauggaguggcaguggcggcagaccuuaagaguacacaagaagcuauaaauaagauaacaaaaaaucucaauucuuugagugagcuagaaguaaagaaccuucaaagacuaaguggugccauggaugaacuccacaacgaaauacucgagcuggaugagaaaguggaugaucucagagcugacacuauaagcucacaaauagaacuugcagucuugcuuuccaacgaaggaauaauaaacagugaagacgagcaucuauuggcacuugagagaaaacuaaagaaaaugcugggccccucugcuguagacauaggaaauggaugcuucgaaaccaaacacaaaugcaaccagaccugcuuagacaggauagcugcuggcaccuuuaaugcaggagaauuuucucuccccacuuuugauucauugaacauuacugcugcaucuuuaaaugaugauggauuggauaaccauacuauacugcucuauuacucaacugcugcuucuaguuuggcuguaacauuaaugcuagcuauuuuuauuguuuauauggucuccagagacaacguuucaugcuccaucugucuauaa

SEQ ID NO: 59979 - RNA, 1755 nt, Artificial Sequence; identical to SEQ ID NO: 58838
  derived and/or modified CDS sequence (wt) from hemagglutinin__InfluenzaB__AHL92398

SEQ ID NO: 59980 - RNA, 1755 nt, Artificial Sequence; identical to SEQ ID NO: 58838
  derived and/or modified CDS sequence (wt) from hemagglutinin__InfluenzaB__AHL92409

SEQ ID NO: 59981 - RNA, 1755 nt, Artificial Sequence; identical to SEQ ID NO: 58838
  derived and/or modified CDS sequence (wt) from hemagglutinin__InfluenzaB__AHL92420

SEQ ID NO: 59982 - RNA, 1755 nt, Artificial Sequence
  derived and/or modified CDS sequence (wt) from hemagglutinin__InfluenzaB__AHL92431
augaaggcaauaauuguacuacucaugguaguaacauccaaugcagaucgaaucugcacuggaauaacaucuucaaacucaccucauguggucaaaacagccacucaaggggaggucaaugugacuggugugauaccacuaacaacaacaccaacaaaaucuuauuuugcaaaucucaaaggaacaaggaccagagggaaacuaugcccagacugucucaacugcacagaucuggauguggcuuugggcagaccaauguguguggggaccacaccuucggcgaaagcuucaauacuccacgaagucagaccuguuacauccgggugcuuuccuauaaugcacgacagaacaaaaaucaggcaacuacccaaucuucucagaggauaugaaaauaucaggcuaucaacccaaaacgucaucgaugcggaaaaggcaccaggaggacccuacagacuuggaaccucaggaucuugcccuaacgcuaccaguaagagcggauuuuucgcaacaauggcuugggcugucccaaaggacaacaacaaaaaugcaacgaacccacuaacaguagaaguaccauacauuuguacagaaggggaagaccaaaucacuguuuggggguuccauucagauaacaaaacccaaaugaagaaccucuauggagacucaaauccucaaaaguucaccucaucugcuaauggaguaaccacacacuauguuucucagauuggcagcuucccagaucaaacagaagacggaggacuaccacaaagcggcaggauuguuguugauuacaugaugcaaaaaccugggaaaacaggaacaauugucuaccaaagagguguuuuguugccucaaaagguguggugcgcgaguggcaggagcaaaguaauaaaaggguccuugccuuuaauuggugaagcagauugccuucaugaaaaauacgguggauuaaacaaaagcaagccuuacuacacaggagaacaugcaaaagccauaggaaauugcccaauaugggugaaaacaccuuugaagcuugccaauggaaccaaauauagaccuccugcaaaacuauuaaaggaaagggguuucuucggagcuauugcugguuuccuagaaggaggaugggaaggaaugauugcaggcuggcacggauacacaucucacggagcacauggaguggcaguggcggcggaccuuaagaguacgcaagaagcuauaaauaagauaacaaaaaaucucaauucuuugagugagcuagaaguaaagaaucuucaaagacuaaguggugccauggaugaacuccacaacgaaauacucgagcuggaugagaaaguggaugaucucagagcugacacuauaagcucgcaaauagaacuugcagucuugcuuuccaacgaaggaauaauaaacagugaagaugagcaucuauuggcacuugagagaaaacuaaagaaaaugcugggucccucugcuguagagauaggaaauggaugcuucgaaaccaaacacaagugcaaccagaccugcuuagacaggauagcugcuggcaccuuuaaugcaggagaauuuucucuccccacuuuugauucacuaaacauuacugcugcaucuuuaaaugaugauggauuggauaaccauacuauacugcucuauuacucaacugcugcuucuaguuuggcuguaacauugaugcuagcuauuuuuauuguuuauauggucuccagagacaacguuucaugcuccaucugucuauaa

SEQ ID NO: 59983 - RNA, 1755 nt, Artificial Sequence; identical to SEQ ID NO: 58838
  derived and/or modified CDS sequence (wt) from hemagglutinin__InfluenzaB__AHL92442

SEQ ID NO: 59984 - RNA, 1755 nt, Artificial Sequence; identical to SEQ ID NO: 59978
  derived and/or modified CDS sequence (wt) from hemagglutinin__InfluenzaB__AHL92453

SEQ ID NO: 59985 - RNA, 1755 nt, Artificial Sequence; identical to SEQ ID NO: 58838
  derived and/or modified CDS sequence (wt) from hemagglutinin__InfluenzaB__AHL92464

SEQ ID NO: 59986 - RNA, 1755 nt, Artificial Sequence
  derived and/or modified CDS sequence (wt) from hemagglutinin__InfluenzaB__AHL92475
augaaggcaauaauuguacuacucaugguaguaacauccaaugcagaucgaaucugcacugggauaacaucuucaaacucaccucauguggucaaaacagcuacucaaggggaggucaaugugacuggcgugauaccacugacaacaacaccaacaaaaucuuauuuugcaaaccucaaaggaacaaggaccagagggaaacuaugcccggacugucucaacuguacagaucuggauguggccuugggcaggccaauguguguggggaccacaccuucugcuaaagcuucaauacuccacgaagucagaccuguuacauccgggugcuuuccuauaaugcacgacagaacaaaaaucaggcaacuacccaaucuucucagaggauaugaaaauaucagguuaucaacccagaacguuaucgaugcagaaaaagcaccaggaggacccuacagacuuggaaccucaggaucuugcccuaaugcuaccaguaaaaucggauuuuucgcaacaauggcuugggcugucccaaaggacaacuacaaaaaugcaacgaacccacuaacaguagaaguaccauacauuuguacagaaggggaagaccaaauuacuguuuggggguuccauucagauaacaaaacccaaaugaagaaccucuauggagacucaaauccucaaaaguucaccucaucugcuaauggaguaaccacacauuauguuucucagauuggcgacuucccagaucaaacagaagacggaggacuaccacaaagcggcagaauuguuguugauuacaugaugcaaaaaccugggaaaacaggaacaauugucuaucaaagagguguuuuguugccucaaaagguguggugcgcgaguggcaggagcaaaguaauaaaagggucauugccuuuaauuggugaagcagauugccuucaugaaaaauacgguggauuaaacaaaagcaagccuuacuacacaggagaacaugcaaaagccauaggaaauugcccaauauggguaaaaacaccuuugaagcuugccaauggaaccaaauauagaccuccugcaaaacuauuaaaggaaagggguuucuucggagcuauugcugguuuccuagaaggaggaugggaaggaaugauugcagguuggcacggauacacaucucacggagcacauggaguggcaguggcggcagaccuuaagaguacacaagaagcuauaaauaagauaacaaaaaaucucaauucuuugagugagcuagaaguaaagaaccuucaaagacuaaguggugccauggaugaacuccacaacgaaauacucgagcuggaugagaaaguggaugaucucagagcugacacuauaagcucacaaauagaacuugcagucuugcuuuccaacgaaggaauaauaaacagugaagacgagcaucuauuggcacuugagagaaaacuaaagaaaaugcugggccccucugcuguagacauaggaaauggaugcuucgaaaccaaacacaaaugcaaccaggccugcuuagacaggauagcugcuggcaccuuuaaugcaggagaauuuucucuccccacuuuugauucauugaacauuacugcugcaucuuuaaaugaugauggauuggauaaccauacuauacugcucuauuacucaacugcugcuucuaguuuggcuguaacauuaaugcuagcuauuuuuauuguuuauauggucuccagagacaacguuucaugcuccaucugucuauaa

SEQ ID NO: 59987 - RNA, 1755 nt, Artificial Sequence; identical to SEQ ID NO: 58579
  derived and/or modified CDS sequence (wt) from hemagglutinin__InfluenzaB__AHL92486

SEQ ID NO: 59988 - RNA, 1755 nt, Artificial Sequence; identical to SEQ ID NO: 58838
  derived and/or modified CDS sequence (wt) from hemagglutinin__InfluenzaB__AHL92497

SEQ ID NO: 59989 - RNA, 1755 nt, Artificial Sequence; identical to SEQ ID NO: 59978
  derived and/or modified CDS sequence (wt) from hemagglutinin__InfluenzaB__AHL92508

SEQ ID NO: 59990 - RNA, 1755 nt, Artificial Sequence; identical to SEQ ID NO: 59978
  derived and/or modified CDS sequence (wt) from hemagglutinin__InfluenzaB__AHL92519

SEQ ID NO: 59991 - RNA, 1755 nt, Artificial Sequence; identical to SEQ ID NO: 59978
  derived and/or modified CDS sequence (wt) from hemagglutinin__InfluenzaB__AHL92530

SEQ ID NO: 59992 - RNA, 1755 nt, Artificial Sequence; identical to SEQ ID NO: 58579
  derived and/or modified CDS sequence (wt) from hemagglutinin__InfluenzaB__AHL92541

SEQ ID NO: 59993 - RNA, 1752 nt, Artificial Sequence
  derived and/or modified CDS sequence (wt) from hemagglutinin__InfluenzaB__AHL92563
augaaggcaauaauuguacuacucaugguaguaacauccaaugcagaucgaaucugcacugggauaacaucuucaaacucaccucauguggucaaaacagcuacucaaggggaggucaaugugacuggugugauaccacugacaacaacaccaaaaaaaucuuauuuugcaaaucucaaaggaacaaggaccagagggaaacuaugcccggacugucucaacuguacagaucuggauguggccuugggcaggccaauguguguggggaccacaccuucugcuaaagcuucaauacuccacgaagucagaccuguuacauccggaugcuuuccuauaaugcacgacagaacaaaaaucaggcaacuacccaaucuucucagaggauaugaaaauaucagguuaucaacccaaaacguuaucgaugcagaaaaagcaccaggaggacccuacagacuuggaaccucaggaucuugcccuaacgcuaccaguaaaaucggauuuuucgcaacaauggcuugggcugucccaaaggacaacuacaaaaaugcaacgaacccacuaacaguagaaguaccauacauuuguacagaaggggaagaccaaauuacuguuuggggguuccauucagauaacaaaacccaaaugaagaaccucuauggagacucaaauccucaaaaguucaccucaucugcuaauggaguaaccacacauuauguuucucagauuggcgacuucccagaucaaacagaagacggaggacuaccacaaagcggcagaauuguuguugauuacaugaugcaaaaaccugggaaaacaggaacaauugucuaucaaagagguguuuuguugccucaaaagguguggugcgcgaguggcaggagcaaaguaauaaaagggucauugccuuuaauuggugaagcagauugccuucaugaaaaauacgguggauuaaacaaaagcaagccuuacuacacaggagaacaugcaaaagccauaggaaauugcccaauauggguaaaaacaccuuugaagcuugccaauggaaccaaauauagaccuccugcaaaacuauuaaaggaaagggguuucuucggagcuauugcugguuuccuagaaggaggaugggaaggaaugauugcagguuggcacggauacacaucucacggagcacauggaguggcaguggcggcagaccuuaagaguacacaagaagcuauaaauaagauaacaaaaaaucucaauucuuugagugagcuagaaguaaagaaccuucaaagacuaaguggugccauggaugaacuccacaacgaaauacucgagcuggaugagaaaguggaugaucucagagcugacacuauaagcucacaaauagaacuugcagucuugcuuuccaacgaaggaauaauaaacagugaagacgagcaucuauuggcacuugagagaaaacuaaagaaaaugcugggucccucugcuguagacauaggaaauggaugcuucgaaaccaaacacaaaugcaaccagaccugcuuagacaggauagcugcuggcaccuuuaaugcaggagaauuuucucuccccacuuuugauucauugaacauuacugcugcaucuuuaaaugauggauuggauaaccauacuauacugcucuauuacucaacugcugcuucuaguuuggcuguaacauuaaugcuagcuauuuuuauuguuuauauggucuccagagacaacguuucaugcuccaucugucuauaa

SEQ ID NO: 59994 - RNA, 1755 nt, Artificial Sequence; identical to SEQ ID NO: 58838
  derived and/or modified CDS sequence (wt) from hemagglutinin__InfluenzaB__AHL92574

SEQ ID NO: 59995 - RNA, 1755 nt, Artificial Sequence
  derived and/or modified CDS sequence (wt) from hemagglutinin__InfluenzaB__AHL92585
augaaggcaauaauuguacuacucaugguaguaacauccaaugcagaucgaaucugcacuggaauaacaucuucaaacucaccucauguggucaaaacagccacucaaggggaggucaaugugacuggugugauaccacuaacaacaacaccaacaaaaucuuauuuugcaaaucucaaaggaacaaggaccagagggaaacuaugcccagacugucucaacugcacagaucuggauguggcuuugggcagaccaaugugugugggggccacaccuucggcgaaagcuucaauacuccacgaagucagaccuguuacauccgggugcuuuccuauaaugcacgacagaacaaaaaucaggcaacuacccaaucuucucagaggauaugaaaauaucagguuaucaacccaaaacgucaucgaugcggaaaaggcaccaggaggacccuacagacuuggaaccucaggaucuugcccuaacgcuaccaguaagagcggauuuuucgcaacaauggcuugggcugucccaaaggacaacaacaaaaaugcaacgaacccacuaacaguagaaguaccauacauuuguacagaaggggaagaccaaaucacuguuuggggguuccauucagauaacaaaacccaaaugaagaaccucuauggagacucaaauccucaaaaguucaccucaucugcuaauggaguaaccacacacuauguuucucagauuggcagcuucccagaucaaacagaagacggaggacuaccacaaagcggcaggauuguuguugauuacaugaugcaaaaaccugggaaaacaggaacaauugucuaccaaagagguguuuuguugccucaaaagguguggugcgcgaguggcaggagcaaaguaauaaaaggguccuugccuuuaauuggugaagcagauugccuucaugaaaaauacgguggauuaaacaaaagcaagccuuacuacacaggagaacaugcaaaagccauaggaaauugcccaauaugggugaaaacaccuuugaagcuugccaauggaaccaaauauagaccuccugcaaaacuauuaaaagaaagggguuucuucggagcuauugcugguuuccuagaaggaggaugggaaggaaugauugcaggcuggcacggauacacaucucacggagcacauggaguggcaguggcggcggaccuuaagagcacgcaagaagcuauaaacaagauaacaaaaaaucucaauucuuugagugagcuagaaguaaagaaucuucaaagacuaaguggugccauggaugaacuccacaacgaaauacucgagcuggaugagaaaguggaugaucucagagcugacacuauaagcucgcaaauagaacuugcagucuugcuuuccaacgaaggaauaauaaacagugaagaugagcaucuauuggcacuugagagaaaacuaaagaaaaugcugggucccucugcuguagagauaggaaauggaugcuucgaaaccaaacacaagugcaaccagaccugcuuagacaggauagcugcuggcaccuuuaaugcaggagaauuuucucuccccacuuuugauucacugaacauuacugcugcaucuuuaaaugaugauggauuggauaaccauacuauacugcucuauuacucaacugcugcuucuaguuuggcuguaacauugaugcuagcuauuuuuauuguuuauauggucuccagagacaacguuucaugcuccaucugucuauaa

SEQ ID NO: 59996 - RNA, 1755 nt, Artificial Sequence; identical to SEQ ID NO: 58838
  derived and/or modified CDS sequence (wt) from hemagglutinin__InfluenzaB__AHL92596

SEQ ID NO: 59997 - RNA, 1755 nt, Artificial Sequence
  derived and/or modified CDS sequence (wt) from hemagglutinin__InfluenzaB__AHL92607
augaaggcaauaauuguacuacucaugguaguaacauccaaugcagaucgaaucugcacuggaauaacaucuucaaacucaccucauguggucaaaacagccacucaaggggaggucaaugugacuggugugauaccacuaacaacaacaccaacaaaaucuuauuuugcaaaucucaaaggaacaaggaccagagggaaacuaugcccagacugucuuaacugcacagaucuggauguggcuuugggcagaccaauguguguggggaccacaccuucggcgaaagcuucaauacuccacgaagucagaccuguuacauccgggugcuuuccuauaaugcacgacagaacaaaaaucaggcaacuacccaaucuucucagaggauaugaaaauaucaggcuaucaacccaaaacgucaucgaugcggaaaaggcaccaggaggacccuacagacuuggaaccucaggaucuugcccuaacgcuaccaguaagagcggauuuuucgcaacaauggcuugggcugucccaaaggacaacaacaaaaaugcaacgaacccacuaacaguagaaguaccauacauuuguacagaaggggaagaccaaaucacuguuuggggguuccauucagauaacaaaacccaaaugaagaaccucuauggagacucaaauccucaaaaguucaccucaucugcuaauggaguaaccacacacuauguuucucagauuggcagcuucccagaucaaacagaagacggaggacuaccacaaagcggcaggauuguuguugauuacaugaugcaaaaaccugggaaaacaggaacaauugucuaccaaagagguguuuuguugccucaaaagguguggugcgcgaguggcaggagcaaaguaauaaaaggguccuugccuuuaauuggugaagcagauugccuucaugaaaaauacgguggauuaaacaaaagcaagccuuacuacacaggagaacaugcaaaagccauaggaaauugcccaauaugggugaaaacaccuuugaagcuugccaauggaaccaaauauagaccuccugcaaaacuauuaaaggaaagggguuucuucggagcuauugcugguuuccuagaaggaggaugggaaggaaugauugcaggcuggcacggauacacaucccacggagcacauggaguggcaguggcggcggaccuuaagaguacgcaagaagcuauaaacaagauaacaaaaaaucucaauucuuugagugagcuagaaguaaagaaucuucaaagacuaaguggugcuauggaugaacuccacaacgaaauacucgagcuggaugagaaaguggaugaucucagagcugacacuauaagcucgcaaauagaacuugcagucuugcuuuccaacgaaggaauaauaaacagugaagaugagcauuuauuggcacuugagagaaaauuaaagaaaaugcugggucccucugcuguagagauaggaaauggaugcuucgaaaccaaacacaagugcaaccagaccugcuuagacaggauagcugcuggcaccuuuaaugcaggagaauuuucucuccccacuuuugauucacugaacauuacugcugcaucuuuaaaugaugauggauuggauaaccauacuauacugcucuauuacucaacugcugcuucuaguuuggcuguaacauugaugcuagcuauuuuuauuguuuauauggucuccagagacaacguuucaugcuccaucugucuauaa

SEQ ID NO: 59998 - RNA, 1755 nt, Artificial Sequence
  derived and/or modified CDS sequence (wt) from hemagglutinin__InfluenzaB__AHL92629
augaaggcaauaauuguacuacucaugguaguaacauccaaugcagaucgaaucugcacugggauaacaucuucaaacucaccucauguggucaaaacagcuacucaaggggaggucaaugugacuggugugauaccacugacaacaacaccagaaaaaucuuauuuugcaaaucucaaaggaacaaggaccagagggaaacuaugcccggacugucucaacuguacagaucuggauguggccuugggcaggccaauguguguggggaccacaccuucugcuaaagcuucaauacuccacgaagucagaccuguuacauccgggugcuuuccuauaaugcacgacagaacaaaaaucaggcaacuacccaaucuucucagaggauaugaaaauaucagauuaucaacccaaaacguuaucgaugcagaaaaagcaccaggaggacccuacagacuuggaaccucaggaucuugcccuaacgcuaccaguaaaaucggauuuuucgcaacaauggcuugggcugucccaaaggacaacuacaaaaaugcaacgaacccacuaacaguagaaguaccauacauuuguacagaaggggaagaccaaauuacuguuuggggauuccauucagauaacaaaacccaaaugaagaaccucuauggagacucaaauccucaaaaguucaccucaucugcuaauggaguaaccacacauuauguuucucagauuggcgacuucccagaucaaacagaagacggaggacuaccacaaagcggcagaauuguuguugauuacaugaugcaaaaaccugggaaaacaggaacaauugucuaucaaagagguguuuuguugccucaaaagguguggugcgcgaguggcaggagcaaaguaauaaaagggucauugccuuuaauuggugaagcagauugccuucaugaaaaauacgguggauuaaacaaaagcaagccuuacuacacaggagaacaugcaaaagccauaggaaauugcccaauauggguaaaaacaccuuugaagcuugccaauggaaccaaauauagaccuccugcaaaacuauuaaaggaaagggguuucuucggagcuauugcugguuuccuagaaggaggaugggaaggaaugauugcagguuggcacggauacacaucucacggagcacauggaguggcaguggcggcagaccuuaagaguacacaagaagcuauaaauaagauaacaaaaaaucucaauucuuugagugagcuagaaguaaagaaccuucaaagacuaaguggugccauggaugaacuccacaacgaaauacucgagcuggaugagaaaguggaugaucucagagcugacacuauaagcucacaaauagaacuugcagucuugcuuuccaacgaaggaauaauaaacagugaagacgagcaucuauuggcacuugagagaaaacuaaagaaaaugcugggucccucugcuguagacauaggaaauggaugcuucgaaaccaaacacaaaugcaaccagaccugcuuagacaggauagcugcuggcaccuuuaaugcaggagaauuuucucuccccacuuuugauucauugaacauuacugcugcaucuuuaaaugaugauggauuggauaaccauacuauacugcucuauuacucaacugcugcuucuaguuuggcuguaacauuaaugcuagcuauuuuuauuguuuauauggucuccagagacaacguuucaugcuccaucugucuauaa

SEQ ID NO: 59999 - RNA, 1755 nt, Artificial Sequence; identical to SEQ ID NO: 58579
  derived and/or modified CDS sequence (wt) from hemagglutinin__InfluenzaB__AHL92640

SEQ ID NO: 60000 - RNA, 1755 nt, Artificial Sequence; identical to SEQ ID NO: 58579
  derived and/or modified CDS sequence (wt) from hemagglutinin__InfluenzaB__AHL92651

SEQ ID NO: 60001 - RNA, 1755 nt, Artificial Sequence
  derived and/or modified CDS sequence (wt) from hemagglutinin__InfluenzaB__AHL92684
augaaggcaauaauuguacuacucaugguaguaacauccaaugcagaucgaaucugcacuggaauaacaucuucaaacucaccucacguggucaaaacagccacucaaggggaggucaaugugacuggugugauaccacuaacaacaacaccaacaaaaucuuauuuugcaaaucucaaaggaacaaggaccagagggaaacuaugcccagacugucucaacugcacagaucuggauguggcuuugggcagaccaauguguguggggaccacaccuucggcgaaagcuucaauacuccacgaagucagaccuguuacauccgggugcuuuccuauaaugcacgacagaacaaaaaucaggcaacuacccaaucuucucagaggauaugaaaauaucaggcuaucaacccaaaacgucaucgaugcggaaaaggcaccaggaggacccuacagacuuggaaccucaggaucuugcccuaacgcuaccaguaagagcggauuuuucgcaacaauggcuugggcugucccaaaggacaacaacaaaaaugcaacgaacccacuaacaguagaaguaccauacauuuguacagaaggggaagaccaaaucacuguuuggggguuccauucagauaacaaaacccaaaugaagaaccucuauggagacucaaauccucaaaaguucaccucaucugcuaauggaguaaccacacacuauguuucucagauuggcagcuucccagaucaaacagaagacggaggacuaccacaaagcggcaggauuguuguugauuacaugaugcaaaaaccugggaaaacaggaacaauugucuaccaaagagguguuuuguugccucaaaagguguggugcgcgaguggcaggagcaaaguaauaaaaggguccuugccuuuaauuggugaagcagauugccuucaugaaaaauacgguggauuaaacaaaagcaagccuuacuacacaggagaacaugcaaaagccauaggaaauugcccaauaugggugaaaacaccuuugaagcuugccaauggaaccaaauauagaccuccugcaaagcuauuaaaggaaagggguuucuucggagcuauugcugguuuccuagaaggaggaugggaaggaaugauugcaggcuggcacggauacacaucucacggagcacauggaguggcaguggcggcggaccuuaagagcacgcaagaagcuauaaacaagauaacaaaaaaucucaauucuuugagugagcuagaaguaaagaaucuucaaagacuaaguggugccauggaugaacuccacaacgaaauacucgagcuggaugagaaaguggaugaucucagagcugacacuauaagcucgcaaauagaacuugcagucuugcuuuccaacgaaggaauaauaaacagugaagaugagcaucuauuggcacuugagagaaaacuaaagaaaaugcugggucccucugcuguagagauaggaaauggaugcuucgaaaccaaacacaagugcaaccagaccugcuuagacaggauagcugcuggcaccuuuaaugcaggagaauuuucucuccccacuuuugauucacugaacauuacugcugcaucuuuaaaugaugauggauuggauaaccauauuauacugcucuauuacucaacugcugcuucuaguuuggcuguaacauugaugcuagcuauuuuuauuguuuauauggucuccagagacaacguuucaugcuccaucugucuauaa

SEQ ID NO: 60002 - RNA, 1755 nt, Artificial Sequence; identical to SEQ ID NO: 58832
  derived and/or modified CDS sequence (wt) from hemagglutinin__InfluenzaB__AHL92695

SEQ ID NO: 60003 - RNA, 1755 nt, Artificial Sequence
  derived and/or modified CDS sequence (wt) from hemagglutinin__InfluenzaB__AHL92706
augaaggcaauaauuguacuacucaugguaguaacauccaaugcagaucgaaucugcacugggauaacaucuucaaacucaccucauguggucaaaacagcuacucaaggggaggucaaugugacuggugugauaccacugacaacaacaccaacaaaaucuuauuuugcaaaucucaaaggaacaaggaccagagggaaacuaugcccggacugucucaacuguacagaucuggauguggccuuaggcaggccaauguguguggggaccacaccuucugcuaaggcuucaauacuccacgaagucagaccuguuacauccgggugcuuuccuauaaugcacgacagaacaaaaaucaggcaacuacccaaucuucucagaggauaugaaaauaucagguuaucaacccaaaacguuaucgaugcagaaaaagcaccaggaggacccuacagacuuggaaccucaggaucuugcccuaacgcuaccaguaaaaucggauuuuucgcaacaauggcuugggcugucccaaaggacaacuacaaaaaugcaacgaacccacuaacaguagaaguaccauacauuuguacagaaggggaagaccaaauuacuguuuggggguuccauucagauaacaaaacccaaaugaagaaccucuauggagacucaaauccucaaaaguucaccucaucugcuaauggaguaaccacacauuauguuucucagauuggcgacuucccagaucaaacagaagacggaggacuaccacaaagcggcagaauuguuguugauuacaugaugcaaaaaccugggaaaacaggaacaauugucuaucaaagagguguuuuguugccucaaaagguguggugcgcgaguggcaggagcaaaguaauaaaagggucauugccuuuaauuggugaagcagauugccuucaugaaaaauacgguggauuaaacaaaagcaagccuuacuacacaggagaacaugcaaaagccauaggaaauugcccaauauggguaaaaacaccuuugaagcuugccaauggaaccaaauauagaccuccugcaaaacuauuaaaggaaagggguuucuucggagcuauugcugguuuccuagaaggaggaugggaaggaaugauugcagguuggcacggauacacaucucacggagcacauggaguggcaguggcggcagaccuuaagaguacacaagaagcuauaaauaagauaacaaaaaaucucaauuccuugagugagcuagaaguaaaaaaccuucaaagacuaaguggugccauggaugaacuccacaacgaaauacucgagcuggaugagaaaguggaugaucucagagcugacacuauaagcucacaaauagaacuugcagucuugcuuuccaacgaaggaauaauaaacagugaagacgagcaucuauuggcacuugagagaaaacuaaagaaaaugcugggucccucugcuguagacauaggaaauggaugcuucgaaaccaaacacaaaugcaaccagaccugcuuagacaggauagcugcuggcaccuuuaaugcaggagaauuuucucuccccacuuuugauucauugaacauuacugcugcaucuuuaaaugaugauggauuggauaaccauacuauacugcucuauuacucaacugcugcuucuaguuuggcuguaacauuaaugcuagcuauuuuuauuguuuauauggucuccagagacaacguuucaugcuccaucugucuauaa

SEQ ID NO: 60004 - RNA, 1755 nt, Artificial Sequence
  derived and/or modified CDS sequence (wt) from hemagglutinin__InfluenzaB__AHL92728
augaaggcaauaauuguacuacucaugguaguaacauccaaugcagaucgaaucugcacugggauaacaucuucaaacucaccucauguggucaaaacagcuacucaaggggaggucaaugugacuggcgugauaccacugacaacaacaccaacaaaaucuuauuuugcaaaccucaaaggaacaaggaccagagggaaacuaugcccggacugucucaacuguacagaucuggauguggccuugggcaggccaauguguguggggaccacaccuucugcuaaagcuucaauacuccacgaagucagaccuguuacauccgggugcuuuccuauaaugcacgacagaacaaaaaucaggcaacuacccaaucuucucagaggauaugaaaauaucagguuaucaacccagaacguuaucgaugcagaaaaagcaccaggaggacccuacagacuuggaaccucaggaucuugcccuaaugcuaccaguaaaaucggauuuuucgcaacaauggcuugggcugucccaaaggacaacuacaaaaaugcaacgaacccacuaacaguagaaguaccauacauuuguacagaaggggaagaccaaauuacuguuuggggguuccauucagauaacaaaacccaaaugaagaaccucuauggagacucaaauccucaaaaguucaccucaucugcuaauggaguaaccacacauuauguuucucagauuggcgacuucccagaucaaacagaagacggaggacuaccacaaagcggcagaauuguuguugauuacaugaugcaaaaaccugggaaaacaggaacaauugucuaucaaagagguguuuuguugccucaaaagguguggugcgcgaguggcaggagcaaaguaauaaaagggucauugccuuuaauuggugaagcagauugccuucaugaaaaauacgguggauuaaacaaaagcaagccuuacuacacaggaaaacaugcaaaagccauaggaaauugcccaauauggguaaaaacaccuuugaagcuugccaauggaaccaaauauagaccuccugcaaaacuauuaaaggaaagggguuucuucggagcuauugcugguuuccuagaaggaggaugggaaggaaugauugcagguuggcacggauacacaucucacggagcacauggaguggcaguggcggcagaccuuaagaguacacaagaagcuauaaauaagauaacaaaaaaucucaauucuuugagugagcuagaaguaaagaaccuucaaagacuaaguggugccauggaugaacuccacaacgaaauaaucgagcuggaugagaaaguggaugaucucagagcugacacuauaagcucacaaauagaacuugcagucuugcuuuccaacgaaggaauaauaaacagugaagacgagcaucuauuggcacuugagagaaaacuaaagaaaaugcugggccccucugcuguagacauaggaaauggaugcuucgaaaccaaacacaaaugcaaccagaccugcuuagacaggauagcugcuggcaccuuuaaugcaggagaauuuucucuccccacuuuugauucauugaacauuacugcugcaucuuuaaaugaugauggauuggauaaccauacuauacugcucuauuacucaacugcugcuucuaguuuggcuguaacauuaaugcuagcuauuuuuauuguuuauauggucuccagagacaacguuucaugcuccaucugucuauaa

SEQ ID NO: 60005 - RNA, 1755 nt, Artificial Sequence; identical to SEQ ID NO: 60004
  derived and/or modified CDS sequence (wt) from hemagglutinin__InfluenzaB__AHL92739

SEQ ID NO: 60006 - RNA, 1755 nt, Artificial Sequence; identical to SEQ ID NO: 60004
  derived and/or modified CDS sequence (wt) from hemagglutinin__InfluenzaB__AHL92750

SEQ ID NO: 60007 - RNA, 1755 nt, Artificial Sequence; identical to SEQ ID NO: 59978
  derived and/or modified CDS sequence (wt) from hemagglutinin__InfluenzaB__AHL92761

SEQ ID NO: 60008 - RNA, 1755 nt, Artificial Sequence
  derived and/or modified CDS sequence (wt) from hemagglutinin__InfluenzaB__AHL92772
augaaggcaauaauuguacuacucaugguaguaacauccaaugcagaucgaaucugcacugggauaacaucuucaaacucaccucauguggucaaaacagcuacucaaggggaggucaaugugacuggugugauaccacugacaacaacaccaacaaaaucuuauuuugcaaaucucaaaggaacaaggaccagagggaaacuaugcccggacugucucaacuguacagaucuggauguggccuugggcaggccaaugugcauggggaccacaccuucugcuaaagcuucaauacuccacgaagucagaccuguuacauccgggugcuuuccuauaaugcacgacagaacaaaaaucaggcaacuacccaaucuucucagaggauaugaaaauaucagguuaucaacccaaaacguuaucgaugcagaaaaagcaccaggaggacccuacagacuuggaaccucaggaucuugcccuaacgcuaccaguaaaaucggauuuuucgcaacaauggcuugggcugucccaaaggacaacuacaaaaaugcaacgaacccacuaacaguagaaguaccauacauuuguacagaaggggaagaccaaauuacuguuuggggguuccauucagauaacaaaacccaaaugaagaaccucuauggagacucaaauccucaaaaguucaccucaucugcuaauggaguaaccacacauuauguuucucagauuggcgacuucccagaucaaacagaagacggaggacuaccacaaagcggcagaauuguuguugauuacaugaugcaaaaaccugggaaaacaggaacaauugucuaucaaagagguguuuuguugccucaaaagguguggugcgcgaguggcaggagcaaaguaauaaaagggucauugccuuuaauuggugaagcagauugccuucaugaaaaauacgguggauuaaacaaaagcaagccuuacuacacaggagaacaugcaaaagccauaggaaauugcccaauauggguaaaaacaccuuugaagcuugccaauggaaccaaauauagaccuccugcaaaacuauuaaaggaaagggguuucuucggagcuauugcugguuuccuagaaggaggaugggaaggaaugauugcagguuggcacggauacacaucucacggagcacauggaguggcaguggcggcagaccuuaagaguacacaagaagcuauaaauaagauaacaaaaaaucucaauucuuugagugagcuagaaguaaagaaccuucaaagacuaaguggugccauggaugaacuccacaacgaaauacucgagcuggaugagaaaguggaugaucucagagcugacacuauaagcucacaaauagaacuugcagucuugcuuuccaacgaaggaauaauaaacagugaagacgagcaucuauuggcacuugagagaaaacuaaagaaaaugcugggucccucugcuguagacauaggaaauggaugcuucgaaaccaaacacaaaugcaaccaaaccugcuuagacaggauagcugcuggcaccuuuaaugcaggagaauuuucucuccccacuuuugauucauugaacauuacugcugcaucuuuaaaugaugauggauuggauaaccauacuauacugcucuauuacucaacugcugcuucuaguuuggcuguaacauuaaugcuagcuauuuuuauuguuuauauggucuccagagacaacguuucaugcuccaucugucuauaa

SEQ ID NO: 60009 - RNA, 1755 nt, Artificial Sequence
  derived and/or modified CDS sequence (wt) from hemagglutinin__InfluenzaB__AHL92794
augaaggcaauaauuguacuacucaugguaguaacauccaaugcagaucgaaucugcacugggauaacaucuucaaacucaccucauguggucaaaacagcuacucaaggggaggucaaugugacuggcgugauaccacugacaacaacaccaacaaaaucuuauuuugcaaaccucaaaggaacaaggaccagagggaaacuaugcccggacugucucaacuguacagaucuggauguggccuugggcaggccaauguguguggggaccacaccuucugcuaaagcuucaauacuccacgaagucagaccuguuacauccgggugcuuuccuauaaugcacgacagaacaaaaaucaggcaacuacccaaucuucucagaggauaugaaaauaucagguuaucaacccagaacguuaucgaugcagaaaaagcaccaggaggacccuacagacuuggaaccucaggaucuugcccuaaugcuaccaguaaaaucggauuuuucgcaacaauggcuugggcugucccaaaggacaacuacaaaaaugcaacgaacccacuaacaguagaaguaccauacauuuguacagaaggggaagaccaaauuacuguuuggggguuccauucagauaacaaaacccaaaugaagaaccucuauggagacucaaauccucaaaaguucaccucaucugcuaauggaguaaccacacauuauguuucucagauuggcgacuucccagaucaaacagaagacggaggacuaccacaaagcggcagaauuguuguugauuacaugaugcaaaaaccugggaaaacaggaacaauugucuaucaaagagguguuuuguugccucaaaagguguggugcgcgaguggcaggagcaaaguaauaaaagggucauugccuuuaauuggugaagcagauugccuucaugaaaaauacgguggauuaaacaaaagcaagccuuacuacacaggagaacaugcaaaagccauaggaaauugcccaauauggguaaaaacaccuuugaagcuugccaauggaaccaaauauagaccuccugcaaaacuauuaaaggaaagggguuucuucggagcuauugcugguuuccuagaaggaggaugggaaggaaugauugcagguuggcacggauacacaucucacggagcacauggaguggcaguggcggcagaccuuaagaguacacaagaagcuauaaauaagauaacaaaaaaucucaauucuuugagugagcuagaaguaaagaaccuucaaagacuaaguggugccauggaugaacuccacaacgaaauacucgagcuggaugagaaaguggaugaucucagagcugacacuauaagcucacaaauagaacuugcagucuugcuuuccaacgaaggaauaauaaacagugaagacgagcaucuauuggcacuugagagaaaacuaaagaaaaugcugggccccuccgcuguagacauaggaaauggaugcuucgaaaccaaacacaaaugcaaccagaccugcuuagacaggauagcugcuggcaccuuuaaugcaggagaauuuucucuccccacuuuugauucauugaacauuacugcugcaucuuuaaaugaugauggauuggauaaccauacuauacugcucuauuacucaacugcugcuucuaguuuggcuguaacauuaaugcuagcuauuuuuauuguuuauauggucuccagagacaacguuucaugcuccaucugucuauaa

SEQ ID NO: 60010 - RNA, 1755 nt, Artificial Sequence
  derived and/or modified CDS sequence (wt) from hemagglutinin__InfluenzaB__AHL92805
augaaggcaauaauuguacuacucaugguaguaacauccaaugcagaucgaaucugcacugggauaacaucuucaaacucaccucauguggucaaaacagcuacucaaggggaggucaaugugacuggcgugauaccacugacaacaacaccaacaaaaucuuauuuugcaaaucucaaaggaacaaggaccagagggaaacuaugcccggacugucucaacuguacagaucuggauguggccuugggcaggccaaugugugugggaaccacaccuucugcuaaagcuucaauacuccacgaagucagaccuguuacauccgggugcuuuccuauaaugcacgacagaacaaaaaucaggcaacuacccaaucuucucagaggauaugaaaauaucagguuaucaacccaaaacguuaucgaugcagaaaaagcaccaggaggacccuacagacuuggaaccucaggaucuugcccuaacgcuaccaguaaaaucggauuuuucgcaacaauggcuugggcugucccaaaggacaacuacaaaaaugcaacgaacccacuaacaguagaaguaccauacauuuguacagaaggggaagaccaaauuacuguuuggggguuccauucagauaacaaaacccaaaugaagaaccucuauggagacucaaauccucaaaaguucaccucaucugcuaauggaguaaccacacauuauguuucucagauuggcgacuucccagaucaaacagaagacggaggacuaccacaaagcggcagaauuguuguugauuacaugaugcaaaaaccugggaaaacaggaacaauugucuaucaaagagguguuuuguugccucaaaagguguggugcgcgaguggcaggagcaaaguaauaaaagggucauugccuuuaauuggugaagcagauugccuucaugaaaaauacgguggauuaaacaaaagcaagccuuacuacacaggagaacaugcaaaagccauaggaaauugcccaauauggguaaaaacaccuuugaagcuugccaauggaaccaaauauagaccuccugcaaaacuauuaaaggaaagggguuucuucggagcuauugcugguuuccuagaaggaggaugggaaggaaugauugcagguuggcacggauacacaucucacggagcacauggaguggcaguggcggcagaccuuaagaguacacaagaagcuauaaauaagauaacaaaaaaucucaauucuuugagugagcuagaaguaaagaaccuucaaagacuaaguggugccauggaugaacuccacaacgaaauacucgagcuggaugagaaaguggaugaucucagagcugacacuauaagcucacaaauagaacuugcagucuugcuuuccaacgaaggaauaauaaacagugaagacgagcaucuauuggcacuugagagaaaacuaaagaaaaugcugggucccucugcuguagacauaggaaauggaugcuucgaaaccaaacacaaaugcaaccagaccugcuuagacaggauagcugcuggcaccuuuaaugcaggagaauuuucucuccccacuuuugauucauugaacauuacugcugcaucuuuaaaugaugauggauuggauaaccauacuauacugcucuauuacucaacugcugcuucuaguuuggcuguaacauuaaugcuagcuauuuuuauuguuuauauggucuccagagacaacguuucaugcuccaucugucuauaa

SEQ ID NO: 60011 - RNA, 1755 nt, Artificial Sequence; identical to SEQ ID NO: 59680
  derived and/or modified CDS sequence (wt) from hemagglutinin__InfluenzaB__AHL92816

SEQ ID NO: 60012 - RNA, 1755 nt, Artificial Sequence
  derived and/or modified CDS sequence (wt) from hemagglutinin__InfluenzaB__AHL92827
augaaggcaauaauuguacuacucaugguaguaacauccaaugcagaucgaaucugcacugggauaacaucuucaaacucaccucauguggucaaaacagcuacucaaggggaggucaaugugacuggcgugauaccacugacaacaacaccaacaaaaucuuauuuugcaaaccucaaaggaacaaggaccagagggaaacuaugcccggacugucucaacuguacagaucuggauguggccuugggcaggccaauguguguggggaccacaccuucugcuaaagcuucaauacuccacgaagucagaccuguuacauccgggugcuuuccuauaaugcacgacagaacaaaaaucaggcaacuacccaaucuucucagaggauaugaaaauaucagguuaucaacccagaacguuaucgaugcagaaaaagcaccaggaggacccuacagacuuggaaccucaggaucuugcccuaaugcuaccaguaaaaucggauuuuucgcaacaauggcuugggcugucccaaaggacaacuacaaaaaugcaacgaacccacuaacaguagaaguaccauacauuuguacagaaggggaagaccaaauuacuguuuggggguuccauucagauaacaaaacccaaaugaagaaccucuauggagacucaaauccucaaaaguucaccucaucugcuaauggaguaaccacacauuauguuucucagauuggcgacuucccagaucaaacagaagacggaggacuaccacaaagcggcagaauuguuguugauuacaugaugcaaaaaccugggaaaacaggaacaauugucuaucaaagagguguuuuguugccucaaaagguguggugcgcgaguggcaggagcaaaguaauaaaagggucauugccuuuaauuggugaagcagauugccuucaugaaaaauacgguggauuaaacaaaagcaagccuuacuacacaggagaacaugcaaaagccauaggaaauugcccaauauggguaaaaacaccuuugaagcuugccaauggaaccaaauauagaccuccugcaaaacuauuaaaggaaagggguuucuucggagcuauugcugguuuccuagaaggaggaugggaaggaaugauugcagguuggcacggauacacaucucacggagcacauggaguggcaguggcggcagaccuuaagaguacacaagaagcuauaaauaagauaacaaaaaaucucaauucuuugagugagcuagaaguaaagaaccuucaaagacuaaguggugccauggaugaacuccacaacgaaauacucgagcuggaugagaaaguggaugaucucagagcugacacuauaagcucacaaauagaacuugcagucuugcuuuccaacgaaggaauaauaaacagugaagacgagcaucuauuggcacuugagagaaaacuaaagaaaaugcugggccccucugcuguagacauaggaaauggaugcuucgaaaccaaacacaaaugcaaccagaccugcuuagacaggauagcugcuggcaccuuuaaugcaggagaauuuucucuccccacuuuugauucauugaacauuacugcugcaucuuuaaaugaugauggauuggauaaccauacuauacugcucuauuacucaacugcugcuucuaguuuggcuguaacauuaaugcuagcuauuuuuguuguuuauauggucuccagagacaacguuucaugcuccaucugucuauaa

SEQ ID NO: 60013 - RNA, 1755 nt, Artificial Sequence; identical to SEQ ID NO: 58838
  derived and/or modified CDS sequence (wt) from hemagglutinin__InfluenzaB__AHL92838

SEQ ID NO: 60014 - RNA, 1755 nt, Artificial Sequence; identical to SEQ ID NO: 60010
  derived and/or modified CDS sequence (wt) from hemagglutinin__InfluenzaB__AHL92849

SEQ ID NO: 60015 - RNA, 1755 nt, Artificial Sequence; identical to SEQ ID NO: 58838
  derived and/or modified CDS sequence (wt) from hemagglutinin__InfluenzaB__AHL92860

SEQ ID NO: 60016 - RNA, 1758 nt, Artificial Sequence
  derived and/or modified CDS sequence (wt) from hemagglutinin__InfluenzaB__AHL92871
augaaggcaauaauuguacuacucaugguaguaacauccaaugcagaucgaaucugcacugggauaacaucgucaaacucaccccauguggucaaaacugcuacucaaggggaggucaaugugacuggugugauaccacugacaacaacacccaccaaaucucauuuugcaaaucucaaaggaacaaaaaccagagggaaacuaugcccaaaaugccucaacugcacagaucuggacguggccuugggcagaccaaaaugcacggggaacauacccucggcagaaguuucaauacuccaugaagucagaccuguuaccucugggugcuuuccuauaaugcacgacagaacaaaaauuagacagcugcccaaccuucucagaggguacgaacauaucagauuaucaacucauaacguuaucaaugcagaaaaggcaccaggaggacccuacaaaauuggaaccucagggucuugcccuaauguuaccaauggaaacggauuuuucgcaacaauggcuugggccgucccaaaaaacgacaacaacaaaacagcaacaaauucauuaacaauagaaguaccauacauuuguacagaaggagaagaccaaauuaccauuuggggguuccacucugauaacgaaacccaaauggcaaaacucuauggggacucaaagccccagaaguucaccucaucugccaacggggugaccacacauuacguuucacagauugguggcuucccaaaucaaacagaagacggaggacuaccacaaagugguagaauuguuguugauuacauggugcaaaaaucugggaaaacaggaacaauuaccuaucaaagagguauuuuauugccucaaaaaguguggugcgcaaguggcaggagcaagguaauaaaaggauccuugcccuuaauuggagaagcagauugucuccacgaaaaauacgguggauuaaacaaaagcaagccuuacuacacaggggaacaugcaaaggccauaggaaauugcccaauaugggugaaaacacccuugaagcuggccaaugggaccaaauauagaccuccugcaaaacuauuaaaggaaagggguuucuucggagcuauugcugguuucuuagaaggaggaugggaaggaaugauugcagguuggcacggauacacaucccauggggcacauggaguagcaguggcagcagaccuuaagagcacucaagaagccauaaacaagauaacaaaaaaucucaacucuuugagugagcuggaaguaaagaaucuucaaagacuaagcggugccauggaugaacuccacaacgaaauacuagaacuagacgagaaaguggaugaucucagagcugauacaauaagcucacaaauagaacucgcaguccugcuuuccaaugaaggaauaauaaacagugaagaugagcaucucuuggcgcuugaaagaaagcugaagaaaaugcugggccccucugcuguagagauagggaauggaugcuucgaaaccaaacacaagugcaaccagaccugucuugacagaauagcugcugguaccuuugaugcaggagaauuuucucuccccacuuuugauucacugaauauuacugcugcaucuuuaaaugacgauggauuggauaaucauacuauacugcuuuacuacucaacugcugccuccaguuuggcuguaacauugaugauagcuaucuuuguuguuuauauggucuccagagacaauguuucuugcuccaucugucuauaa

SEQ ID NO: 60017 - RNA, 1755 nt, Artificial Sequence
  derived and/or modified CDS sequence (wt) from hemagglutinin__InfluenzaB__AHL92882
augaaggcaauaauuguacuacucaugguaguaacauccaaugcagaucgaaucugcacugggauaacaucuucaaacucaccucauguggucaaaacagcuacucaaggggaggucaaugugacuggugugauaccacugacaacaacaccaacaaaaucuuauuuugcaaaucucaaaggaacaaggaccagagggaaacuaugcccagacugucucaacuguacagaccuggauguggccuugggcaggccaauguguguggggaccacaccuucugcgaaagcuucaauacuccacgaagucagaccuguuacauccgggugcuuuccuauaaugcacgacagaacaaaaaucaggcaacuagccaaucuucucagaggauaugaaaauaucagguuaucaacccaaaacguuaucgaugcagaaaaggcaccaggaggacccuacagacuuggaaccucaggaucuugcccuaacgcuaccaguaaaagcggauuuuucgcaacaauggcuugggcugucccaaaggacaacaacaaaaaugcaacgaacccacuaacaguagaaguaccauacauuuguacagaaggggaagaccaaauuacuguuuggggguuccauucagauaacaaaacccaaaugaagaaccucuauggagacucaaauccucaaaaguucaccucaucugcuaauggaguaaccacacauuauguuucucagauuggcggcuucccagaucaaacagaagacggaggacuaccacaaagcggcagaauuguuguugauuacaugaugcaaaaaccugggaaaacaggaacaauugucuaucaaagagguguuuuguugccucaaaagguguggugcgcgaguggcaggagcaaaguaauaaaaggguccuugccuuuaauuggugaagcagauugccuucaugaaaaauacgguggauuaaacaaaagcaagccuuacuacacaggagaacaugcaaaagccauaggaaauugcccaauaugggugaaaacaccuuugaagcuugccaauggaaccaaauauagaccuccugcaaaacuauuaaaggaaagggguuucuucggagcuauugcugguuuccuagaaggaggaugggaaggaaugauugcagguuggcacggauacacaucucacggagcacauggaguggcaguggcggcagaccuuaagaguacacaagaagcuauaaacaagauaacaaaaaaucucaauucuuugagugagcuagaaguaaagaaucuucaaagacuaaguggugccauggaugaacuccacaacgaaauacucgagcuggaugagaaaguggaugaucucagagcugacacuauaagcucacaaauagaacuugcagucuugcuuuccaacgaaggaauaauaaacagugaagacgagcaucuauuggcacuugagagaaaacuaaagaaaaugcugggucccucugcuguagacauaggaaauggaugcuucgaaaccaaacacaaaugcaaccagaccugcuuagacaggauagcugcuggcaccuuuaaugcaggagaauuuucucuccccacuuuugauucauugaacauuacugcugcaucuuuaaaugaugauggauuggauaaccauacuauacugcucuauuacucaacugcugcuucuaguuuggcuguaacauugaugcuagcuauuuuuauuguuuauauggucuccagagacaacguuucaugcuccaucugucuauaa

SEQ ID NO: 60018 - RNA, 1758 nt, Artificial Sequence
  derived and/or modified CDS sequence (wt) from hemagglutinin__InfluenzaB__AHL92893
augaaggcaauaauuguacuacucaugguaguaacauccaaugcagaucgaaucugcacugggauaacaucgucaaacucaccccauguggucaaaacugcuacucaaggggaggucaaugugacuggugugauaccacugacaacaacacccaccaaaucucauuuugcaaaucucaaaggaacaaaaaccagagggaaacuaugcccaaaaugccucaacugcacagaucuggacguggccuugggcagaccaaaaugcacggggaacauacccucggcagaaguuucaauacuccaugaagucagaccuguuaccucugggugcuuuccuauaaugcacgacagaacaaaaauuagacagcugcccaaccuucucagaggauacgaacauaucagauuaucaacucauaacguuaucaaugcagaaaaggcaccaggaggacccuacaaaauuggaaccucagggucuugcccuaauguuaccaauggaaacggauuuuucgcaacaauggcuugggccgucccaaaaaacgacaacaacaaaacagcaacaaauucauuaacaauagaaguaccauacauuuguacagaaggagaagaccaaauuaccauuuggggguuccacucugauaaagaaacccaaauggcaaaacucuauggggacucaaagccccagaaguucaccucaucugccaacggagugaccacacauuacguuucacagauugguggcuucccaaaucaaacagaagacggaggacuaccacaaagugguagaauuguuguugauuacauggugcaaaaaucugggaaaacaggaacaauuaccuaucaaagagguauuuuauugccucaaaaaguguggugcgcaaguggcaggagcaagguaauaaaaggauccuugcccuuaauuggagaagcagauugccuccacgaaaaauacgguggauuaaacaaaagcaagccuuacuacacaggggaacaugcaaaggccauaggaaauugcccaauaugggugaaaacacccuugaagcuggccaauggaaccaaauauagaccuccugcaaaacuauuaaaggaaagggguuucuucggagcuauugcugguuucuuagaaggaggaugggaaggaaugauugcagguuggcacggauacacaucccauggggcacauggaguagcaguggcagcagaccuuaagagcacucaagaagccauaaacaagauaacaaaaaaucucaacucuuugagugagcuggaaguaaagaaucuucaaagacuaagcggugccauggaugaacuccacaacgaaauacuagaacuagacgagaaaguggaugaucucagagcugauacaauaagcucacaaauagaacucgcaguccugcuuuccaaugaaggaauaauaaacagugaagaugagcaucucuuggcgcuugaaagaaagcugaagaaaaugcugggccccucugcuguagagauagggaauggaugcuucgaaaccaaacacaagugcaaccagaccugucuugacagaauagcugcugguaccuuugaugcaggagaauuuucucuccccacuuuugauucacugaauauuacugcugcaucuuuaaaugacgauggauuggauaaucauacuauacugcuuuacuacucaacugcugccuccaguuuggcuguaacauugaugauagcuaucuuuauuguuuauauggucuccagagacaauguuucuugcuccaucugucuauaa

SEQ ID NO: 60019 - RNA, 1755 nt, Artificial Sequence
  derived and/or modified CDS sequence (wt) from hemagglutinin__InfluenzaB__AHL92904
augaaggcaauaauuguacuacucaugguaguaacauccaaugcagaucgaaucugcacugggauaacaucuucaaacucaccucauguggucaaaacagcuacucaaggggaggucaaugugacuggugugauaccacugacaacaacaccaacaaaaucuuauuuugcaaaucucaaaggaacaaggaccagagggaaacuaugcccagacugucucaacuguacagaucuggauguggccuugggcaggccaauguguguggggaccacaccuucugcgaaagcuucaauacuccacgaagucagaccuguuacauccgggugcuuuccuauaaugcacgacagaacaaaaaucaggcaacuacccaaucuucucagaggauaugaaaauaucagguuaucaacccaaaacguuaucgaugcagaaaaggcaccaggaggacccuacagacuuggaaccucaggaucuugcccuaacgcuaccaguaaaagcggauuuuucgcaacaauggcuugggcugucccaaaggacaacaacaaaaaugcaacgaacccacuaacaguagaaguaccauacauuuguacagaaggggaagaccaaauuacuguuuggggguuccauucagauaacaaaacccaaaugaagaaccucuauggagacucaaauccucaaaaguucaccucaucugcuaacggaguaaccacacauuauguuucucagauuggcggcuucccagaucaaacagaagacggaggacuaccacaaagcggcagaauuguuguugauuacaugaugcaaaaaccugggaaaacaggaacaauugucuaucaaagagguguuuuguugccucaaaagguguggugcgcgaguggcaggagcaaaguaauaaaaggauccuugccuuuaauuggugaagcagauugccuucaugaaaaauacgguggauuaaacaaaagcaagccuuacuacacaggagaacaugcaaaagccauaggaaauugcccaauaugggugaaaacaccuuugaagcuugccaauggaaccaaauauagaccuccugcaaaacuauuaaaggaaagggguuucuucggggcuauugcugguuuccuagaaggaggaugggaagggaugauugcagguuggcacggauacacaucucacggagcacauggaguggcaguggcggcagaccuuaagaguacacaagaagcuauaaacaagauaacaaaaaaucucaauucuuugagugagcuagaaguaaagaaucuucaaagacuaaguggugccauggaugaacuccacaacgaaauacucgagcuggaugagaaaguggaugaucucagagcugacacuauaagcucacaaauagaacuugcagucuugcuuuccaacgaaggaauaauaaacagugaagacgagcaucuauuggcacuugagagaaaacuaaagaaaaugcugggucccucugcuguagacauaggaaauggaugcuucgaaacuaaacacaaaugcaaccagaccugcuuagacaggauagcugcuggcaccuuuaaugcaggagaauucucucuccccacuuuugauucauugaacauuacugcugcaucuuuaaaugaugauggauuggauaaccauacuauacugcucuauuacucaacugcugcuucuaguuuggcuguaacauugaugcuagcuauuuuuauuguuuauauggucuccagagacaacguuucaugcuccaucugucuauaa

SEQ ID NO: 60020 - RNA, 1758 nt, Artificial Sequence
  derived and/or modified CDS sequence (wt) from hemagglutinin__InfluenzaB__AHL92915
augaaggcaauaauuguacuacucaugguaguaacauccaaugcagaucgaaucugcacugggauaacaucgucaaacucaccccauguggucaaaacugcuacucaaggggaggucaaugugacuggugugauaccacugacaacaacacccaccaaaucucauuuugcaaaucucaaaggaacaaaaaccagagggaaacuaugcccaaaaugccucaacugcacagaucuggacguggccuugggcagaccaaaaugcacggggaacauacccucggcagaaguuucaauacuccaugaagucagaccuguuaccucugggugcuuuccuauaaugcacgacagaacaaaaauuagacagcugcccaaccuucucagaggauacgaacauaucagauuaucaacucauaacguuaucaaugcagaaaaggcaccaggaggacccuacaaaauuggaaccucagggucuugcccuaauguuaccaauggaaacggauuuuucgcaacaauggcuugggccgucccaaaaaacgacaacaacaaaacagcaacaaauucauuaacaauagaaguaccauacauuuguacagaaggagaagaccaaauuaccauuuggggguuccacucugauaacgaaacccaaauggcaaaacucuauggggacucaaagccccagaaguucaccucaucugccaacggagugaccacacauuacguuucacagauugguggcuucccaaaucaaacagaagacggaggacuaccacaaagugguagaauuguuguugauuacauggugcaaaaaucugggaaaacaggaacaauuaccuaucaaagagguauuuuauugccucaaaaaguguggugcgcaaguggcaggagcaagguaauaaaaggauccuugcccuuaauuggagaagcagauugccuccacgaaaaauacgguggauuaaacaaaagcaagccuuacuacacaggggaacaugcaaaggccauaggaaauugcccaauaugggugaaaacacccuugaagcuggccaauggaaccaaauauagaccuccugcaaaacuauuaaaggaaagggguuucuucggagcuauugcugguuucuuagaaggaggaugggaaggaaugauugcagguuggcacggauacacaucccauggggcacauggaguagcaguggcagcagaccuuaagagcacucaagaagccauaaacaagauaacaaaaaaucucaacucuuugagugagcuggaaguaaagaaucuucaaagacuaagcggugccauggaugaacuccacaacgaaauacuagaacuagacgagaaaguggaugaucucagagcugauacaauaagcucacaaauagaacucgcaguccugcuuuccaaugaaggaauaauaaacagugaagaugagcaucucuuggcgcuugaaagaaagcugaagaaaaugcugggccccucugcuguagagauagggaauggaugcuucgaaaccaaacacaagugcaaccagaccugucuugacagaauagcugcugguaccuuugaugcaggagaauuuucucuccccacuuuugauucacugaauauuacugcugcaucuuuaaaugacgauggauuggauaaucauacuauacugcuuuacuacucaacugcugccuccaguuuggcuguaacauugaugauagcuaucuuuauuguuuauauggucuccagagacaauguuucuugcuccaucugucuauaa

SEQ ID NO: 60021 - RNA, 1758 nt, Artificial Sequence
  derived and/or modified CDS sequence (wt) from hemagglutinin__InfluenzaB__AHL92926
augaaggcaauaauuguacuacucaugguaguaacauccaaugcagaucgaaucugcacugggauaacaucgucaaacucaccccauguggucaaaacugcuacucaaggggaggucaaugugacuggugugauaccacugacaacaacacccaccaaaucucauuuugcaaaucucaaaggaacaaaaaccagagggaaacuaugcccaaaaugccucaacugcacagaucuggacguggccuugggcagaccaaaaugcacggggaacauacccucggcagaaguuucaauacuccaugaagucagaccuguuaccucugggugcuuuccuauaaugcacgacagaacaaaaauuagacagcugcccaaccuucucagaggauacgaacauaucagauuaucaacucauaacguuaucaaugcagaaaaggcaccaggaggacccuacaaaauuggaaccucagggucuugcccuaauguuaccaauggaaacggauuuuucgcaacaauggcuugggccgucccaaaaaacgacaacaacaaaacagcaacaaauucauuaacaauagaaguaccauacauuuguacagaaggagaagaccaaauuaccauuuggggguuccacucugauaacgaaacccaaauggcaaaacucuauggggacucaaagccccagaaguucaccucaucugccaacggagugaccacacauuacguuucacagauugguggcuucccaaaucaaacagaagacggaggacuaccacaaagugguagaauuguuguugauuacauggugcaaaaaucugggaaaacaggaacaauuaccuaucaaagagguauuuuauugccucaaaaaguguggugcgcaaguggcaggagcaagguaauaaaaggauccuugcccuuaauuggagaagcagauugccuccacgaaaaauacgguggauuaaacaaaagcaagccuuacuacacaggggaacaugcaaaggccauaggaaauugcccaauaugggugaaaacacccuugaagcuggccaauggaaccaaauauagaccuccugcaaaacuauuaaaggaaagggguuucuucggagcuauugcugguuucuuagaaggaggaugggaaggaaugauugcagguuggcacggauacacaucccauggggcacauggaguagcaguggcagcagaccuuaagagcacucaagaagccauaaacaagauaacaaaaaaucucaacucuuugagugagcuggaaguaaagaaucuucaaagacuaagcggugccauggaugaacuccacaacgaaauacuagaacuagacgagaaaguggaugaucucagagcugauacaauaagcucacaaauagaacucgcaguccugcuuuccaaugaaggaauaauaaacagugaagaugagcaucucuuggcgcuugaaagaaagcugaagaaaaugcugggccccucugcuguagagauagggaauggaugcuucgaaaccaaacacaagugcaaccagacuugucuugacagaauagcugcugguaccuuugaugcaggagaauuuucucuccccacuuuugauucacugaauauuacugcugcaucuuuaaaugacgauggauuggauaaucauacuauacugcuuuacuacucaacugcugccuccaguuuggcuguaacauugaugauagcuaucuuuguuguuuauauggucuccagagacaauguuucuugcuccaucugucuauaa

SEQ ID NO: 60022 - RNA, 1755 nt, Artificial Sequence; identical to SEQ ID NO: 59611
  derived and/or modified CDS sequence (wt) from hemagglutinin__InfluenzaB__AHL92937

SEQ ID NO: 60023 - RNA, 1758 nt, Artificial Sequence
  derived and/or modified CDS sequence (wt) from hemagglutinin__InfluenzaB__AHL92948
augaaggcaauaauuguacuacucaugguaguaacauccaaugcagaucgaaucugcacugggauaacaucgucaaacucaccacauguugucaaaacugcuacucaaggggaggucaaugugacugguguaauaccacugacaacaacacccaccaaaucucauuuugcaaaucucaaaggaacagaaaccagagggaaacuaugcccaaaaugccucaacugcacagaucuggacguggccuugggcagaccaaaaugcacggggaacauacccucggcaagaguuucaauacuccaugaagucagaccuguuacaucugggugcuuuccuauaaugcacgacagaacaaaaauuagacagcugccuaaccuucucagaggauacgaacauaucagguuaucaacucauaacguuaucaaugcagaaaaugcaccaggaggacccuacaaaauuggaaccucagggucuugcccuaacguuaccaauggaaacggauuuuucgcaacaauggcuugggccgucccaaaaaacgacaacaacaaaacagcaacaaauucauuaacaauagaaguaccauacauuuguacagaaggagaagaccaaauuaccguuuggggguuccacucugauaacgagacccaaauggcaaagcucuauggggauucaaagccccagaaguucaccucaucugccaacggagugaccacacauuacguuucacagauugguggcuucccaaaucaaacagaagacggaggacuaccacaaagugguagaauuguuguugauuacauggugcaaaaaucugggaaaacaggaacaauuaccuaucaaagagguauuuuauugccucaaaagguguggugcgcaaguggcaggagcaagguaauaaaaggauccuugccuuuaauuggagaagcagauugccuccacgaaaaauacgguggauuaaacaaaagcaagccuuacuacacaggggaacaugcaaaggccauaggaaauugcccaauaugggugaaaacacccuugaagcuggccaauggaaccaaauauagaccuccugcaaaacuauuaaaggaaagggguuucuucggagcuauugcugguuucuuagaaggaggaugggaaggaaugauugcagguuggcacggauacacaucccauggggcacauggaguagcgguggcagcagaccuuaagagcacucaagaggccauaaacaagauaacaaaaaaucucaacucuuugagugagcuggaaguaaagaaucuucaaagacuaagcggugccauggaugaacuccacaacgaaauacuagaacuagacgagaaaguggaugaucucagagcugauacaauaagcucacaaauagaacucgcaguccugcuuuccaaugaaggaauaauaaacagugaagaugagcaucucuuggcgcuugaaagaaagcugaagaaaaugcugggccccucugcuguagagauagggaauggaugcuuugaaaccaaacacaagugcaaccagaccugucucgacagaauagcugcugguaccuuugaugcaggagaauuuucucuccccaccuuugauucacugaauauuacugcugcaucuuuaaaugacgauggauuggauaaucauacuauacugcuuuacuacucaacugcugccuccaguuuggcuguaacauugaugauagcuaucuuuguuguuuauauggucuccagagacaauguuucuugcuccaucugucuauaa

SEQ ID NO: 60024 - RNA, 1758 nt, Artificial Sequence; identical to SEQ ID NO: 59944
  derived and/or modified CDS sequence (wt) from hemagglutinin__InfluenzaB__AHL92959

SEQ ID NO: 60025 - RNA, 1758 nt, Artificial Sequence; identical to SEQ ID NO: 59947
  derived and/or modified CDS sequence (wt) from hemagglutinin__InfluenzaB__AHL92970

SEQ ID NO: 60026 - RNA, 1758 nt, Artificial Sequence
  derived and/or modified CDS sequence (wt) from hemagglutinin__InfluenzaB__AHL92981
augaaggcaauaauuguacuacucaugguaguaacauccaaugcagaucgaaucugcacugggauaacaucgucaaacucaccacauguugucaaaacugcuacucaaggggaggucaaugugacugguguaauaccacugacaacaacgcccaccaaaucucauuuugcaaaucucaaaggaacagaaaccagagggaaacuaugcccaaaaugccucaacugcacagaucuggacguggccuugggcagaccaaaaugcacggggaacauacccucggcaagaguuucaauacuccaugaagucagaccuguuacaucugggugcuuuccuauaaugcacgacagaacaaaaauuagacagcugccuaaccuucucagaggauacgaacauaucagguuaucaacucauaacguuaucaaugcagaaaaugcaccaggaggacccuacaaaauuggaaccucagggucuugcccuaacguuaccaauggaaacggauuuuucgcaacaauggcuugggccgucccaaaaaacgacaacaacaaaacagcaacaaauucauuaacaauagaaguaccauacauuuguacagaaggagaagaccaaauuaccguuuggggguuccacucugauaacgagacccaaauggcaaagcucuauggggacucaaagccccagaaguucaccucaucugccaacggagugaccacacauuacguuucacagauugguggcuucccaaaucaaacagaagacggaggacuaccacaaagugguagaauuguuguugauuacauggugcaaaaaucugggaaaacaggaacaauuaccuaucaaagagguauuuuauugccucaaaagguguggugcgcaaguggcaggagcaagguaauaaaaggauccuugccuuuaauuggagaagcagauugccuccacgaaaaauacgguggauuaaacaaaagcaagccuuacuacacaggggaacaugcaaaggccauaggaaauugcccaauaugggugaaaacacccuugaagcuggccaauggaaccaaauauagaccuccugcaaaacuauuaaaggaaagggguuucuucggagcuauugcugguuucuuagaaggaggaugggaaggaaugauugcagguuggcacggauacacaucccauggggcacauggaguagcgguggcagcagaccuuaagagcacucaagaggccauaaacaagauaacaaaaaaucucaacucuuugagugagcuggaaguaaagaaucuucaaagacuaagcggugccauggaugaacuccacaacgaaauauuagaacuagacgagaaaguggaugaucucagagcugauacaauaagcucacaaauagaacucgcaguccugcuuuccaaugaaggaauaauaaacagugaagaugagcaucucuuggcgcuugaaagaaagcugaagaaaaugcugggccccucugcuguagagauagggaauggaugcuuugaaaccaaacacaagugcaaccagaccugucucgacagaauagcugcugguaccuuugaugcaggagaauuuucucuccccaccuuugauucacugaauauuacugcugcaucuuuaaaugacgauggauuggauaaucauacuauacugcuuuauuacucaacugcugccuccaguuuggcuguaacauugaugauagcuaucuuuguuguuuauauggucuccagagacaauguuucuugcuccaucugucuauaa

SEQ ID NO: 60027 - RNA, 1758 nt, Artificial Sequence; identical to SEQ ID NO: 60026
  derived and/or modified CDS sequence (wt) from hemagglutinin__InfluenzaB__AHL92992

SEQ ID NO: 60028 - RNA, 1758 nt, Artificial Sequence; identical to SEQ ID NO: 59966
  derived and/or modified CDS sequence (wt) from hemagglutinin__InfluenzaB__AHL93004

SEQ ID NO: 60029 - RNA, 1758 nt, Artificial Sequence; identical to SEQ ID NO: 59961
  derived and/or modified CDS sequence (wt) from hemagglutinin__InfluenzaB__AHL93015

SEQ ID NO: 60030 - RNA, 1758 nt, Artificial Sequence; identical to SEQ ID NO: 59947
  derived and/or modified CDS sequence (wt) from hemagglutinin__InfluenzaB__AHL93026

SEQ ID NO: 60031 - RNA, 1755 nt, Artificial Sequence; identical to SEQ ID NO: 59975
  derived and/or modified CDS sequence (wt) from hemagglutinin__InfluenzaB__AHL93037

SEQ ID NO: 60032 - RNA, 1755 nt, Artificial Sequence; identical to SEQ ID NO: 59975
  derived and/or modified CDS sequence (wt) from hemagglutinin__InfluenzaB__AHL93048

SEQ ID NO: 60033 - RNA, 1755 nt, Artificial Sequence; identical to SEQ ID NO: 60004
  derived and/or modified CDS sequence (wt) from hemagglutinin__InfluenzaB__AHL93059

SEQ ID NO: 60034 - RNA, 1755 nt, Artificial Sequence
  derived and/or modified CDS sequence (wt) from hemagglutinin__InfluenzaB__AHL93070
augaaggcaauaauuguacuacucaugguaguaacauccaaugcagaucgaaucugcacugggauaacaucuucaaacucaccucauguggucaaaacagcuacucaaggggaggucaaugugacuggugugauaccacugacaacaacaccaacaaaaucuuauuuugcaaaucucaaaggaacaaggaccagagggaaacuaugcccggacugucucaacuguacagaucuggauguggccuugggcaggccaauguguguggggaccacaccuucugcuaaggcuucgauacuccacgaagucagaccuguuacauccgggugcuuuccuauaaugcacgacagaacaaaaaucaggcaacuacccaaucuucucagaggauaugaaaauaucagguuaucaacccaaaacguuaucgaugcagaaaaagcaccaggaggacccuacagacuuggaaccucaggaucuugcccuaacgcuaccaguaaaaucggauuuuucgcaacaauggcuugggcugucccaaaggacaacuacaaaaaugcaacgaacccacuaacaguagaaguaccauacauuuguacagaaggggaagaccaaauuacuguuuggggguuccauucagauaacaaaacccaaaugaagaaccucuauggagacucaaauccucaaaaguucaccucaucugcuaauggaguaaccacacauuauguuucucagauuggcgacuucccagaucaaacagaagacggaggacuaccacaaagcggcagaauuguuguugauuacaugaugcaaaaaccugggaaaacaggaacaauugucuaucaaagagguguuuuguugccucaaaagguguggugcgcgaguggcaggagcaaaguaauaaaagggucauugccuuuaauuggugaagcagauugccuucaugaaaaauacgguggauuaaacaaaagcaagccuuacuacacaggagaacaugcaaaagccauaggaaauugcccaauauggguaaaaacaccuuugaagcuugccaauggaaccaaauauagaccuccugcaaaacuauuaaaggaaagggguuucuucggagcuauugcugguuuccuagaaggaggaugggaaggaaugauugcagguuggcacggauacacaucucacggagcacauggaguggcaguggcggcagaucuuaagaguacacaagaagcuauaaauaagauaacaaaaaaucucaauucuuugagugagcuagaaguaaagaaccuucaaagacuaaguggugccauggaugaacuccacaacgaaauacucgagcuggaugagaaaguggaugaucucagagcugacacuauaagcucacaaauagaacuugcagucuugcuuuccaacgaaggaauaauaaacagugaagacgagcaucuauuggcacuugagagaaaacuaaagaaaaugcugggucccucugcuguagacauaggaaauggaugcuucgaaaccaaacacaaaugcaaccagaccugcuuagacaggauagcugcuggcaccuuuaaugcaggagaauuuucucuccccacuuuugauucauugaacauuacugcugcaucuuuaaaugaugauggauuggauaaccauacuauacugcucuauuacucaacugcugcuucuaguuuggcuguaacauuaaugcuagcuauuuuuauuguuuauauggucuccagagacaacguuucaugcuccaucugucuauaa

SEQ ID NO: 60035 - RNA, 1755 nt, Artificial Sequence
  derived and/or modified CDS sequence (wt) from hemagglutinin__InfluenzaB__AHL93081
augaaggcaauaauuguacuacucaugguaguaacauccaaugcagaucgaaucugcacugggauaacaucuucaaacucaccucauguggucaaaacagcuacucaaggggaggucaaugugacuggcgugauaccacugacaacaacaccaacaaaaucuuauuuugcaaaucucaaaggaacaaggaccagagggaaacuaugcccggacugucucaacuguacagaucuggauguggccuugggcaggccaauguguguggggaccacaccuucugcuaaagcuucaauacuccacgaagucagaccuguuacauccgggugcuuuccuauaaugcacgacagaacaaaaaucaggcaacuacccaaucuucucagaggauaugaaaauaucagguuaucaacccaaaacguuaucgaugcagaaaaagcaccaggaggacccuacagacuuggaaccucaggaucuugcccuaacgcuaccaguaaaaucggauuuuucgcaacaauggcuugggcugucccaaaggacaacuacaaaaaugcaacgaacccacuaacaguagaaguaccauacauuuguacagaaggggaagaccaaauuacuguuuggggguuccauucagauaacaaaacccaaaugaagaaccucuauggagacucaaauccucaaaaguucaccucaucugcuaauggaguaaccacacauuauguuucucagauuggcgacuucccagaucaaacagaagacggaggacuaccacaaagcggcagaauuguuguugauuacaugaugcaaaaaccugggaaaacaggaacaauugucuaucaaagagguguuuuguugccucaaaagguguggugcgcgaguggcaggagcaaaguaauaaaagggucauugccuuuaauuggugaagcagauugccuucaugaaaaauacgguggauuaaacaaaagcaagccuuacuacacaggagaacaugcaaaagccauaggaaauugcccaauauggguaaaaacaccuuugaagcuugccaauggaaccaaauauagaccuccugcaaaacuauuaaaggaaagggguuucuucggagcuauugcugguuuccuagaaggaggaugggaaggaaugauugcagguuggcacggauacacaucucacggagcacauggaguggcaguggcggcagaccuuaagaguacacaagaagcuauaaauaagauaacaaaaaaucucaauucuuugagugagcuagaaguaaagaaccuucaaagacuaaguggugccauggaugaacuccacaacgaaauacucgagcuggaugggaaaguggaugaucucagagcugacacuauaagcucacaaauagaacuugcagucuugcuuuccaacgaaggaauaauaaacagugaagacgagcaucuauuggcacuugagagaaaacuaaagaaaaugcugggucccucugcuguagacauaggaaauggaugcuucgaaaccaaacacaaaugcaaccagaccugcuuagacaggauagcugcuggcaccuuuaaugcaggagaauuuucucuccccacuuuugauucauugaacauuacugcugcaucuuuaaaugaugauggauuggauaaccauacuauacugcucuauuacucaacugcugcuucuaguuuggcuguaacauuaaugcuagcuauuuuuauuguuuauauggucuccagagacaacguuucaugcuccaucugucuauaa

SEQ ID NO: 60036 - RNA, 1755 nt, Artificial Sequence; identical to SEQ ID NO: 58838
  derived and/or modified CDS sequence (wt) from hemagglutinin__InfluenzaB__AHL93092

SEQ ID NO: 60037 - RNA, 1755 nt, Artificial Sequence; identical to SEQ ID NO: 58832
  derived and/or modified CDS sequence (wt) from hemagglutinin__InfluenzaB__AHL93103

SEQ ID NO: 60038 - RNA, 1755 nt, Artificial Sequence; identical to SEQ ID NO: 58838
  derived and/or modified CDS sequence (wt) from hemagglutinin__InfluenzaB__AHL93114

SEQ ID NO: 60039 - RNA, 1755 nt, Artificial Sequence; identical to SEQ ID NO: 58579
  derived and/or modified CDS sequence (wt) from hemagglutinin__InfluenzaB__AHL93125

SEQ ID NO: 60040 - RNA, 1755 nt, Artificial Sequence
  derived and/or modified CDS sequence (wt) from hemagglutinin__InfluenzaB__AHL93136
augaaggcaauaauuguacuacucaugguaguaacauccaaugcagaucgaaucugcacugggauaacaucuucaaacucaccucauguggucaaaacagcuacucaaggggaggucaaugugacuggcgugauaccacugacaacaacaccaacaaaaucuuauuuugcaaaucucaaaggaacaaggaccagagggaaacuaugcccggacugucucaacuguacagaucuggauguggccuugggcaggccaauguguguggggaccacaccuucugcuaaagcuucaauacuccacgaagucagaccuguuacauccgggugcuuuccuauaaugcacgacagaacaaaaaucaggcaacuacccaaucuucucagaggauaugaaaauaucagguuaucaacccagaacguuaucgaugcagaaaaagcaccaggaggacccuacagacuuggaaccucaggaucuugcccuaaugcuaccaguaaaaucggauuuuucgcaacaauggcuugggcugucccaaaggacaacuacaaaaaugcaacgaacccacuaacaguagaaguaccauacauuuguacagaaggggaagaccaaauuacuguuuggggguuccauucagauaacaaaacccaaaugaagaaccucuauggagacucaaauccucaaaaguucaccucaucugcuaauggaguaaccacacauuauguuucucaaauuggcgacuucccagaucaaacagaagacggaggacuaccacaaagcggcagaauuguuguugauuacaugaugcaaaaaccugggaaaacaggaacaauugucuaucaaagagguguuuuguugccucaaaggguguggugcgcgaguggcaggagcaaaguaauaaaagggucauugccuuuaauuggugaagcagauugccuucaugaaaaauacgguggauuaaacaaaagcaagccuuacuacacaggagaacaugcaaaagccauaggaaauugcccaauauggguaaaaacaccuuugaagcuugccaauggaaccaaauauagaccuccugcaaaacuauuaaaggaaagggguuucuucggagcuauugcugguuuccuagaaggaggaugggaaggaaugauugcagguuggcacggauacacaucucacggagcacauggaguggcaguggcggcagaccuuaagaguacacaagaagcuauaaauaagauaacaaaaaaucucaauucuuugagugagcuagaaguaaagaaccuucaaagacuaaguggugccauggaugaacuccacaacgaaauacucgagcuggaugagaaaguggaugaucucagagcugacacuauaagcucacaaauagaacuugcagucuugcuuuccaacgaaggaauaauaaacagugaagacgagcaucuauuggcacuugagagaaaacuaaagaaaaugcugggccccucugcuguagacauaggaaauggaugcuucgaaaccaaacacaaaugcaaccagaccugcuuagacaggauagcugcuggcaccuuuaaugcaggagaauuuucucuccccacuuuugauucauugaacauuacugcugcaucuuuaaaugaugauggauuggauaaccauacuauacugcucuauuacucaacugcugcuucuaguuuggcuguaacauuaaugcuagcuauuuuuauuguuuauauggucucuagagacaacguuucaugcuccaucugucuauaa

SEQ ID NO: 60041 - RNA, 1755 nt, Artificial Sequence; identical to SEQ ID NO: 58579
  derived and/or modified CDS sequence (wt) from hemagglutinin__InfluenzaB__AHL93147

SEQ ID NO: 60042 - RNA, 1755 nt, Artificial Sequence; identical to SEQ ID NO: 58832
  derived and/or modified CDS sequence (wt) from hemagglutinin__InfluenzaB__AHL93158

SEQ ID NO: 60043 - RNA, 1755 nt, Artificial Sequence
  derived and/or modified CDS sequence (wt) from hemagglutinin__InfluenzaB__AHL93169
augaaggcaauaauuguacuacucaugguaguaacauccaaugcggaucgaaucugcacugggauaacaucuucaaacucaccucauguggucaaaacagcuacucaaggggaggucaaugugacuggugugauaccacugacaacaacaccaacaaaaucuuauuuugcaaaucucaaaggaacaaggaccagagggaaacuaugcccggacuguuucaacuguacagaucuggauguggccuugggcaggccaauguguguggggaccacaccuucugcuaaagcuucaauacuccacgaagucagaccuguuacauccgggugcuuucccauaaugcacgacagaacaaaaaucaggcaacuacccaaucuucucagaggauaugaaaauaucagguuaucaacccaaaacguuaucgaugcagaaaaagcaccaggaggacccuacagacuuggaaccucaggaucuugcccuaacgcuaccaguaaaaucggauuuuucgcaacaauggcuugggcugucccaaaggacaacuacaaaaaugcaacgaacccacuaacaguagaaguaccauacauuuguacagaaggggaagaccaaauuacuguuuggggguuccauucagauaacaaaacccaaaugaagaaccucuauggagacucaaauccucaaaaguucaccucaucugcuaauggaguaaccacacauuauguuucucagauuggcgacuucccagaucaaacagaagacggaggacuaccacaaagcggcagaauuguuguugauuacaugaugcaaaaaccugggaaaacaggaacaauugucuaucaaagagguguuuuguugccucaaaagguguggugcgcgaguggcaggagcaaaguaauaaaagggucauugccuuugauuggugaagcagauugccuucaugaaaaauacgguggauuaaacaaaagcaagccuuacuacacaggagaacaugcaaaagccauaggaaauugcccaauauggguaaaaacaccuuugaagcuugccaauggaaccaaauauagaccuccugcaaaacuauuaaaggaaagggguuucuucggagcuauugcugguuuccuagaaggaggaugggaaggaaugauugcagguuggcacggauacacaucucacggagcacauggaguggcaguggcggcagaccuuaagaguacacaagaagcuauaaauaagauaacaaaaaaucucaauucuuugagugagcuagaaguaaagaaccuucaaagacuaaguggugccauggaugaacuccacaacgaaauacucgagcuggaugagaaaguggaugaucucagagcugacacuauaagcucacaaauagaacuugcagucuugcuuuccaacgaaggaauaauaaacagugaagacgagcaucuauuggcacuugagagaaaacuaaagaaaaugcugggucccucugcuguagacauaggaaauggaugcuucgaaaccaaacacaaaugcaaccagaccugcuuagacagaauagcugcuggcaccuuuaaugcaggagaauuuucucuccccacuuuugauucauugaacauuacugcugcaucuuuaaaugaugauggauuggauaaccauacuauacugcucuauuacucaacugcugcuucuaguuuggcuguaacauuaaugcuagcuauuuuuauuguuuauauggucuccagagacaacguuucaugcuccaucugucuauaa

SEQ ID NO: 60044 - RNA, 1755 nt, Artificial Sequence
  derived and/or modified CDS sequence (wt) from hemagglutinin__InfluenzaB__AHL93180
augaaggcaauaauuguacuacucaugguaguaacauccaaugcagaucgaaucugcacuggaauaacaucuucaaacucaccucauguggucaaaacagccacucaaggggaggucaaugugacuggugugauaccacuaacaacaacaccaacaaaaucuuauuuugcaaaucucaaaggaacaaggaccagagggaaacuaugcccagacugucucaacugcacagaucuggauguggcuuuaggcagaccaauguguguggggaccacaccuucggcgaaagcuucaauacuccacgaagucagaccuguuacauccgggugcuuuccuauaauacacgacagaacaaaaaucaggcaacuacccaaucuucucagaggauaugaaaauaucaggcuaucaacccaaaacgucaucgaugcggaaaaggcaccaggaggacccuacagacuuggaaccucagggucuugcccuaacgcuaccaguaagagcggauuuuucgcaacaauggcuugggcugucccaaaggacaacaacaaaaaugcaacgaacccacuaacaguagaaguaccauacauuuguacagaaggggaagaccaaaucacuguuuggggguuccauucagauaacaaaacccaaaugaagaaccucuauggagacucaaauccucaaaaauucaccucaucugcuaauggaguaaccacacacuauguuucucagauuggcagcuucccagaucaaacagaagacggaggacuaccacaaagcggcaggauuguuguugauuacaugaugcaaaaaccugggaaaacaggaacaauugucuaccaaagagguguuuuguugccucaaaggguguggugcgcgaguggcaggagcaaaguaauaaaaggguccuugccuuuaauuggugaagcagauugccuucaugaaaaauacgguggauuaaacaaaagcaagcccuacuacacaggagaacaugcaaaagccauaggaaauugcccaauaugggugaaaacaccuuugaagcuugccaauggaaccaaauauagaccuccugcaaaacuauuaaaggaaagggguuucuucggagcuauugcugguuuccuagaaggaggaugggaaggaaugauugcaggcuggcacggauacacaucucacggagcacauggaguggcaguggcggcggaccuuaagaguacgcaagaagcuauaaacaagauaacaaaaaaucucaauucuuugagugagcuagaaguaaagaaucuucaaagacuaaguggugccauggaugaacuccacaacgaaauacucgagcuggaugagaaaguggaugaucucagagcugacacuauaagcucgcaaauagaacuugcagucuugcuuuccaacgaaggaauaauaaacagugaagaugagcaucuauuggcacuugagagaaaacuaaagaaaaugcugggucccucugcuguagagauaggaaauggaugcuucgaaaccaaacacaagugcaaccagaccugcuuagacaggauagcugcuggcaccuuuaaugcaggagaauuuucucuccccacuuuugauucacugaacauuacugcugcaucuuuaaaugaugauggauuggauaaccauacuauacugcucuauuacucaacugcugcuucuaguuuggcuguaacauugaugcuagcuauuuuuauuguuuauauggucuccagagacaacguuucaugcuccaucugucuauaa

SEQ ID NO: 60045 - RNA, 1755 nt, Artificial Sequence
  derived and/or modified CDS sequence (wt) from hemagglutinin__InfluenzaB__AHL93191
augaaggcaauaauuguacuacucaugguaguaacauccaaugcagaucgaaucugcacugggauaacaucuucaaacucaccucauguggucaaaacagcuacucaaggggaggucaaugugacuggcgugauaccacugacaacaacaccaacaaaaucuuauuuugcaaaucucaaaggaacaaggaccagagggaaacuaugcccggacugucucaacuguacagaucuggauguggccuugggcaggccaauguguguggggaccacaccuucugcuaaagcuucaauacuccacgaagucagaccuguuacauccgggugcuuuccuauaaugcacgacagaacaaaaaucaggcaacuacccaaucuucucagaggauaugaaaauaucagguuaucaacccaaaacguuaucgaugcagaaaaagcaccaggaggacccuacagacuuggaaccucaggaucuugcccuaacgauaccaguaaaaucggauuuuucgcaacaauggcuugggcugucccaaaggacaacuacaaaaaugcaacgaacccacuaacaguagaaguaccauacauuuguacggaaggggaagaccaaauuacuguuuggggguuccauucagauaacaaaacccaaaugaagaaccucuauggagacucaaauccucaaaaguucaccucaucugcuaauggaguaaccacacauuauguuucucagauuggcgacuucccagaucaaacagaagacggaggacuaccacaaagcggcagaauuguuguugauuacaugaugcaaaaaccugggaaaacaggaacaauugucuaucaaagagguguuuuguugccucaaaagguguggugcgcgaguggcaggagcaaaguaauaaaagggucauuaccuuuaauuggugaagcagauugccuucaugaaaaauacgguggauuaaacaaaagcaagccuuacuacacaggagaacaugcaaaagccauaggaaauugcccaauauggguaaaaacaccuuugaagcuugccaauggaaccaaauauagaccuccugcaaaacuauuaaaggaaaggggcuucuucggagcuauugcugguuuccuagaaggaggaugggaaggaaugauugcagguuggcacggauacacaucucacggagcacauggaguggcaguggcggcagaccuuaagaguacacaagaagcuauaaauaagauaacaaaaaaucucaauucuuugagugagcuagaaguaaagaaccuucaaagacuaaguggugccauggaugaacuccacaacgaaauacucgagcuggaugagaaaguggaugaucucagagcugacacuauaagcucacaaauagaacuugcagucuugcuuucaaacgaaggaauaauaaacagugaagacgagcaucuauuggcacuugagagaaaacuaaagaaaaugcugggucccucugcuguagacauaggaaauggaugcuucgaaaccaaacacaaaugcaaccagaccugcuuagacaggauagcugcuggcaccuuuaaugcaggagaauuuucucuccccacuuuugauucauugaacauuacugcugcaucuuuaaaugaugauggauuggauaaccauacuauacugcucuauuacucaaccgcugcuucuaguuuggcuguaacauuaaugcuagcuauuuuuauuguuuauauggucuccagagacaacguuucaugcuccaucugucuauaa

SEQ ID NO: 60046 - RNA, 1755 nt, Artificial Sequence
  derived and/or modified CDS sequence (wt) from hemagglutinin__InfluenzaB__AHL93202
augaaggcaauaauuguacuacucaugguaguaacauccaaugcagaucgaaucugcacugggauaacaucuucaaacucaccucauguggucaaaacagcuacucaaggggaggucaaugugacuggcgugauaccacugacaacaacaccaacaaaaucuuauuuugcaaaccucaaaggaacaaggaccagagggaaacuaugcccggacugucucaacuguacagaucuggauguggccuugggcaggccaauguguguggggaccacaccuucugcuaaagcuucaauacuccacgaagucagaccuguuacauccgggugcuuuccuauaaugcacgacagaacaaaaaucaggcaacuacccaaucuucucagaggauaugaaaauaucagguuaucaacccagaacguuaucgaugcagaaaaagcaccaggaggacccuacagacuuggaaccucaggaucuugcccuaaugcuaccaguaaaaucggauuuuucgcaacaauggcuugggcugucccaaaggacaacuacaaaaaugcaacgaacccacuaacaguagaaguaccauacauuuguacagaaggggaagaccaaauuacuguuuggggguuccauucagauaacaaaacccaaaugaagaaccucuauggagacucaaauccucaaaaguucaccucaucugcuaauggagugaccacacauuauguuucucagauuggcgacuucccagaucaaacagaagacggaggacuaccacaaagcggcagaauuguuguugauuacaugaugcaaaaaccugggaaaacaggaacaauugucuaucaaagagguguuuuguugccucaaaagguguggugcgcgaguggcaggagcaaaguaauaaaagggucauugccuuuaauuggugaagcagauugccuucaugaaaaauacgguggauuaaacaaaagcaagccuuacuacacaggagaacaugcaaaagccauaggaaauugcccaauauggguaaaaacaccuuugaagcuugccaauggaaccaaauauagaccuccugcaaaacuauuaaaggaaagggguuucuucggagcuauugcugguuuccuagaaggaggaugggaaggaaugauugcagguuggcacggauacacaucucacggagcacauggaguggcaguggcggcagaccuuaagaguacacaagaagcuauaaauaagauaacaaaaaaucucaauucuuugagugagcuagaaguaaagaaccuucaaagacuaaguggugccauggaugaauuccacaacgaaauacucgagcuggaugagaaaguggaugaucucagagcugacacuauaagcucacaaauagaacuugcagucuugcuuuccaacgaaggaauaauaaacagugaagacgagcaucuauuggcacuugagagaaaacuaaagaaaaugcugggccccucugcuguagacauaggaaauggaugcuucgaaaccaaacacaaaugcaaccagaccugcuuagacaggauagcugcuggcaccuuuaaugcaggagaauuuucucuccccacuuuugauucauugaacauuacugcugcaucuuuaaaugaugauggauuggauaaccauacuauacugcucuauuacucaacugcugcuucuaguuuggcuguaacauuaaugcuagcuauuuuuauuguuuauauggucuccagagacaacguuucaugcuccaucugucuauaa

SEQ ID NO: 60047 - RNA, 1758 nt, Artificial Sequence; identical to SEQ ID NO: 59001
  derived and/or modified CDS sequence (wt) from hemagglutinin__InfluenzaB__AHL93213

SEQ ID NO: 60048 - RNA, 1758 nt, Artificial Sequence; identical to SEQ ID NO: 59001
  derived and/or modified CDS sequence (wt) from hemagglutinin__InfluenzaB__AHL93224

SEQ ID NO: 60049 - RNA, 1758 nt, Artificial Sequence
  derived and/or modified CDS sequence (wt) from hemagglutinin__InfluenzaB__AHL93235
augaaggcaauaauuguacuacucaugguaguaacauccaaugcagaucgaaucugcacugggauaacaucgucaaacucaccacaugucgucaaaacugcuacucaaggggaggucaaugugacugguguaauaccacugacaacaacacccaccaaaucucauuuugcaaaucucaaaggaacagaaaccagagggaaacuaugcccaaaaugccccaacugcacagaucuggacguagccuugggcagaccaaaaugcacggggaaaauacccucggcaagaguuucaauacuccaugaagucagaccuguuacaucugggugcuuuccuauaaugcacgacagaacaaaaauuagacagcugccuaaccuucuccgaggauacgaacauaucagauuaucaacucauaacguuaucaaugcagaaaaugcaccaggaggacccuacaaaauuggaaccucagggucuugcccuaacguuaccaauggaaacggauuuuucgcaacaauggcuugggccgucccaaaaaacgacaaaaacaaaacagcaacaaauccauuaacaauagaaguaccauacauuuguacagaaggagaagaccaaauuaccguuuggggguuccacucugauaacgagacccaaauggcaaagcucuauggggacucaaagccccagaaguucaccucaucugccaacggagugaccacacauuacguuucacagauugguggcuucccaaaucaaacagaagacggaggacuaccacaaagugguagaauuguuguugauuacauggugcaaaaaucugggaaaacaggaacaauuaccuaucaaagagguauuuuauugccucaaaagguguggugcgcaaguggcaggagcaagguaauaaaaggauccuugccuuuaauuggagaagcagauugccuccacgaaaaauacgguggauuaaacaaaagcaagccuuacuacacaggggaacaugcaaaggccauaggaaauugcccaauaugggugaagacacccuugaagcuggccaauggaaccaaauauagaccuccugcaaaacuauuaaaggaaagggguuucuucggagcuauugcugguuucuuagaaggaggaugggaaggaaugauugcagguuggcacggauacacgucccauggggcacauggaguagcgguggcagcagaccuuaagagcacucaagaggccauaaacaagauaacaaaaaaucucaacucuuugagugagcuggaaguaaagaaucuucaaagacuaagcggugccauggaugaacuccacaacgaaauacuagaacuagacgagaaaguggaugaucucagagcugauacaauaagcucacaaauagaacucgcaguccugcuuuccaaugaaggaauaauaaacagugaagaugaacaucucuuggcgcuugaaagaaagcugaagaaaaugcuaggccccucugcaguagagauagggaauggaugcuuugaaaccaaacacaagugcaaccagaccugucucgacagaauagcugcugguaccuuugaugcaggagaauuuucucuccccaccuuugauucacugaauauuacugcugcaucuuuaaauaacgauggauuggauaaucauacuauacugcuuuacuacucaacugcugccuccaguuuggcuguaacacugaugauagcuaucuuuguuguuuauauggucuccagagacaauguuucuugcuccaucugucuauaa

SEQ ID NO: 60050 - RNA, 1758 nt, Artificial Sequence
  derived and/or modified CDS sequence (wt) from hemagglutinin__InfluenzaB__AHL93246
augaaggcaauaauuguacuacucaugguaguaacauccaaugcagaucgaaucugcacugggauaacaucgucaaacucaccacauguugucaaaacugcuacucaaggggaggucaaugugacugguguaauaccacugacaacaacacccaccaaaucucauuuugcaaaucucaaaggaacagaaaccagagggaaacuaugcccaaaaugccucaacugcacagaucuggacguggccuugggcagaccaaaaugcacggggaacauacccucggcaagaguuucaauacuccaugaagucaggccuguuacaucugggugcuuuccuauaaugcacgacagaacaaaaauuagacagcugccuaaccuucucagaggauacgaacauaucagguuaucaacucauaacguuaucaaugcagaaaaugcaccaggaggacccuacaaaauuggaaccucagggucuugcccuaacguuaccaauggaaacggauuuuucgcaacaauggcuugggccgucccaaaaaacgacaaaaacaaaacagcaacaaauucauuaacaauagaaguaccauacauuuguacagaaggagaagaccaaauuaccauuuggggguuccacucugauaacgaaacccaaauggcaaagcucuauggggacucaaagccccagaaguucaccucaucugccaacggagugaccacacauuacguuucacagauugguggcuucccaaaucaaacagaagacggaggacuaccacaaagugguagaauuguuguugauuacauggugcaaaaaucugggaaaacaggaacaauuaccuaucaaagagguauucuauugccucaaaaaguguggugcgcaaguggcaggagcaagguaauaaaaggauccuugccuuuaauuggagaagcagauugccuccacgaaaaauacgguggauuaaacaaaagcaagccuuacuacacaggggaacaugcaaaggccauaggaaauugcccaauaugggugaaaacacccuugaagcuggccaaugggaccaaauauagaccuccugcaaaacuauuaaaggaaagggguuucuucggagcuauugcugguuucuuagaaggaggaugggaaggaaugauugcagguuggcacggauacacaucccauggggcacauggaguagcgguggcagcagaccuuaaaagcacucaagaggccauaaacaagauaacaaaaaaucucaacucuuugggugagcuggaaguaaagaaucuucaaagacuaagcggugccauggaugaacuccacaacgaaauacuagaacuagacgagaaaguggaugaucucagagcugauacuauaagcucacaaauagaacucgcaguccugcuuuccaaugaaggaauaauaaacagugaagaugagcaucucuuggcgcuugaaagaaaacugaagaaaaugcugggccccucugcuguagagauagggaauggaugcuuugaaaccaaacacaagugcaaccagaccugucucgacagaauagcugcugguaccuuugaugcaggagaauuuucucuccccaccuuugauucacugaauauuacugcugcaucuuuaaaugacgauggauuggauaaucacacuauacugcuuuacuacucaacugcugccuccaguuuggcuguaacauuaaugauagcuaucuuuguuguuuauauggucuccagagacaauguuucuugcuccaucugucuauaa

SEQ ID NO: 60051 - RNA, 1758 nt, Artificial Sequence; identical to SEQ ID NO: 59001
  derived and/or modified CDS sequence (wt) from hemagglutinin__InfluenzaB__AHL93257

SEQ ID NO: 60052 - RNA, 1758 nt, Artificial Sequence
  derived and/or modified CDS sequence (wt) from hemagglutinin__InfluenzaB__AHL93268
augaaggcaauaauuguacuacucaugguaguaacauccaaugcagaucgaaucugcacugggauaacaucgucaaacucaccacaugucgucaaaacugcuacucaaggggaggucaaugugacugguguaauaccacugacaacaacacccaccaaaucucauuuugcaaaucucaaaggaacagaaaccagggggaaacuaugcccaaaaugccucaacuguacagaucuggacguagccuugggcagaccaaaaugcacggggaaaauacccucggcaagaguuucaauacuccaugaagucagaccuguuacaucugggugcuuuccuauaaugcacgacagaacaaaaauuagacagcugccuaaccuucuccgaggauacgaacauaucagguuaucaacucauaacguuaucaaugcagaaaaugcaccaggaggacccuacaaaauuggaaccucagggucuugcccuaacauuaccaauggaaacggauuuuucgcaacaauggcuugggccgucccaaaaaacgacaaaaacaaaacagcaacaaauccauuaacaauagaaguaccauacauuuguacagaaggagaagaccaaauuaccguuuggggguuccacucugacaacgagacccaaauggcaaagcucuauggggacucaaagccccagaaguucaccucaucugccaacggagugaccacacauuacauuucacagauugguggcuucccaaaucaaacagaagacggaggacuaccacaaagugguagaauuguuguugauuacauggugcaaaaaucugggaaaacaggaacaauuaccuaucaaagggguauuuuauugccucaaaagguguggugcgcaaguggcaggagcaagguaauaaaaggauccuugccuuuaauuggagaagcagauugccuccacgaaaaauacgguggauuaaacaaaagcaagccuuacuacacaggggaacaugcaaaggccauaggaaauugcccaauaugggugaaaacacccuugaagcuggccaauggaaccaaauauagaccuccugcaaaacuauuaaaggaaagggguuucuucggagcuauugcugguuucuuagaaggaggaugggaaggaaugauugcagguuggcacggauacacaucccauggggcacauggaguagcgguggcagcagaccuuaagagcacucaagaggccauaaacaagauaacaaaaaaucucaacucuuugagugagcuggaaguaaagaaucuucaaagacuaagcggugccauggaugaacuccacaacgaaauacuagaacuagaugagaaaguggaugaucucagagcugauacaauaagcucacaaauagaacucgcaguccugcuuuccaaugaaggaauaauaaacagugaagaugaacaucucuuggcgcuugaaagaaagcugaagaaaaugcugggccccucugcuguagagauagggaauggaugcuuugaaaccaaacacaagugcaaccagaccugucucgacagaauagcugcugguaccuuugaugcaggagaauuuucucuccccaccuuugauucacugaauauuacugcugcaucuuuaaaugacgauggauuggauaaucauacuauacugcuuuacuacucaacugcugccuccaguuuggcuguaacacugaugauagcuaucuuuguuguuuauauggucuccagagacaauguuucuugcuccaucugucuauaa

SEQ ID NO: 60053 - RNA, 1758 nt, Artificial Sequence
  derived and/or modified CDS sequence (wt) from hemagglutinin__InfluenzaB__AHL93279
augaaggcaauaauuguacuacucaugguaguaacauccaaugcagaucgaaucugcacugggauaacaucgucaaacucaccacaugucgucaaaacugcuacucaaggggaggucaaugugacugguguaauaccacugacaacaacacccaccaaaucucauuuugcaaaucucaaaggaacagaaaccagagggaaacuaugcccaaaaugccucaacugcacagaucuggacguagccuugggcagaccaaaaugcacggggaaaauacccucggcaagaguuucaauacuccaugaagucagaccuguuacaucugggugcuuuccuauaaugcacgacagaacaaaaauuagacagcugccuaaccuucuccgaggauacgaacauaucagguuaucaacucauaacguuaucaaugcagaaaaugcaccaggaggacccuacaaaauuggaaccucagggucuugcccuaacauuaccaauggaaacggauuuuucgcaacaauggcuugggccgucccaaaaaacgacaaaaacaaaacagcaacaaauccauuaacaauagaaguaccauacauuuguacagaaggagaagaccaaauuaccguuuggggguuccacucugacaacgagacccaaauggcaaagcucuauggggacucaaagccccagaaguucaccucaucugccaacggagugaccacacauuacguuucacagauugguggcuucccaaaucaaacagaagacggaggacuaccacaaagugguagaauuguuguugauuacauggugcaaaaaucugggaaaacaggaacaauuaccuaucaaagggguauuuuauugccucaaaagguguggugcgcaaguggcaagagcaagguaauaaaaggauccuugccuuuaauuggagaagcagauugccuccacgaaaaauacgguggauuaaacaaaagcaagccuuacuacacaggggaacaugcaaaggcaauaggaaauugcccaauaugggugaaaacacccuuaaagcuggccaauggaaccaaauauagaccuccugcaaaacuauuaaaggaaagggguuucuucggagcuauugcugguuucuuagaaggaggaugggaaggaaugauugcagguuggcacggauacacaucccauggggcacauggaguagcgguggcagcagaccuuaagagcacucaagaggccauaaacaagauaacaaaaaaucucaacucuuugagugagcuggaaguaaagaaucuucaaagacuaagcggugccauggaugaacuccacaacgaaauacuagaacuagaugagaaaguggaugaucucagagcugauacaauaagcucacaaauagaacucgcaguccugcuuuccaaugaaggaauaauaaacagugaagaugaacaucucuuggcgcuugaaagaaagcugaagaaaaugcugggccccucugcuguagagauagggaauggaugcuuugaaaccaaacacaagugcaaccagaccugucucgacagaauagcugcugguaccuuugaugcaggagaauuuucucuccccaccuuugauucacugaauauuacugcugcaucuuuaaaugacgauggauuggauaaucauacuauacugcuuuacuacucaacugcugccuccaguuuggcuguaacacugaugauagcuaucuuuguuguuuauauggucuccagagacaauguuucuugcuccaucugucuauaa

SEQ ID NO: 60054 - RNA, 1758 nt, Artificial Sequence
  derived and/or modified CDS sequence (wt) from hemagglutinin__InfluenzaB__AHL93290
augaaggcaauaauuguacuacucaugguaguaacauccaaugcagaucgaaucugcacugggauaacaucgucaaacucaccacaugucgucaaaacugcuacucaaggggaggucaaugugacugguguaauaccacugacaacaacacccaccaaaucucauuuugcaaaucucaaaggaacagaaaccagggggaaacuaugcccaaaaugccucaacugcacagaucuggacguagccuugggcagaccaaaaugcacggggaaaauacccucggcaagaguuucaauacuccaugaagucagaccuguuacaucugggugcuuuccuauaaugcacgacagaacaaaaauuagacagcugccuaaccuucuccgaggauacgaacauaucagguuaucaacucauaacguuaucaaugcagaaaaugcaccaggaggacccuacaaaauuggaaccucagggucuugcccuaacauuaccaauggaaacggauuuuuugcaacaauggcuugggccgucccaaaaaacgacaaaaacaaaacagcaacaaauccauuaacaauagaaguaccauacauuuguacagaaggagaagaccaaauuaccguuuggggguuccacucugacaacgagacccaaauggcaaagcucuauggggacucaaagccccagaaguucaccucaucugccaacggagugaccacacauuacguuucacagauugguggcuucccaaaucaaacagaagacgggggacuaccacaaagugguagaauuguuguugauuacauggugcaaaaaucugggaaaacaggaacaauuaccuaucaaagggguauuuuauugccucaaaagguguggugcgcaaguggcaggagcaagguaauaaaaggauccuugccuuuaauuggagaagcagauugccuccacgaaaaauacgguggauuaaacaaaagcaagccuuacuacacaggggaacaugcaaaggccauaggaaauugcccaauaugggugaaaacacccuugaagcuggccaauggaaccaaauauagaccuccugcaaaacuauuaaaggaaagggguuucuucggagcuauugcugguuucuuagaaggaggaugggaaggaaugauugcagguuggcacggauacacaucccauggggcacauggaguagcgguggcagcagaccuuaagagcacucaagaggccauaaacaagauaacaaaaaaucucaacucuuugagugagcuggaaguaaagaaucuucaaagacuaagcggugccauggaugaacuccacaacgaaauacuagaacuagaugagaaaguggaugaucucagagcugauacaauaagcucacaaauagaacucgcaguccugcuuuccaaugaaggaauaauaaacagugaagaugaacaucucuuggcgcuugaaagaaagcugaagaaaaugcugggccccucugcuguagagauagggaauggaugcuuugaaaccaaacacaagugcaaccagaccugucucgacagaauagcugcugguaccuuugaugcaggagaauuuucucuccccaccuuugauucacugaauauuacugcugcaucuuuaaaugacgauggauuggauaaucauacuauacugcuuuacuacucaacugcugccuccaguuuggcuguaacacugaugauagcuaucuuuguuguuuauauggucuccagagacaauguuucuugcuccaucugucuauaa

SEQ ID NO: 60055 - RNA, 1758 nt, Artificial Sequence
  derived and/or modified CDS sequence (wt) from hemagglutinin__InfluenzaB__AHL93301
augaaggcaauaauuguacuacucaugguaguaacauccaaugcagaucgaaucugcacugggauaacaucgucaaacucaccacaugucgucaaaacugcuacucaaggggaggucaaugugacugguguaauaccacugacaacaacacccaccaaaucucauuuugcaaaucucaaaggaacagaaaccagggggaaacuaugcccaaaaugccucaacugcacagaucuggacguagccuugggcagaccaaaaugcacggggaaaauacccucggcaagaguuucaauacuccaugaagucagaccuguuacaucugggugcuuuccuauaaugcacgacagaacaaaaauuagacagcugccuaaccuucuccgaggauacgaacauaucagguuaucaacucauaacguuaucaaugcagaaaaugcaccaggaggacccuacaaaauuggaaccucagggucuugcccuaacauuaccaauggaaacggauuuuucgcaacaauggcuugggccgucccaaaaaacgacaaaaacaaaacagcaacaaauccauuaacaauagaaguaccauacauuuguacagaaggagaagaccaaauuaccguuuggggguuccacucugacaacgagacccaaauggcaaagcucuauggggacucaaagccccagaaguucaccucaucugccaacggagugaccacacauuacguuucacagauugguggcuucccaaaucaaacagaagacgggggacuaccacaaagugguagaauuguuguugauuacauggugcaaaaaucugggaaaacaggaacaauuaccuaucaaagggguauuuuauugccucaaaagguguggugcgcaaguggcaggagcaagguaauaaaaggauccuugccuuuaauuggagaagcagauugccuccacgaaaaauacgguggauuaaacaaaagcaagccuuacuacacaggggaacaugcaaaggccauaggaaauugcccaauaugggugaaaacacccuugaagcuggccaauggaaccaaauauagaccuccugcaaaacuauuaaaggaaagggguuucuucggagcuauugcugguuucuuagaaggaggaugggaaggaaugauugcagguuggcacggauacacaucccauggggcacauggaguagcgguggcagcagaccuuaagagcacucaagaggccauaaacaagauaacaaaaaaucucaacucuuugagugagcuggaaguaaagaaucuucaaagacuaagcggugccauggaugaacuccacaacgaaauacuagaacuagaugagaaaguggaugaucucagagcugauacaauaagcucacaaauagaacucgcaguccugcuuuccaaugaaggaauaauaaacagugaagaugaacaucucuuggcgcuugaaagaaagcugaagaaaaugcugggccccucugcuguagagauagggaauggaugcuuugaaaccaaacacaagugcaaccagaccugucucgacagaauagcugcugguaccuuuaaugcaggagaauuuucucuccccaccuuugauucacugaauauuacugcugcaucuuuaaaugacgauggauuggauaaucauacuauacugcuuuacuacucaacugcugccuccaguuuggcuguaacacugaugauagcuaucuuuguuguuuauauggucuccagagacaauguuucuugcuccaucugucuauaa

SEQ ID NO: 60056 - RNA, 1758 nt, Artificial Sequence
  derived and/or modified CDS sequence (wt) from hemagglutinin__InfluenzaB__AHL93312
augaaggcaauaauuguacuacucaugguaguaacauccaaugcagaucgaaucugcacugggauaacaucgucaaacucaccacaugucgucaaaacugcuacucaaggggaggucaaugugacugguguaauaccauugacaacaacacccaccaaaucucauuuugcaaaucucaaaggaacagaaaccagggggaaacuaugcccaaaaugccucaacugcacagaucuggacguagccuugggcagaccaaaaugcacggggaaaauacccucggcaagaguuucaauacuccaugaagucagaccuguuacaucugggugcuuuccuauaaugcacgacagaacaaaaauuagacagcugccuaaccuucuccgaggauacgaacauaucagguuaucaacucauaacguuaucaaugcagaaaaugcaccaggaggacccuacaaaauuggaaccucagggucuugcccuaacauuaccaauggaaacggauuuuacgcaacaauggcuugggccgucccaaaaaacgacaaaaacaaaacagcaacaaauccauuaacaauagaaguaccauacauuuguacagaaggagaagaccaaauuaccguuuggggguuccacucugacaacgagacccaaauggcaaagcucuauggggacucaaagccccagaaguucaccucaucugccaacggagugaccacacauuacguuucacagauugguggcuucccaaaucaaacagaagacggaggacuaccacaaagugguagaauuguuguugauuacauggugcaaaaaucugggaaaacaggaacaauuaccuaucaaagggguauuuuauugccucaaaagguguggugcgcaaguggcaggagcaagguaauaaaaggauccuugccuuuaauuggagaagcagauugccuccacgaaaaauacgguggauuaaacaaaagcaagccuuacuacacaggggaacaugcaaaggcaauaggaaauugcccaauaugggugaaaacacccuugaagcuggccaaugggaccaaauauagaccuccugcaaaacuauuaaaggaaagggguuucuucggagcuauugcugguuucuuagaaggaggaugggaaggaaugauugcagguuggcacggauacacaucccauggggcacauggaguagcgguggcagcagaccuuaagagcacucaagaggccauaaacaagauaacaaaaaaucucaacucuuugagugagcuggaaguaaagaaucuucaaagacuaagcggugccauggaugaacuccacaacgaaauacuagaacuagaugagaaaguggaugaucucagagcugauacaauaagcucacaaauagaacucgcaguccugcuuuccaaugaaggaauaauaaacagugaagaugaacaucucuuggcgcuugaaagaaagcugaagaaaaugcugggccccucugcuguagagauagggaauggaugcuuugaaaccaaacacaagugcaaccagaccugucucgacagaauagcugcugguaccuuugaugcaggagaauuuucucuccccaccuuugauucacugaauauuacugcugcaucuuuaaaugacgauggauuggauaaucauacuauacugcuuuacuacucaacugcugccuccaguuuggcuguaacacugaugauagcuaucuuuguuguuuauauggucuccagagacaauguuucuugcuccaucugucuauaa

SEQ ID NO: 60057 - RNA, 1758 nt, Artificial Sequence
  derived and/or modified CDS sequence (wt) from hemagglutinin__InfluenzaB__AHL93323
augaaggcaauaauuguacuacucaugguaguaacauccaaugcagaucgaaucugcacugggauaacaucgucaaacucaccacaugucgucaaaacugcuacucaaggggaggucaaugugacugguguaauaccacugacaacaacacccaccaaaucucauuuugcaaaucucaaaggaacggaaaccagggggaaacuaugcccaaaaugccucaacugcacagaucuggacguagccuugggcagaccaaaaugcacggggaaaauacccucggcaagaguuucaauacuccaugaagucagaccuguuacaucugggugcuuuccuauaaugcacgacagaacaaaaauuagacagcugccuaaccuucuccgaggauacgaacauaucagguuaucaacucauaacguuaucaaugcagaaaaugcaccaggaggacccuacaaaauuggaaccucagggucuugcccuaacauuaccaauggaaacggauuuuucgcaacaauggcuugggccgucccaaaaaacgacaaaaacaaaacagcaacaaauccauuaacaauagaaguaccauacauuuguacagaaggagaagaccaaauuaccguuuggggguuccacucugacaacgagacccaaauggcaaagcucuauggggacucaaagccccagaaguucaccucaucugccaacggagugaccacacauuacguuucacagauugguggcuucccaaaucaaacagaagacggaggacuaccacaaagugguagaauuguuguugauuacauggugcaaaaaucugggaaaacaggaacaauuaccuaucaaagagguauuuuauugccucaaaagguguggugcacaaguggcaggagcaagguaauaaaaggauccuugccuuuaauuggagaagcagauugccuccacgaaaaauacgguggauuaaacaaaagcaagccuuacuacacaggggaacaugcaaaggccauaggaaauugcccaauaugggugaaaacacccuugaagcuggccaauggaaccaaauauagaccuccugcaaaacuauuaaaggaaagggguuucuucggagcuauugcugguuucuuagaaggaggaugggaaggaaugauugcagguuggcacggauauacaucccauggggcacauggaguagcgguggcagcagaccuuaagagcacucaagaggccauaaacaagauaacaaaaaaucucaacucuuugagugagcuggaaguaaagaaucuucaaagacuaagcggugccauggaugaacuccacaacgaaauacuagaacuagaugagaaaguggaugaucucagagcugauacaauaagcucacaaauagaacucgcaguccugcuuuccaaugaaggaauaauaaacagugaagaugaacaucucuuggcgcuugaaagaaagcugaagaaaaugcugggccccucugcuguagagauagggaauggaugcuuugaaaccaaacacaagugcaaccagaccugucucgacagaauagcugcugguaccuuugaugcaggagaauuuucucuccccaccuuugauucacugaauauuacugcugcaucuuuaaaugacgauggauuggauaaucauacuauacugcuuuacuacucaacugcugccuccaguuuggcuguaacacugaugauagcuaucuuuguuguuuauauggucuccagagacaauguuucuugcuccaucugucuauaa

SEQ ID NO: 60058 - RNA, 1758 nt, Artificial Sequence
  derived and/or modified CDS sequence (wt) from hemagglutinin__InfluenzaB__AHL93334
augaaggcaauaauuguacuacucaugguaguaacauccaaugcagaucgaaucugcacugggauaacaucgucaaacucaccacaugucgucaaaacugcuacucaaggggaggucaaugugacugguguaauaccacugacaacaacacccaccaaaucucauuuugcaaaucucaaaggaacggaaaccagggggaaacuaugcccaaaaugccccaacugcacagaucuggacguagcccugggcagaccaaaaugcacggggaaaauacccucggcaagaguuucaauacuccaugaagucagaccuguuacaucugggugcuuuccuauaaugcacgacagaacaaaaauuagacagcugccuaaccuucuccgaggauacgaacauaucagguuaucaacucauaacguuaucaaugcagaaaaugcaccaggaggacccuacaaaauuggaaccucagggucuugcccuaacauuaccaauggaaacggauuuuucgcaacaauggcuugggccgucccaaaaaacgacaaaaacaaaacagcaacaaauccauuaacaauagaaguaccauacauuuguacagaaggagaagaccaaauuaccguuuggggguuccacucugacaacgagacccaaauggcaaagcucuauggggacucaaagccccagaaguucaccucaucugccaacggagugaccacacauuacguuucacagauugguggcuucccaaaucaaacagaagacggaggacuaccacaaagugguagaauuguuguugauuacauggugcaaaaaucugggaaaacaggaacaauuaccuaucaaagagguauuuuauugccucaaaagguguggugcacaaguggcaggagcaagguaauaaaaggauccuugccuuuaauuggagaagcagauugccuccacgaaaaauacgguggauuaaacaaaagcaagccuuacuacacaggggaacaugcaaaggccauaggaaauugcccaauaugggugaaaacacccuugaagcuggccaauggaaccaaauauagaccuccugcaaaacuauuaaaggaaagggguuucuucggagcuauugcugguuucuuagaaggaggaugggaaggaaugauugcagguuggcacggauauacaucccauggggcacauggaguagcgguggcagcagaccuuaagagcacucaagaggccauaaacaagauaacaaaaaaucucaacucuuugagugagcuggaaguaaagaaucuucaaagacuaagcggugccauggaugaacuccacaacgaaauacuagaacuagaugagaaaguggaugaucucagagcugauacaauaagcucacaaauagaacucgcaguccugcuuuccaaugaaggaauaauaaacagugaagaugaacaucucuuggcgcuugaaagaaagcugaagaaaaugcugggccccucugcuguagagauagggaauggaugcuuugaaaccaaacacaagugcaaccagaccugucucgacagaauagcugcugguaccuuugaugcaggagaauuuucucuccccaccuuugauucacugaauauuacugcugcaucuuuaaaugacgauggauuggauaaucauacuauacugcuuuacuacucaacugcugccuccaguuuggcuguaacacugaugauagcuaucuuuguuguuuauauggucuccagagacaauguuucuugcuccaucugucuauaa

SEQ ID NO: 60059 - RNA, 1758 nt, Artificial Sequence; identical to SEQ ID NO: 59339
  derived and/or modified CDS sequence (wt) from hemagglutinin__InfluenzaB__AHL93345

SEQ ID NO: 60060 - RNA, 1758 nt, Artificial Sequence; identical to SEQ ID NO: 59339
  derived and/or modified CDS sequence (wt) from hemagglutinin__InfluenzaB__AHL93356

SEQ ID NO: 60061 - RNA, 1758 nt, Artificial Sequence
  derived and/or modified CDS sequence (wt) from hemagglutinin__InfluenzaB__AHL93367
augaaggcaauaauuguacuacucaugguaguaacauccaaugcagaucgaaucugcacugggauaacaucgucaaacucaccacaugucgucaaaacugcuacucaaggggaggucaaugugacugguguaauaccacugacaacaacacccaccaaaucucauuuugcaaaucucaaaggaacagaaaccagggggaaacuaugcccaaaaugccucaacugcacagaucuggacguagccuugggcagaccaaaaugcacggggaaaauacccucggcaagaguuucaauacuccaugaagucagaccuguuacaucugggugcuuuccuauaaugcacgacagaacaaaaauuagacagcugccuaaccuucuccgaggauacgaauauaucagguuaucaacucauaacguuaucaaugcagaaaaugcaccaggaggacccuacaaaauuggaaccucagggucuugcccuaacauuaccaauggaaacggauuuuucgcaacaauggcuugggccgucccaaaaaacgacaaaaacaaaacagcaacaaauccauuaacaauagaaguaccauacauuuguacagaaggagaagaccaaauuaccguuuggggguuccacucugacaacgagacccaaauggcaaagcucuauggggacucaaagccccagaaguucaccucaucugccaacggagugaccacacauuacguuucacagauugguggcuucccaaaucaaacagaagacgggggacuaccacaaagugguagaauuguuguugauuacauggugcaaaaaucugggaaaacaggaacaauuaccuaucaaagggguauuuuauugccucaaaagguguggugcgcaaguggcaggagcaagguaauaaaaggauccuugccuuuaauuggagaagcagauugccuccacgaaaaauacgguggauuaaacaaaagcaagccuuacuacacaggggaacaugcaaaggccauaggaaauugcccaauaugggugaaaacacccuugaagcuggccaauggaaccaaauauagaccuccugcaaaacuauuaaaggaaagggguuucuucggagcuauugcugguuucuuagaaggaggaugggaaggaaugauugcagguuggcacggauacacaucccauggggcacauggaguagcgguggcagcagaccuuaagagcacucaagaggccauaaacaagauaacaaaaaaucucaacucuuugagugagcuggaaguaaagaaucuucaaagacuaagcggugccauggaugaacuccacaacgaaauacuagaacuagaugagaaaguggaugaucucagagcugauacaauaagcucacaaauagaacucgcaguccugcuuuccaaugaaggaauaauaaacagugaagaugaacaucucuuggcgcuugaaagaaagcugaagaaaaugcugggccccucugcuguagagauagggaauggaugcuuugaaaccaaacacaagugcaaccagaccugucucgacagaauagcugcugguaccuuugaugcaggagaauuuucucuccccaccuuugauucacugaauauuacugcugcaucuuuaaaugacgauggauuggauaaucauacuauacugcuuuacuacucaacugcugccuccaguuuggcuguaacacugaugauagcuaucuuuguuguuuauauggucuccagagacaauguuucuugcuccaucugucuauaa

SEQ ID NO: 60062 - RNA, 1758 nt, Artificial Sequence
  derived and/or modified CDS sequence (wt) from hemagglutinin__InfluenzaB__AHL93378
augaaggcaauaauuguacuacucaugguaguaacauccaaugcagaucgaaucugcacugggauaacaucgucaaacucaccacaugucgucaaaacugcuacucaaggggaggucaaugugacugguguaauaccacugacaacaacacccaccaaaucucauuuugcaaaucucaaaggaacagaaaccagggggaaacuaugcccaaaaugccucaacugcacagaucuggacguagccuugggcagaccaaaaugcacggggaaaauacccucggcaagaguuucaauacuccaugaagucagaccuguuacaucuggguguuuuccuauaaugcacgacagaacaaaaauuagacagcugccuaaccuucuccgaggauacgaacauaucagguuaucaacucauaacguuaucaaugcagaaaaugcaccaggaggacccuacaaaauuggaaccucagggucuugcccuaacauuaccaauggaaacggauuuuucgcaacaauggcuugggccgucccaaaaaacgacaaaaacaaaacagcaacaaauccauuaacaauagaaguaccauacauuuguacagaaggagaagaccaaauuaccguuuggggguuccacucugacaacgagacccaaauggcaaagcucuauggggacucaaagccccagaaguucaccucaucugccaacggagugaccacacauuacguuucacagauugguggcuucccaaaucaaacagaagacggaggacuaccacaaagugguagaauuguuguugauuacauggugcaaaaaucugggaaaacaggaacaauuaccuaucaaagggguauuuuauugccucaaaagguguggugcgcaaguggcaggagcaagguaauaaaaggaucuuugccuuuaauuggagaagcagauugccuccacgaaaaauacgguggauuaaacaaaagcaagccuuacuacacaggggaacaugcaaaggccauaggaaauugcccaauaugggugaaaacacccuugaagcuggccaauggaaccaaauauagaccuccugcaaaacuauuaaaggaaagggguuucuucggagcuauugcugguuucuuagaaggaggaugggaaggaaugauugcagguuggcacggauacacaucccauggggcacauggaguagcgguggcagcagaccuuaagagcacucaagaggccauaaacaagauaacaaaaaaucucaacucuuugagugagcuggaaguaaagaaucuucaaagacuaagcggugccauggaugaacuccacaacgaaauacuagaacuagaugagaaaguggaugaucucagagcugauacaauaagcucacaaauagaacucgcaguccugcuuuccaaugaaggaauaauaaacagugaagaugaacaucucuuggcgcuugaaagaaagcugaagaaaaugcugggccccucugcuguagagauagggaauggaugcuuugaaaccaaacacaagugcaaccagaccugucucgacagaauagcugcugguaccuuugaugcaggagaauuuucucuccccaccuuugauucacugaauauuacugcugcaucuuuaaaugacgauggauuggauaaucauacuauacugcuuuacuacucaacugcugccuccaguuuggcugugacacugaugauagcuaucuuuguuguuuauauggucuccagagacaauguuucuugcuccaucugucuauaa

SEQ ID NO: 60063 - RNA, 1758 nt, Artificial Sequence
  derived and/or modified CDS sequence (wt) from hemagglutinin__InfluenzaB__AHL93389
augaaggcaauaauuguacuacucaugguaguaacauccaaugcagaucgaaucugcacugggauaacaucgucaaacucaccacaugucgucaaaacugcuacucaaggggaggucaaugugacugguguaauaccacuaacaacaacacccaccaaaucuuauuuugcaaaucucaaaggaacagaaaccagggggaaacuaugcccaaaaugccucaacugcacagaucuggacguagccuugggcagaccaaaaugcacggggaaaauacccucggcaagaguuucaauacuccaugaagucagaccuguuacaucugggugcuuuccuauaaugcacgacagaacaaaaauuagacagcugccuaaccuucuccgaggauacgaacauaucagguuaucaacucauaacguuaucaaugcagaaaaugcaccaggaggacccuacaaaauuggaaccucagggucuugcccuaacauuaccaauggaaacggauuuuucgcaacaauggcuugggccgucccaaaaaacgacaaaaacaaaacagcaacaaauccauuaacaauagaaguaccauacauuuguacagaaggagaagaccaaauuaccguuuggggguuccacucugacaacgagacccaaauggcaaagcucuauggggacucaaagccccagaaguucaccucaucugccaacggagugaccacacauuacguuucacagauugguggcuucccaaaucaaacagaagacggaggacuaccacaaagugguagaauuguuguugauuacauggugcaaaaaucugggaaaacaggaacaauuaccuaucaaagggguauuuuauugccucaaaagguguggugcgcaaguggcaggagcaagguaauaaaaggauccuugccuuuaauuggagaagcagauugccuccacgaaaaauacgguggauuaaacaaaagcaagccuuacuacacaggggaacaugcaaaggcaauaggaaauugcccaauaugggugaaaacacccuugaagcuggccaauggaaccaaauauagaccuccugcaaaacuauuaaaggaaagggguuucuucggagcuauugcugguuucuuagaaggaggaugggaaggaaugauugcagguuggcacggauacacaucccauggggcacauggaguagcgguggcagcagaccuuaagagcacucaagaggccauaaacaagauaacaaaaaaucucaacucuuugagugagcuggaaguaaagaaucuucaaagacuaagcggugccauggaugaacuccacaaugaaauacuagaacuagaugagaaaguggaugaucucagagcugauacaauaagcucacaaauagaacucgcaguccugcuuuccaaugaaggaauaauaaacagugaagaugaacaucucuuggcgcuugaaagaaagcugaagaaaaugcugggccccucugcuguagagauagggaauggaugcuuugaaaccaaacacaagugcaaccagaccugucucgacagaauagcugcugguaccuuugaugcaggagaauuuucucuccccaccuuugauucacugaauauuacugcugcaucuuuaaaugacgauggauuggauaaucauacuauacugcuuuacuacucaacugcugccuccaguuuggcuguaacacugaugauagcuaucuuuguuguuuauauggucuccagagacaauguuucuugcuccaucugucuauaa

SEQ ID NO: 60064 - RNA, 1758 nt, Artificial Sequence
  derived and/or modified CDS sequence (wt) from hemagglutinin__InfluenzaB__AHL93400
augaaggcaauaauuguacuacucaugguaguaacauccaaugcagaucgaaucugcacugggauaacaucgucaaacucaccacaugucgucaaaacugcuacucaaggggaggucaaugugacugguguaauaccacugacaacaacacccaccaaaucucauuuugcaaaucucaaaggaacagaaaccagggggaaacuaugcccaaaaugccucaacugcacagaucuggacguagccuugggcagaccaaaaugcacggggaaaauacccucggcaagaguuucaauacuccaugaagucagaccuguuacaucugggugcuuuccuauaaugcacgacagaacaaaaauuagacagcugccuaaccuucuccgaggauacgaacauaucagguuaucaacucauaacguuaucaaugcagaaaaugcaccaggaggacccuacaaaauuggaaccucagggucuugcccuaacauuaccaauggaaacggauuuuucgcaacaauggcuugggccgucccaaaaaacgacaaaaacaaaacagcaacaaauccauuaacaauagaaguaccauacauuuguacagaaggagaagaccaaauuaccguuuggggguuccacucugacaacgagacccaaauggcaaagcucuauggggacucaaagccccagaaguucaccucaucugccaacggagugaccacacauuacguuucacagauugguggguucccaaaucaaacagaagacgggggacuaccacaaagugguagaauuguuguugauuacauggugcaaaaaucugggaaaacaggaacaauuaccuaucaaagggguauuuuauugccucaaaagguguggugcgcaaguggcaggagcaagguaauaaaaggauccuugccuuuaauuggagaagcagauugccuccacgaaaaauacgguggauuaaacaaaagcaagccuuacuacacaggggaacaugcaaaggccauaggaaauugcccaauaugggugaaaacacccuugaagcuggccaauggaaccaaauauagaccuccugcaaaacuauuaaaggaaagggguuucuucggagcuauugcugguuucuuagaaggaggaugggaaggaaugauugcagguuggcacggauacacaucccauggggcacauggaguagcaguggcagcagaccuuaagagcacucaagaggccauaaacaagauaacaaaaaaucucaacucuuugagugagcuggaaguaaagaaucuucaaagacuaagcggugccauggaugaacuccacaacgaaauacuagaacuagaugagaaaguggaugaucucagagcugauacaauaagcucacaaauagaacucgcaguccugcuuuccaaugaaggaauaauaaacagugaagaugaacaucucuuggcgcuugaaagaaagcugaagaaaaugcugggccccucugcuguagagauagggaauggaugcuuugaaaccaaacacaagugcaaccagaccugucucgacagaauagcugcugguaccuuugaugcaggagaauuuucucuccccaccuuugauucacugaauauuacugcugcaucuuuaaaugacgauggauuggauaaucauacuauacugcuuuacuacucaacugcugccuccaguuuggcuguaacacugaugauagcuaucuuuguuguuuauauggucuccagagacaauguuucuugcuccaucugucuauaa

SEQ ID NO: 60065 - RNA, 1758 nt, Artificial Sequence
  derived and/or modified CDS sequence (wt) from hemagglutinin__InfluenzaB__AHL93411
augaaggcaauaauuguacuacucaugguaguaacauccaaugcagaucgaaucugcacugggauaacaucgucaaacucaccacauguugucaaaacugcuacucaaggggaggucaaugugacugguguaauaccacugacaacaacacccaccaaaucucauuuugcaaaucucaaaggaacagaaaccagggggaaacuaugcccaaaaugccucaacugcacagaucuggacguagccuugggcagaccaaaaugcacggggaaaauacccucggcaagaguuucaauacuccaugaagucagaccuguuacaucugggugcuuuccuauaaugcacgacagaacaaaaauuagacagcugccuaaccuucuccgaggauacgaacauaucagguuaucaacucauaacguuaucaaugcagaaaaugcaccaggaggacccuacaaaauuggaaccucagggucuugcccuaacauuaccaauggaaacggauuuuucgcaacaauggcuugggccgucccaaaaaacgacaaaaacaaaacagcaacaaauccauuaacaauagaaguaccauacauuuguacagaaggagaagaccaaauuaccguuuggggguuccacucugacaacgagacccaaauggcaaagcucuauggggacucaaagccccagaaguucaccucaucugccaacggagugaccacacauuacauuucacagauugguggcuucccaaaucaaacagaagacggaggacuaccacaaagugguagaauuguuguugauuacauggugcaaaaaucugggaaaacaggaacaauuaccuaucaaagggguauuuuauugccucaaaagguguggugcgcaaguggcaggagcaagguaauaaaaggauccuugccuuuaauuggagaagcagauugccuccacgaaaaauacgguggauuaaacaaaagcaagccuuacuacacaggggaacaugcaaaggccauaggaaauugcccaauaugggugaaaacacccuugaagcuggccaauggaaccaaauauagaccuccugcaaaacuauuaaaggaaagggguuucuucggagcuauugcugguuucuuagaaggaggaugggaaggaaugauugcagguuggcacggauacacaucccauggggcacauggaguagcgguggcagcagaccuuaagagcacucaagaggccauaaacaagauaacaaaaaaucucaacucuuugagugagcuggaaguaaagaaucuucaaagacuaagcggugccauggaugaacuccacaacgaaauacuagaacuagaugagaaaguggaugaucucagagcugauacaauaagcucacaaauagaacucgcaguccugcuuuccaaugaaggaauaauaaacagugaagaugaacaucucuuggcgcuugaaagaaagcugaagaaaaugcugggccccucugcuguagagauagggaauggaugcuuugaaaccaaacacaagugcaaccagaccugucucgacagaauagcugcugguaccuuugaugcaggagaauuuucucuccccaccuuugauucacugaauauuacugcugcaucuuuaaaugacgauggauuggauaaucauacuauacugcuuuacuacucaacugcugccuccaguuuggcuguaacacugaugauagcuaucuuuguuguuuauauggucuccagagacaauguuucuugcuccaucugucuauaa

SEQ ID NO: 60066 - RNA, 1758 nt, Artificial Sequence; identical to SEQ ID NO: 59334
  derived and/or modified CDS sequence (wt) from hemagglutinin__InfluenzaB__AHL93422

SEQ ID NO: 60067 - RNA, 1758 nt, Artificial Sequence; identical to SEQ ID NO: 59334
  derived and/or modified CDS sequence (wt) from hemagglutinin__InfluenzaB__AHL93433

SEQ ID NO: 60068 - RNA, 1758 nt, Artificial Sequence; identical to SEQ ID NO: 59339
  derived and/or modified CDS sequence (wt) from hemagglutinin__InfluenzaB__AHL93444

SEQ ID NO: 60069 - RNA, 1758 nt, Artificial Sequence
  derived and/or modified CDS sequence (wt) from hemagglutinin__InfluenzaB__AHL93455
augaaggcaauaauuguacuacucaugguaguaacauccaaugcagaucgaaucugcacugggauaacaucgucaaacucaccacaugucgucaaaacugcuacucaaggggaggucaaugugacugguguaauaccauugacaacaacacccaccaaaucucauuuugcaaaucucaaaggaacagaaaccagggggaaacuaugcccaaaaugccucaacugcacagaucuggacguagccuugggcagaccaaaaugcacggggaaaauacccucggcaagaguuucaauacuccaugaagucagaccuguuacaucugggugcuuuccuauaaugcacgacagaacaaaaauuagacagcugccuaaccuucuccgaggauacgaacauaucagguuaucaacucauaacguuaucaaugcagaaaaugcaccaggaggacccuacaaaauuggaaccucagggucuugcccuaacauuaccaauggaaacggauuuuucgcaacaauggcuugggccgucccaaaaaacgacaaaaacaaaacagcaacaaauccauuaacaauagaaguaccauacauuuguacagaaggagaagaccaaauuaccguuuggggguuccacucugacaacgagacccaaauggcaaagcucuauggggacucaaagccccagaaguucaccucaucugccaacggagugaccacacauuacguuucacagauugguggcuucccaaaucaaacagaagacggaggacuaccacaaagugguagaauuguuguugauuacauggugcaaaaaucugggaaaacaggaacaauuaccuaucaaagggguauuuuauugccucaaaagguguggugcgcaaguggcaggagcaagguaauaaaaggauccuugccuuuaauuggagaagcagauugccuccacgaaaaauacgguggauuaaacaaaagcaagccuuacuacacaggggaacaugcaaaggcaauaggaaauugcccaauaugggugaaaacacccuugaagcuggccaaugggaccaaauauagaccuccugcaaaacuauuaaaggaaagggguuucuucggagcuauugcugguuucuuagaaggaggaugggaaggaaugauugcagguuggcacggauacacaucccauggggcacauggaguagcgguggcagcagaccuuaagagcacucaagaggccauaaacaagauaacaaaaaaucucaacucuuugagugagcuggaaguaaagaaucuucaaagacuaagcggugccaugaaugaacuccacaacgaaauacuagaacuagaugagaaaguggaugaucucagagcugauacaauaagcucacaaauagaacucgcaguccugcuuuccaaugaaggaauaauaaacagugaagaugaacaucucuuggcgcuugaaagaaagcugaagaaaaugcugggccccucugcuguagagauagggaauggaugcuuugaaaccaaacacaagugcaaccagaccugucucgacagaauagcugcugguaccuuugaugcaggagaauuuucucuccccaccuuugauucacugaauauuacugcugcaucuuuaaaugacgauggauuggauaaucauacuauacugcuuuacuacucaacugcugccuccaguuuggcuguaacacugaugauagcuaucuuuguuguuuauauggucuccagagacaauguuucuugcuccaucugucuauaa

SEQ ID NO: 60070 - RNA, 1758 nt, Artificial Sequence; identical to SEQ ID NO: 59001
  derived and/or modified CDS sequence (wt) from hemagglutinin__InfluenzaB__AHL93466

SEQ ID NO: 60071 - RNA, 1758 nt, Artificial Sequence
  derived and/or modified CDS sequence (wt) from hemagglutinin__InfluenzaB__AHL93477
augaaggcaauaauuguacuacucaugguaguaacauccaaugcagaucgaaucugcacugggauaacaucgucaaacucaccacaugucgucaaaacugcuacucaaggggaggucaaugugacugguguaauaccacugacaacaacacccaccaaaucucauuuugcaaaucucaaaggaacagaaaccagagggaaacuaugcccaaaaugccccaacugcacagaucuggacguagccuugggcagaccaaaaugcacggggaaaauacccucggcaagaguuucaauacuccaugaagucagaccuguuacaucugggugcuuuccuauaaugcacgacagaacaaaaauuagacagcugccuaaccuucuccgaggauacgaacauaucagauuaucaacucauaacguuaucaaugcagaaaaugcaccaggaggacccuacaaaauuggaaccucagggucuugcccuaacguuaccaauggaaacggauuuuucgcaacaauggcuugggccgucccaaaaaacgacaaaaacaaaacagcaacaaauccauuaacaauagaaguaccauacauuuguacagaaggagaagaccaaauuaccguuuggggguuccacucugauaacgagacccaaauggcaaagcucuauggggacucaaagccccagaaguucaccucaucugccaacggagugaccacacauuacguuucacagauugguggcuucccaaaucaaacagaagacggaggacuaccacaaagugguagaauuguuguugauuacauggugcaaaaaucugggaaaacaggaacaauuaccuaucaaagagguauuuuauugccucaaaagguguggugcgcaaguggcaggagcaagguaauaaaaggauccuugccuuuaauuggagaagcagauugccuccacgaaaaauacgguggauuaaacaaaagcaagccuuacuacacaggggaacaugcaaaggccauaggaaauugcccaauaugggugaagacacccuugaagcuggccaauggaaccaaauauagaccuccugcaaaacuauuaaaggaaagggguuucuucggagcuauugcugguuucuuagaaggaggaugggaaggaaugauugcagguuggcacggauacacgucccauggggcacauggaguagcgguggcagcagaccuuaagagcacucaagaggccauaaacaagauaacaaaaaaucucaacucuuugagugagcuggaaguaaagaaucuucaaagacuaagcggugccauggaugaacuccacaacgaaauacuagaacuagacgagaaaguggaugaucucagagcugauacaauaagcucacaaauagaacucgcaguccugcuuuccaaugaaggaauaauaaacagugaagaugaacaucucuuggcgcuugaaagaaagcugaagaaaaugcugggccccucugcuguagagauagggaauggaugcuuugaaaccaaacacaagugcaaccagaccugucucgacagaauagcugcugguaccuuugaugcuggagaauuuucucuccccaccuuugauucacugaauauuacugcugcaucuuuaaaugacgauggauuggauaaucauaccauacugcuuuacuacucaacugcugccuccaguuuggcuguaacacugaugauagcuaucuuuguuguuuauauggucuccagagacaauguuucuugcuccaucugucuauaa

SEQ ID NO: 60072 - RNA, 1758 nt, Artificial Sequence
  derived and/or modified CDS sequence (wt) from hemagglutinin__InfluenzaB__AHL93488
augaaggcaauaauuguacuacucaugguaguaacauccaaugcagaucgaaucugcacugggauaacaucgucaaacucaccacauaucgucaaaacugcuacucaaggggaggucaaugugacugguguaauaccacugacaacaacacccaccaaaucucauuuugcaaaucucaaaggaacagaaaccagggggaaacuaugcccaaaaugccucaacugcacagaucuggacguagccuugggcagaccaaaaugcacggggaaaauacccucggcaagaguuucaauacuccaugaagucagaccuguuacaucugggugcuuuccuauaaugcacgacagaacaaaaauuagacagcugccuaaccuucucagaggauacgaacauaucagguuaucaacucauaacguuaucaaugcagaaaaugcaccaggaggacccuacaaaauuggaaccucagggucuugcccuaacauuaccaauggaaacggauuuuucgcaacaauggcuugggccgucccaaaaaacgacaaaaacaaaacagcaacaaauccauuaacaauagaaguaccauacauuuguacagaaggagaagaccaaauuaccguuuggggguuccacucugacaaugagacccaaauggcaaagcucuauggggacucaaagccccagaaguucaccucaucugccaacggagugaccacacauuacguuucacagauugguggcuucccaaaucaaacagaagacggaggacuaccacaaagugguagaauuguuguugauuacaugguacaaaaaucugggaaaacaggaacaauuaccuaucaaagggguauuuuauugccucaaaagguguggugcgcaaguggcaggagcaagguaauaaaaggauccuugccuuuaauuggagaagcagauugccuccacgaaaaauacgguggauuaaacaaaagcaagccuuacuacacaggggaacaugcaaaggccauaggaaauugcccaauaugggugaaaacacccuugaagcuggccaauggaaccaaauauagaccuccugcaaaacuauuaaaggaaagggguuucuucggagcuauugcuggcuucuuagaaggaggaugggaaggaaugauugcagguuggcacggauacacaucccauggggcacauggaguagcgguggcagcagaccuuaagagcacucaagaggccauaaacaagauaacaaaaaaucucaacucuuugagugagcuggaaguaaagaaucuucaaagacuaagcggugccauggaugaacuccacaaugaaauacuagaauuagaugagaaaguggaugaucucagagcugauacaauaagcucacaaauagaacucgcaguccugcuuuccaaugaaggaauaauaaacagugaagaugaacaucucuuggcgcuugaaagaaagcugaagaaaaugcugggccccucugcuguagagauagggaauggaugcuuugaaaccaaacacaagugcaaccagaccugucucgacagaauagcugcugguaccuuugaugcaggagaauuuucucuccccacuuuugauucacugaauauuacugcugcaucuuuaaaugacgauggauuggauaaucauacuauacugcuuuacuacucaacugcugccuccaguuuggcuguaacacugaugauagcuaucuuuguuguuuauauggucuccagagacaauguuucuugcuccaucugucuauaa

SEQ ID NO: 60073 - RNA, 1755 nt, Artificial Sequence
  derived and/or modified CDS sequence (wt) from hemagglutinin__InfluenzaB__AHL93499
augaaggcaauaauuguacuacucaugguaguaacauccaacgcagaucgaaucugcacugggauaacaucuucaaacucaccucauguggucaaaacagcuacucaaggggaggucaaugugacuggugugauaccacugacaacaacaccaacaaaaucuuauuuugcaaaucucaaaggaacaaggaccagagggaaacuaugcccggacugucucaacuguacagaucuggauguggccuugggcaggccaauguguguggggaccacaccuucugcuaaggcuucaauacuccacgaaaucagaccuguuacauccgggugcuuuccuauaaugcacgacagaacaaaaaucaggcaacuacccaaucuucucagaggauaugaaaauaucagguuaucaacccaaaacguuauugaugcagaaaaagcaccaggaggacccuacagacuuggaaccucaggaucuugcccuaacgcuaccaguaaaaucggauuuuucgcaacaauggcuugggcugucccaaaggacaacuacaaaaaugcaacgaacccacuaacaguagaaguaccauacauuuguacagaaggggaagaccaaauuacuguuuggggguuccauucagauaacaaaacccaaaugaagaaccucuauggagacucaaauccucaaaaguucaccucaucugcuaauggaguaaccgcacauuauguuucucagauuggcgacuucccagaucaaacagaagacggaggacuaccacaaagcggcagaauuguuguugauuacaugaugcaaaaaccugggaaaacaggaacaauugucuaucaaagagguguuuuguugccucaaaagguguggugcgcgaguggcaggagcaaaguaauaaaagggucauugccuuuaauuggugaagcagauugccuucaugaaaaauacgguggauuaaacaaaagcaagccuuacuacacaggagaacaugcaaaagccauaggaaauugcccaauauggguaaaaacaccuuugaagcuugccaauggaaccaaauauagaccuccugcaaaacuacuaaaggaaagggguuucuucggagcuauugcugguuuccuagaaggaggaugggaaggaaugauugcagguuggcacggauacacaucucacggagcacaugggguggcaguggcggcagaccuuaagaguacacaagaagcuauaaauaagauaacaaaaaaccucaauucuuugagugagcuagaaguaaagaaccuucaaagacuaaguggugccauggaugaacuccacaacgaaauacucgagcuggaugagaaaguggaugaucucagagcugacacuauaagcucacaaauagaacuugcagucuugcuuucaaacgagggaauaauaaacagugaagacgagcaucuauuggcacuugagagaaaacuaaagaaaaugcugggucccucugcuguagacauaggaaauggaugcuucgaaaccaaacacaaaugcaaccagaccugcuuagacaggauagcugcuggcaccuuuaaugcaggagaauuuucucuccccacuuuugauucauugaacauuacugcugcaucuuuaaaugaugauggauuggauaaccauacuauacugcucuauuacucaacugcugcuucuaguuuggcuguaacauuaaugcuagcuauuuuuauuguuuauauggucuccagagacaacguuucaugcuccaucugucuauaa

SEQ ID NO: 60074 - RNA, 1758 nt, Artificial Sequence
  derived and/or modified CDS sequence (wt) from hemagglutinin__InfluenzaB__AHL93510
augaaggcaauaauuguacuacucaugguaguaacauccaaugcagaucgaaucugcacugggauaacgucgucaaacucaccacaugucgucaaaacugcuacucaaggggaagucaaugugacugguguaauaccacugacaacaacacccaccaaaucucauuuugcaaaucucaaaggaacagaaaccagaggaaaacuaugcccaaaaugccccaacugcacagaucuggacguagccuugggcagaccaaaaugcacggggaaaauacccucggcaagaguuucaauacuccaugaagucagaccuguuacaucugggugcuuuccuauaaugcacgacagaacaaaaauuagacagcugccuaaccuucuccgaggauacgaacauaucagguuaucaacucauaacguuaucaaugcagaaaaugcaccaggaggacccuacaaaauuggaaccucagggucuugcccuaacguuaccaauggaaacggauuuuucgcaacaauggcuugggccgucccaaaaaacgacaaaaacaaaacagcaacaaauccauuaacaauagaaguaccauacauuuguacagaaggagaagaccaaauuaccguuuggggguuccacucugauaacgagacccaaauggcaaagcuuuauggggacucaaagccccagaaguucaccucaucugccaacggagugaccacacauuacguuucacagauugguggcuucccaaaucaaacagaagacggaggacuaccacaaagugguagaauuguuguugauuacauggugcaaaaaucugggaaaacaggaacaauuaccuaucaaagagguauuuuauugccucaaaagguguggugcgcaaguggcaggagcaagguaauaaaaggauccuugccuuuaauuggagaagcagauugccuccacgaaaaauacgguggauuaaacaaaagcaagccuuacuacacaggggaacaugcaaaggccauaggaaauugcccaauaugggugaagacacccuugaagcuggccaauggaaccaaauauagaccuccugcaaaacuauuaaaggaaagggguuucuucggagcuauugcugguuucuuggaaggaggaugggaaggaaugauugcagguuggcacggauacacgucccauggggcacauggaguagcgguggcagcagaccuuaagagcacucaagaggccauaaacaagauaacaaaaaaucuuaacucuuugagugaacuggaaguaaagaaucuucaaagacuaagcggugccauggaugaacuccacaacgaaauacuagaacuagacgaaaaaguggaugaucucagagcugauacaauaagcucacaaauagaacucgcaguccugcuuuccaaugaaggaauaauaaacagugaagaugaacaucucuuggcgcuugaaagaaagcugaagaaaaugcugggccccucugcuguagaaauagggaauggaugcuuugaaaccaaacacaagugcaaccagaccugucucgacagaauagcugcugguaccuuugaugcaggagaauuuucucuccccaccuuugauucacugaauauuacugcugcaucuuuaaaugacgauggauuggauaaucauacuauacugcuuuacuacucaacugcugccuccaguuuggcuguaacacugaugauagcuaucuuuguuguuuauauggucuccagagacaauguuucuugcuccaucugucuauaa

SEQ ID NO: 60075 - RNA, 1755 nt, Artificial Sequence
  derived and/or modified CDS sequence (wt) from hemagglutinin__InfluenzaB__AHL93521
augaaggcaauaauugcacuacucaugguaguaacauccaaugcagaucgaaucugcacugggauaacaucuucaaacucaccucauguggucaaaacagcuacucaaggggaggucaaugugacuggcgugauaccauugacaacaacaccaacaaaaucuuauuuugcaaaucucaaaggaacaaggaccagagggaaacuaugcccggacugucucaacuguacagaucuggauguggccuugggcaggccaauguguguggggaccacaccuucugcuaaagcuucaauacuccacgaagucagaccuguuacauccgggugcuuuccuauaaugcacgacagaacaaaaaucaggcaacuacccaaucuucucagaggauaugaaaauaucagguuaucaacccaaaacguuaucgaugcagaaaaagcaccaggaggacccuacagacuuggaaccucaggaucuugcccuaacgcuaccaguaaaaucggauuuuucgcaacaauggcuugggcugucccaaaggacaacuacaaaaaugcaacgaacccacuaacaguagaaguaccauacauuuguacagaaggggaagaccaaauuacuguuuggggguuccauucagauaacaaaacccaaaugaagaaccucuauggagacucaaauccucaaagguucaccucaucugcuaauggaguaaccacacauuauguuucucagauuggcgacuucccagaucaaacagaagacggaggacuaccacaaagcggcagaauuguuguugauuacauggugcaaaaaccugggaaaacaggaacaauugucuaucaaagaggcguuuuguugccucaaaagguguggugcgcgaguggcaggagcaaaguaauaaaagggucauugccuuuaauuggugaagcagauugccuucaugaaaaauacgguggauuaaacaaaagcaagccuuacuacacaggagaacaugcaaaagccauaggaaauugcccaauauggguaaaaacaccuuugaagcuugccaauggaaccaaauauagaccuccugcaaaacuauuaaaagaaagggguuucuucggagcuauugcugguuuccuagaaggaggaugggaaggaaugauugcagguuggcacggauacacaucucacggagcacauggaguggcaguggcggcagaccuuaagaguacacaagaagcuauaaauaagauaacaaaaaaucucaauucuuugagugagcuagaaguaaaaaaccuucaaagacuaaguggugccauggaugaacuccacaacgaaauacucgagcuggaugagaaaguggaugaucucagagcugacacuauaagcucacaaauagaacuugcagucuugcuuuccaacgaaggaauaauaaacagugaagacgagcaucuauuggcacuugagagaaaacuaaagaaaaugcugggucccucugcuguagacauaggaaauggaugcuucgaaaccaaacacaaaugcaaccagaccugcuuagacaggauagcugcuggcaccuuuaaugcaggagaauuuucucuccccacuuuugauucauugaacauuacugcugcaucuuuaaaugaugauggauuggauaaccauacuauacugcucuauuacucaacugcugccucuaguuuggcuguaacauuaaugcuagcuauuuuuauuguuuauauggucuccagagacaacguuucaugcuccaucugucuauaa

SEQ ID NO: 60076 - RNA, 1758 nt, Artificial Sequence; identical to SEQ ID NO: 58738
  derived and/or modified CDS sequence (wt) from hemagglutinin__InfluenzaB__AHL93532

SEQ ID NO: 60077 - RNA, 1758 nt, Artificial Sequence
  derived and/or modified CDS sequence (wt) from hemagglutinin__InfluenzaB__AHL93543
augaaggcaauaauuguacuacucaugguaguaacauccaaugcagaucggaucugcacugggauaacaucgucaaacucaccacaugucgucaaaacugcuacucaaggggaggucaaugugaccgguguaauaccacugacaacaacacccaccaaaucucauuuugcaaaucucaaaggaacagaaaccagggggaaacuaugcccaaaaugccucaacugcacagaucuggacguagccuugggcagaccaaaaugcacugggaaaauacccucggcaagaguuucaauacuccaugaagucagaccuguuacaucugggugcuuuccuauaaugcacgauagaacaaaaauuagacagcugccuaaccuucuccgaggauacgaacauaucagguuaucaacucauaacguuaucaaugcagaaaaugcaccaggaggacccuacaaaauuggaaccucagggucuugcccuaacguuaccaauggaaacggauucuucgcaacaauggcuugggccgucccaaaaaacgacaaaaacaaaacagcaacaaauccauuaacaauagaaguaccauacauuuguacagaaggagaagaccaaauuaccguuuggggguuccacucugacaacgagacccaaauggcaaagcucuauggggacucaaagccccagaaguucaccucaucugccaacggagugaccacacauuacguuucacagauugguggcuucccaaaucaaacagaagacggaggacuaccacaaagugguagaauuguuguugauuacauggugcaaaaaucugggaaaacaggaacaauuaccuaucaaagagguauuuuauugccucaaaagguguggugcgcaaguggcaggagcaagguaauaaaaggauccuugccuuuaauuggagaagcagauugccuccacgaaaaauacgguggauuaaacaaaagcaagccuuacuacacaggggaacaugcaaaggccauaggaaauugcccaauaugggugaaaacacccuugaagcuggccaauggaaccaaauauagaccuccugcaaaacuauuaaaggaaagggguuucuucggagcuauugcugguuucuuagaaggaggaugggaaggaaugauugcagguuggcacggauacacaucccauggggcacauggaguagcgguggcagcagaccuuaagagcacucaagaggccauaaacaagauaacaaaaaaucucaacucuuugagugagcuggaaguaaagaaucuucaaagacuaagcggugccauggaugaacuccacaacgaaauacuagaacuagaugagaaaguggaugaucucagagcugauacaauaagcucacaaauagagcucgcaguccugcuuuccaaugaaggaauaauaaacagugaagaugaacaucucuuggcgcuugaaagaaagcugaagaaaaugcugggccccucugcuguagagauagggaauggaugcuuugaaaccaaacacaagugcaaccagaccugucucgacagaauagcugcugguaccuuugaugcaggagaauuuucucuccccaccuuugauucacugaauauuacugcugcaucuuuaaaugacgauggauuggauaaucauacuauacugcuuuacuacucaacugcugccuccaguuuggcuguaacacugaugauagcuaucuuuguuguuuauauggucuccagagacaauguuucuugcuccaucugucuauaa

SEQ ID NO: 60078 - RNA, 1758 nt, Artificial Sequence; identical to SEQ ID NO: 60077
  derived and/or modified CDS sequence (wt) from hemagglutinin__InfluenzaB__AHL93554

SEQ ID NO: 60079 - RNA, 1758 nt, Artificial Sequence
  derived and/or modified CDS sequence (wt) from hemagglutinin__InfluenzaB__AHL93565
augaaggcaauaauuguacuacucaugguaguaacauccaaugcagaucgaaucugcacugggauaacaucgucaaacucaccacaugucgucaaaacugcuacucaaggggaggucaaugugaccgguguaauaccacugacaacaacacccaccaaaucucauuuugcaaaucucaaaggaacagaaaccagggggaaacuaugcccaaaaugccucaacugcacagaucuggacguagccuugggcagaccaaaaugcacggggaaaauacccucggcaagaguuucaauacuccaugaagucagaccuguuacauccgggugcuuuccuauaaugcacgauagaacaaaaauuagacagcugccuaaccuucuccgaggauacgaacauaucagguuaucaacucauaacguuaucaaugcagaaaaugcaccaggaggacccuacaaaauuggaaccucagggucuugcccuaacguuaccaauggaaacggauucuucgcaacaauggcuugggccgucccaaaaaacgacaaaaacaaaacagcaacaaauccauuaacaauagaaguaccauacauuuguacagaaggagaagaccaaauuaccguuuggggguuccacucugacaacgagacccaaauggcaaagcucuauggggacucaaagccccagaaguucaccucaucugccaacggagugaccacacauuacguuucacagauugguggcuucccaaaucaaacagaagacggaggacuaccacaaagugguagaauuguuguugauuacauggugcaaaaaucugggaaaacaggaacaauuaccuaucaaagagguauuuuauugccucaaaagguguggugcgcaaguggcaggagcaagguaauaaaaggauccuugccuuuaauuggagaagcagauugccuccacgaaaaauacgguggauuaaacaaaagcaagccuuacuacacaggggaacaugcaaaggcuauaggaaauugcccaauaugggugaaaacacccuugaagcuggccaauggaaccaaauauagaccuccugcaaaacuauuaaaggaaagggguuucuucggagcuauugcugguuucuuagaaggaggaugggaaggaaugauugcagguuggcacggauacacaucccauggggcacauggaguagcgguggcagcagaccuuaagagcacucaagaggccauaaacaagauaacaaaaaaucucaacucuuugagugagcuggaaguaaagaaucuucaaagacuaagcggugccauggaugaacuccacaacgaaauacuagaacuagaugagaaaguggaugaucucagagcugauacaauaagcucacaaauagagcucgcaguccugcuuuccaaugaaggaauaauaaacagugaagaugaacaucucuuggcgcuugaaagaaagcugaagaaaaugcugggccccucugcuguagagauagggaaugggugcuuugaaaccaaacacaagugcaaccagaccugucucgacagaauagcugcugguaccuuugaugcaggagaauuuucucuccccaccuuugauucacugaauauuacugcugcaucuuuaaaugacgauggauuggauaaucauacuauacugcuuuacuacucaacugcugccuccaguuuggcuguaacacugaugauagcuaucuuuguuguuuauauggucuccagagacaauguuucuugcuccaucugucuauaa

SEQ ID NO: 60080 - RNA, 1758 nt, Artificial Sequence
  derived and/or modified CDS sequence (wt) from hemagglutinin__InfluenzaB__AHL93576
augaaggcaauaauuguacuacucaugguaguaacauccaaugcagaucgaaucugcacugggauaacaucgucaaacucaccacauaucgucaaaacugcuacucaaggggaggucaaugugacugguguaauaccacugacaacaacacccaccaaaucucauuuugcaaaucucaaaggaacagaaaccagggggaaacuaugcccaaaaugccucaacugcacagaucuggacguagccuugggcagaccaaaaugcacggggaaaauacccucggcaagaguuucaauacuccaugaagucagaccuguuacaucugggugcuuuccuauaaugcacgacagaacaaaaauuagacagcugccuaaccuucucagaggauacgaacauaucagguuaucaacucauaacguuaucaaugcagaaaaugcaccaggaggacccuacaaaauuggaaccucagggucuugcccuaacauuaccaauggaaacggauuuuucgcaacaauggcuugggccgucccaaaaaacgacaaaaacaaaacagcaacaaauccauuaacaauagaaguaccauacauuuguacagaaggagaagaccaaauuaccguuuggggguuccacucugacaaugaaacccaaauggcaaagcucuauggggacucaaagccccagaaguucaccucaucugccaacggagugaccacacauuacguuucacagauugguggcuucccaaaucaaacagaagacggaggacuaccacaaagugguagaauuguuguugauuacauggugcaaaaaucugggaaaacaggaacaauuaccuaucaaagggguauuuuauugccucaaaagguguggugcgcaaguggcaggagcaagguaauaaaaggauccuugccuuuaauuggagaagcagauugccuccacgaaaaauacgguggauuaaacaaaagcaagccuuacuacacaggggaacaugcaaaggccauaggaaauugcccaauaugggugaaaacacccuugaagcuggccaauggaaccaaauauagaccuccugcaaaacuauuaaaggaaagggguuucuucggagcuauugcuggcuucuuagaaggaggaugggaaggaaugauugcagguuggcacggauacacaucccauggggcacauggaguagcgguggcagcagaccuuaagagcacucaagaggccauaaacaagauaacaaaaaaucucaacucuuugagugagcuggaaguaaagaaucuucaaagacuaagcggugccauggaugaacuccacaaugaaauacuagaauuagaugagaaaguggaugaucucagagcugauacaauaagcucacaaauagaacucgcaguccugcuuuccaaugaaggaauaauaaacagugaagaugaacaucucuuggcgcuugaaagaaagcugaagaaaaugcugggccccucugcuguagagauagggaauggaugcuuugaaaccaaacacaagugcaaccagaccugucucgacagaauagcugcugguaccuuugaugcaggagaauuuucucuccccacuuuugauucacugaauauuacugcugcaucuuuaaaugacgauggauuggauaaucauacuauacugcuuuacuacucaacugcugccuccaguuuggcuguaacacugaugauagcuaucuuuguuguuuauauggucuccagagacaauguuucuugcuccaucugucuauaa

SEQ ID NO: 60081 - RNA, 1758 nt, Artificial Sequence
  derived and/or modified CDS sequence (wt) from hemagglutinin__InfluenzaB__AHL93587
augaaggcaauaauuguacuacucaugguaguaacauccaaugcagaucgaaucugcacugggauaacaucgucaaacucaccacauaucgucaaaacugcuacucaaggggaggucaaugugacugguguaauaccacugacaacaacacccaccaaaucucauuuugcaaaucucaaaggaacagaaaccagggggaaacuaugcccaaaaugccucaacugcacagauuuggacguagccuugggcagaccaaaaugcacggggaaaauacccucggcaagaguuucaauacuccaugaagucagaccuguuacaucugggugcuuuccuauaaugcacgacagaacaaaaauuagacagcugccuaaccuucucagaggauacgaacauaucagguuaucaacucauaacguuaucaaugcagaaaaugcaccaggagggcccuacaaaauuggaaccucagggucuugcccuaacauuaccaauggaaacggauuuuucgcaacaauggcuugggccgucccaaaaaacgacaaaaacaaaacagcaacaaauccauuaacaauagaaguaccauacauuuguacagaaggugaagaccaaauuaccguuuggggguuccacucugacaaugaaacccaaauggcaaagcucuauggggacucaaagccccagaaguucaccucaucugccaacggagugaccacacauuacguuucacagauugguggcuucccaaaucaaacagaagacggaggacuaccacaaagugguagaauuguuguugauuacauggugcaaaaaucugggaaaacaggaacaauuaccuaucaaagggguauuuuauugccucaaaagguguggugcgcaaguggcaggagcaagguaauaaaaggauccuugccuuuaauuggagaagcagauugccuccacgaaaaauacgguggauuaaacaaaagcaagccuuacuacacaggggaacaugcaaaggccauaggaaauugcccaauaugggugaaaacacccuugaagcuggccaauggaaccaaauauagaccuccugcaaaacuauuaaaggaaagggguuucuucggugcuauugcuggcuucuuagaaggaggaugggaaggaaugauugcagguuggcacggauacacaucccauggggcacauggaguagcgguggcagcagaccuuaagagcacucaagaggccauaaacaagauaacaaaaaaucucaacucuuugagugagcuggaaguaaagaaucuucaaagacuaagcggugccauggaugaacuccacaaugaaauacuagaauuagaugagaaaguggaugaucucagagcugauacaauaagcucacaaauagaacucgcaguccugcuuuccaaugaaggaauaauaaacagugaagaugaacaucucuuggcgcuugaaagaaagcugaagaaaaugcugggccccucugcuguagagauagggaacggaugcuuugaaaccaaacacaagugcaaccagaccugucucgacagaauagcugcugguaccuuugaugcaggagaauuuucucuccccacuuuugauucacugaauauuacugcugcaucuuuaaaugacgauggauuggauaaucauacuauacugcuuuacuacucaacugcugccuccaguuuggcuguaacacugaugauagcuaucuuuguuguuuauauggucuccagagacaauguuucuugcuccaucugucuauaa

SEQ ID NO: 60082 - RNA, 1758 nt, Artificial Sequence
  derived and/or modified CDS sequence (wt) from hemagglutinin__InfluenzaB__AHL93609
augaaggcaauaauuguacuacucaugguaguaacauccaaugcagaucgaaucugcacugggauaacaucgucaaacucaccacaugucgucaaaacugcuacucaaggggaggucaaugugacugguguaauaccacugacaacaacacccaccaaaucucauuuugcaaaucucaaaggaacagaaaccagagggaaacuaugcccaaaaugccccaacugcacagaucuggacguagccuugggcagaccaaaaugcacggggaaaauacccucggcaagaguuucaauacuccaugaagucagaccuguuacaucugggugcuuuccuauaaugcacgacagaacaaaaauuagacagcugccuaaccuucuccgaggauacgaacauaucagauuaucaacucauaacguuaucaaugcagaaaaugcaccaggaggacccuacaaaauuggaaccucagggucuugcccuaauguuaccaauggaaacggauuuuucgcaacaauggcuugggccgucccaaaaaacgacaaaaacaaaacagcaacaaauccauuaacaauagaaguaccauacauuuguacagaaggagaagaccaaauuaccguuuggggguuccacucugauaacgagacccaaauggcaaagcucuauggggacucaaagccccagaaguucaccucaucugccaacggagugaccacacauuacguuucacagauugguggcuucccaaaucaaacagaagacggaggacuaccacaaagugguagaauuguuguugauuacauggugcaaaaaucugggaaaacaggaacaauuaccuaucaaagagguauuuuauugccucaaaagguguggugcgcaaguggcaggagcaagguaauaaaaggauccuugccuuuaauuggagaagcagauugccuccacgaaaaauacgguggauuaaacaaaagcaagccuuacuacacaggggaacaugcaaaggccauaggaaauugcccaauaugggugaagacacccuugaagcuggccaaugggaccaaauauagaccuccugcaaaacuauuaacggaaagggguuucuucggagcuauugcugguuucuuagaaggaggaugggaaggaaugauugcagguuggcacggauacacgucccauggggcacauggaguagcaguggcagcagaccuuaagagcacucaagaggccauaaacaagauaacaaaaaaucucaacucuuugagugagcuggaaguaaagaaucuucaaagacuaagcggugccauggaugaacuccacaacgaaauacuagaacuagacgagaaaguggaugaucucagagcugauacaauaagcucacaaauagaacucgcaguccugcuuuccaaugaaggaauaauaaacagugaagaugaacaucucuuggcgcuugaaagaaagcugaagaaaaugcugggccccucugcuguagagauagggaauggaugcuuugaaaccaaacacaagugcaaccagaccugucucgacagaauagcugcugguaccuuugaugcaggagaauuuucucuccccaccuuugauucacugaauauuacugcugcaucuuuaaaugacgauggauuggauaaucauacuauauugcuuuacuacucaacugcugccuccaguuuggcuguaacacugaugauagcuaucuuuguuguuuauauggucuccagagacaauguuucuugcuccaucugucuauaa

SEQ ID NO: 60083 - RNA, 1758 nt, Artificial Sequence; identical to SEQ ID NO: 58738
  derived and/or modified CDS sequence (wt) from hemagglutinin__InfluenzaB__AHL93620

SEQ ID NO: 60084 - RNA, 1758 nt, Artificial Sequence
  derived and/or modified CDS sequence (wt) from hemagglutinin__InfluenzaB__AHL93631
augaaggcaauaauuguacuacucaugguaguaacauccaaugcagaucgaaucugcacugggauaacaucgucaaacucaccacaugucgucaaaacugcuacucaaggggaggucaaugugacugguguaauaccacugacaacaacacccaccaaaucucauuuugcaaaucucaaaggaacagaaaccagagggaaacuaugcccaaaaugccccaacugcacagaucuggacguagccuugggcagaccaaaaugcacggggaaaauacccucggcaagaguuucaauacuccaugaagucagaccuguuacaucugggugcuuuccuauaaugcacgacagaacaaaaauuagacagcugccuaaccuucuccgaggauacgaacauaucagauuaucaacucauaacguuaucaaugcagaaaaugcaccaggaggacccuacaaaauuggaaccucagggucuugcccuaauguuaccaauggaaacggauuuuucgcaacaauggcuugggccgucccaaaaaacgacaaaaacaaaacagcaacaaauccauuaacaauagaaguaccauacauuuguacagaaggagaagaccaaauuaccguuuggggguuccacucugauaacgagacccaaauggcaaagcucuauggggacucaaagccccagaaguucaccucaucugccaacggagugaccacacauuacguuucacagauugguggcuucccaaaucaaacagaagacggaggacuaccacaaagugguagaauuguuguugauuacauggugcaaaaaucugggaaaacaggaacaauuaccuaucaaagagguauuuuauugccucaaaagguguggugcgcaaguggcaggagcaagguaauaaaaggauccuugccuuuaauuggagaagcagauugccuccacgaaaaauacgguggauuaaacaaaagcaagccuuacuacacaggggaacaugcaaaggccauaggaaauugcccaauaugggugaagacacccuugaagcuggccaaugggaccaaauauagaccuccugcaaaacuauuaacggaaagggguuucuucggagcuauugcugguuucuuagaaggaggaugggaaggaaugauugcagguuggcacggauacacgucccauggggcacauggaguagcaguggcagcagaccuuaagagcacucaagaggccauaaacaagauaacaaaaaaucucaacucuuugagugagcuggaaguaaagaaucuucaaagacuaagcggugccauggaugaacuccacaacgaaauacuagaacuagacgagaaaguggaugaucucagagcugauacaauaagcucacaaauagaacucgcaguccugcuuuccaaugaaggaauaauaaacagugaagaugaacaucucuuggcgcuugaaagaaagcugaagaaaaugcugggccccucugcuguagagauagggaauggaugcuuugaaaccaaacacaagugcaaccagaccugucucgacagaauagcugcugguaccuuugaugcaggagaauuuucucuccccaccuuugauucacugaauauuacugcugcaucuuuaaaugacgauggauuggauaaucauacuauacugcuuuacuacucaacugcugccuccaguuuggcuguaacacugaugauagcuaucuuuguuguuuauauggucuccagagacaauguuucuugcuccaucugucuauaa

SEQ ID NO: 60085 - RNA, 1758 nt, Artificial Sequence; identical to SEQ ID NO: 60084
  derived and/or modified CDS sequence (wt) from hemagglutinin__InfluenzaB__AHL93642

SEQ ID NO: 60086 - RNA, 1755 nt, Artificial Sequence
  derived and/or modified CDS sequence (wt) from hemagglutinin__InfluenzaB__AHL93653
augaaggcaauaauuguacuacucaugguaguaacauccaaugcagaucgaaucugcacugggauaacaucuucaaacucaccucauguggucaaaacagcuacucaaggggaggucaaugugacuggcgugauaccauugacaacaacaccaacaaaaucuuauuuugcaaaucucaaaggaacaaggaccagagggaaacuaugcccggacugucucaacuguacagaucuggauguggccuugggcaggccaauguguguggggaccacaccuucugcuaaagcuucaauacuccacgaagucagaccuguuacauccgggugcuuuccuauaaugcacgacagaacaaaaaucaggcaacuacccaaucuucucagaggauaugaaaauaucagguuaucaacccaaaacguuaucgaugcagaaaaagcaccaggaggacccuacagacuuggaaccucaggaucuugcccuaacgcuaccaguaaaaucggauuuuucgcaacaauggcuugggcugucccaaaggacaacuacaaaaaugcaacgaacccacuaacaguagaaguaccauacauuuguacagaaggggaagaccaaauuacuguuuggggguuccauucagauaacaaaacccaaaugaagaaccucuauggagacucaaauccucaaaaguucaccucaucugcuaauggaguaaccacacauuauguuucucagauuggcgacuucccagaucaaacagaagacggaggacuaccacaaagcggcagaauuguuguugauuacauggugcaaaaaccugggaaaacaggaacaauugucuaucaaagaggcguuuuguugccucaaaagguguggugcgcgaguggcaggagcaaaguaauaaaagggucauugccuuuaauuggugaagcagauugccuucaugaaaaauacgguggauuaaacaaaagcaagccuuacuacacaggagaacaugcaaaagccauaggagauugcccaauauggguaaaaacaccuuugaagcuugccaauggaaccaaauauagaccuccugcaaaacuauuaaaggaaagggguuucuucggagcuauugcugguuuccuagaaggaggaugggaaggaaugauugcagguuggcacggauacacaucucacggagcacauggaguggcaguugcggcagaccuuaagaguacacaagaagcuauaaauaagauaacaaaaaaucucaauucuuugagugagcuagaaguaaaaaaccuucaaagacuaaguggugccauggaugaacuccacaacgaaauacucgagcuggaugagaaaguggaugaucucagagcugacacuauaagcucacaaauagaacuugcagucuugcuuuccaacgaaggaauaauaaacagugaagacgagcaucuauuggcacuugagagaaaacuaaagaaaaugcugggucccucugcuguagacauaggaaauggaugcuucgaaaccaaacacaaaugcaaccagaccugcuuagacaggauagcugcuggcaccuuuaaugcaggagaauuuucucuccccacuuuugauucauugaacauuacugcugcaucuuuaaaugaugauggauuggauaaccauacuauacugcucuauuacucaacugcugcuucuaguuuggcuguaacauuaaugcuagcuauuuuuauuguuuauauggucuccagagacaacguuucaugcuccaucugucuauaa

SEQ ID NO: 60087 - RNA, 1758 nt, Artificial Sequence
  derived and/or modified CDS sequence (wt) from hemagglutinin__InfluenzaB__AHL93664
augaaggcaauaauuguacuacuuaugguaguaacauccaaugcagaucgaaucugcacugggauaacaucgucaaacucaccacauaucgucaaaacugcuacucaaggggaggucaaugugacugguguaauaccacugacaacaacacccaccaaaucucauuuugcaaaucucaaaggaacagaaaccagggggaaacuaugcccaaaaugccucaacugcacagaucuggacguagccuugggcagaccaaaaugcacggggaaaauacccucggcaagaguuucaauacuccaugaagucagaccuguuacaucugggugcuuuccuauaaugcacgacagaacaaaaauuagacagcugccuaaccuucucagaggauacgaacauaucagguuaucaacucauaacguuaucaaugcagaaaaugcaccaggaggacccuacaaaauuggaaccucagggucuugcccuaacauuaccaauggaaacggauuuuucgcaacaauggcuugggccgucccaaaaaacgacaaaaacaaaacagcaacaaauccauuaacaauagaaguaccauacauuuguacagaaggagaagaccaaauuaccguuuggggguuccacucugacaaugaaacccaaauggcaaagcucuauggggacucaaagccccagaaguucaccucaucugccaacggagugaccacacauuacguuucacagauugguggcuucccaaaucaaacagaagacggaggacuaccacaaagugguagaauuguuguugauuacauggugcaaaaaucugggaaaacaggaacaauuaccuaucaaagggguauuuuauugccucaaaagguguggugcgcaaguggcaggagcaagguaauaaaaggauccuugccuuuaauuggagaagcagauugccuccacgaaaaauacgguggauuaaacaaaagcaagccuuacuacacaggggaacaugcaaaggccauaggaaauugcccaauaugggugaaaacacccuugaagcuggccaauggaaccaaauauagaccuccugcaaaacuauuaaaggaaagggguuucuucggugcuauugcuggcuucuuagagggaggaugggaaggaaugauugcagguuggcacggauacacaucccauggggcacauggaguagcgguggcagcagaccuuaagagcacucaagaggccauaaacaagauaacaaaaaaucucaacucuuugagugagcuggaaguaaagaaucuucaaagacuaagcggugccauggaugaacuccacaaugaaauacuagaauuagaugagaaaguggaugaucucagagcugauacaauaagcucacaaauagaacuugcaguccugcuuuccaaugaaggaauaauaaacagugaagaugaacaucucuuggcgcuugaaagaaagcugaagaaaaugcugggccccucugcuguagagauagggaauggaugcuuugaaaccaaacacaagugcaaccagaccugucucgacagaauagcugcugguaccuuugaugcaggagaauuuucucuccccacuuuugauucacugaauauuacugcugcaucuuuaaaugacgauggauuggauaaucauacuauacugcuuuacuacucaacugcugccuccaguuuggcuguaacacugaugauagcuaucuuuguuguuuauauggucuccagagacaauguuucuugcuccaucugucuauaa

SEQ ID NO: 60088 - RNA, 1758 nt, Artificial Sequence
  derived and/or modified CDS sequence (wt) from hemagglutinin__InfluenzaB__AHL93675
augaaggcaauaauuguacuacucaugguaguaacauccaaugcagaucgaaucugcacugggauaacaucgucaaacucaccacaugucgucaaaacugcuacucaaggggaggucaaugugacugguguaauaccacugacaacaacacccaccaaaucucauuuugcaaaucucaaaggaacagaaaccagagggaaacuaugcccaaaaugccccaacugcacagaucuggacguagccuugggcagaccaaaaugcacggggaaaauacccucggcaagaguuucaauacuccaugaagucagaccuguuacaucugggugcuuuccuauaaugcacgacagaacaaaaauuagacagcugccuaaccuucuccgaggauacgaacauaucagauuaucaacucauaacguuaucaaugcagaaaaugcaccaggaggacccuacaaaauuggaaccucagggucuugcccuaacguuaccaauggaaacggauuuuucgcaacaauggcuugggccgucccaaaaaacgacaaaaacaaaacagcaacaaauccauuaacaauagaaguaccauacauuuguacagaaggagaagaccaaauuaccguuuggggguuccacucugauaacgagacccaaauggcaaagcucuauggggacucaaagccccagaaguucaccucaucagccaacggagugaccacacauuacguuucacagauugguggcuucccaaaucaaacagaagacggaggacuaccacaaagugguagaauuguuguugauuacauggugcaaaaaucugggaaaacaggaacaauuaccuaucaaagagguauuuuauugccucaaaagguguggugcgcaaguggcaggagcaagguaauaaaaggauccuugccuuuaauuggagaagcagauugccuccacgaaaaauacgguggauuaaacaaaagcaagccuuacuacacaggggaacaugcaaaggccauaggaaauugcccaauaugggugaagacacccuugaagcuggccaauggaaccaaauauagaccuccugcaaaacuauuaaaggaaagggguuucuucggagcuauugcugguuucuuagaaggaggaugggaaggaaugauugcagguuggcacggauacacgucccauggggcacauggaguagcgguggcagcagaccuuaagagcacucaagaggccauaaacaagauaacaaaaaaucucaacucuuugagugagcuggaaguaaagaaucuucaaagacuaaguggugccauggaugaacuccacaacgaaauacuagaacuagacgagaaaguggaugaucucagagcugauacaauaagcucacaaauagaacucgcaguccugcuuuccaaugaaggaauaauaaacagugaagaugaacaucucuuggcacuugaaagaaagcugaagaaaaugcugggcccuucugcuguagagauagggaauggaugcuuugaaaccaaacacaagugcaaccagaccugucucgacagaauagcugcugguaccuuugaugcaggagaauuuucucuccccaccuuugauucacugaauauuacugcugcaucuuuaaaugacgauggauuggauaaucauaccauacugcuuuacuacucaacugcugccuccaguuuggcuguaacacugaugauagcuaucuuuguuguuuauauggucuccagagacaauguuucuugcuccaucugucuauaa

SEQ ID NO: 60089 - RNA, 1758 nt, Artificial Sequence
  derived and/or modified CDS sequence (wt) from hemagglutinin__InfluenzaB__AHL93686
augaaggcaauaauuguacuacucaugguaguaacauccaaugcagaucgaaucugcacugggauaacaucgucaaacucaccacaugucgucaaaacugcuacucaaggggaggucaaugugacugguguaauaccacugacaacaacacccaccaaaucucauuuugcaaaucucaaaggaacagaaaccagagggaaacuaugcccaaaaugccccaacugcacagaucuggacguagccuugggcagaccaaaaugcacggggaaaauacccucggcaagaguuucaauacuccaugaagucagaccuguuacaucugggugcuuuccuauaaugcacgacagaacaaaaauuagacagcugccuaaccuucuccgaggauacgaacauaucagauuaucaacucauaacguuaucaaugcagaaaaugcaccaggaggacccuacaaaauuggaaccucagggucuugcccuaauguuaccaauggaaacggauuuuucgcaacaauggcuugggccgucccaaaaaacgacaaaaacaaaacagcaacaaauccauuaacaauagaaguaccauacauuuguacagaaggagaagaccaaauuaccguuuggggguuccacucugauaacgagacccaaauggcaaagcucuauggggacucaaagccccagaaguucaccucaucugccaacggagugaccacacauuacguuucacagauugguggcuucccaaaucaaacagaagacggaggacuaccacaaagugguagaauuguuguugauuacauggugcaaaaaucugggaaaacaggaacaauuaccuaucaaagagguauuuuauugccucaaaagguguggugcgcaaguggcaggagcaagguaauaaaaggauccuugccuuuaauuggagaagcagauugccuccacgaaaaauacgguggauuaaacaaaagcaagccuuacuacacaggggaacaugcaaaggccauaggaaauugcccaauaugggugaagacacccuugaagcuggccaaugggaccaaauauagaccuccugcaaaacuauuaacggaaagggguuucuucggagcuauugcugguuucuuagaaggaggaugggaaggaaugauugcagguuggcacggauacacgucccauggggcacauggaguagcaguggcagcagaccuuaagagcacucaagaggccauaaacaagauaacaaaaaaucucaacucuuugagugagcuggaaguaaagaaucuucaaagacuaagcggugccauggaugaacuccacaacgaaauacuagaacuagacgagaaaguggaugaucucagagcugauacaauaagcucacaaauagaacucgcaguccugcuuuccaaugaaggaauaauaaacagugaagaugaacaucucuuggcgcuugaaagaaagcugaagaaaaugcugggccccucugcuguagagauagggaaugggugcuuugaaaccaaacacaagugcaaccagaccugucucgacagaauagcugcugguaccuuugaugcaggagaauuuucucuccccaccuuugauucacugaauauuacugcugcaucuuuaaaugacgauggauuggauaaucauacuauacugcuuuacuacucaacugcugccuccaguuuggcuguaacacugaugauagcuaucuuuguuguuuauauggucuccagagacaauguuucuugcuccaucugucuauaa

SEQ ID NO: 60090 - RNA, 1758 nt, Artificial Sequence; identical to SEQ ID NO: 60084
  derived and/or modified CDS sequence (wt) from hemagglutinin__InfluenzaB__AHL93697

SEQ ID NO: 60091 - RNA, 1758 nt, Artificial Sequence
  derived and/or modified CDS sequence (wt) from hemagglutinin__InfluenzaB__AHL93708
augaaggcaauaauuguacuacucaugguaguaacauccaaugcagaucgaaucugcacugggauaacaucgucaaacucaccacaugucgucaaaacugcuacucaaggggaggucaaugugacugguguaauaccacugacaacaacacccaccaaaucucauuuugcaaaucucaaaggaacagaaaccagagggaaacuaugcccaaaaugccccaacugcacagaucuggacguagccuugggcagaccaaaaugcacggggaaaauacccucggcaagaguuucaauacuccaugaagucagaccuguuacaucugggugcuuuccuauaaugcacgacagaacaaaaauuagacagcugccuaaccuucuccgaggauacgaacauaucagauuaucaacucauaacguuaucaaugcagaaaaugcaccaggaggacccuacaaaauuggaaccucagggucuugcccuaauguuaccaauggaaacggauuuuucgcaacaauggcuugggccgucccaaaaaacgacaaaaacaaaacagcaacaaauccauuaacaauagaaguaccauacauuuguacagaaggagaagaccaaauuaccguuuggggguuccacucugauaacgagacccaaauggcaaagcucuauggggacucaaagccccagaaguucaccucaucugccaacggagugaccacacauuacguuucacagauugguggcuucccaaaucaaacagaagacggaggacuaccacaaagugguagaauuguuguugauuacauggugcaaaaaucugggaaaacaggaacaauuaccuaucaaagagguauuuuauugccucaaaagguguggugcgcaaguggcaggagcaagguaauaaaaggauccuugccuuuaauuggagaagcagauugccuccacgaaaaauacgguggauuaaacaaaagcaagccuuacuacacagggaaacaugcaaaggccauaggaaauugcccaauaugggugaagacacccuugaagcuggccaaugggaccaaauauagaccuccugcaaaacuauuaacggaaagggguuucuucggagcuauugcugguuucuuagaaggaggaugggaaggaaugauugcagguuggcacggauacacgucccauggggcacauggaguagcaguggcagcagaccuuaagagcacucaagaggccauaaacaagauaacaaaaaaucucaacucuuugagugagcuggaaguaaagaaucuucaaagacuaagcggugccauggaugaacuccacaacgaaauacuagaacuagacgagaaaguggaugaucucagagcugauacaauaagcucacaaauagaacucgcaguccugcuuuccaaugaaggaauaauaaacagugaagaugaacaucucuuggcgcuugaaagaaagcugaagaaaaugcugggccccucugcuguagagauagggaaugggugcuuugaaaccaaacacaagugcaaccagaccugucucgacagaauagcugcugguaccuuugaugcaggagaauuuucucuccccaccuuugauucacugaauauuacugcugcaucuuuaaaugacgauggauuggauaaucauacuauacugcuuuacuacucaacugcugccuccaguuuggcuguaacacugaugauagcuaucuuuguuguuuauauggucuccagagacaauguuucuugcuccaucugucuauaa

SEQ ID NO: 60092 - RNA, 1758 nt, Artificial Sequence
  derived and/or modified CDS sequence (wt) from hemagglutinin__InfluenzaB__AHL93719
augaaggcaauaauuguacuacucaugguaguaacauccaaugcagaucgaaucugcacugggauaacaucgucaaacucaccacauaucgucaaaacugcuacucaaggugaggucaaugugacugguguaauaccacugacaacaacacccaccaaaucucauuuugcaaaucucaaaggaacagaaaccagggggaaacuaugcccaaaaugccucaacugcacagaucuggacguagccuugggcagaccaaaaugcacggggaaaauacccucggcaagaguuucaauacuccaugaagucauaccuguuacaucugggugcuuuccuauaaugcacgacagaacaaaaauuagacagcugccuaaccuucucagaggauacgaacauaucagguuaucaacucauaacguuaucaaugcagaaaaugcaccaggaggacccuacaaaauuggaaccucagggucuugcccuaacauuaccaauggaaacggauuuuucgcaacaauggcuugggccgucccaaaaaacgacaaaaacaaaacagcaacaaauccauuaacaauagaaguaccauacauuuguacagaaggagaagaccaaauuaccguuuggggguuccacucugacaaugaaacccaaauggcaaagcucuauggggacucaaagccccagaaguucaccucaucugccaacggagugaccacacauuacguuucacagauugguggcuucccaaaucaaacagaagacggaggacuaccacaaagugguagaauuguuguugauuacauggugcaaaaaucugggaaaacaggaacaauuaccuaucaaagggguauuuuauugccucaaaagguguggugcgcaaguggcaggagcaagguaauaaaaggauccuugccuuuaauuggagaagcagauugccuccacgaaaaauacgguggauuaaacaaaagcaagccuuacuacacaggggaacaugcaaaggccauaggaaauugcccaauaugggugaaaacacccuugaagcuggccaauggaaccaaauauagaccuccugcaaaacuauuaaaggaaagggguuucuucggugcuauugcuggcuucuuggaaggaggaugggaaggaaugauugcagguuggcacggauacacaucccauggggcacauggaguagcgguggcagcagaccuuaagagcacucaagaggccauaaacaagauaacaaaaaaucucaacucuuugagugagcuggaaguaaagaaucuucaaagacuaagcggugccauggaugaacuccacaaugaaauacuagaauuagaugagaaaguggaugaucucagagcugauacaauaagcucacaaauagaacucgcaguccugcuuuccaaugaaggaauaauaaacagugaagaugaacaucucuuggcgcuugaaagaaagcugaagaaaaugcugggccccucugcuguagagauagggaauggaugcuuugaaaccaaacacaagugcaaccagaccugucucgacagaauagcagcugguaccuuugaugcaggagaauuuucucuccccacuuuugauucacugaauauuacugcugcaucuuuaaaugacgauggauuggauaaucauacuauacugcuuuacuacucaacugcugccuccaguuuggcuguaacacugaugauagcuaucuuuguuguuuauauggucuccagagacaauguuucuugcuccaucugucuauaa

SEQ ID NO: 60093 - RNA, 1758 nt, Artificial Sequence; identical to SEQ ID NO: 60080
  derived and/or modified CDS sequence (wt) from hemagglutinin__InfluenzaB__AHL93730

SEQ ID NO: 60094 - RNA, 1758 nt, Artificial Sequence
  derived and/or modified CDS sequence (wt) from hemagglutinin__InfluenzaB__AHL93741
augaaggcaauaauuguacuacucaugguaguaacauccaaugcagaucgaaucugcacugggauaacaucgucaaacucaccacauaucgucaaaacugcuacucaaggggaggucaaugugacugguguaauaccacugacaacaacacccaccaaaucucauuuugcaaaucucaaaggaacagaaaccagggggaaacuaugcccaaaaugccucaacugcacagaucuggacguagccuugggcagaccaaaaugcacggggaaaauacccucggcaagaguuucaauacuccaugaagucagaccuguuacaucugggugcuuuccuauaaugcacgacagaacaaaaauuagacagcugccuaaccuucucagaggauacgaacauaucagguuaucaacucauaacguuaucaaugcagaaaaugcaccaggaggacccuacaaaauuggaaccucagggucuugcccuaacauuaccaauggaaacggauuuuucgcaacaauggcuugggccgucccaaaaaacgacaaaaacaaaacagcaacaaauccauuaacaauagaaguaccauacauuuguacagaaggagaagaccaaauuaccguuuggggguuccacucugacaaugaaacccaaauggcaaagcucuauggggacucaaagccccagaaguucaccucaucugccaacggagugaccacacauuacguuucacagauugguggcuucccaaaucaaacagaagacggaggacuaccacaaagugguagaauuguuguugauuacauggugcaaaaaucugggaaaacaggaacaauuaccuaucaaagggguauuuuauugccucaaaagguguggugcgcaaguggcaggagcaagguaauaaaaggauccuugccuuuaauuggagaagcagauugccuccacgaaaaauacgguggauuaaacaaaagcaagccuuacuacacaggggaacaugcaaaggccauaggaaauugcccaauaugggugaaaacacccuugaagcuggccaauggaaccaaauauagaccuccugcaaaacuauuaaaggaaagggguuucuucggagcuauugcuggcuucuuagaaggaggaugggaaggaaugauugcagguuggcacggauacacaucccauggggcacauggaguagcgguggcagcagaccuuaagagcacucaagaggccauaaacaagauaacaaaaaaucucaacucuuugagugagcuggaaguaaagaaucuucaaagacuaagcggugccauggaugaacuccacaaugaaauacuagaauuagaugagaaaguggaugaucucagagcugauacaauaagcucacaaauagaacucgcaguccugcuuuccaaugaaggaauaauaaacagugaagaugaacaucucuuggcgcuugaaagaaagcugaagaaaaugcugggccccucugcuguagagauagggaauggaugcuuugaaaccaaacacaagugcaaccagaccugucuugacagaauagcugcugguaccuuugaugcaggagaauuuucucuccccacuuuugauucacugaauauuacugcugcaucuuuaaaugacgauggauuggauaaucauacuauacugcuuuacuacucaacugcugccuccaguuuggcuguaacacugaugauagcuaucuuuguuguuuauauggucuccagagacaauguuucuugcuccaucugucuauaa

SEQ ID NO: 60095 - RNA, 1758 nt, Artificial Sequence; identical to SEQ ID NO: 60077
  derived and/or modified CDS sequence (wt) from hemagglutinin__InfluenzaB__AHL93752

SEQ ID NO: 60096 - RNA, 1758 nt, Artificial Sequence; identical to SEQ ID NO: 60089
  derived and/or modified CDS sequence (wt) from hemagglutinin__InfluenzaB__AHL93763

SEQ ID NO: 60097 - RNA, 1758 nt, Artificial Sequence; identical to SEQ ID NO: 58652
  derived and/or modified CDS sequence (wt) from hemagglutinin__InfluenzaB__AHL93774

SEQ ID NO: 60098 - RNA, 1758 nt, Artificial Sequence; identical to SEQ ID NO: 60089
  derived and/or modified CDS sequence (wt) from hemagglutinin__InfluenzaB__AHL93785

SEQ ID NO: 60099 - RNA, 1758 nt, Artificial Sequence
  derived and/or modified CDS sequence (wt) from hemagglutinin__InfluenzaB__AHL93796
augaaggcaauaauuguacuacucaugguaguaacauccaaugcagaucgaaucugcacugggauaacaucgucaaacucaccacauaucgucaaaacugcuacucaaggugaggucaaugugacugguguaauaccacugacaacaacacccaccaaaucucauuuugcaaaucucaaaggaacagaaaccagggggaaacuaugcccaaaaugccucaacugcacagaucuggacguagccuugggcagaccaaaaugcacggggaaaauacccucggcaagaguuucaauacuccaugaagucagaccuguuacaucugggugcuuuccuauaaugcacgacagaacaaaaauuagacagcugccuaaccuucucagaggauacgaacauaucagguuaucaacucauaacguuaucaaugcagaaaaugcaccaggaggacccuacaaaauuggaaccucagggucuugcccuaacauuaccaauggaaacggauuuuucgcaacaauggcuugggccgucccaaaaaacgacaaaaacaaaacagcaacaaauccauuaacaauagaaguaccauacauuuguacagaaggagaagaccaaauuaccguuuggggguuccacucugacaaugaaacccaaauggcaaagcucuauggggacucaaagccccagaaguucaccucaucugccaacggagugaccacacauuacguuucacagauugguggcuucccaaaucaaacagaagacggaggacuaccacaaagugguagaauuguuguugauuacauggugcaaaaaucugggaaaacaggaacaauuaccuaucaaagggguauuuuauugccucaaaagguguggugcgcaaguggcaggagcaagguaauaaaaggauccuugccuuuaauuggagaagcagauugccuccacgaaaaauacgguggauuaaacaaaagcaagccuuacuacacaggggaacaugcaaaggccauaggaaauugcccaauaugggugaaaacacccuugaagcuggccaauggaaccaaauauagaccuccugcaaaacuauuaaaggaaagggguuucuucggugcuauugcuggcuucuuggaaggaggaugggaaggaaugauugcagguuggcacggauacacaucccauggggcacauggaguagcgguggcagcagaccuuaagagcacucaagaggccauaaacaagauaacaaaaaaucucaacucuuugagugagcuggaaguaaagaaucuucaaagacuaagcggugccauggaugaacuccacaaugaaauacuagaauuagaugagaaaguggaugaucucagagcugauacaauaagcucacaaauagaacucgcaguccugcuuuccaaugaaggaauaauaaacagugaagaugaacaucucuuggcgcuugaaagaaagcugaagaaaaugcugggccccucugcuguagagauagggaauggaugcuuugaaaccaaacacaagugcaaccagaccugucucgacagaauagcagcugguaccuuugaugcaggagaauuuucucuccccacuuuugauucacugaauauuacugcugcaucuuuaaaugacgauggauuggauaaucauacuauacugcuuuacuacucaacugcugccuccaguuuggcuguaacacugaugauagcuaucuuuguuguuuauauggucuccagagacaauguuucuugcuccaucugucuauaa

SEQ ID NO: 60100 - RNA, 1758 nt, Artificial Sequence
  derived and/or modified CDS sequence (wt) from hemagglutinin__InfluenzaB__AHL93818
augaaggcaauaauuguacuacucaugguaguaacauccaaugcagaucgaaucugcacugggauaacaucgucaaacucaccacaugucgucaaaacugcuacucaaggggaggucaauguaacuggugugauaccacugacaacaacacccaccaaaucucauuuugcaaaucucaaaggaacagaaaccagagggaaacuaugcccaaaaugccccaacugcacagaucuggacguagccuugggcagaccaaaaugcacggggaaaauacccucggcaagaguuucaauacuccaugaagucagaccuguuacaucugggugcuuuccuauaaugcacgacagaacaaaaauuagacagcugccuaaccuucuccgaggauacgaacauaucagguuaucaacucauaacguuaucaaugcagaaaaugcaccaggaggacccuacaaaauuggaaccucagggucuugcccuaauguuaccaauggaaacggauuuuucgcaacaauggcuugggccgucccaaagaacgacaaaaacaaaacagcaacaaauccauuaacaauagaaguaccauacauuuguacagaaggagaagaccaaauuaccguuuggggguuccacucugauaacgagacccaaauggcaaagcucuauggggacucaaagccccagaaguucaccucaucugccaacggagugaccacacauuacguuucacagauugguggcuucccaaaucaaacagaagacggaggacuaccacaaagugguagaauuguuguugauuacauggugcaaaaaucugggaaaacaggaacaauuaccuaucaaagagguauuuuauugccucaaaagguguggugcgcaaguggcaggagcaagguaauaaaaggauccuugccuuuaauuggagaagcagauugccuccaugaaaaauacgguggauuaaacaaaagcaagccuuacuacacaggggaacaugcaaaggccauaggaaauugcccaauaugggugaagacacccuugaagcuggccaauggaaccaaauauagaccuccugcaaaacuauuaaaggaaagggguuucuucggagcuauugcugguuucuuagaaggaggaugggaaggaaugauugcagguuggcacggauacacgucccauggggcacauggaguagcgguggcagcagaccuuaagagcacucaagaggccauaaacaagauaacaaaaaaucucaacucuuugagugagcuggaaguaaagaaucuucaaagacuaagcggugccauggaugaacuccacaaugaaauacuagaacuagacgagaaaguggaugaucucagagcugauacaauaagcucacaaauagaacucgcaguccugcuuuccaaugaaggaauaauaaacagugaagaugaacaucucuuggcgcuugaaagaaagcugaagaaaaugcugggccccucugcuguagagauagggaauggaugcuuugaaaccaaacacaagugcaaccagaccugucucgacagaauagcugcugguaccuuugaugcaggagaauuuucucuccccacauuugauucacugaauauuacugcugcaucuuuaaaugacgauggauuggauaaucauacuauacugcuuuacuacucaacugcugccuccaguuuggcuguaacacugaugauagcuaucuuuguuguuuauauggucuccagagacaauguuucuugcuccaucugucuauaa

SEQ ID NO: 60101 - RNA, 1758 nt, Artificial Sequence
  derived and/or modified CDS sequence (wt) from hemagglutinin__InfluenzaB__AHL93829
augaaggcaauaauuguacuacucaugguaguaacauccaaugcagaucgaaucugcacugggauaacaucgucaaacucaccacauaucgucaaaacugcuacucaaggggaggucaaugugacugguguaauaccacugacaacaacacccaccaaaucucauuuugcaaaucucaaaggaacagaaaccagggggaaacuaugcccaaaaugccucaacugcacagaucuggacguagccuuggguagaccaaaaugcacggggaaaauacccucggcaagaguuucaauacuccaugaagucagaccuguuacaucugggugcuuuccuauaaugcacgacagaacaaaaauuagacagcugccuaaccuucucagaggauacgaacauaucagguuaucaacucauaacguuaucaauacagaaaaugcaccaggaggacccuacaaaauuggaaccucagggucuugcccuaacauuaccaauggaaacggauuuuucgcaacaauggcuugggccgucccaaaaaacgacaaaaacaaaacagcaacaaauccauuaacaauagaaguaccauacauuuguacagaaggagaagaccaaauuaccguuuggggguuccacucugacaaugaaacccaaauggcaaagcucuauggggacucaaagccccagaaguucaccucaucugccaacggagugaccacacauuacguuucacagauugguggcuucccaaaucaaacagaagacggaggacuaccacaaagugguagaauuguuguugauuacauggugcaaaaaucugggaaaacaggaacaauuaccuaucaaagggguauuuuauugccucaaaagguguggugcgcaaguggcaggagcaagguaauaaaaggauccuugccuuuaauuggagaagcagauugccuccacgaaaaauacgguggauuaaacaaaagcaagccuuacuacacaggggaacaugcaaaggccauaggaaauugcccaauaugggugaaaacacccuugaagcuggccaauggaaccaaauauagaccuccugcaaaacuauuaaaggaaagggguuucuucggugcuauugcuggcuucuuagaaggaggaugggaaggaaugauugcagguuggcacggauacacaucccauggggcacauggaguagcgguggcagcagaccuuaagagcacucaagaggccauaaacaagauaacaaaaaaucucaacucuuugagugagcuggaaguaaagaaucuucaaagacuaagcggugccauggaugaacuccacaaugaaauacuagaauuagaugagaaaguggaugaucucagagcugauacaauaagcucacaaauagaacucgcaguccugcuuuccaaugaaggaauaauaaacagugaagaugaacaucucuuggcgcuugaaagaaagcugaagaaaaugcugggccccucugcuguagagauagggaauggaugcuuugaaaccaaacacaagugcaaccagaccugucucgacagaauagcugcugguaccuuugaugcaggagaauuuucucuccccacuuuugauucacugaauauuacugcugcaucuuuaaaugacgauggauuggauaaucauacuauacugcuuuacuacucaacugcugccuccaguuuggcuguaacacugaugauagcuaucuuuguuguuuauauggucuccagagacaauguuucuugcuccaucugucuauaa

SEQ ID NO: 60102 - RNA, 1758 nt, Artificial Sequence
  derived and/or modified CDS sequence (wt) from hemagglutinin__InfluenzaB__AHL93840
augaaggcaauaauuguacuacucaugguaguaacauccaaugcagaucgaaucugcacugggauaacaucgucaaacucaccacaugucgucaaaacugcuacucaaggggaggucaaugugacugguguaauaccauugacaacaacacccaccaaaucucauuuugcaaaucucaaaggaacagaaaccagggggaaacuaugcccaaaaugccucaacugcacagaucuggacguagccuugggcagaccaaaaugcacggggaaaauacccucggcaagaguuucaauacuccaugaagucagaccuguuacaucuggguguuuuccuauaaugcacgacagaacaaaaauuagacagcugccuaaccuucuccgaggauacgaacauaucagguuaucaacucauaacguuaucaaugcagaaaaugcaccaggaggacccuacaaaauuggaaccucagggucuugcccuaacauuaccaauggaaacggauuuuucgcaacaauggcuugggccgucccaaaaaacgacaaaaacaaaacagcaacaaauccauuaacaauagaaguaccauacauuuguacagaaggagaagaccaaauuaccguuuggggguuccacucugacaacgagacccaaauggcaaagcucuauggggacucaaagccccagaaguucaccucaucugccaacggagugaccacacauuacguuucacagauugguggcuucccaaaucaaacagaagacggaggacuaccacaaagugguagaauuguuguugauuacauggugcaaaaaucugggaaaacaggaacaauuaccuaucaaagggguauuuuauugccucaaaagguguggugugcaaguggcaggagcaagguaauaaaaggauccuugccuuuaauuggagaagcagauugccuccacgaaaaauacgguggauuaaacaaaagcaagccuuacuacacaggggaacaugcaaaggcaauaggaaauugcccaauaugggugaaaacacccuugaagcuggccaaugggaccaaauauagaccuccugcaaaacuauuaaaggaaagggguuucuucggagcuauugcugguuucuuagaaggaggaugggaaggaaugauugcagguuggcacggauacacaucccauggggcacauggaguagcgguggcagcagaccuuaagagcacucaagaggccauaaacaagauaacaaaaaaucucaacucuuugagugagcuggaaguaaagaaucuucaaagacuaagcggugccauggaugaacuccacaacgaaauacuagaacuagaugagaaaguggaugaucucagagcugauacaauaagcucacaaauagaacucgcaguccugcuuuccaaugaaggaauaauaaacagugaagaugaacaucucuuggcgcuugaaagaaagcugaagaaaaugcugggccccucugcuguagagauagggaauggaugcuuugaaaccaaacacaagugcaaccagaccugucucgacagaauagcugcugguaccuuugaugcaggagaauuuucucuccccaccuuugauucacugaauauuacugcugcaucuuuaaaugacgauggauuggauaaucauacuauacugcuuuacuacucaacugcugccuccaguuuggcuguaacacugaugauagcuaucuuuguuguuuauauggucuccagagacaauguuucuugcuccaucugucuauaa

SEQ ID NO: 60103 - RNA, 1758 nt, Artificial Sequence
  derived and/or modified CDS sequence (wt) from hemagglutinin__InfluenzaB__AHL93851
augaaggcaauaauuguacuacucaugguaguaacauccaaugcagaucgaaucugcacugggauaacaucgucaaacucaccacauaucgucaaaacugcuacucaaggggaggucaaugugacugguguaauaccacugacaacaacacccaccaaaucucauuuugcaaaucucaaaggaacagaaaccagggggaaacuaugcccaaaaugccucaacugcacagaucuggacguagccuuggguagaccaaaaugcacggggaaaauacccucggcaagaguuucaauacuccaugaagucagaccuguuacaucugggugcuuuccuauaaugcacgacagaacaaaaauuagacagcugccuaaccuucucagaggauacgaacauaucagguuaucaacucauaacguuaucaaugcagaaaaugcaccaggaggacccuacaaaauuggaaccucagggucuugcccuaacauuaccaauggaaacggauuuuucgcaacaauggcuugggccgucccaaagaacgacaaaaacaaaacagcaacaaauccauuaacaauagaaguaccauacauuuguacagaaggagaagaccaaauuaccguuuggggguuccacucugacaaugaaacccaaauggcaaagcucuauggggacucaaagccccagaaguucaccucaucugccaacggagugaccacacauuacguuucacagauugguggcuucccaaaucaaacagaagacggaggacuaccacaaagugguagaauuguuguugauuacauggugcaaaaaucugggaaaacaggaacaauuaccuaucaaagggguauuuuauugccucaaaagguguggugcgcaaguggcaggagcaagguaauaaaaggauccuugccuuuaauuggagaagcagauugccuccacgaaaaauacgguggauuaaacaaaagcaagccuuacuacacaggggaacaugcaaaggccauaggaaauugcccaauaugggugaaaacacccuugaagcuggccaauggaaccaaauauagaccuccugcaaaacuauuaaaggaaagggguuucuucggugcuauugcuggcuucuuagaaggaggaugggaaggaaugauugcagguuggcacggauacacaucccauggggcacauggaguagcgguggcagcagaccuuaagagcacucaagaggccauaaacaagauaacaaaaaaucucaacucuuugagugagcuggaaguaaagaaucuucaaagacuaagcggugccauggaugaacuccacaaugaaauacuagaauuagaugagaaaguggaugaucucagagcugauacaauaagcucacaaauagaacucgcaguccugcuuuccaaugaaggaauaauaaacagugaagaugaacaucucuuggcgcuugaaagaaagcugaagaaaaugcugggccccucugcuguagagauagggaauggaugcuuugaaaccaaacacaagugcaaccagaccugucucgacagaauagcugcugguaccuuugaugcaggagaauuuucucuccccacuuuugauucacugaauauuacugcugcaucuuuaaaugacgauggauuggauaaucauacuauacugcuuuacuacucaacugcugccuccaguuuagcuguaacacugaugauagcuaucuuuguuguuuauauggucuccagagacaauguuucuugcuccaucugucuauaa

SEQ ID NO: 60104 - RNA, 1758 nt, Artificial Sequence; identical to SEQ ID NO: 58738
  derived and/or modified CDS sequence (wt) from hemagglutinin__InfluenzaB__AHL93862

SEQ ID NO: 60105 - RNA, 1758 nt, Artificial Sequence
  derived and/or modified CDS sequence (wt) from hemagglutinin__InfluenzaB__AHL93873
augaaggcaauaauuguacuacucaugguaguaacauccaaugcagaucgaaucugcacugggauaacaucgucaaacucaccacauaucgucaaaacugcuacucaaggggaggucaaugugacugguguaauaccacugacaacaacacccaccaaaucucauuuugcaaaucucaaagggacagaaaccaggggggaacuaugcccaaaaugccucaacugcacagaucuggacguagccuugggcagaccaaaaugcacggggaaaauacccucggcaagaguuucaauacuccaugaagucagaccuguuacaucugggugcuuuccuauaaugcacgacagaacaaaaauuagacagcugccuaaccuucucagaggauacgaacauaucagguuaucaacucauaacguuaucaaugcagaaaaugcaccaggaggacccuacaaaauuggaaccucagggucuugcccuaacauuaccaauggaaacggauuuuucgcaacaauggcuugggccgucccaaaaaacgacaaaaacaaaacagcaacaaauccauuaacaauagaaguaccauacauuuguacagaaggagaagaccaaauuaccguuuggggguuccacucugacaaugaaacccaaauggcaaagcucuauggggacucaaagccccagaaguucaccucaucugccaacggagugaccacacauuacguuucacagauugguggcuucccaaaucaaacagaagacggaggacuaccacaaagugguagaauuguuguugauuacauggugcaaaaaucugggaaaacaggaacaauuaccuaucaaagggguauuuuauugccucaaaagguguggugcgcaaguggcaggagcaagguaauaaaaggauccuugccuuuaauuggagaagcagauugccuccacgaaaaauacgguggauuaaacaaaagcaagccuuacuacacaggggaacaugcaaaggccauaggaaauugcccaauaugggugaaaacacccuugaagcuggccaauggaaccaaauauagaccuccugcaaaacuauuaaaggaaagggguuucuucggugcuauugcuggcuucuuagaaggaggaugggaaggaaugauugcagguuggcacggauacacaucccauggggcacauggaguagcgguggcagcagaccuuaagagcacucaagaggccauaaacaagauaacaaaaaaucucaacucuuugagugagcuggaaguaaagaaucuucaaagacuaagcggugccauggaugaacuccacaaugaaauacuagaauuagaugagaaaguggaugaucucagagcugauacaauaagcucacaaauagaacucgcaguccugcuuuccaaugaaggaauaauaaacagugaagaugaacaucucuuggcgcuugaaagaaagcugaagaaaaugcugggccccucugcuguagagauagggaauggaugcuuugaaaccaaacacaagugcaaccagaccugucucgacagaauagcugcugguaccuuugaugcaggagaauuuucucuccccacuuuugauucacugaauauuacugcugcaucuuuaaaugacgauggauuggauaaucauacuauacugcuuuacuacucaacugcugccuccaguuuggcuguaacacugaugauagcuaucuuuguuguuuauauggucuccagagacaauguuucuugcuccaucugucuauaa

SEQ ID NO: 60106 - RNA, 1758 nt, Artificial Sequence
  derived and/or modified CDS sequence (wt) from hemagglutinin__InfluenzaB__AHL93884
augaaggcaauaauuguacuacucaugguaguaacauccaaugcagaucgaaucugcacugggauaacaucgucaaacucaccacauaucgucaaaacugcuacucaaggggaggucaaugugacugguguaauaccacugacaacaacacccaccaaaucucauuuugcaaaucucaaaggaacagaaaccagggggaaacuaugcccaaaaugccucaacugcacagaucuggacguagccuugggcagaccaaaaugcacggggaaaauacccucggcaagaguuucaauacuccaugaagucagaccuguuacaucugggugcuuuccuauaaugcacgacagaacaaaaauuagacagcugccuaaccuucucagaggauacgaacauaucagguuaucaacucauaacguuaucaaugcagaaaaugcaccaggaggacccuacaaaauuggaaccucagggucuugcccuaacauuaccaauggaaacggauuuuucgcaacaauggcuugggccgucccaaaaaacgacaaaaacaaaacagcaacaaauccauuaacaauagaaguaccauacauuuguacagaaggagaagaccaaauuaccguuuggggguuccacucugacaaugaaacccaaauggcaaagcucuauggggacucaaagccccagaaguucaccucaucugccaacggagugaccacacauuacguuucacagauugguggcuucccaaaucaaacagaagacggaggacuaccacaaagugguagaauuguuguugauuacauggugcaaaaaucugggaaaacaggaacaauuaccuaucaaagggguauuuuauugccucaaaagguguggugcgcaaguggcaggagcaagguaauaaaaggauccuugccuuuaauuggagaagcagauugccuccacgaaaaauacgguggauuaaacaaaagcaagccuuacuacacaggggaacaugcaaaggccauaggaaauugcccaauaugggugaaaacacccuugaagcuggccaauggaaccaaauauagaccuccugcaaaacuauuaaaggaaagggguuucuucggagcuauugcuggcuucuuagaaggaggaugggaaggaaugauugcagguuggcacggauacacaucccauggggcacauggaguagcuguggcagcagaccuuaagagcacucaagaggccauaaacaagauaacaaaaaaucucaacucuuugagugagcuggaaguaaagaaucuucaaagacuaagcggugccauggaugaacuccacaaugaaauacuagaauuagaugagaaaguggaugaucucagagcugauacaauaagcucacaaauagaacucgcaguccugcuuuccaaugaaggaauaauaaacagugaagaugaacaucucuuggcgcuugaaagaaagcugaagaaaaugcugggccccucugcuguagagauagggaauggaugcuuugaaaccaaacacaagugcaaccagaccugucucgacagaauagcugcugguaccuuugaugcaggagaauuuucucuccccacuuuugauucacugaauauuacugcugcaucuuuaaaugacgauggauuggauaaucauacuauacugcuuuacuacucaacugcugccuccaguuuggcuguaacacugaugauagcuaucuuuguuguuuauauggucuccagagacaauguuucuugcuccaucugucuauaa

SEQ ID NO: 60107 - RNA, 1758 nt, Artificial Sequence; identical to SEQ ID NO: 60099
  derived and/or modified CDS sequence (wt) from hemagglutinin__InfluenzaB__AHL93895

SEQ ID NO: 60108 - RNA, 1758 nt, Artificial Sequence
  derived and/or modified CDS sequence (wt) from hemagglutinin__InfluenzaB__AHL93906
augaaggcaauaauuguacuacucaugguaguaacauccaaugcagaucgaaucugcacugggauaacaucgucaaacucaccacauaucgucaaaacugcuacucaaggggaggucaaugugacugguguaauaccacugacaacaacacccaccaaaucucauuuugcaaaucucaaaggaacagaaaccagggggaaacuaugcccaaaaugccucaacugcacagaucuggacguagccuugggcagaccaaaaugcacggggaaaauacccucggcaagaguuucaauacuccaugaagucagaccuguuacaucugggugcuuuccuauaaugcacgacagaacaaaaauuagacagcugccuaaccuucucagaggauacgaacauaucagguuaucaacucauaacguuaucaaugcagaaaaugcaccaggaggacccuacaaaauuggaaccucagggucuugcccuaacauuaccaauggaaacggauuuuucgcaacaauggcuugggccgucccaaaaaacgacaaaaacaaaacagcaacaaauccauuaacaauagaaguaccauacauuuguacagaaggagaagaccaaauuaccguuuggggguuccacucugacaaugaaacccaaauggcaaagcucuauggggacucaaagccccagaaguucaccucaucugccaacggagugaccacacauuacguuucacagauugguggcuucccaaaucaaacagaagacggaggacuaccacaaagugguagaauuguuguugauuacauggugcaaaaaucugggaaaacaggaacaauuaccuaucaaagggguauuuuauugccucaaaagguguggugcgcaaguggcaggagcaagguaauaaaaggauccuugccuuuaauuggagaagcagauugccuccacgaaaaauacgguggauuaaacaaaagcaagccuuacuacacaggggaacaugcaaaggccauaggaaauugcccaauaugggugaaaacacccuugaagcuggccaauggaaccaaauauagaccuccugcaaaacuauuaaaggaaagggguuucuucggugcuauugcuggcuucuuagaaggaggaugggaaggaaugauugcagguuggcacggauacacaucccauggggcacauggaguagcgguggcagcagaccuuaagagcacucaagaggccauaaacaagauaacaaaaaaucucaacucuuugagugagcuggaaguaaagaaucuucaaagacuaagcggugccauggaugaacuccacaaugaaauacuagaauuagaugagaaaguggaugaucucagagcugauacaauaagcucacaaauagaacucgcaguccugcuuuccaaugaaggaauaauaaacagugaagaugaacaucucuuggcgcuugaaagaaagcugaagaaaaugcugggccccucugcuguagagauagggaauggaugcuuugaaaccaaacacaagugcaaccagaccugucuagacagaauagcugcugguaccuuugaugcaggagaauuuucucuccccacuuuugauucacugaauauuacugcugcaucuuuaaaugacgauggauuggauaaucauacuauacugcuuuacuacucaacugcugccuccaguuuggcuguaacacugaugauagcuaucuuuguuguuuauauggucuccagagacaauguuucuugcuccaucugucuauaa

SEQ ID NO: 60109 - RNA, 1758 nt, Artificial Sequence; identical to SEQ ID NO: 58738
  derived and/or modified CDS sequence (wt) from hemagglutinin__InfluenzaB__AHL93917

SEQ ID NO: 60110 - RNA, 1758 nt, Artificial Sequence
  derived and/or modified CDS sequence (wt) from hemagglutinin__InfluenzaB__AHL93928
augaaggcaauaauuguacuacucaugguaguaacauccaaugcagaucgaaucugcacugggauaacaucgucaaacucaccacaugucgucaaaacugcuacucaaggggaggucaauguaacuggugugauaccacugacaacaacacccaccaaaucucauuuugcaaaucucaaaggaacagaaaccagagggaaacuaugcccaaaaugccccaacugcacagaucuggacguagccuugggcagaccaaaaugcacggggaaaauacccucggcaagaguuucaauacuccaugaagucagaccuguuacaucugggugcuuuccuauaaugcacgacagaacaaaaauuagacagcugccuaaucuucuccgaggauacgaacauaucagguuaucaacucauaacguuaucaaugcagaaaaugcaccaggaggacccuacaaaauuggaaccucagggucuugcccuaauguuaccaauggaaacggauuuuucgcaacaauggcuugggccgucccaaagaacgacaaaaacaaaacagcaacaaauccauuaacaauagaaguaccauacauuuguacagaaggagaagaccaaauuaccguuuggggguuccacucugauaacgagacccaaauggcaaagcucuauggggacucaaagccccagaaguucaccucaucugccaacggagugaccacacauuacguuucacagauugguggcuucccaaaucaaacagaagacggaggacuaccacaaagugguagaauuguuguugauuacauggugcaaaaaucugggaaaacaggaacaauuaccuaucaaagagguauuuuauugccucaaaagguguggugcgcaaguggcaggagcaagguaauaaaaggauccuugccuuuaauuggagaagcagauugccuccaugaaaaauacgguggauugaacaaaagcaagccuuacuacacaggggaacaugcaaaggccauaggaaauugcccaauaugggugaagacacccuugaagcuggccaauggaaccaaauauagaccuccugcaaaacuauuaaaggaaagggguuucuucggagcuauugcugguuucuuagaaggaggaugggaaggaaugauugcagguuggcacggauacacgucccauggggcacauggaguagcgguggcagcagaccuuaagagcacucaagaggccauaaacaagauaacaaaaaaucucaacucuuugagugagcuggaaguaaagaaucuucaaagacuaagcggugccauggaugaacuccacaacgaaauacuagaacuagacgagaaaguggaugaucucagagccgauacaauaagcucacaaauagaacucgcaguccugcuuuccaaugaaggaauaauaaacagugaagaugaacaucucuuggcgcuugaaagaaagcugaagaaaaugcugggccccucugcuguagagauagggaauggaugcuuugaaaccaaacacaagugcaaccagaccugucucgacagaauagcugcugguaccuuugaugcaggagaauuuucucuccccaccuuugauucacugaauauuacugcugcaucuuuaaaugaugauggauuggauaaucauacuauacugcuuuacuacucaacugcugccuccaguuuggcuguaacacugaugauagcuaucuuuguuguuuauauggucuccagagacaauguuucuugcuccaucugucuauaa

SEQ ID NO: 60111 - RNA, 1758 nt, Artificial Sequence; identical to SEQ ID NO: 60077
  derived and/or modified CDS sequence (wt) from hemagglutinin__InfluenzaB__AHL93939

SEQ ID NO: 60112 - RNA, 1758 nt, Artificial Sequence; identical to SEQ ID NO: 58738
  derived and/or modified CDS sequence (wt) from hemagglutinin__InfluenzaB__AHL93950

SEQ ID NO: 60113 - RNA, 1758 nt, Artificial Sequence; identical to SEQ ID NO: 60077
  derived and/or modified CDS sequence (wt) from hemagglutinin__InfluenzaB__AHL93961

SEQ ID NO: 60114 - RNA, 1758 nt, Artificial Sequence
  derived and/or modified CDS sequence (wt) from hemagglutinin__InfluenzaB__AHL93972
augaaggcaauaauuguacuacucaugguaguaacauccacugcagaucgaaucugcacugggauaacaucaucaaacucaccacaugucgucaaaacugcuacucaaggggaggucaaugugacugguguaauaccacugacaacaacacccaccaaaucucauuuugcaaaucucaaaggaacagaaaccagagggaaacuaugcccaaaaugccucaacugcacagaucuggacguagccuugggcagaccaaaaugcacggggaaaauacccucggcaagaguuucaauacuccaugaaguaagaccuguuacaucugggugcuuuccuauaaugcacgacagaacaaaaauuagacagcugccuaaccuucuccgaggauacgaacauaucagguuaucaacucauaacguuaucaaugcagaaaaugcaccaggaggacccuacaaaauuggaaccucagggucuugcccuaacguuaccaauggaaacggauuuuucgcaacaauggcuugggccgucccaaaaaacgacaaaaacaaaacagcaacaaauccauuaacaauagaaguaccauacauuuguacagaaggagaagaccaaauuaccguuuggggauuccacucugauaacgagacccaaauggcaaagcucuauggggacucaaagccccagaaguucaccucaucugccaacggagugaccacacauuacguuucacagauugguggcuucccaaaucaaacagaagacggaggacuaccacaaagugguagaauuguuguugauuacauggugcaaaaaucugggaaaacaggaacaauuaccuaucaaagagguauuuuauugccucaaaagguauggugcgcaaguggcaggagcaagguaauaaaaggauccuugccuuuaauuggagaagcagauugccuccacgaaaaauacgguggauuaaacaaaagcaagccuuacuacacaggggaacaugcaaaggccguaggaaauugcccaauaugggugaagacacccuugaagcuggccaauggaaccaaauauagaccuccugcaaaacuauuaaaggaaagggguuucuucggagcuauugcugguuucuuagaaggaggaugggaaggaaugauugcagguuggcacggauacacgucccauggggcacauggaguagcgguggcagcagaccuuaagagcacucaagaggccauaaacaagauaacaaaaaaucucaacucuuugagugagcuggaaguaaagaaucuucaaagacuaagcggugccauggaugaacuccacaaugaaauacuagaacuagacgagaaaguggaugaucucagagcugauacaauaagcucacaaauagaacucgcaguccuucuuuccaaugaaggaauaauaaacagugaagaugaacaucucuuggcgcuugaaagaaagcugaagaaaaugcugggccccucugcuguagagauagggaauggaugcuuugaaaccaaacacaagugcaaccagaccugucucgacagaauagcugcugguaccuuugaugcaggagaauuuucucuccccaccuuugauucacuaaauauuacugcugcaucuuuaaaugacgauggauuggauaaucauacuauacugcuuuacuacucaacugcugccuccaguuuggcuguaacacugaugauagcuaucuuuguuguuuauauggucuccagagacaauguuucuugcuccaucugucuauaa

SEQ ID NO: 60115 - RNA, 1758 nt, Artificial Sequence; identical to SEQ ID NO: 60088
  derived and/or modified CDS sequence (wt) from hemagglutinin__InfluenzaB__AHL93983

SEQ ID NO: 60116 - RNA, 1755 nt, Artificial Sequence
  derived and/or modified CDS sequence (wt) from hemagglutinin__InfluenzaB__AHL93994
augaaggcaauaauuguacuacucaugguaguaacauccaaugcagaucgaaucugcacugggauaacaucuucaaacucaccucauguggucaaaacagcuacucaaggggaggucaaugugacuggugugauaccacugacaacaacaccaaaaaaaucuuauuuugcaaaucucaaaggaacaaagaccagagggaaacuaugcccagacugucucaacuguacagaucuggauguggccuugggcaggccaaugugugugggaacuacaccuucugcgaaagcuucaauacuucacgaagucagaccuguuacauccgggugcuuuccuauaaugcacgacagaacaaaaaucaggcaacuagccaaucuucucagaggauaugaaaauaucagguuaucaacccaaaacguuaucgaugcagaaaaggcaccaggaggacccuacagacuuggaaccucaggaucuugcccuaacgcuaccaguaaaagcggauuuuucgcaacaauggcuugggcugucccaaaggacaacaacaaaaaugcaacgaacccauuaacaguagaaguaccauacauuugugcagaaggggaagaccaaauuacuguuuggggguuccauucagauaacaaaacccaaaugaagaaccucuauggagacucaaauccucaaaaguucaccucaucugcuaauggaguaaccacacauuauguuucucagauuggcggcuucccagaucaaacagaagacggaggacuaccacaaagcggcagaauugucguugauuacaugaugcaaaaaccugggaaaacaggaacaauugucuaucaaagagguguuuuguugccucaaaagguguggugcgcgaguggcaggagcaaaguaauaaaaggguccuuaccuuuaauuggugaagcagauugccuucaugaaaaauacgguggauuaaacaaaagcaagccuuacuacacaggagaacaugcaaaagccauaggaaauugcccaauaugggugaaaacaccuuugaagcuugccaauggaaccaaauauagaccuccugcaaaacuauuaaaggaaagggguuucuucggagcuauugcugguuuccuagaaggaggaugggaaggaaugauugcagguuggcacggauacacaucucacggagcacauggaguggcaguugcugcagaccuuaagagcacacaagaagcuauaaacaagauaacaaaaaaucucaacucuuugagugagcuagaaguaaagaaucuucaaagacuaaguggugccauggaugaacuccacaaugaaauacucgagcuggaugagaaaguggaugaucucagagcugacacuauaaguucacaaauagaacuugcagucuugcuuuccaacgaaggaauaauaaacagugaagacgagcaucuauuggcacuugagagaaaacuaaagaaaaugcugggucccucugcuguagacauaggaaauggaugcuucgaaaccaaacacaaaugcaaccagaccugcuuagacaggauagcugcuggcaccuuuaaugcaggagaguuuucucuccccacuuuugauucauugaacauuacugcugcaucuuuaaaugaugauggauuggauaaccauacuauacugcucuauuacucaacugcugcuucuaguuuggcuguaacauugaugcuagcuauuuuuauuguuuauaugaucuccagagacaacguuucaugcuccaucugucuauaa

SEQ ID NO: 60117 - RNA, 1758 nt, Artificial Sequence
  derived and/or modified CDS sequence (wt) from hemagglutinin__InfluenzaB__AHL94005
augaaggcaauaauuguacuacucaugguaguaacauccaaugcagaucgaaucugcacugggauaacaucgucaaacucaccacauaucgucaaaacugcuacucaaggggaggucaaugugacugguguaauaccacugacaacaacacccaccaaaucucauuuugcaaaucucaaaggaacagaaaccagggggaaacuaugcccaaaaugccucaacugcacagaucuggacguagccuugggcagaccaaaaugcacggggaaaauacccucggcaagaguuucaauacuccaugaagucagaccuguuacaucugggugcuuuccuauaaugcacgacagaacaaaaauuagacagcugccuaaccuucucagaggauacgaacauaucagguuaucaacucauaacguuaucaaugcagaaaaugcaccaggaggacccuacaaaauuggaaccucagggucuugcccuaacauuaccaauggaaacggauuuuucgcaacaauggcuugggccgucccaaaaaacgacaaaaacaaaacagcaacaaauccauuaacaauagaaguaccauacauuuguacagaaggagaagaccaaauuaccguuuggggguuccacucugacaaugaaacccaaauggcaaagcucuauggggacucaaagccccaaaaguucaccucaucugccaacggagugaccacacauuacguuucacagauugguggcuucccaaaucaaacagaagacggaggacuaccacaaagugguagaauuguuguugauuacauggugcaaaaaucugggaaaacaggaacaauuaccuaucaaagggguauuuuauugccucaaaagguguggugcgcaaguggcaggagcaagguaauaaaaggauccuugccuuuaauuggagaagcagauugccuccacgaaaaauacgguggauuaaacaaaagcaagccuuacuacacaggggaacaugcaaaggccauaggaaauugcccaauaugggugaaaacacccuugaagcuggccaauggaaccaaauauagaccuccugcaaaacuauuaaaggaaagggguuucuucggugcuauugcuggcuucuuagaaggaggaugggaaggaaugauugcagguuggcacggauacacaucccauggggcacauggaguagcgguggcagcagaccuuaagagcacucaagaggccauaaacaagauaacaaaaaaucucaacucuuugagugagcuggaaguaaagaaucuucaaagacuaagcggugccauggaugaacuccacaaugaaauacuagaauuagaugagaaaguagaugaucucagagcugauacaauaagcucacaaauagaacucgcaguccugcuuuccaaugaaggaauaauaaacagugaagaugaacaucucuuggcgcuugaaagaaagcugaagaaaaugcugggccccucugcuguagagauagggaauggaugcuuugaaaccaaacacaagugcaaccagaccugucucgacagaauagcugcugguaccuuugaugcaggagaauuuucucuccccacuuuugauucacugaauauuacugcugcaucuuuaaaugacgauggauuggauaaucauacuauacugcuuuacuacucaacugcugccuccaguuuggcuguaacacugaugauagcuaucuuuguuguuuauauggucuccagagacaauguuucuugcuccaucugucuauaa

SEQ ID NO: 60118 - RNA, 1758 nt, Artificial Sequence; identical to SEQ ID NO: 60080
  derived and/or modified CDS sequence (wt) from hemagglutinin__InfluenzaB__AHL94016

SEQ ID NO: 60119 - RNA, 1758 nt, Artificial Sequence
  derived and/or modified CDS sequence (wt) from hemagglutinin__InfluenzaB__AHL94027
augaaggcaauaauuguacuacucaugguaguaacauccaaugcagaucgaaucugcacugggauaacaucgucaaacucaccacauaucgucaaaacugcuacucaaggggaggucaaugugacugguguaauaccacugacaacaacacccaccaaaucucauuuugcaaaucucaaaggaacagaaaccagggggaaacuaugcccaaaaugccucaacugcacagaucuggacguagccuugggcagaccaaaaugcacggggaaaauacccucggcaagaguuucaauacuccaugaagucagaccuguuacaucugggugcuuuccuauaaugcacgacagaacaaaaauuagacagcugccuaaccuucucagaggauacgaacauaucagguuaucaacucauaacguuaucaaugcagaaaaugcaccaggaggacccuacaaaauuggaaccucagggucuugcccuaacauuaccaauggaaacggauuuuucgcaacaauggcuugggccgucccaaaaaacgacaaaaacaaaacagcaacaaauccauuaacaauagaaguaccauacauuuguacagaaggagaagaccaaauuaccguuuggggguuccacucugacaaugaaacccaaauggcaaagcucuauggggacucaaagccccagaaguucaccucaucugccaacggagugaccacacauuacguuucacagauugguggcuucccaaaucaaacagaagacggaggacuaccacaaagugguagaauuguuguugauuacauggugcaaaaaucugggaaaacaggaacaauuaccuaucaaauggguguuuuauugccucaaaagguguggugcgcaaguggcaggagcaagguaauaaaaggauccuugccuuuaauuggagaagcagauugccuccacgaaaaauacgguggauuaaacaaaagcaagccuuacuacacaggggaacaugcaaaggccauaggaaauugcccaauaugggugaaaacacccuugaagcuggccaauggaaccaaauauagaccuccugcaaaacuauuaaaggaaagggguuucuucggugcuauugcuggcuucuuagaaggaggaugggaaggaaugauugcagguuggcacggauacacaucccauggggcacauggaguagcgguggcagcagaccuuaagagcacucaagaggccauaaacaagauaacaaaaaaucucaacucuuugagugagcuggaaguaaagaaucuucaaagacuaagcggugccauggaugaacuccacaaugaaauacuagaauuagaugagaaaguggaugaucucagagcugauacaauaagcucacaaauagaacucgcaguccugcuuuccaaugaaggaauaauaaacagugaagaugaacaucucuuggcgcuugaaagaaagcugaagaaaaugcugggccccucugcuguagagauagggaauggaugcuuugaaaccaaacacaagugcaaccagaccugucucgacagaauagcugcugguaccuuugaugcaggagaauuuucucuccccacuuuugauucacugaauauuacugcugcaucuuuaaaugacgauggauuggauaaucauacuauacugcuuuacuacucaacugcugccuccaguuuggcuguaacacugaugauagcuaucuuuguuguuuauauggucuccagagacaauguuucuugcuccaucugucuauaa

SEQ ID NO: 60120 - RNA, 1758 nt, Artificial Sequence; identical to SEQ ID NO: 60077
  derived and/or modified CDS sequence (wt) from hemagglutinin__InfluenzaB__AHL94038

SEQ ID NO: 60121 - RNA, 1758 nt, Artificial Sequence
  derived and/or modified CDS sequence (wt) from hemagglutinin__InfluenzaB__AHL94049
augaaggcaauaauuguacuacucaugguaguaacauccaaugcagaucgaaucugcacugggauaacaucgucaaacucaccacaugucgucaaaacugcuacucaaggggaggucaaugugacugguguaauaccacugacaacaacacccaccaaaucucauuuugcaaaucucaaaggaacagaaaccagagggaaacuaugcccaaaaugccccaacugcacagaucuggacguagccuugggcagaccaaaaugcacggggaaaauacccucggcaagaguuucaauacuccaugaagucagaccuguuacaucugggugcuuuccuauaaugcacgacagaacaaaaauuagacagcugccuaaccuucucagaggauacgaacauaucagauuaucaacucauaacguuaucaaugcagaaaaugcaccaggaggacccuacaaaauuggaaccucagggucuugcccuaacguuaccaauggaaacggauuuuuugcaacaauggcuugggccgucccaaaaaacgacaaaaacaaaacagcaacaaauccauuaacaauagaaguaccauacauuuguacagaaggagaagaccaaauuaccguuuggggguuccacucugauaacgagacccaaauggcaaagcucuauggggacucaaagccccagaaguucaccucaucugccaacggagugaccacacauuacguuucacagauugguggcuucccaaaucaaacagaagacggaggacuaccacaaagugguagaauuguuguugauuacauggugcaaaaaucugggaaaacaggaacaauuaccuaucaaagagguauuuuauugccucaaaagguguggugcgcaaguggcaggagcaagguaauaaaaggauccuugccuuuaauuggagaagcagauugccuccacgaaaaauacgguggauuaaacaaaagcaagccuuacuacacaggggaacaugcaaaggccauaggaaauugcccaauaugggugaagacacccuugaagcuggccaauggaaccaaauauagaccuccugcaaaacuauuaaaggaaagggguuucuucggagcuauugcugguuucuuagaaggaggaugggaaggaaugauugcagguuggcacggauacacgucccauggggcacauggaguagcgguggcagcagaccuuaagagcacucaagaggccauaaacaagauaacaaaaaaucucaacucuuugagugagcuggaaguaaagaaucuucaaagacuaagcggugccauggaugaacuccacaacgaaauacuagaacuagacgaaaaaguggaugaucucagagcugauacaauaagcucacaaauagaacucgcaguucugcuuuccaaugaaggaauaauaaacagugaagaugaacaucucuuggcgcuugaaagaaagcugaagaaaaugcugggcccuucugcuguagagauagggaauggaugcuuugaaaccaaacacaagugcaaccagaccugucucgacagaauagcugcugguaccuuugaugcaggagaauuuucucuccccaccuuugauucacugaauauuacugcugcaucuuuaaaugacgauggauuggauaaucauaccauacugcuuuacuacucaacugcugccuccaguuuggcuguaacacugaugauagcuaucuuuguuguuuauauggucuccagagacaauguuucuugcuccaucugucuauaa

SEQ ID NO: 60122 - RNA, 1758 nt, Artificial Sequence
  derived and/or modified CDS sequence (wt) from hemagglutinin__InfluenzaB__AHL94060
augaaggcaauaauuguacuacucaugguaguaacauccaaugcagaucgaaucugcacugggauaacaucgucaaacucaccacauaucgucaaaacugcuacucaaggggaggucaaugugacugguguaauaccacugacaacaacacccaccaaaucucauuuugcaaaucucaaaggaacagaaaccagggggaaacuaugcccaaaaugccucaacugcacagaucuggacguagccuugggcagaccaaaaugcacggggaaaauacccucggcaagaguuucaauacuccaugaagucagaccuguuacaucugggugcuuuccuauaaugcacgacagaacaaaaauuagacagcugccuaaccuucucagaggauacgaacauaucagguuaucaacucauaacguuaucaaugcagaaaaugcaccaggaggacccuacaaaauuggaaccucagggucuugcccuaacauuaccaauggaaacggauuuuucgcaacaauggcuugggccgucccaaaaaacgacaaaaacaaaacagcaacaaauccauuaacaauagaaguaccauacauuuguacagaaggagaagaccaaauuaccguuuggggguuccacucugacaaugaaacccaaauggcaaagcucuauggggacucaaagccccagaaguucaccucaucugccaacggagugaccacacauuacguuucacagauugguggcuucccaaaucaaacagaagacggaggacuaccacaaagugguagaauuguuguugauuacauggugcaaaaaucugggaaaacaggaacaauuaccuaucaaagggguauuuuauugccucaaaagguguggugcgcaaguggcaggagcaagguaauaaaaggauccuugccuuuaauuggagaagcagauugccuccacgaaaaauacgguggauuaaacaaaagcaagccuuacuacacaggggaacaugcaaaggccauaggaaauugcccaauaugggugaaaacacccuugaagcuggccaauggaaccaaauauagaccuccugcaaaacuauuaaaggaaagggguuucuucggugcuauugcuggcuucuuagaaggaggaugggaaggaaugauugcagguuggcacggauacacaucccauggggcacauggaguagcgguggcagcagaccuuaagagcacucaagaggccauaaacaagauaacaaaaaaucucaacucuuugagugagcuggaaguaaagaaucuucaaagacuaagcggugccauggaugaacuccacaaugaaauacuagaauuagaugagaaaguggaugaucucagagcugauacaauaagcucacaaauagaacuugcaguccugcuuuccaaugaaggaauaauaaacagugaagaugaacaucucuuggcgcuugaaagaaagcugaagaaaaugcugggccccucugcuguagagauagggaauggaugcuuugaaaccaaacacaagugcaaccagaccugucucgacagaauagcugcugguaccuuugaugcaggagaauuuucucuccccacuuuugauucacugaauauuacugcugcaucuuuaaaugacgauggguuggauaaucauacuauacugcuuuacuacucaacugcugccuccaguuuggcuguaacacugaugauagcuaucuuuguuguuuauauggucuccagagacaauguuucuugcuccaucugucuauaa

SEQ ID NO: 60123 - RNA, 1758 nt, Artificial Sequence
  derived and/or modified CDS sequence (wt) from hemagglutinin__InfluenzaB__AHL94071
augaaggcaauaauuguacuacucaugguaguaacauccaaugcagaucgaaucugcacugggauaacaucgucaaacucaccacauaucgucaaaacugcuacucaaggggaggucaaugugacugguguaauaccacugacaacaacacccaccaaaucucauuuugcaaaucucaaaggaacagaaaccagggggaaacuaugcccaaaaugccucaacugcacagaucuggacguagccuugggcagaccaaaaugcacggggaaaauacccucggcaagaguuucaauacuccaugaagucagaccuguuacaucugggugcuuuccuauaaugcacgacagaacaaaaauuagacagcugccuaaccuucucagaggauacgaacauaucagauuaucaacucauaacguuaucaaugcagaaaaugcaccaggaggacccuacaaaauuggaaccucagggucuugcccuaacauuaccaauggaaacggauuuuucgcaacaauggcuugggccgucccaaaaaacgacaaaaacaaaacagcaacaaauccauuaacaauagaaguaccauacauuuguacagaaggagaagaccaaauuaccguuuggggguuccacucugacaaugaaacccaaauggcaaagcucuauggggacucaaagccccagaaguucaccucaucugccaacggagugaccacacauuacguuucacagauugguggcuucccaaaucaaacagaagacggaggacuaccacaaagugguagaauuguuguugauuacaugaugcaaaaaucugggaaaacaggaacaauuaccuaucaaagggguauuuuauugccucaaaagguguggugcgcaaguggcaggagcaagguaauaaaaggauccuugccuuuaauuggagaagcagauugccuccacgaaaaauacgguggauuaaacaaaagcaagccuuacuacacaggggaacaugcaaaggccauaggaaauugcccaauaugggugaaaacacccuugaagcuggccaauggaaccaaauauagaccuccugcaaaacuauuaaaggaaagggguuucuucggugcuauugcuggcuucuuagaaggaggaugggaaggaaugauugcagguuggcacggauacacaucccauggggcacauggaguagcgguggcagcagaccuuaagagcacucaagaggccauaagcaagauaacaaaaaaucucaacucuuugagugagcuggaaguaaagaaucuucaaagacuaagcggugccauggaugaacuccacaaugaaauacuagaauuagaugagaaaguggaugaucucagagcugauacaauaagcucacaaauagaacucgcaguccugcuuuccaaugaaggaauaauaaacagugaagaugaacaucucuuggcgcuugaaagaaagcugaagaaaaugcugggccccucugcuguagagauagggaauggaugcuuugaaaccaaacacaagugcaaccagaccugucucgacagaauagcugcugguaccuuugaugcaggagaauuuucucuccccacuuuugauucacugaauauuacugcugcaucuuuaaaugacgauggauuggauaaucauacuauacugcuuuacuacucaacugcugccuccaguuuggcuguaacacugaugauagcuaucuuuguuguuuauauggucuccagagacaauguuucuugcuccaucugucuauaa

SEQ ID NO: 60124 - RNA, 1755 nt, Artificial Sequence
  derived and/or modified CDS sequence (wt) from hemagglutinin__InfluenzaB__AHL94082
augaaggcaauaauuguacuacucaugguaguaacauccaaugcagaucgaaucugcacugggauaacaucuucaaacucaccucauguggucaaaacagcuacucaaggggaggucaaugugacuggcgugauaccacugacaacaacaccaacaaaaucauauuuugcaaaucucaaaggaacaaggaccagagggaaacuaugcccggacugucucaacuguacagaucuggauguggccuugggcaggccaauguguguggggaccacaccuucugcuaaagcuucaauacuccacgaaaucagaccuguuacaucugggugcuuuccuauaaugcacgacagaacaaaaaucaggcaacuacccaaucuucucagaggauaugaaaauaucagguuaucaacccaaaacguuaucgaugcagaaaaagcaccaggaggacccuacagacuugggaccucaggaucuugcccuaacgcuaccaguaaaaucggauuuuuugcaacaauggcuugggcugucccaaaggacaacuacaaaaaugcaacgaacccacuaacaguagaaguaccauacauuuguacagaaggggaagaccaaauuacuguuuggggguuccauucagauaacaaaacccaaaugaagaaccucuacggagacucaaauccucaaaaguucaccucaucugcuaauggaguaaccacacauuauguuucucagauuggcgacuucccagaucaaacagaagacggaggacuaccacaaagcggcagaauuguuguugauuacaugaugcaaaagccugggaaaacaggaacaauugucuaucaaagagguguuuuguugccucaaaagguguggugcgcgaguggcaggagcaaaguaauaaaagggucauugccuuuaauuggugaagcagauugccuucaugaaaaauacgguggauuaaacaaaagcaagccuuacuacacaggagaacaugcaaaagccauaggaaauugcccaauauggguaaaaacaccucugaagcuugccaauggaaccaaauauagaccuccugcaaaacuauuaaaggaaagggguuucuucggagcuauugcugguuuccuagaaggaggaugggaaggaaugauugcagguuggcacggauacacaucucacggagcacauggaguggcaguggcggcagaccuuaagaguacacaggaagcuauaaauaagauaacaaaaaaucucaauucuuugagugagcuagaaguaaagaaccuucaaagacuaaguggugccauggaugaacuccacaacgaaauacucgagcuggaugagaaaguggaugaucucagagcugacacuauaagcucacaaauagaacuugcagucuugcuuuccaacgaaggaauaauaaacagugaagacgagcaucuauuggcacuugagagaaaacuaaagaaaaugcugggucccucugcuguagacauaggaaauggaugcuucgaaaccaaacauaaaugcaaccagaccugcuuagacaggauagcugcuggcaccuuuaaugcaggagaauuuucucuccccacuuuugauucauugaacauuacugcugcaucuuuaaaugaugauggauuggauaaccacacuauacugcucuauuacucaacugcugcuucuaguuuggcuguaacauuaaugcuagcuauuuuuauuguuuauauggucuccagagacaacguuucaugcuccaucugucuauaa

SEQ ID NO: 60125 - RNA, 1758 nt, Artificial Sequence; identical to SEQ ID NO: 60077
  derived and/or modified CDS sequence (wt) from hemagglutinin__InfluenzaB__AHL94093

SEQ ID NO: 60126 - RNA, 1758 nt, Artificial Sequence
  derived and/or modified CDS sequence (wt) from hemagglutinin__InfluenzaB__AHL94102
augaaggcaauaauuguacuacucaugguaguaacauccaaugcagaucgaaucugcacugggauaacaucgucaaacucaccacauaucgucaaaacugcuacucaaggggaggucaaugugacugguguaauaccacugacaacaacacccaccaaaucucauuuugcaaaucucaaaggaacagaaaccagggggaaacuaugcccaaaaugccucaacugcacagaucuggacguagccuuggguagaccaaaaugcacggggaaaauacccucggcaagaguuucaauacuccaugaagucagaccuguuacaucugggugcuuuccuauaaugcacgacagaacaaaaauuagacagcugccuaaccuucucagaggauacgaacauaucagguuaucaacucauaacguuaucaaugcagaaaaugcaccaggaggacccuacaaaauuggaaccucagggucuugcccuaacauuaccaauggaaacggauuuuucgcaacaauggcuugggccgucccaaaaaacgacaaaaacaaaacagcaacaaauccauuaacaauagaaguaccauacauuuguacagaaggagaagaccaaauuaccguuuggggguuccacucugacaaugaaacccaaauggcaaagcucuauggggacucaaagccccagaaguucaccucaucugccaacggagugaccacacauuacguuucacagauugguggcuucccaaaucaaacagaagacggaggacuaccacaaagugguagaauuguuguugauuacauggugcaaaaaucugggaaaacaggaacaauuaccuaucaaagggguauuuuauugccucaaaagguguggugcgcaaguggcaggagcaagguaauaaaaggauccuugccuuuaauuggagaagcagauugccuccacgaaaaauacgguggauuaaacaaaagcaagccuuacuacacaggggaacaugcaaaggccauaggaaauugcccaauaugggugaaaacacccuugaagcuggccaauggaaccaaauauagaccuccugcaaaacuauuaaaggaaagggguuucuucggugcuauugcuggcuucuuagaaggaggaugggaaggaaugauugcagguuggcacggauacacaucccauggggcacauggaguagcgguggcagcagaccuuaagagcacucaagaggccauaaacaagauaacaaaaaaucucaacucuuugagugagcuggaaguaaagaaucuucaaagacuaagcggugccauggaugaacuccacaaugaaauacuagaauuagaugagaaaguggaugaucucagagcugauacaauaagcucacaaauagaacucgcaguccugcuuuccaaugaaggaauaauaaacagugaagaugaacaucucuuggcgcuugaaagaaagcugaagaaaaugcugggccccucugcuguagagauagggaauggaugcuuugaaaccaaacacaagugcaaccagaccugucucgacagaauagcugcugguaccuuugaugcaggagaauuuucucuccccacuuuugauucacugaauauuacugcugcaucuuuaaaugacgauggauuggauaaucauacuauacugcuuuacuacucaacugcugccuccaguuuagcuguaacacugaugauagcuaucuuuguuguuuauauggucuccagagacaauguuucuugcuccaucugucuauaa

SEQ ID NO: 60127 - RNA, 1758 nt, Artificial Sequence
  derived and/or modified CDS sequence (wt) from hemagglutinin__InfluenzaB__AHL94113
augaaggcaauaauuguacuacucaugguaguaacauccaaugcagaucgaaucugcacugggauaacaucgucaaacucaccacauaucgucaaaacugcuacucaaggggaggucaaugugacugguguaauaccacugacaacaacacccaccaaaucucauuuugcaaaucucaaaggaacagaaaccagggggaaacuaugcccaaaaugccucaacugcacagaucuggacguagccuugggcagaccaaaaugcacggggaaaauacccucggcaagaguuucaauacuccaugaagucagaccuguuacaucugggugcuuuccuauaaugcacgacagaacaaaaauuagacagcugccuaaccuucucagaggauacgaacauaucagguuaucaacucauaacguuaucaaugcagaaaaugcaccaggaggacccuacaaaauuggaaccucagggucuugccuuaacauuaccaauggaaacggauuuuucgcaacaauggcuugggccgucccaaaaaacgacaaaaacaaaacagcaacaaauccauuaacaauagaaguaccauacauuuguacagaaggagaagaccaaauuaccguuuggggguuccacucugacaaugaaacccaaauggcaaagcucuauggggacucaaagccccagaaguucaccucaucugccaacggagugaccacacauuacguuucacagauugguggcuucccaaaucaaacagaagacggaggacuaccacaaagugguagaauuguuguugauuacauggugcaaaaaucugggaaaacaggaacaauuaccuaucaaagggguauuuuauugccucaaaagguguggugcgcaaguggcaggagcaagguaauaaaaggauccuugccuuuaauuggagaagcagauugccuccacgaaaaauacgguggauuaaacaaaagcaagccuuacuacacaggggaacaugcaaaggccauaggaaauugcccaauaugggugaaaacacccuugaagcuggccaauggaaccaaauauagaccuccugcaaaacuauuaaaggaaagggguuucuucggugcuauugcuggcuucuuagaaggaggaugggaaggaaugauugcagguuggcacggauacacaucccauggggcacauggaguagcgguggcagcagaccuuaagagcacucaagaggccauaaacaagauaacaaaaaaucucaacucuuugagugagcuggaaguaaagaaucuucaaagacuaagcggugccauggaugaacuccacaaugaaauacuagaauuagaugagaaaguggaugaucucagagcugauacaauaagcucacaaauagaacucgcaguccugcuuuccaaugaaggaauaauaaacagugaagaugaacaucucuuggcgcuugaaagaaagcugaagaaaaugcugggccccucugcuguagagauagggaauggaugcuuugaaaccaaacacaagugcaaccagaccugucucgacagaauagcugcugguaccuuugaugcaggagaauuuucucuccccacuuuugauucacugaauauuacugcugcaucuuuaaaugacgauggauuggauaaucauacuauacugcuuuacuacucaacugcugccuccaguuuggcuguaacacugaugauagcuaucuuuguuguuuauauggucuccagagacaauguuucuugcuccaucugucuauaa

SEQ ID NO: 60128 - RNA, 1758 nt, Artificial Sequence
  derived and/or modified CDS sequence (wt) from hemagglutinin__InfluenzaB__AHL94124
augaaggcaauaauuguacuacucaugguaguaacauccaaugcagaucgaaucugcacugggauaacaucgucaaacucaccacauaucgucaaaacugcuacucaaggggaggucaaugugacugguguaauaccacugacaacaacacccacaaaaucucauuuugcaaaucucaaaggaacagaaaccagggggaaacuaugcccaaaaugccucaacugcacagaucuggacguagccuugggcagaccaaaaugcacggggaaaauacccucggcaagaguuucaauacuccaugaaaucagaccuguuacaucugggugcuuuccuauaaugcacgacagaacaaaaauuagacagcugccuaaccuucucagaggauacgaacauaucagguuaucaacucauaacguuaucaaugcagaaaaugcaccaggagggcccuacaaaauuggaaccucagggucuugcccuaacauuaccaauggaaacggauuuuucgcaacaauggcuugggccgucccaaaaaacgacaaaaacaaaacagcaacaaauccauuaacaauagaaguaccauacauuuguacagaaggagaagaccaaauuaccguuuggggguuccacucugacaaugaaacccaaauggcaaagcucuauggggacucaaagccccagaaguucaccucaucugccaacggagugaccacacauuacguuucacagauugguggcuucccaaaucaaacagaagacggaggacuaccacaaagugguagaauuguuguugauuacauggugcaaaaaucugggaaaacaggaacaauuaccuaucaaagggguauuuuauugccucaaaagguguggugcgcaaguggcaggagcaagguaauaaaaggauccuugccuuuaauuggagaagcagauugccuccacgaaaaauacgguggauuaaacaaaagcaagccuuacuacacaggggaacaugcaaaggccauaggaaauugcccaauaugggugaaaacacccuugaagcuggccaauggaaccaaauauagaccuccugcaaaacuauuaaaggaaagggguuucuucggugcuauugcuggcuucuuagaaggaggaugggaaggaaugauugcagguuggcacggauacacaucccauggggcacauggaguagcgguggcagcagaccuuaagagcacucaagaggccauaaacaagauaacaaaaaaucucaacucuuugagugagcuggaaguaaagaaucuucaaagacuaagcggugccauggaugaacuccacaaugaaauacuagaauuagaugagaaaguggaugaucucagagcugauacaauaagcucacaaauagaacucgcaguccugcuuuccaaugaaggaauaauaaacagugaagaugaacaucucuuggcgcuugaaagaaagcugaagaaaaugcugggccccucugcuguagagauagggaauggaugcuuugaaaccaaacacaagugcaaccagaccugucucgacagaauagcugcugguaccuuugaugcaggagaauuuucucuccccacuuuugauucacugaauauuacugcugcaucuuuaaaugacgauggauuggauaaucauacuauacugcuuuacuacucaacugcugccuccaguuuggcuguaacacugaugauagcuaucuuuguuguuuauauggucuccagagacaauguuucuugcuccaucugucuauaa

SEQ ID NO: 60129 - RNA, 1758 nt, Artificial Sequence
  derived and/or modified CDS sequence (wt) from hemagglutinin__InfluenzaB__AHL94135
augaaggcaauaauuguacuacucaugguaguaacauccaaugcagaucgaaucugcacugggauaacaucgucaaacucaccacaugucgucaaaacugcuacucaaggggaggucaaugugacugguguaauaccacugacaacaacacccaccaaaucucauuuugcaaaucucaaaggaacagaaaccagagggaaacuaugcccaaaaugccccaacugcacagaucuggacguagccuugggcagaccaaaaugcacggggaaaauacccucggcaagaguuucaauacuccaugaagucagaccuguuacaucugggugcuuuccuauaaugcacgacagaacaaaaauuagacagcugccuaaccuucucagaggauacgaacauaucagauuaucaacucauaacguuaucaaugcagaaaaugcaccaggaggacccuacaaaauuggaaccucagggucuugcccuaacguuaccaauggaaacggauuuuuugcaacaauggcuugggccgucccaaaaaacgacaaaaacaaaacagcaacaaauccauuaacaauagaaguaccauacauuuguacagaaggagaagaccaaauuaccguuuggggguuccacucugauaacgagacccaaauggcaaagcucuauggggacucaaagccccagaaguucaccucaucugccaacggagugaccacacauuacguuucacagauugguggcuucccaaaucaaacagaagacggaggacuaccacaaagugguagaauuguuguugauuacauggugcaaaaaucugggaaaacaggaacaauuaccuaucaaagagguauuuuauugccucaaaagguguggugcgcaaguggcaggagcaagguaauaaaaggauccuugccuuuaauuggagaagcagauugccuccacgaaaaauacgguggauuaaacaaaagcaagccuuacuacacaggggaacaugcaaaggccauaggaaauugcccaauaugggugaagacacccuugaagcuggccaauggaaccaaauauagaccuccugcaaaacuauuaaaggaaagggguuucuucggagcuauugcugguuucuuagaaggaggaugggaaggaaugauugcagguuggcacggauacacgucccauggggcacauggaguagcgguggcagcagaccuuaagagcacucaagaggccauaaacaagauaacaaaaaaucucaacucuuugagugagcuggaaguaaagaaucuucaaagacuaagcggugccauggaugaacuccacaacgaaauacuagaacuagacgaaaaaguggaugaucucagagcugauacaauaagcucacaaauagaacucgcaguccugcuuuccaaugaaggaauaauaaacagugaagaugaacaucucuuggcgcuugaaagaaagcugaagaaaaugcugggcccuucugcuguagagauagggaauggaugcuuugaaaccaaacacaagugcaaccagaccugucucgacagaauagcugcugguaccuuugaugcaggagaauuuucucuccccaccuuugauucacugaauauuacugcugcaucuuuaaaugaugauggauuagauaaucauaccauacugcuuuacuacucaacugcugccuccaguuuggcuguaacacugaugauagcuaucuuuguuguuuauauggucuccagagacaauguuucuugcuccaucugucuauaa

SEQ ID NO: 60130 - RNA, 1758 nt, Artificial Sequence
  derived and/or modified CDS sequence (wt) from hemagglutinin__InfluenzaB__AHL94146
augaaggcaauaauuguacuacucaugguaguaacauccaaugcagaucgaaucugcacugggauaacaucgucaaacucaccacaugucgucaaaacugcuacucaaggggaggucaaugugacugguguaauaccacugacaacaacacccaccaaaucucauuuugcaaaucucaaaggaacagaaaccagagggaaacuaugcccaaaaugccccaacugcacagaucuggacguagccuugggcagaccaaaaugcacggggaaaauacccucggcaagaguuucaauacuccaugaagucagaccuguuacaucugggugcuuuccuauaaugcacgacagaacaaaaauuagacagcugccuaaccuucuccgaggauacgaacauaucagauuaucaacucauaacguuaucaaugcagaaaaugcaccaggaggacccuacaaaauuggaaccucagggucuugcccuaacguuaccaauggaaacggauuuuucgcaacaauggcuugggccgucccaaaaaacgacaaaaacaaaacagcaacaaauccauuaacaauagaaguaccauacauuuguacagaaggagaagaccaaauuaccguuuggggguuccacucugauaacgagacccaaauggcaaagcucuauggggacucaaagccccagaaguucaccucaucagccaacggagugaccacacauuacguuucacagauugguggcuucccaaaucaaacagaagacggaggacuaccacaaagugguagaauuguuguugauuacauggugcaaaaaucugggaaaacaggaacaauuaccuaucaaagagguauuuuauugccucaaaagguguggugcgcaaguggcaggagcaagguaauaaaaggauccuugccuuuaauuggagaagcagauugccuccacgaaaaauacgguggauuaaacaaaagcaagccuuacuacacaggagaacaugcaaaggccauaggaaauugcccaauaugggugaagacacccuugaagcuggccaauggaaccaaauauagaccuccugcaaaacuauuaaaggaaagggguuucuucggagcuauugcugguuucuuagaaggaggaugggaaggaaugauugcagguuggcacggauacacgucccauggggcacauggaguagcgguggcagcagaccuuaagagcacucaagaggccauaaacaagauaacaaaaaaucucaacucuuugagugagcuggaaguaaagaaucuucaaagacuaaguggugccauggaugaacuccacaacgaaauacuagaacuagacgagaaaguggaugaucucagagcugauacaauaagcucacaaauagaacucgcaguccugcuuuccaaugaaggaauaauaaacagugaagaugaacaucucuuggcacuugaaagaaagcugaagaaaaugcugggcccuucugcuguagagauagggaauggaugcuuugaaaccaaacacaagugcaaccagaccugucucgacagaauagcugcugguaccuuugaugcaggagaauuuucucuccccaccuuugauucacugaauauuacugcugcaucuuuaaaugacgauggauuggauaaucauaccauacugcuuuacuacucaacugcugccuccaguuuggcuguaacacugaugauagcuaucuuuguuguuuauauggucuccagagacaauguuucuugcuccaucugucuauaa

SEQ ID NO: 60131 - RNA, 1758 nt, Artificial Sequence; identical to SEQ ID NO: 60080
  derived and/or modified CDS sequence (wt) from hemagglutinin__InfluenzaB__AHL94157

SEQ ID NO: 60132 - RNA, 1758 nt, Artificial Sequence
  derived and/or modified CDS sequence (wt) from hemagglutinin__InfluenzaB__AHL94168
augaaggcaauaauuguacuacucaugguaguaacauccaaugcagaucgaaucugcacugggauaacaucgucaaacucaccacauaucgucaaaacugcuacucaaggggaggucaaugugacugguguaauaccacugacaacaacacccaccaaaucucauuuugcaaaucucaaaggaacagaaaccagggggaaacuaugcccaaaaugccucaacugcacagaucuggacguagccuugggcagaccaaaaugcacggggaaaauacccucggcaagaguuucaauacuccaugaagucagaccuguuacaucugggugcuuuccuauaaugcacgacagaacaaaaauuagacagcugccuaaccuucucagaggauacgaacauaucagguuaucaacucauaacguuaucaaugcagaaaaugcaccaggaggacccuacaaaauuggaaccucagggucuugcccuaacauuaccaauggaaacggauuuuucgcaacaauggcuugggccgucccaaaaaacgacaaaaacaaaacagcaacaaauccauuaacaauagaaguaccauacauuuguacagaaggagaagaccaaauuaccguuuggggguuccacucugacaaugaaacccaaauggcaaagcucuauggggacucaaagccccagaaguucaccucaucugccaacggagugaccacacauuacguuucacagauugguggcuucccaaaucaaacagaagacggaggacuaccacaaagugguagaauuguuguugauuacaugguccaaaaaucugggaaaacaggaacaauuaccuaucaaagggguauuuuauugccucaaaagguguggugcgcaaguggcaggagcaagguaauaaaaggauccuugccuuuaauuggagaagcagauugccuccacgaaaaauacgguggauuaaacaaaagcaagccuuacuacacaggggaacaugcaaaggccauaggaaauugcccaauaugggugaaaacacccuugaagcuggccaauggaaccaaauauagaccuccugcaaaacuauuaaaggaaagggguuucuucggugcuauugcuggcuucuuagaaggaggaugggaaggaaugauugcagguuggcacggauacacaucccauggggcacauggaguagcgguggcagcagaccuuaagagcacucaagaggccauaaacaagauaacaaaaaaucucaacucuuugagugagcuggaaguaaagaaucuucaaagacuaagcggugccauggaugaacuccacaaugaaauacuagaauuagaugagaaaguggaugaucucagagcugauacaauaagcucacaaauagaacucgcaguccugcuuuccaaugaaggaauaauaaacagugaagaugaacaucucuuggcgcuugaaagaaagcugaagaaaaugcugggccccucugcuguagagauagggaauggaugcuuugaaaccaaacacaagugcaaccagaccugucucgacagaauagcugcugguaccuuugaugcaggagaauuuucucuccccacuuuugauucacugaauauuacugcugcaucuuuaaaugacgauggauuggauaaucauacuauacugcuuuacuacucaacugcugccuccaguuuggcuguaacacugaugauagcuaucuuuguuguuuauauggucuccagagacaauguuucuugcuccaucugucuauaa

SEQ ID NO: 60133 - RNA, 1758 nt, Artificial Sequence
  derived and/or modified CDS sequence (wt) from hemagglutinin__InfluenzaB__AHL94179
augaaggcaauaauuguacuacucaugguaguaacauccaaugcagaucgaaucugcacugggauaacaucgucaaacucaccacaugucgucaaaacugcuacucaaggggaggucaaugugacuggcguaauaccacugacaacaacacccaccaaaucucauuuugcaaaucucaaaggaacagaaaccagagggaaacuaugcccaaaaugccccaacugcacagaucuggacguagccuugggcagaccaaaaugcacggggaaaauacccucggcaagaguuucaauacuccaugaagucagaccuguuacaucugggugcuuuccuauaaugcacgacagaacaaaaauuagacagcugccuaaccuucuccgaggauacgaacauaucagauuaucaacucauaacguuaucaaugcagaaaaugcaccaggaggacccuacaaaauuggaaccucagggucuugcccuaacguuaccaauggaaacggauuuuucgcaacaauggcuugggccgucccaaaaaacgacaaaaacaaaacagcaacaaauccauuaacaauagaaguaccauacauuuguacagaaggagaagaccaaauuaccguuuggggguuccacucugauaacgagacccaaauggcaaagcucuauggggacucaaagccccagaaguucaccucaucagccaacggagugaccacacauuacguuucacagauugguggcuucccaaaucaaacagaagacggaggacuaccacaaagugguagaauuguuguugauuacauggugcaaaaaucugggaaaacaggaacaauuaccuaucaaagagguauuuuauugccucaaaagguguggugcgcaaguggcaggagcaagguaauaaaaggauccuugccuuuaauuggagaagcagauugccuccacgaaaaauacgguggauuaaacaaaagcaagccuuacuacacaggggaacaugcaaaggccauaggaaauugcccaauaugggugaagacacccuugaagcuggccaauggaaccaaauauagaccuccugcaaaacuauuaaaggaaagggguuucuucggagcuauugcugguuucuuagaaggaggaugggaaggaaugauugcagguuggcacggauacacgucccauggggcacauggaguagcgguggcagcagaccuuaagagcacucaagaggccauaaacaagauaacaaaaaaucucaacucuuugagugagcuggaaguaaagaaucuucaaagacuaaguggugccauggaugaacuccacaacgaaauacuagaacuagacgagaaaguggaugaucucagagcugauacaauaagcucacaaauagaacucgcaguccugcuuuccaaugaaggaauaauaaacagugaagaugaacaucucuuggcacuugaaagaaagcugaagaaaaugcugggcccuucugcuguagagauagggaauggaugcuuugaaaccaaacacaagugcaaccagaccugucucgacagaauagcugcugguaccuuugaugcaggagaauuuucucuccccaccuuugauucacugaauauuacugcugcaucuuuaaaugacgauggauuggauaaucauaccauacugcuuuacuacucaacugcugccuccaguuuggcuguaacacugaugauagcuaucuuuguuguuuauauggucuccagagacaauguuucuugcuccaucugucuauaa

SEQ ID NO: 60134 - RNA, 1758 nt, Artificial Sequence
  derived and/or modified CDS sequence (wt) from hemagglutinin__InfluenzaB__AHL94190
augaaggcaauaauuguacuacucaugguaguaacauccaaugcagaucgaaucugcacugggauaacaucgucaaacucaccacaugucgucaaaacugcuacucaaggggaggucaaugugacugguguaauaccacugacaacaacacccaccaaaucucauuuugcaaaucucaaaggaacagaaaccagagggaaacuaugcccaaaaugccccaacugcacagaucuggacguagccuugggcagaccaaaaugcacggggaaaauacccucggcaagaguuucaauacuccaugaagucagaccuguuacaucugggugcuuuccuauaaugcacgacagaacaaaaauuagacagcugccuaaccuucucagaggauacgaacauaucagauuaucaacucauaacguuaucaaugcagaaaaugcaccaggaggacccuacaaaauuggaaccucagggucuugcccuaacguuaccaauggaaacggauuuuuugcaacaauggcuugggccgucccaaaaaacgacaaaaacaaaacagcaacaaauccauuaacaauagaaguaccauacauuuguacagaaggagaagaccaaauuaccguuuggggguuccacucugauaacgagacccaaauggcaaagcucuauggggacucaaagccccagaaguucaccucaucugccaacggagugaccacacauuacguuucacagauugguggcuucccaaaucaaacagaagacggaggacuaccacaaagugguagaauuguuguugauuacauggugcaaaaaucugggaaaacaggaacaauuaccuaucaaagagguauuuuauugccucaaaagguguggugcgcaaguggcaggagcaagguaauaaaaggauccuugccuuuaauuggagaagcagauugccuccacgaaaaauaugguggauuaaacaaaagcaagccuuacuacacaggggaacaugcaaaggccauaggaaauugcccaauaugggugaagacacccuugaagcuggccaauggaaccaaauauagaccuccugcaaaacuauuaaaggaaagagguuucuuuggagcuauugcugguuucuuagaaggaggaugggaaggaaugauugcagguuggcacggauacacgucccauggggcacauggaguagcgguggcagcagaccuuaagagcacucaagaggccauaaacaagauaacaaaaaaucucaacucuuugagugagcuggaaguaaaaaaucuucaaagacuaagcggugccauggaugaacuccacaacgaaauacuagaacuagacgaaaaaguggaugaucucagagcugauacaauaagcucacaaauagaacucgcaguccugcuuuccaaugaaggaauaauaaacagugaagaugaacaucucuuggcgcuugaaagaaagcugaagaaaaugcugggcccuucugcuguagagauagggaaugggugcuuugaaaccaaacacaagugcaaccagaccugucucgacagaauagcugcugguaccuuugaugcaggagaauuuucucuccccaccuuugauucacugaauauuacugcugcaucuuuaaaugacgauggauuggauaaucauaccauacugcuuuacuacucaacugcugccuccaguuuggcuguaacacugaugauagcuaucuuuguuguuuauauggucuccagagacaauguuucuugcuccaucugucuauaa

SEQ ID NO: 60135 - RNA, 1758 nt, Artificial Sequence
  derived and/or modified CDS sequence (wt) from hemagglutinin__InfluenzaB__AHL94201
augaaggcaauaauuguacuacucaugguaguaacauccaaugcagaucgaaucugcacugggauaacaucgucaaacucaccacauaucgucaaaacugcuacucaaggggaggucaaugugacugguguaauaccacugacaacaacacccaccaaaucucauuuugcaaaucucaaaggaacagaaaccagggggaaacuaugcccaaaaugccucaacugcacagaucuggacguagccuugggcagaccaaaaugcacggggaaaauacccucggcaagaguuucaauacuccaugaagucagaccuguuacaucugggugcuuuccuauaaugcacgacagaacaaaaauuagacagcugccuaaccuucucagaggauacgaacauaucagguuaucaacucauaacguuaucaaugcagaaaaugcaccaggaggacccuacaaaauuggaaccucagggucuugcccuaacauuaccaauggaaacggauuuuucgaaacaauggcuugggccgucccaaaaaacgacaaaaacaaaacagcaacaaauccauuaacaauagaaguaccauacauuuguacagaaggagaagaccaaauuaccguuuggggguuccacucugacaaugaaacccaaauggcaaagcucuauggggacucaaagccccagaaguucaccucaucugccaacggagugaccacacauuacguuucacagauugguggcuucccaaaucaaacagaagacggaggacuaccacaaagugguagaauuguuguugauuacauggugcaaaaaucugggaaaacaggaacaauuaccuaucaaagggguauuuuauugccucaaaagguguggugcgcaaguggcaggagcaagguaauaaaaggauccuugccuuuaauuggagaagcagauugccuccacgaaaaauacgguggauuaaacaaaagcaagccuuacuacacaggggaacaugcaaaggccauaggaaauugcccaauaugggugaaaacacccuugaagcuggccaauggaaccaaauauagaccuccugcaaaacuauuaaaggaaagggguuucuucggugcuauugcuggcuucuuagaaggaggaugggaaggaaugauugcagguuggcacggauacacaucccauggggcacauggaguagcgguggcagcagaccuuaagagcacucaagaggccauaaacaagauaacaaaaaaucucaacucuuugagugagcuggaaguaaagaaucuucaaagacuaagcggugccauggaugaacuccacaaugaaauacuagaauuagaugagaaaguggaugaucucagagcugauacaauaagcucacaaauagaacucgcaguccugcuuuccaaugaaggaauaauaaacagugaagaugaacaucucuuggcgcuugaaagaaagcugaagaaaaugcugggccccucugcuguagagauagggaauggaugcuuugaaaccaaacacaagugcaaccagaccugucucgacagaauagcugcugguaccuuugaugcaggagaauuuucucuccccacuuuugauucacugaauauuacugcugcaucuuuaaaugacgauggauuggauaaucauacuauacugcuuuacuacucaacugcugccuccaguuuggcuguaacacugaugauagcuaucuuuguuguuuauauggucuccagaaacaauguuucuugcuccaucugucuauaa

SEQ ID NO: 60136 - RNA, 1758 nt, Artificial Sequence
  derived and/or modified CDS sequence (wt) from hemagglutinin__InfluenzaB__AHL94212
augaaggcaauaauuguacuacucaugguaguaacauccaaugcagaucggaucugcacugggauaacaucgucaaacucaccacaugucgucaaaacugcuacucaaggggaggucaaugugaccgguguaauaccacugacaacaacacccaccaaaucucauuuugcaaaucucaaaggaacagaaaccagggggaaacuaugcccaaaaugccucaacugcacagaucuggacguagccuugggcagaccaaaaugcacugggaaaauacccucggcaagaguuucaauacuccaugaagucagaccuguuacaucugggugcuuuccuauaaugcacgauagaacaaaaauuagacagcugccuaaccuucuccgaggauacgaacauaucagguuaucaacucauaacguuaucaaugcagaaaaugcaccaggaggacccuacaaaauuggaaccucagggucuugcccuaacguuaccaauggaaacggauucuucgcaacaauggcuugggccgucccaaaaaacgacaaaaacaaaacagcaacaaauccauuaacaauagaaguaccauacauuuguacagaaggagaagaccaaguuaccguuuggggguuccacucugacaacgagacccaaauggcaaagcucuauggggacucaaagccccagaaguucaccucaucugccaacggagugaccacacauuacguuucacagauugguggcuucccaaaucaaacagaagacggaggacuaccacaaagugguagaauuguuguugauuacauggugcaaaaaucugggaaaacaggaacaauuaccuaucaaagagguauuuuauugccucaaaagguguggugcgcaaguggcaggagcaagguaauaaaaggauccuugccuuuaauuggagaagcagauugccuccacgaaaaauacgguggauuaaacaaaagcaagccuuacuacacaggggaacaugcaaaggccauaggaaauugcccaauaugggugaaaacacccuugaagcuggccaauggaaccaaauauagaccuccugcaaaacuauuaaaggaaagggguuucuucggagcuauugcugguuucuuagaaggaggaugggaaggaaugauugcagguuggcacggauacacaucccauggggcacauggaguagcgguggcagcagaccuuaagagcacucaagaggccauaaacaagauaacaaaaaaucucaacucuuugagugagcuggaaguaaagaaucuucaaagacuaagcggugccauggaugaacuccacaacgaaauacuagaacuagaugagaaaguggaugaucucagagcugauacaauaagcucacaaauagagcucgcaguccugcuuuccaaugaaggaauaauaaacagugaagaugaacaucucuuggcgcuugaaagaaagcugaagaaaaugcugggccccucugcuguagagauagggaauggaugcuuugaaaccaaacacaagugcaaccagaccugucucgacagaauagcugcugguaccuuugaugcaggagaauuuucucuccccaccuuugauucacugaauauuacugcugcaucuuuaaaugacgauggauuggauaaucauacuauacugcuuuacuacucaacugcugccuccaguuuggcuguaacacugaugauagcuaucuuuguuguuuauauggucuccagagacaauguuucuugcuccaucugucuauaa

SEQ ID NO: 60137 - RNA, 1758 nt, Artificial Sequence; identical to SEQ ID NO: 58738
  derived and/or modified CDS sequence (wt) from hemagglutinin__InfluenzaB__AHL94220

SEQ ID NO: 60138 - RNA, 1758 nt, Artificial Sequence
  derived and/or modified CDS sequence (wt) from hemagglutinin__InfluenzaB__AHL94231
augaaggcaauaauuguacuacucaugguaguaacauccaaugcagaucgaaucugcacugggauaacaucgucaaacucaccacauaucgucaaaacugcuacucaaggggaggucaaugugacugguguaauaccacugacaacaacacccaccaaaucucauuuugcaaaucucaaaggaacagaaaccagggggaaacuaugcccaaaaugccucaacugcacagaucuggacguagccuugggcagaccaaaaugcacggggaaaauacccucggcaagaguuucaauacuccaugaagucagaccuguuacaucugggugcuuuccuauaaugcacgacagaacaaaaauuagacagcugccuaaccuucucagaggauacgaacauaucagguuaucaacucauaacguuaucaaugcagaaaaugcaccaggaggacccuacaaaauuggaaccucagggucuugcccuaacauuaccaauggaaacggauuuuucgcaacaauggcuugggccgucccaaaaaacgacaaaaacaaaacagcaacaaauccauuaacaauagaaguaccauacauuuguacagaaggagaagaccaaauuaccguuuggggguuccacucugacaaugaaacccaaauggcaaagcucuauggggacucaaagccccagaaguucaccucaucugccaacggagugaccacacauuacguuucacagauugguggcuucccaaaucaaacagaagacggaggacuaccacaaagugguagaauuguuguugauuacauggugcaaaaaucugggaaaacaggaacaauuaccuaucaaagggguauuuuauugccucaaaagguguggugcgcaaguggcaggagcaagguaauaaaaggauccuugccuuuaauuggagaagcagauugccuccacgaaaaauacgguggauuaaacaaaagcaagccuuacuacacaggggaacaugcaaaggccauaggaaauugcccaauaugggugaaaacacccuugaagcuggccaauggaaccaaauauagaccuccugcaaaacuauuaaaggaaagggguuucuucggugcuauugcuggcuucuuagaaggaggaugggaaggaaugauugcagguuggcacggauacacaucccauggggcacauggaguagcgguggcagcagaccuuaagagcacccaagaggccauaaacaagauaacaaaaaaucucaacucuuugagugagcuggaaguaaagaaucuucaaagacuaagcggugccauggaugaacuccacaaugaaauacuagaauuagaugagaaaguggaugaucucagagcugauacaauaagcucacaaauagaacucgcaguccugcuuuccaaugaaggaauaauaaacagugaagaugaacaucucuuggcgcuugaaagaaagcugaagaaaaugcugggccccucugcuguagagauagggaauggaugcuuugaaaccaaacacaagugcaaccagaccugucucgacagaauagcugcugguaccuuugaugcaggagaauuuucucuccccacuuuugauucacugaauauuacugcugcaucuuuaaaugacgauggauuggauaaucauacuauacugcuuuacuacucaacugcugccuccaguuuggcuguaacacugaugauagcuaucuuuguuguuuauauggucuccagagacaauguuucuugcuccaucugucuauaa

SEQ ID NO: 60139 - RNA, 1758 nt, Artificial Sequence
  derived and/or modified CDS sequence (wt) from hemagglutinin__InfluenzaB__AHL94242
augaaggcaauaauuguacuacucaugguaguaacauccaaugcagaucggaucugcacugggauaacaucgucaaacucaccacaugucgucaaaacugcuacucaaggggaggucaaugugaccgguguaauaccacugacaacaacacccaccaaaucucauuuugcaaaucucaaaggaacagaaaccagggggaaacuaugcccaaaaugccucaacugcacagaucuggacguagccuugggcagaccaaaaugcacugggaaaauacccucggcaagaguuucaauacuccaugaagucagaccuguuacaucugggugcuuuccuauaaugcacgauagaacaaaaauuagacagcugccuaaccuucuccgaggauacgaacauaucagguuaucaacucauaacguuaucaaugcagaaaaugcaccaggaggacccuacaaaauuggaaccucagggucuugcccuaacguuaccaauggaaacggauucuucgcaacaauggcuugggccgucccaaaaaacgacaaaaacaaaacagcaacaaauccauuaacaauagaaguaccauacauuuguacagaaggagaagaccaaauuaccguuuggggguuccacucugacaacgagacccaaauggcaaagcucuauggggacucaaagccccagaaguucaccucaucugccaacggagugaccacacauuacguuucacagauugguggcuucccaaaucaaacagaagacggaggacuaccacaaagugguagaauuguuguugauuacauggugcaaaaaucugggaaaacaggaacaauuaccuaucaaagagguauuuuauugccucaaaagguguggugcgcaaauggcaggagcaagguaauaaaaggauccuugccuuuaauuggagaagcagauugccuccacgaaaaauacgguggauuaaacaaaagcaagccuuacuacacaggggaacaugcaaaggccauaggaaauugcccaauaugggugaaaacacccuugaagcuggccaauggaaccaaauauagaccuccugcaaaacuauuaaaggaaagggguuucuucggagcuauugcugguuucuuagaaggaggaugggaaggaaugauugcagguuggcacggauacacaucccauggggcacauggaguagcgguggcagcagaccuuaagagcacucaagaggccauaaacaagauaacaaaaaaucucaacucuuugagugagcuggaaguaaagaaucuccaaagacuaagcggugccauggaugaacuccacaacgaaauacuagaacuagaugagaaaguggacgaucucagagcugauacaauaagcucacaaauagagcucgcaguccugcuuuccaaugaaggaauaauaaacagugaagaugaacaucucuuggcgcuugaaagaaagcugaagaaaaugcugggccccucugcuguagagauagggaauggaugcuuugaaaccaaacacaagugcaaccagaccugucucgacagaauagcugcugguaccuuugaugcaggagaauuuucucuccccaccuuugauucacugaauauuacugcugcaucuuuaaaugacgauggauuggauaaucauacuauacugcuuuacuacucaacugcugccuccagcuuggcuguaacacugaugauagcuaucuuuguuguuuauauggucuccagagacaauguuucuugcuccaucugucuauag

SEQ ID NO: 60140 - RNA, 1758 nt, Artificial Sequence
  derived and/or modified CDS sequence (wt) from hemagglutinin__InfluenzaB__AHL94253
augaaggcaauaauuguacuacucaugguaguaacauccaaugcagaucggaucugcacugggauaacaucgucaaacucaccacaugucgucaaaacugcuacucaaggggaggucaaugugaccgguguaauaccacugacaacaacacccaccaaaucucauuuugcaaaucucaaaggaacagaaaccagggggaaacuaugcccaaaaugccucaacugcacagaucuggacguagccuugggcagaccaaaaugcacugggaaaauacccucggcaagaguuucaauacuccaugaagucagaccuguuacaucugggugcuucccuauaaugcacgauagaacaaaaauuagacagcugccuaaccuucuccgaggauacgaacauaucagguuaucaacucauaacguuaucaaugcagaaaaugcaccaggaggacccuacaaaauuggaaccucagggucuugcccuaacguuaccaauggaaacggauucuucgcaacaauggcuugggccgucccaaaaaacgacaaaaacaaaacagcaacaaauccauuaacaauagaaguaccauacauuuguacagaaggagaagaccaaauuaccguuuggggguuccacucugacaacgagacccaaauggcaaagcucuauggggacucaaagccccagaaguucaccucaucugccaacggagugaccacacauuacguuucacagauugguggcuucccaaaucaaacagaagacggaggacuaccacaaagugguagaauuguuguugauuacauggugcaaaaaucugggaaaacaggaacaauuaccuaucaaagagguauuuuauugccucaaaagguguggugcgcaaguggcaggagcaagguaauaaaaggauccuugccuuuaauuggagaagcagauugccuccacgaaaaauacgguggauuaaacaaaagcaagccuuacuacacaggggaacaugcaaaggccauaggaaauugcccaauaugggugaaaacacccuugaagcuggccaauggaaccaaauauagaccuccugcaaaacuauuaaaggaaagggguuucuucggagcuauugcugguuucuuagaaggaggaugggaaggaaugauugcagguuggcacggauacacaucccauggggcacauggaguagcgguggcagcagaccuuaagagcacucaagaggccauaaacaagauaacaaaaaaucucaacucuuugagugagcuggaaguaaagaaucuucaaagacuaagcggugccauggaugaacuccacaacgaaauacuagaacuagaugagaaaguggaugaucucagagcugauacaauaagcucacaaauagagcucgcaguccugcuuuccaaugaaggaauaauaaacagugaagaugaacaucucuuggcgcuugaaagaaagcugaagaaaaugcugggccccucugcuguagagauagggaauggaugcuuugaaaccaaacacaagugcaaccagaccugucucgacagaauagcugcugguaccuuugaugcaggagaauuuucucuccccaccuuugauucacugaauauuacugcugcaucuuuaaaugacgauggauuggauaaucauacuauacugcuuuacuacucaacugcugccuccaguuuggcuguaacacugaugauagcuaucuuuguuguuuauauggucuccagagacaauguuucuugcuccaucugucuauaa

SEQ ID NO: 60141 - RNA, 1755 nt, Artificial Sequence
  derived and/or modified CDS sequence (wt) from hemagglutinin__InfluenzaB__AHL94274
augaaggcaauaauuguacuacucaugguaguaacauccaaugcagaucgaaucugcacugggauaacaucuucaaacucaccucauguggucaaaacagcuacucaaggggaggucaaugugacuggcgugauaccacugacaacaacaccaacaaaaucuuauuuugcaaaucucaaaggaacaaggaccagagggaaacuaugcccggacugucucaacuguacagaucuggauguggccuugggcaggccaauguguguggggaccacaccuucugcuaaagcuucaauacuccacgaggucagaccuguuacauccgggugcuuuccuauaaugcacgacagaacaaaaaucaggcaacuacccaaucuucucagaggauaugaaaagaucagguuaucaacccaaaacguuaucgaugcagaaaaagcaccaggaggacccuacagacuuggaaccucaggaucuugcccuaacgcuaccaguaaaaucggauuuuucgcaacaauggcuugggcugucccaaaggacaacuacaaaaaugcaacgaacccacuaacaguggaaguaccauacauuuguacagaaggggaagaccaaauuacuguuuggggguuccauucggauaacaaaacccaaaugaagagccucuauggagacucaaauccucaaaaguucaccucaucugcuaauggaguaaccacacauuauguuucucagauuggcgacuucccagaucaaacagaagacggaggacuaccacaaagcggcagaauuguuguugauuacaugaugcaaaaaccugggaaaacaggaacaauugucuaucaaagagguguuuuguugccucaaaagguguggugcgcgaguggcaggagcaaaguaauaaaagggucauugccuuuaauuggugaagcagauugccuucaugaagaauacgguggauuaaacaaaagcaagccuuacuacacaggaaaacaugcaaaagccauaggaaauugcccaauauggguaaaaacaccuuugaagcuugccaauggaaccaaauauagaccuccugcaaaacuauugaaggaaagggguuucuucggagcuauugcugguuuccuagaaggaggaugggaaggaaugauugcagguuggcacggauacacaucucacggagcacauggaguggcaguggcggcagaccuuaagaguacacaagaagcuauaaauaagauaacaaaaaaucucaauucuuugagugaacuagaaguaaagaaccuucaaagacuaaguggugccauggaugaacuccacaacgaaauacucgagcuggaugaaaaaguggaugaucucagagcugacacuauaagcucacaaauagaacuugcagucuugcuuuccaacgaaggaauaauaaacagugaagacgagcaucuauuggcacuugagagaaaacuaaagaaaaugcugggucccucugcuguagacauaggaaacggaugcuucgaaaccaaacacaaaugcaaccagaccugcuuagacaggauagcugcuggcaccuuuaaugcaggagaauuuucucuccccacuuuugauucauugaacauuacugcugcaucuuuaaaugaugauggauuggauaaccauacuauacugcucuauuacucaacugcugcuucuaguuuggcuguaacauuaaugcuagcuauuuuuauuguuuauauggucuccagagacaacguuucaugcuccaucugucuauaa

SEQ ID NO: 60142 - RNA, 1755 nt, Artificial Sequence
  derived and/or modified CDS sequence (wt) from hemagglutinin__InfluenzaB__AHL94295
augaaggcaauaauuguacuacucaugguaguaacauccaaugcagaucgaaucugcacugggauaacaucuucaaacucaccucauguggucaaaacagcuacucaaggggaggucaaugugacuggcgugauaccacugacaacaacaccaacaaaaucuuauuuugcaaaucucaaaggaacaaggaccagagggaaacuaugcccggacugucucaacuguacagaucuggauguggccuugggcaggccaauguguguggggaccacaccuucugcuaaagcuucaauacuccacgaggucagaccuguuacauccgggugcuuuccuauaaugcacgacagaacaaaaaucaggcaacuacccaaucuucucagaggauaugaaaagaucagguuaucaacccaaaacguuaucgaugcagaaaaagcaccaggaggacccuacagacuuggaaccucaggaucuugcccuaacgcuaccaguaaaaucggauuuuucgcaacaauggcuugggcugucccaaaggacaacuacaaaaaugcaacgaacccacuaacaguggaaguaccauacauuuguacagaaggggaagaccaaauuacuguuuggggguuccauucggauaacaaaacccaaaugaagagccucuauggagacucaaauccucaaaaguucaccucaucugcuaauggaguaaccacacauuauguuucucagauuggcgacuucccagaucaaacagaagacggaggacuaccacaaagcggcagaauuguuguugauuacaugaugcaaaaaccugggaaaacaggaacaauugucuaucaaagagguguuuuguugccucaaaagguguggugcgcgaguggcaggagcaaaguaauaaaagggucauugccuuuaauuggugaagcagauugccuucaugaagaauacgguggauuaaacaaaagcaagccuuacuacacaggaaaacaugcaaaagccauaggaaauugcccaauauggguaaaaacaccuuugaagcuugccaauggaaccaaauauagaccuccugcaaaacuauugaaggaaagggguuucuucggagcuauugcugguuuccuagaaggaggaugggaaggaaugauugcagguuggcacggauacacaucucacggagcacauggaguggcaguggcggcagaccuuaagaguacacaagaagcuauaaauaagauaacaaaaaaucucaauucuuugagugaacuagaaguaaagaaccuucaaagacuaaguggugccauggaugaacuccacaacgaaauacucgagcuggaugaaaaaguggaugaucucagagcugacacuauaagcucacaaauagaacuugcagucuugcuuuccaacgaaggaauaauaaacagugaagacgagcaucuauuggcacuugagagaaaacuaaagaaaaugcugggucccucugcuguagacauaggaaacggaugcuucgaaaccaaacacaaaugcaaccagaccugcuuagacaggauagcugcuggcaccuuuaaugcaggagaauuuucucuccccacuuuugauucauugaauauuacugcugcaucuuuaaaugaugauggauuggauaaccauacuauacugcucuauuacucaacugcugcuucuaguuuggcuguaacauuaaugcuagcuauuuuuauuguuuauauggucuccagagacaacguuucaugcuccaucugucuauaa

SEQ ID NO: 60143 - RNA, 1755 nt, Artificial Sequence
  derived and/or modified CDS sequence (wt) from hemagglutinin__InfluenzaB__AHL94306
augaaggcaauaauuguacuacucaugguaguaacauccaaugcagaucgaaucugcacugggauaacaucuucaaacucaccucauguagucaaaacagcuacucaaggggaggucaaugugacuggcgcgauaccauugacaacaacaccaacaaaaucuuauuuugcaaaucucaaaggaacaaggaccagagggaaacuaugcccggacugucucaacuguacagaucuggauguggccuugggcaggccaauguguguggggaccacaccuucugcuaaagcuucaauacuccacgaagucagaccuguuacaucagggugcuuuccuauaaugcacgacagaacaaaaaucaggcaacuacccaaucuucucagaggauaugaaaauaucagguuaucaacccaaaacguuaucgaugcagaaaaagcaccaggaggacccuacagacuuggaaccucaggaucuugcccuaacgcuaccaguaaaaucggguuuuucgcaacaauggcuugggcugucccaaaggacaacuacaaaaaugcaacgaacccacaaacaguagaaguaccauacauuuguacagaaggggaagaccaaauuacuguuuggggguuccauucagauaacaaaacccaaaugaagaaccucuauggagacucaaauccucaaaaguucaccucaucugcuaauggaguaaccacacauuauguuucucagauuggcgacuucccagaucaaacagaagacggaggacuaccacaaagcggcagaauuguuguugauuacauggugcaaaaaccugggaaaacaggaacaauugucuaucaaagaggcguuuuguugccucaaaagguguggugcgcgaguggcaggagcaaaguaauaaaagggucauuaccuuuaauuggugaagcagauugccuucaugaaaaauacgguggauuaaacaagagcaagccuuacuacacaggagaacaugcaaaagccauaggaaauugcccaauauggguaaaaacaccuuugaagcuugccaauggaaccaaauauagaccuccugcaaaacuauuaaaggaaagggguuucuucggagcuauugcugguuuccuagaaggaggaugggaaggaaugauugcagguuggcacggauacacaucucacggagcacauggaguggcaguggcggcagaccuuaagaguacacaagaagcuauaaauaagauaacaaaaaaucucaauucuuugagugagcuagaaguaaaaaaccuucaaagacuaaguggugccauggaugaacuccacaacgaaauacucgaacuggaugagaaaguggaugaucucagagcugacacuauaagcucacaaauagaacuugcagucuugcuuuccaacgaaggaauaauaaacagugaagacgagcaucuauuggcacuugagagaaaacuaaagaaaaugcugggucccucugcuguagacauaggaaauggaugcuucgaaaccaaacacaaaugcaaccagaccugcuuagacaggauagcugcuggcaccuuuaaugcaggagaauuuucucuccccacuuuugauucauugaacauuacugcugcaucuuuaaaugaugauggauuggauaaccauacuauacugcucuauuacucaacugcugcuucuaguuuggcuguaacauuaaugcuagcuauuuuuauuguuuauauggucuccagagacaacguuucaugcuccaucugucuauaa

SEQ ID NO: 60144 - RNA, 1755 nt, Artificial Sequence
  derived and/or modified CDS sequence (wt) from hemagglutinin__InfluenzaB__AHL94317
augaaggcaauaauuguacuacucaugguaguaacauccaaugcagaucgaaucugcacugggauaacaucuucaaacucaccucauguagucaaaacagcuacucaaggggaggucaaugugacuggcgcgauaccauugacaacaacaccaacaaaaucuuauuuugcaaaucucaaaggaauaaggaccagagggaaacuaugcccggacugucucaacuguacagaucuggauguggccuugggcaggccaauguguguggggaccacaccuucugcuaaagcuucaauacuccacgaagucagaccuguuacaucagggugcuuuccuauaaugcacgacagaacaaaaaucaggcaacuacccaaucuucucagaggauaugaaaauaucagguuaucaacccaaaacguuaucgaugcagaaaaagcaccaggaggacccuacagacuuggaaccucaggaucuugcccuaacgcuaccaguaaaaucggguuuuucgcaacaauggcuugggcugucccaagggacaacuacaaaaaugcaacgaacccacaaacaguagaaguaccauacauuuguacagaaggggaagaccaaauuacuguuuggggguuccauucagauaacaaaacccaaaugaagaaccucuauggagacucaaauccucaaaaguucaccucaucugcuaauggaguaaccacacauuauguuucucagauuggcgacuucccagaucaaacagaagacggaggacuaccacaaagcggcagaauuguuguugauuacauggugcaaaaaccugggaaaacaggaacaauugucuaucaaagaggcguuuuguugccucaaaagguguggugcgcgaguggcaggagcaaaguaauaaaagggucauuaccuuuaauuggugaagcagauugccuucaugaaaaauacgguggauuaaacaagagcaagccuuacuacacaggagaacaugcaaaagccauaggaaauugcccaauauggguaaaaacaccuuugaagcuugccaauggaaccaaauauagaccuccugcaaagcuauuaaaggaaagggguuucuucggagcuauugcugguuuccuagaaggaggaugggaaggaaugauugcagguuggcacggauacacaucucacggagcacauggaguggcaguggcggcagaccuuaagaguacacaagaagcuauaaauaagauaacaaaaaaucucaauucuuugagugagcuagaaguaaaaaaccuucaaagacuaaguggugccauggaugaacuccacaacgaaauacucgagcuggaugagaaaguggaugaucucagagcugacacuauaagcucacaaauagaacuugcagucuugcuuuccaacgaaggaauaauaaacagugaagacgagcaucuauuggcacuugagagaaaacuaaagaaaaugcugggucccucugcuguagacauaggaaauggaugcuucgaaaccaaacacaaaugcaaccagaccugcuuagacaggauagcugcuggcaccuuuaaugcaggagaauuuucucuccccacuuuugauucauugaacauuacugcugcaucuuuaaaugaugauggauuggauaaccauacuauacugcucuauuacucaacugcugcuucuaguuuggcuguaacauuaaugcuagcuauuuuuauuguuuauauggucuccagagacaacguuucaugcuccaucugucuauaa

SEQ ID NO: 60145 - RNA, 1755 nt, Artificial Sequence
  derived and/or modified CDS sequence (wt) from hemagglutinin__InfluenzaB__AHL94328
augaaggcaauaauuguacuacucaugguaguaacauccaaugcagaucgaaucugcacugggauaacaucuucaaacucaccucauguagucaaaacagcuacucaaggggaggucaaugugacuggcgcgauaccauugacaacaacaccaacaaaaucuuauuuugcaaaucucaaaggaacaaggaccagagggaaacuaugcccggacugucucaacuguacagaucuggauguggccuugggcaggccaauguguguggggaccacaccuucugcuaaagcuucaauacuccacgaagucagaccuguuacauccgggugcuuuccuauaaugcacgacagaacaaaaaucaggcaacuacccaaucuucucagaggauaugaaaauaucagguuaucaacccaaaacguuaucgaugcagaaaaagcaccaggaggacccuacagacuuggaaccucaggaucuugcccuaacgcuaccaguaaaaucggauuuuucgcaacaauggcuugggcugucccaaaggacaacuacaaaaaugcgacgaacccacaaacaguagaaguaccauacauuuguacagaaggggaagaccaaauuacuguuuggggguuccauucagauaacaaaacccaaaugaagaaccucuauggagacucaaauccucaaaaguucaccucaucugcuaauggaguaaccacacauuauguuucucagauuggcgacuucccagaucaaacagaagacggaggacuaccacaaagcggcagaauuguuguugauuacauggugcaaaaaccugggaaaacaggaacaauugucuaucaaagaggcguuuuguugccucaaaagguguggugcgcgaguggcaggagcaaaguaauaaaagggucauugccuuuaauuggugaagcagauugccuucaugaaaaauacgguggauuaaacaaaagcaagccuuacuacacaggagaacaugcaaaagccauaggaaauugcccaauauggguaaaaacaccuuugaagcuugccaauggaaccaaauauagaccuccugcaaaacuauuaaaggaaagggguuucuucggagcuauugcugguuuccuagaaggaggaugggaaggaaugauugcagguuggcacggauacacaucucacggagcacauggaguggcaguggcggcagaccuuaagaguacacaagaagcuauaaauaagauaacaaaaaaucucaauucuuugagugagcuagaaguaaaaaaccuucaaagacuaaguggugccauggaugaacuccacaacgaaauacucgagcuggaugagaaaguggaugaucucagagcugacacuauaagcucacaaauagaacuugcagucuugcuuuccaacgaaggaauaauaaacagugaagacgagcaucuauuggcacuugagagaaaacuaaagaaaaugcugggucccucugcuguagacauaggaaauggaugcuucgaaaccaaacacaaaugcaaccagaccugcuuagacaggauagcugcuggcaccuuuaaugcaggagaauuuucucuccccacuuuugauucauugaacauuacugcugcaucuuuaaaugaugauggauuggauaaccauacuauacugcucuauuacucaacugcugcuucuaguuuggcuguaacauuaaugcuagcuauuuuuauuguuuauauggucuccagagacaacguuucaugcuccaucugucuauaa

SEQ ID NO: 60146 - RNA, 1755 nt, Artificial Sequence
  derived and/or modified CDS sequence (wt) from hemagglutinin__InfluenzaB__AHL94339
augaaggcaauaauuguacuacucaugguaguaacauccaaugcagaucgaaucugcacugggauaacaucuucaaacucaccucauguggucaaaacagcuacucaaggggaggucaaugugacuggcgugauaccacugacaacaacaccaacaaaaucuuauuuugcaaaucucaaaggaacaaggaccagagggaaacuaugcccggacugucucaacuguacagaucuggauguggccuugggcaggccaauguguguggggaccacaccuucugcuaaagcuucaauacuccacgaggucagaccuguuacauccgggugcuuuccuauaaugcacgacagaacaaaaaucaggcaacuacccaaucuucucagaggauaugaaaagaucagguuaucaacccaaaacguuaucgaugcagaaaaagcaccaggaggacccuacagacuuggaaccucaggaucuugcccuaacgcuaccaguaaaaucggauuuuucgcaacaauggcuugggcugucccaaaggacaacuacaaaaaugcaacgaacccacuaacaguggaaguaccauacauuuguacagaaggggaagaccaaauuacuguuuggggguuccauucggauaacaaaacccaaaugaagagccucuauggagacucaaauccucaaaaguucaccucaucugcuaauggaguaaccacacauuauguuucucagauuggcgacuucccagaucaaacagaagacggaggacuaccacaaagcggcagaauuguuguugauuacaugaugcaaaagccugggaaaacaggaacaauugucuaucaaagagguguuuuguugccucaaaagguguggugcgcgaguggcaggagcaaaguaauaaaagggucauugccuuuaauuggugaagcagauugccuucaugaagaauacgguggauuaaacaaaagcaagccuuacuacacaggaaaacaugcaaaagccauaggaaauugcccaauauggguaaaaacaccuuugaagcuugccaauggaaccaaauauagaccuccugcaaaacuauugaaggaaagggguuucuucggagcuauugcugguuuccuagaaggaggaugggaaggaaugauugcagguuggcacggauacacaucucacggagcacauggaguggcaguggcggcagaccuuaagaguacacaagaagcuauaaauaagauaacaaaaaaucucaauucuuugagugaacuagaaguaaagaaccuucaaagacuaaguggugccauggaugaacuccacaacgaaauacucgagcuggaugaaaaaguggaugaucucagagcugacacuauaagcucacaaauagaacuugcagucuugcuuuccaacgaaggaauaauaaacagugaagacgagcaucuauuggcacuugagagaaaacuaaagaaaaugcugggucccucugcuguagacauaggaaacggaugcuucgaaaccaaacacaaaugcaaccagaccugcuuagacaggauagcugcuggcaccuuuaaugcaggagaauuuucucuccccacuuuugauucauugaacauuacugcugcaucuuuaaaugaugauggauuggauaaccauacuauacugcucuauuacucaacugcugcuucuaguuuggcuguaacauuaaugcuagcuauuuuuauuguuuauauggucuccagagacaacguuucaugcuccaucugucuauaa

SEQ ID NO: 60147 - RNA, 1758 nt, Artificial Sequence
  derived and/or modified CDS sequence (wt) from hemagglutinin__InfluenzaB__AHL94350
augaaggcaauaauuguacuacucaugguaguaacauccaaugcagaucgaaucugcacugggauaacaucgucaaacucaccacaugucgucaaaacugcuacucaaggggaggucaaugugaccgguguaauaccacugacaacaacacccaccaaaucucauuuugcaaaucucaaaggaacagaaaccagggggaaacuaugcccaaaaugccucaacugcacagaucuggacguagccuugggcagaccaaaaugcacggggaaaauacccucggcaagaguuucaauacuccaugaagucagaccuguuacaucugggugcuuuccuauaaugcacgauagaacaaaaauuagacagcugccuaaccuucuccgaggauacgaacauaucagguuaucaacucacaacguuaucaaugcagaaaaugcaccaggaggacccuacaaaauuggaaccucagggucuugcccuaacguuaccaauggaaacggauucuucgcaacaauggcuugggccgucccaaaaaacgacaaaaacaaaacagcaacaaauccauuaacaauagagguaccauacauuuguacagaaggagaagaccaaauuaccguuuggggguuccacucugacaacgagacccaaauggcaaagcucuauggggacucaaacccccagaaguucaccucaucugccaacggagugaccacacauuacguuucacagauugguggcuucccaaaucaaacagaagacggaggacuaccacaaagugguagaauuguuguugauuacauggugcaaaaaucugggaaaacaggaacaauuaccuaucaaagagguauuuuauugccucaaaagguguggugcgcaaguggcaggagcaagguaauaaaaggauccuugccuuuaauuggagaagcagauugccuccacgaaaaauacgguggguuaaacaaaagcaagccuuacuacacaggggaacaugcaaaggccauaggaaauugcccaauaugggugaaaacacccuugaagcuggccaauggaaccaaauauagaccuccugcaaaacuauuaaaggaaagggguuucuucggagcuauugcugguuucuuagaaggaggaugggaaggaaugauugcagguuggcacggauacacaucccauggggcacauggaguagcgguggcagcugaccuuaagagcacucaagaggccauaaacaagauaacaaaaaaucucaacucuuugagugagcuggaaguaaagaaucuucaaagacuaagcggugccauggaugaacuccacaacgaaauacuagaacuagaugagaaaguggaugaucucagagcugauacaauaagcucacaaauagaacucgcaguccugcuuuccaaugaaggaauaauaaacagugaagaugaacaucucuuggcgcuugaaagaaagcugaagaaaaugcugggccccucugcuguagagauagggaauggaugcuuugaaaccaaacacaagugcaaccagaccugucucgacagaauagcugcugguaccuuugaugcaggagaauuuucucuccccaccuuugauucacugaauauuacugcugcaucuuuaaaugacgauggauuggauaaucauacuauacugcuuuacuacucaacugcugccuccaguuuggcuguaacacugaugauagcuaucuuuguuguuuauauggucuccaaagacaauguuucuugcuccaucugucuauaa

SEQ ID NO: 60148 - RNA, 1758 nt, Artificial Sequence
  derived and/or modified CDS sequence (wt) from hemagglutinin__InfluenzaB__AHL94361
augaaggcaauaauuguacuacucaugguaguaacauccaaugcagaucgaaucugcacugggauaacaucgucaaacucaccacaugucgucaaaacugcuacucaaggggaggucaaugugaccgguguaauaccacugacaacaacacccaccaaaucucauuuugcaaaucucaaaggaacagaaaccagggggaaacuaugcccaaaaugccucaacugcacagaucuggacguagccuugggcagaccaaaaugcacggggaaaauacccucggcaagaguuucaauacuccaugaagucagaccuguuacaucugggugcuuuccuauaaugcacgauagaacaaaaauuagacagcugccuaaccuucuccgaggauacgaacauaucagguuaucaacucacaacguuaucaaugcagaaaaugcaccaggaggacccuacaaaauuggaaccucagggucuugcccuaacguuaccaauggaaacggauucuucgcaacaauggcuugggccgucccaaaaaacgacaaaaacaaaacagcaacaaauccauuaacaauagagguaccauacauuuguacagaaggagaagaccaaauuaccguuuggggguuccacucugacaacgagacccaaauggcaaagcucuauggggacucaaacccccagaaguucaccucaucugccaacggagugaccacacauuacguuucacagauugguggcuucccaaaucaaacagaagacggaggacuaccacaaagugguagaauuguuguugauuacauggugcaaaaaucugggaaaacaggaacaauugccuaucaaagagguauuuuauugccucaaaagguguggugcgcaaguggcaggagcaagguaauaaaaggauccuugccuuuaauuggagaagcagauugccuccacgaaaaauacgguggguuaaacaaaagcaagccuuacuacacaggggaacaugcaaaggccauaggaaauugcccaauaugggugaaaacacccuugaagcuggccaauggaaccaaauauagaccuccugcaaaacuauuaaaggaaagggguuucuucggagcuauugcugguuucuuagaaggaggaugggaaggaaugauugcagguuggcacggauacacaucccauggggcacauggaguagcgguggcagcugaccuuaagagcacucaagaggccauaaacaagauaacaaaaaaucucaacucuuugagugagcuggaaguaaagaaucuucaaagacuaagcggugccauggaugaacuccacaacgaaauacuagaacuagaugagaaaguggaugaucucagagcugauacaauaagcucacaaauagaacucgcaguccugcuuuccaaugaaggaauaauaaacagugaagaugaacaucucuuggcgcuugaaagaaagcugaagaaaaugcugggccccucugcuguagagauagggaauggaugcuuugaaaccaaacacaagugcaaccagaccugucucgacagaauagcugcugguaccuuugaugcaggagaauuuucucuccccaccuuugauucacugaauauuacugcugcaucuuuaaaugacgauggauuggauaaucauacuauacugcuuuacuacucaacugcugccuccaguuuggcuguaacacugaugauagcuaucuuuguuguuuauauggucuccagagacaguguuucuugcuccaucugucuauaa

SEQ ID NO: 60149 - RNA, 1758 nt, Artificial Sequence
  derived and/or modified CDS sequence (wt) from hemagglutinin__InfluenzaB__AHL94383
augaaggcaauaauuguacuacucaugguaguaacauccaaugcagaucgaaucugcacugggauaacaucgucaaacucaccacaugucgucaaaacugcuacucaaggggaggucaaugugaccgguguaauaccacugacaacaacacccaccaaaucucauuuugcaaaucucaaaggaacagaaaccagggggaaacuaugcccaaaaugccucaacugcacagaucuggacguagccuugggcagaccaaaaugcacggggaaaauacccucggcaagaguuucaauacuccaugaagucagaccuguuacaucugggugcuuuccuauaaugcacgauagaacaaaaauuagacagcugccuaaccuucuccgaggauacgaacauaucagguuaucaacucacaacguuaucaaugcagaaaaugcaccaggaggacccuacaaaauuggaaccucagggucuugcccuaacguuaccaauggaaacggauucuucgcaacaauggcuugggccgucccaaaaaacgacaaaaacaaaacagcaacaaauccauuaacaauagaaguaccauacauuuguacagaaggagaagaccaaauuaccguuuggggguuccacucugacaacgagacccaaauggaaaagcucuauggggacucaaagccccagaaguucaccucaucugccaacggagugaccacacauuacguuucacagauugguggcuucccaaaucaaacagaagacggaggacuaccacaaagugguagaauuguuguugauuacauggugcaaaaaucugggaaaacaggaacaauuaccuaucaaagagguauuuuauugccucaaaagguguggugcgcaaguggcaggagcaagguaauaaaaggauccuugccuuuaauuggagaagcagauugccuccacgaaaaauacgguggauuaaacaaaagcaagccuuacuacacaggggaacaugcaaaggccauaggaaauugcccaauaugggugaaaacaccauugaagcuggccaauggaaccaaauauagaccuccugcaaaacuauuaaaggaaagggguuucuucggagcuauugcugguuucuuagaaggaggaugggaaggaaugauugcagguuggcacggauacacaucccauggggcacauggaguagcgguggcagcugaccuuaagagcacucaagaggccauaaacaagauaacaaaaaaucucaacucuuugagugagcuggaaguaaagaaucuucaaagacuaagcggugccauggaugaacuccacaacgaaauacuagaacuagaugagaaaguggaugaucucagagcugauacaauaagcucacaaauagaacucgcaguccugcuuuccaaugaaggaauaauaaacagugaagaugaacaucucuuggcgcuugaaagaaagcugaagaaaaugcugggccccucugcuguagagauagggaauggaugcuuugaaaccaaacacaagugcaaccagaccugucucgacagaauagcugcugguaccuuugaugcaggagaauuuucucuccccaccuuugauucacugaauauuacagcugcaucuuuaaaugacgauggauuggauaaucauacuauacugcuuuacuacucaacugcugccuccaguuuggcuguaacacugaugauagcuaucuuuguuguuuauauggucuccagagacaaugucucuugcuccaucugucuauaa

SEQ ID NO: 60150 - RNA, 1758 nt, Artificial Sequence
  derived and/or modified CDS sequence (wt) from hemagglutinin__InfluenzaB__AHL94394
augaaggcaauaauuguacuacucaugguaguaacauccaaugcagaucgaaucugcacugggauaacaucgucaaacucaccacaugucgucaaaacugcuacucaaggggaggucaaugugaccgguguaauaccacugacaacaacacccaccaaaucucauuuugcaaaucucaaaggaacagaaaccagggggaaacuaugcccaaaaugccucaacugcacagaucuggacguagccuugggcagaccaaaaugcacggggaaaauacccucggcaagaguuucaauacuccaugaagucagaccuguuacaucugggugcuuuccuauaaugcacgauagaacaaaaauuagacagcugccuaaccuucuccgaggauacgaacauaucagguuaucaacucacaacguuaucaaugcagaaaaugcaccaggaggacccuacaaaauuggaaccucagggucuugcccuaacguuaccaauggaaacggauucuucgcaacaauggcuugggccgucccaaaaaacgacaaaaacaaaacagcaacaaauccauuaacaauagaaguaccauacauuuguacagaaggagaagaccaaauuaccguuuggggguuccacucugacaacgagacccaaauggcaaagcucuauggggacucaaagccccagaaguucaccucaucugccaacggagugaccacacauuacguuucacagauugguggcuucccaaaucaaacagaagacggaggacuaccacaaagugguagaauuguuguugauuacauggugcaaaaaucugggaaaacaggaacaauuaccuaucaaagagguauuuuauugccucaaaagguguggugcgcaaguggcaggagcaagguaauaaaaggauccuugccuuuaauuggagaagcagauugccuccacgaaaaauacgguggauuaaacaaaagcaagccuuacuacacaggggaacaugcaaaggccauaggaaauugcccaauaugggugaaaacacccuugaagcuggccaauggaaccaaauauagaccuccugcaaaacuauuaaaggaaagagguuucuucggagcuauugcugguuucuuagaaggaggaugggaaggaaugauugcagguuggcacggauacacaucccauggggcacauggaguagcgguggcagcugaccuuaagagcacucaagaggccauaaacaagauaacaaaaaaucucaacucuuugagugagcuggaaguaaagaaucuucaaagacuaagcggugccauggaugaacuccacaacgaaauacuagaacuagaugagaaaguggaugaucucagagcugauacaauaagcucacaaauagagcucgcaguccugcuuuccaaugaaggaauaauaaacagugaagaugaacaucucuuggcgcuugaaagaaagcugaagaaaaugcugggccccucugcuguagagauagggaauggaugcuuugaaaccaaacacaagugcaaccagaccugucucgacagaauagcugcugguaccuuugaugcaggagaauuuucucuccccaccuuugauucacugaauauuacugcugcaucuuuaaaugacgauggauuggauaaucauacuauacugcuuuacuacucaacugcugccuccaguuuggcuguaacacugaugauagcuaucuuuguuguuuauauggucuccagagacaauguuucuugcuccaucugucuauaa

SEQ ID NO: 60151 - RNA, 1758 nt, Artificial Sequence
  derived and/or modified CDS sequence (wt) from hemagglutinin__InfluenzaB__AHL94405
augaaggcaauaauuguacuacucaugguaguaacauccaaugcagaucgaaucugcacugggauaacaucgucaaacucaccacaugucgucaaaacugcuacucaaggggaggucaaugugaccgguguaauaccacugacaacaacacccaccaaaucucauuuugcaaaucucaaaggaacagaaaccagggggaaacuaugcccaaaaugccucaacugcacagaucuggacguagccuugggcagaccaaaaugcacgggaaaaauacccucggcaagaguuucaauacuccaugaagucagaccuguuacaucugggugcuuuccuauaaugcacgauagaacaaaaauuagacagcugccuaaccuucuccgaggauacgaacauaucagguuaucaacucacaacguuaucaaugcagaaaaugcaccaggaggacccuacaaaauuggaaccucagggucuugcccuaauguuaccaauggaaacggauucuucgcaacaauggcuugggccgucccaaaaaacgacaaaaacaaaacagcaacaaauccauuaacaauagaaguaccauacauuuguacagaaggagaagaccaaauuaccguuuggggguuccacucugacaacgagacccaaauggcaaagcucuauggggacucaaagccccagaaguucaccucaucugcuaacggagugaccacacacuacguuucacagauugguggcuucccaaaucaaacagaagacggaggacuaccacaaagugguagaauuguuguugauuacauggugcaaaaaucugggaaaacaggaacaauuaccuaucaaagagguauuuuauugccucaaaagguguggugcgcaaguggcaggagcaagguaauaaaaggauccuugccuuuaauuggagaagcagauugccuccacgaaaaauacgguggauuaaacaaaagcaagccuuacuacacaggggaacaugcaaaggccauaggaaauugcccaauaugggugaaaacacccuugaagcuggccaauggaaccaaauauagaccuccugcaaaacuauuaaaggaaagggguuucuucggagcuauugcugguuucuuagaaggaggaugggaaggaaugauugcagguuggcacggauacacaucccauggggcacauggaguagcgguagcagcugaccuuaagagcacucaagaggccauaaacaagauaacaaaaaaucucaacucuuugagugagcuggaagugaagaaucuucaaagacuaagcggugccauggaugaacuccacaacgaaauacuagaacuagaugagaaaguggaugaucucagagcugauacaauaagcucacaaauagaacucgcaguccugcuuuccaaugaaggaauaauaaacagugaagaugaacaucucuuggcgcuugaaagaaagcugaagaaaaugcugggccccucugcuguagagauagggaauggaugcuuugaaaccaaacacaagugcaaccagaccugucucgacagaauagcugcugguaccuuuaaugcaggagaauuuucucuccccaccuuugauucacugaauauuacugcugcaucuuuaaaugacgauggauuggauaaucauacuauacugcuuuacuacucaacugcugccuccaguuuggcuguaacacugaugauagcuaucuuuguuguuuauauggucuccagagacaauguuucuugcuccaucugucuauaa

SEQ ID NO: 60152 - RNA, 1758 nt, Artificial Sequence
  derived and/or modified CDS sequence (wt) from hemagglutinin__InfluenzaB__AHL94416
augaaggcaauaauuguacuacucaugguaguaacauccaaugcagaucgaaucugcacugggauaacaucgucaaacucaccacaugucgucaaaacugcuacucaaggggaggucaaugugaccgguguaauaccacugacaacaacacccaccaaaucucauuuugcaaaucucaaaggaacagaaaccagggggaaacuaugcccaaaaugccucaacugcacagaucuggacguagccuugggcagaccaaaaugcacggggaaaauacccucggcaagaguuucaauacuccaugaagucagaccuguuacaucugggugcuuuccuauaaugcacgauagaacaaaaauuagacagcugccuaaccuucuccgaggauacgaacauaucagguuaucaacucacaacguuaucaaugcagaaaaugcaccaggaggacccuacaaaauuggaaccucagggucuugcccuaacguuaccaauggaaacggauucuucgcaacaauggcuugggccgucccaaaaaacgacaaaaacaaaacagcaacaaauccauuaacaauagaaguaccauacauuuguacagaaggagaagaccaaauuaccguuuggggguuccacucugacaacgagacccaaauggcaaagcucuauggggacucaaagccccagaaguucaccucaucugccaacggagugaccacacauuacguuucacaaauugguggcuucccaaaucaaacagaagacggaggacuaccacaaagugguagaauuguuguugauuacauggugcaaaaaucugggaaaacaggaacaauuaccuaucaaagagguauuuuauugccucaaaagguguggugcgcaaguggcaggagcaagguaauaaaaggauccuugccuuuaauuggagaagcagauugccuccacgaaaaauacgguggguuaaacaaaagcaagccuuacuacacaggggaacaugcaaaggccauaggaaauugcccaauaugggugaaaacacccuugaagcuggccaauggaaccaaauauagaccuccugcaaaacuauuaaaggaaagggguuucuucggagcuauugcugguuucuuagaaggaggaugggaaggaaugauugcagguuggcacggauacacaucccacggggcacauggaguagcgguggcagcugaccuuaagagcacucaagaggccauaaacaagauaacaaaaaaucucaacucuuugagugagcuggaaguaaagaaucuucaaagacuaagcggugccauggaugaacuccacaacgaaauacuagaacuagaugagaaaguggaugaucucagagcugauacaauaagcucacaaauagaacuagcaguccugcuuuccaaugaaggaauaauaaacagugaagaugaacaucucuuggcgcuugaaagaaagcugaagaaaaugcugggccccucugcuguagagauagggaauggaugcuuugaaaccaaacacaagugcaaccagaccugucucgacagaauagcugcugguaccuuugaugcaggagaauuuucucuccccaccuuugauucacugaauauuacugcugcaucuuuaaaugacgauggauuggauaaucauacuauacugcuuuacuacucaacugcugcuuccaguuuggcuguaacacugaugauagcuaucuuuguuguuuauauggucuccagagacaauguuucuugcuccaucugucuauaa

SEQ ID NO: 60153 - RNA, 1755 nt, Artificial Sequence
  derived and/or modified CDS sequence (wt) from hemagglutinin__InfluenzaB__AHL94427
augaaggcaauaauuguacuacuaaugguaguaacauccaaugcagaucgaaucugcacugggauaacaucuucaaacucaccucauguggucaaaacagcuacucaaggggaggucaaugugacuggugugauaccacuaacaacaacaccaacaaaaucuuauuuugcaaaucucaaaggaacaaagaccagagggaaacuaugcccagacugucucaacuguacagaucuggauguggcccugggcaggccaaugugugugggaacuacaccuucugcgaaagcuucaauacuucacgaagucagaccuguuacauccgggugcuucccuauaaugcacgacagaacaaaaaucaggcaacuagccaaucuucucagaggauaugaaaauaucagguuaucaacccaaaacguuaucgaugcagaaaaggcaccaggaggacccuacagacuuggaaccucaggaucuugcccuaacgcuaccaguaaaagcggauuuuucgcaacaauggcuugggcugucccaaaggacaacaacaaaaaugcaacgaacccauuaacaguagaaguaccauacauuugugcagaaggggaagaccaaauuacuguuuggggguuccauucagauaacaaaacccaaaugaagaaccucuauggagacucaaauccucaaaaguucaccucaucugcuaauggaguaaccacacauuauguuucucagauuggcggcuucccagaucaaacagaagacggaggacuaccacaaagcggcagaauugucguugauuacaugaugcaaaaaccugggaaaacaggaacaauugucuaucaaagagguguuuuguugccucaaaagguguggugcgcgaguggcaggagcaaaguaauaaaaggguccuugccuuuaauuggugaagcagauugccuucaugaaaaauacgguggauuaaacaaaagcaagccuuacuacacaggagaacacgcaaaagccauaggaaauugcccaauaugggugaaaacaccuuugaagcuugccaauggaaccaaauauagaccuccugcaaaacuauuaaaggaaagggguuucuucggagcuauugcugguuuccuagaagggggaugggaaggaaugauugcagguuggcacggauacacaucucacggagcacauggaguggcaguugcugcagaccuuaagagcacacaagaagcuauaaacaagauaacaaaaaaucucaacucuuugagugagcuagaaguaaagaaucuucaaaggcuaaguggugccauggaugaacuccacaacgaaauacucgagcuggaugagaaaguggaugaccucagagcugacacuauaaguucacaaauagaacuugcagucuugcuuuccaacgaaggaauaauaaacagugaagacgagcauuuauuggcacuugagagaaaacuaaagaaaaugcugggucccucugcuguagacauaggaaauggaugcuucgaaaccaaacacaaaugcaaccagacuugcuuagacaggauagcugcuggcaccuuuaaugcaggagaguuuucucuccccacuuuugauucauugaacauuacugcugcaucuuuaaaugaugauggauuggauaaccauacuauacugcucuauuacucaacugcugcuucuaguuuggcuguaacauugaugcuagcuauuuuuauuguuuauauggucuccagagacaacguuucaugcuccaucugucuauaa

SEQ ID NO: 60154 - RNA, 1755 nt, Artificial Sequence
  derived and/or modified CDS sequence (wt) from hemagglutinin__InfluenzaB__AHL94438
augaaggcaauaauuguacuacucaugguaguaacauccaaugcagaucgaaucugcacugggauaacaucuucaaacucaccucauguagucaaaacagcuacucaaggggaggucaaugugacuggcgcgauaccauugacaacaacaccaacaaaaucuuauuuugcaaaucucaaaggaacaaggaccagagggaaacuaugcccggacugucucaacuguacagaucuggauguggccuugggcaggccaauguguguggggaccacaccuucugcuaaagcuucaauacuccacgaagucagaccuguuacaucagggugcuuuccuauaaugcacgacagaacaaaaaucaggcaacuacccaaucuucucagaggauaugaaaauaucagguuaucaacccaaaacguuaucgaugcagaaaaagcaccaggaggacccuacagacuuggaaccucaggaucuugcccuaacgcuaccaguaaaaucggguuuuucgaaacaauggcuugggcugucccaaaggacaacuacaaaaaugcaacgaacccacaaacaguagaaguaccauacauuuguacagaaggggaagaccaaauuacuguuuggggguuccauucagauaacaaaacccaaaugaagaaccucuauggagacucaaauccucaaaaguucaccucaucugcuaauggaguaaccacacauuauguuucucagauuggcgacuucccagaucaaacagaagacggaggacuaccacaaagcggcagaauuguuguugauuacauggugcaaaaaccugggaaaacaggaacaauugucuaucaaagaggcguuuuguugccucaaaagguguggugcgcgaguggcaggagcaaaguaauaaaagggucauuaccuuuaauuggugaagcagauugccuucaugaaaaauacgguggauuaaacaagagcaagccuuacuacacaggagaacaugcaaaagccauaggaaauugcccaauauggguaaaaacaccuuugaagcuugccaauggaaccaaauauagaccuccugcaaaacuauuaaaggaaagggguuucuucggagcuauugcugguuuccuagaaggaggaugggaaggaaugauugcagguuggcacggauacacaucucacggagcacauggaguggcaguggcggcagaccuuaagaguacacaagaagcuauaaauaagauaacaaaaaaucucaauucuuugagugagcuagaaguaaaaaaccuucaaagacuaaguggugccauggaugaacuccacaacgaaauacucgaacuggaugagaaaguggaugaucucagagcugacacuauaagcucacaaauagaacuugcagucuugcuuuccaacgaaggaauaauaaacagugaagacgagcaucuauuggcacuugagagaaaacuaaagaaaaugcugggucccucugcuguagacauaggaaauggaugcuucgaaaccaaacacaaaugcaaccagaccugcuuagacaggauagcugcuggcaccuuuaaugcaggagaauuuucucuccccacuuuugauucauugaacauuacugcugcaucuuuaaaugaugauggauuggauaaccauacuauacugcucuauuacucaacugcugcuucuaguuuggcuguaacauuaaugcuagcuauuuuuauuguuuauauggucuccagagacaacguuucaugcuccaucugucuauaa

SEQ ID NO: 60155 - RNA, 1755 nt, Artificial Sequence
  derived and/or modified CDS sequence (wt) from hemagglutinin__InfluenzaB__AHL94460
augaaggcaauaauuguacuacucaugguaguaacauccaaugcagaucgaaucugcacugggauaacaucuucaaacucaccucauguagucaaaacagcuacucaaggggaggucaaugugacuggcgcgauaccauugacaacaacaccaacaaaaucuuauuuugcaaaucucaaaggaacaaggaccagagggaaacuaugcccggacugucucaacuguacagaucuggauguggccuugggcaggccaauguguguggggaccacaccuucugcuaaagcuucaauacuccacgaagucagaccuguuacaucagggugcuuuccuauaaugcacgacagaacaaaaaucaggcaacuacccaaucuucucagaggauaugaaaauaucagguuaucaacccaaaacguuaucgaugcagaaaaagcaccaggaggacccuacagacuuggaaccucaggaucuugcccuaacgcuaccagcaaaaucggguuuuucgcaacaauggcuugggcugucccaaaggacaacuacaaaaaugcaacgaacccacaaacaguagaaguaccauacauuuguacagaagaggaagaccaaauuacuguuuggggguuccauucagauaacaaaacccaaaugaagaaccucuauggagacucaaauccucaaaaguucaccucaucugcuaauggaguaaccacacauuauguuucucagauuggcgacuucccagaucaaacagaagacggaggacuaccacaaagcggcagaauuguuguugauuacauggugcaaaaaccugggaaaacaggaacaauugucuaucaaagaggcguuuuguugccucaaaagguguggugcgcgaguggcaggagcaaaguaauaaaagggucauuaccuuuaauuggugaagcagauugccuucaugaaaaauacgguggauuaaacaagagcaagccuuacuacacaggagaacaugcaaaagccauaggaaauugcccaauauggguaaaaacaccuuugaagcuugccaauggaaccaaauauagaccuccugcaaaacuauuaaaggaaagggguuucuucggagcuauugcugguuuccuagaaggaggaugggaaggaaugauugcagguuggcacggauacacaucucacggagcacauggaguggcaguggcggcagaccuuaagaguacacaagaagcuauaaauaagauaacaaaaaaucucaauucuuugagugagcuagaaguaaaaaaccuucaaagacuaaguggugccauggaugaacuccacaacgaaauacucgaacuggaugagaaaguggaugaucucagagcugacacuauaagcucacaaauagaacuugcagucuugcuuuccaacgaaggaauaauaaacagugaagacgagcaucuauuggcacuugagagaaaacuaaagaaaaugcugggucccucugcuguagacauaggaaauggaugcuucgaaaccaaacacaaaugcaaccagaccugcuuagacaggauagcugcuggcaccuuuaaugcaggagaauuuucucuccccacuuuugauucauugaacauuacugcugcaucuuuaaaugaugauggauuggauaaccauacuauacugcucuauuacucaacugcugcuucuaguuuggcuguaacauuaaugcuagcuauuuuuauuguuuauauggucuccagagacaacguuucaugcuccaucugucuauaa

SEQ ID NO: 60156 - RNA, 1755 nt, Artificial Sequence
  derived and/or modified CDS sequence (wt) from hemagglutinin__InfluenzaB__AHL94471
augaaggcaauaauuguacuacucaugguaguaacauccaaugcagaucgaaucugcacugggauaacaucuucaaacucaccucauguggucaaaacagcuacucaaggggaggucaaugugacuggcgugauaccacugacaacaacaccaacaaaaucuuauuuugcaaaucucaaaggaacaaggaccagagggaaacuaugcccggacugucucaacuguacagaucuggauguggccuugggcaggccaauguguguggggaccacaccuucugcuaaagcuucaauacuccacgaggucagaccuguuacauccgggugcuuuccuauaaugcacgacagaacaaaaaucaggcagcuacccaaucuucucagaggauaugaaaagaucagguuaucaacccaaaacguuaucgaugcagaaaaagcaccaggaggacccuacagacuuggaaccucaggaucuugcccuaacgcuaccaguaaaaucggauuuuucgcaacaauggcuugggcugucccaaaggacaacuacaaaaaugcaacgaacccacuaacaguggaaguaccauacauuuguacagaaggggaagaccaaauuacuguuuggggguuccauucggauaacaaaacccaaaugaagagccucuauggagacucaaauccucaaaaguucaccucaucugcuaauggaguaaccacacauuauguuucucagauuggcgacuucccagaucaaacagaagacggaggacuaccacaaagcggcagaauuguuguugauuacaugaugcaaaaaccugggaaaacaggaacaauugucuaucaaagagguguuuuguugccucaaaagguguggugcgcgaguggcaggagcaaaguaauaaaagggucauugccuuuaauuggugaagcagauugccuucaugaagaauacgguggauuaaacaaaagcaagccuuacuacacaggaaaacaugcaaaagccauaggaaauugcccaauauggguaaaaacaccuuugaagcuugccaauggaaccaaauauagaccuccugcaaaacuauugaaggaaagggguuucuucggagcuauugcugguuuccuagaaggaggaugggaaggaaugauugcagguuggcacggauacacaucucacggagcacauggaguggcaguggcggcagaccuuaagaguacacaagaagcuauaaauaagauaacaaaaaaucucaauucuuugagugaacuagaaguaaagaaccuucaaagacuaaguggugccauggaugaacuccacaacgaaauacucgagcuggaugaaaaaguggaugaucucagagcugacacuauaagcucacaaauagaacuugcagucuugcuuuccaacgaaggaauaauaaacagugaagacgagcaucuauuggcacuugagagaaaacuaaagaaaaugcugggucccucugcuguagacauaggaaacggaugcuucgaaaccaaacacaaaugcaaccagaccugcuuagacaggauagcugcuggcaccuuuaaugcaggagaauuuucucuccccacuuuugauucauugaacauuacugcugcaucuuuaaaugaugauggauuggauaaccauacuauacugcucuauuacucaacugcugcuucuaguuuggcuguaacauuaaugcuagcuauuuuuauuguuuauauggucuccagagacaacauuucaugcuccaucugucuauaa

SEQ ID NO: 60157 - RNA, 1758 nt, Artificial Sequence
  derived and/or modified CDS sequence (wt) from hemagglutinin__InfluenzaB__AHL94482
augaaggcaauaauuguacuacucaugguaguaacauccaaugcagaucgaaucugcacugggauaacaucgucaaacucaccacaugucgucaaaacugcuacucaaggggaggucaaugugaccgguguaauaccacugacaacaacacccaccaaaucucauuuugcaaaucucaaaggaacagaaaccagggggaaacuaugcccaaaaugccucaacugcacagaucuggacguagccuugggcagaccaaaaugcacggggaaaauacccucggcaagaguuucaauacuccaugaagucagaccuguuacaucugggugcuuuccuauaaugcacgauagaacaaaaauuagacagcugccuaaccuucuccgaggauacgaacauaucagguuaucaacucacaacguuaucaaugcagaaaaugcaccaggaggacccuacaaaauuggaaccucagggucuugcccuaacguuaccaauggaaacggauucuucacaacaauggcuugggccgucccaaaaaacgacaaaaacaaaacagcaacaaauccauuaacaauagaaguaccauacauuuguacagaaggagaagaccaaauuaccguuuggggguuccacucugacaacgagacccaaauggcaaagcucuauggggacucaaagccccagaaguucaccucaucugccaacggagugaccacacauuacguuucacagauugguggcuucccaaaucaaacagaagacggaggacuaccacaaagugguagaauuguuguugauuacauggugcaaaaaucugggaaaacaggaacaauuaccuaucaaagagguauuuuauugccucaaaagguguggugcgcaaguggcaggagcaagguaauaaaaggauccuugccuuuaauuggagaagcagauugccuccacgaaaaauacgguggauuaaacaaaagcaagccuuacuacacaggggaacaugcaaaggccauaggaaauugcccaauaugggugaaaacacccuugaagcuggccaauggaaccaaauauagaccuccugcaaaacuauuaaaggaaagggguuucuucggagcuauugcugguuucuuagaaggaggaugggaaggaaugauugcagguuggcacggauacacaucccauggggcacauggaguagcgguggcagcugaccuuaagagcacucaagaggccauaaacaagauaacaaaaaaucucaacucuuugagugagcuggaaguaaagaaucuucaaagacuaagcggugccauggaugaacuccacaacgaaauacuagaacuagaugagaaaguggaugaucucagagcugauacaauaagcucacaaauagaacucgcaguccugcuuuccaaugaaggaauaauaaacagugaagaugaacaucucuuggcgcuugaaagaaagcugaagaaaaugcugggccccucugcuguagagauagggaauggaugcuuugaaaccaaacacaagugcaaccagaccugucucgacagaauagcugcugguaccuuugaugcaggagaauuuucucuccccaccuuugauucacugaauauuacugcugcaucuuuaaaugacgauggauuggauaaucauacuauacugcuuuacuacucaacugcugccuccaguuuggcuguaacacugaugauagcuaucuuuguuguuuauauggucuccagagacaauguuucuugcuccaucugucuauaa

SEQ ID NO: 60158 - RNA, 1755 nt, Artificial Sequence
  derived and/or modified CDS sequence (wt) from hemagglutinin__InfluenzaB__AHL94493
augaaggcaauaauuguacuacucaugguaguaacauccaaugcagaucgaaucugcacugggauaacaucuucaaacucaccucauguggucaaaacagcuacucaaggggaggucaaugugacuggcgugauaccacugacaacaacaccaacaaaaucuuauuuugcaaaucucaaaggaacaaggaccagagggaaacuaugcccggacugucucaacuguacagaucuggauguggccuugggcaggccaauguguguggggaccacaccuucugcuaaagcuucaauacuccacgaggucagaccuguuacauccgggugcuuuccuauaaugcacgacagaacaaaaaucaggcaacuacccaaucuucucagaggauaugaaaagaucagguuaucaacccaaaacguuaucgaugcagaaaaagcaccaggaggacccuacagacuuggaaccucaggaucuugcccuaacgcuaccaguaaaaucggauuuuucgcaacaauggcuugggcugucccaaaggacaacuacaaaaaugcaacgaacccacuaacaguggaaguaccauacauuuguacagaaggggaagaccaaauuacuguuuggggguuccauucggauaacaaaacccaaaugaagagccucuauggagacucaaauccucaaaaguucaccucaucugcuaauggaguaaccacacauuauguuucucagauuggcgacuucccagaucaaacagaagacggaggacuaccacaaagcggcagaauuguuguugauuacaugaugcaaaaaccugggaaaacaggaacaauugucuaucaaagagguguuuuguugccucaaaagguguggugcgcgaguggcaggagcaaaguaauaaaagggucauugccuuuaauuggugaagcagauugccuucaugaagaauacgguggauugaacaaaagcaagccuuacuacacaggaaaacaugcaaaagccauaggaaauugcccaauauggguaaaaacaccuuugaagcuugccaauggaaccaaauauagaccuccugcaaaacuauugaaggaaagggguuucuucggagcuauugcugguuuccuagaaggaggaugggaaggaaugauugcagguuggcacggauacacaucucacggagcacauggaguggcaguggcggcagaccuuaagaguacacaagaagcuauaaauaagauaacaaaaaaucucaauucuuugagugaacuagaaguaaagaaccuucaaagacuaaguggugccauggaugaacuccacaacgaaauacucgagcuggaugaaaaaguggaugaucucagagcugacacuauaagcucacaaauagaacuugcagucuugcuuuccaacgaaggaauaauaaacagugaagacgagcaucuauuggcacuugagagaaaacuaaagaaaaugcugggucccucugcuguagacauaggaaacggaugcuucgaaaccaaacacaaaugcaaccagaccugcuuagacaggauagcugcuggcaccuuuaaugcaggagaauuuucucuccccacuuuugauucauugaacauuacugcugcaucuuuaaaugaugauggauuggauaaccauacuauacugcucuauuacucaacugcugcuucuaguuuggcuguaacauuaaugcuagcuauuuuuauuguuuauauggucuccagagacaacguuucaugcuccaucugucuauaa

SEQ ID NO: 60159 - RNA, 1755 nt, Artificial Sequence
  derived and/or modified CDS sequence (wt) from hemagglutinin__InfluenzaB__AHL94504
augaaggcaauaauuguacuacucaugguaguaacauccaaugcagaucgaaucugcacugggauaacaucuucaaacucaccucauguagucaaaacagcuacucaaggggaggucaaugugacuggcgcgauaccauugacaacaacaccaacaaaaucuuauuuugcaaaucucaaaggaacaaggaccagagggaaacuaugcccggacugucucaacuguacagaucuggauguggccuugggcaggccaauguguguggggaccacaccuucugcuaaagcuucaauacuccacgaagucagaccuguuacaucagggugcuuuccuauaaugcacgacagaacaaaaaucaggcaacuacccaaucuucucagaggauaugaaaauaucagguuaucaacccaaaacguuaucgaugcagaaaaagcaccaggaggacccuacagacuuggaaccucaggaucuugcccuaacgcuaccaguaaaaucggguuuuucgcaacaauggcuugggcugucccaaaggacaacuacaaaaaugcaacgaacccacaaacaguagaaguaccauacauuuguacagaaggggaagaccaaauuacuguuuggggguuccauucagauaacaaaacccaaaugaagaaccucuauggagacucaaauccucaaaaguucaccucaucugcuaauggaguaaccacacauuauguuucucagauuggcgacuucccagaucaaacagaagacggaggacuaccacaaagcggcagaauuguuguugauuacauggugcaaaaaccugggaaaacaggaacaauugucuaucaaagaggcguuuuguugccucaaaagguguggugcgcgaguggcaggagcaaaguaauaaaagggucauuaccuuuaauuggugaagcagauugccuucaugaaaaauacgguggauuaaacaagagcaagccuuacuacacaggagaacaugcaaaagccauaggaaauugcccaauauggguaaaaacaccuuugaagcuugccaauggaaccaaauauagaccuccugcaaaacuauuaaaggaaagggguuucuucggagcuauugcugguuuccuagaaggaggaugggaaggaaugauugcagguuggcacggauacacaucucacggagcacauggaguggcaguggcggcagaccuuaagaguacacaagaagcuauaaauaagauaacaaaaaaucucaauucuuugagugagcuagaaguaaaaaaccuucaaagacuaaguggugccauggaugaacuccacaacgaaauacucgaacuggaugagaaaguggaugaucucagagcugacacuauaagcucacaaauagaacuugcagucuugcuuuccaacgaaggaauaauaaacagugaagacgagcaucuauuggcacuugagagaaaacuaaagaaaaugcugggccccucugcuguagacauaggaaauggaugcuucgaaaccaaacacaaaugcaaccagaccugcuuagacaggauagcugcuggcaccuuuaaugcaggagaauuuucucuccccacuuuugauucauugaacauuacugcugcaucuuuaaaugaugauggauuggauaaccauacuauacugcucuauuacucaacugcugcuucuaguuuggcuguaacauuaaugcuagcuauuuuuauuguuuauauggucuccagagacaacguuucaugcuccaucugucuauaa

SEQ ID NO: 60160 - RNA, 1758 nt, Artificial Sequence
  derived and/or modified CDS sequence (wt) from hemagglutinin__InfluenzaB__AHL94515
augaaggcaauaauuguacuacucaugguaguaacauccaaugcagaucgaaucugcacugggauaacaucgucaaacucaccacaugucgucaaaacugcuacucaaggggaggucaaugugacugguguaauaccacugacaacaacacccaccaaaucucacuuugcaaaucucaaaggaacagaaaccagggggaaacuauguccaaaaugccucaacugcacagaucuggacguagccuugggcagaccaaaaugcacggggaaaauacccucggcaagaguuucaauacuccaugaagucagaccuguuacaucugggugcuuuccuauaaugcacgacagaacaaaaauuagacagcugccuaaccuucuccgaggauacgaacauaucagguuaucaacuuauaacguuaucaaugcagaagaugcaccaggaggacccuacaaaauuggaaccucagggucuugcccuaacguuaccaauggaaacggauuuuucgcaacaauggcuugggccgucccaaaaaacgacaaaaacaaaacagcaacaaauccauuaacaauagaaguaccauacauuuguacagaaggagaagaccaaauuaccguuuggggguuccauucugacaacgagacccaaauggaaaagcucuauggggacucaaagccccagaaauucaccucaucugccaacggagugaccacacauuacguuucacagauugguggcuucccaaaucaaacagaagacggaggacuaccacaaagugguagaauuguuguugauuacauggugcaaaaaucugggaaaacaggaacaauuaccuaucaaagagguauuuuauugccucaaaagguguggugcgcaaguggcaggagcaagguaauaaaaggauccuugccuuuaauuggagaagcagauugccuccacgaaaaauacgguggauuaaacaaaagcaagccuuacuacacaggggaacaugcaaaggccauaggaaauugcccaauaugggugaaaacacccuugaagcuggccaauggaaccaaauauagaccuccugcaaaacuauuaaaggaaagggguuucuucggagcuauugcugguuucuuagaaggaggaugggaaggaaugauugcagguuggcacggauacacaucccauggggcacacggaguagcgguggcagcagaccuuaagagcacucaagaggccauaaacaagauaacaaaaaaucucaacucuuugagugagcuggaaguaaagaaucuucaaagacuaagcggugccauggaugaacuccacaacgaaauacuagaacuagaugagaaaguggaugaucucagagcugauacaauaagcucacaaauagaacucgcaguccugcuuuccaaugaaggaauaauaaacagugaagaugaacaucucuuggcgcuugaaagaaagcugaagaaaaugcugggccccucugcuguagagauagggaauggaugcuuugaaaccaaacacaagugcaaccagaccugucucgacagaauagcugcugguaccuuugaugcaggagaauuuucucuccccaccuuugauucacugaauauuacugcugcaucuuuaaaugacgauggauuggauaaucauacuauacugcuuuacuacucaacugcugccuccaguuuggcuguaacacugaugauagcuaucuuuguuguuuauauggucuccagagacaauguuucuugcuccaucugucuauaa

SEQ ID NO: 60161 - RNA, 1755 nt, Artificial Sequence; identical to SEQ ID NO: 60143
  derived and/or modified CDS sequence (wt) from hemagglutinin__InfluenzaB__AHL94526

SEQ ID NO: 60162 - RNA, 1758 nt, Artificial Sequence
  derived and/or modified CDS sequence (wt) from hemagglutinin__InfluenzaB__AHL94537
augaaggcaauaauuguacuacucaugguaguaacauccaaugcagaucgaaucugcacugggauaacaucgucaaacucaccacaugucgucaaaacugcuacucaaggggaggucaaugugaccgguguaauaccacugacaacaacacccaccaaaucucauuuugcaaaucucaaaggaacagaaaccagggggaaacuaugcccaaaaugccucaacugcacagaucuggacguagccuugggcagaccaaaaugcacggggaaaauacccucggcaagaguuucaauacuccaugaagucagaccuguuacaucugggugcuuuccuauaaugcacgauagaacaaaaauuagacagcugccuaaccuucuccgaggauacgaacauaucagguuaucaacucacaacguuaucaaugcagaaaaugcaccaggaggacccuacaaaauuggaaccucagggucuugcccuaacguuaccaauggaaacggauucuucgcaacaauggcuugggccgucccaaaaaacgacaaaaacaaaacagcaacaaauccauuaacaauagagguaccauacauuuguacagaaggagaagaccaaauuaccguuuggggguuccacucugacaacgagacccaaauggcaaagcucuauggggacucaaacccccagaaguucaccucaucugccaacggagugaccacacauuacauuucacagauugguggcuucccaaaucaaacagaagacggaggacuaccacaaagugguagaauuguuguugauuacauggugcaaaaaucugggaaaacaggaacaauuaccuaucaaagagguauuuuauugccucaaaagguguggugcgcaaguggcaggagcaagguaauaaaaggauccuugccuuuaauuggagaagcagauugccuccacgaaaaauacgguggguuaaacaaaagcaagccuuacuacacaggggaacaugcaaaggccauaggaaauugcccaauaugggugaaaacacccuugaagcuggccaauggaaccaaauauagaccuccugcaaaacuauuaaaggaaagggguuucuucggagcuauugcugguuucuuagaaggaggaugggaaggaaugauugcagguuggcacggauacacaucccauggggcacauggaguagcgguggcagcugaccuuaagagcacucaagaggccauaaacaagauaacaaaaaaucucaacucuuugagugagcuggaaguaaagaaucuucaaagacuaagcggugccauggaugaacuccacaacgaaauacuagaacuagaugagaaaguggaugaucucagagcugauacaauaagcucacaaauagaacucgcaguccugcuuuccaaugaaggaauaauaaacagugaagaugaacaucucuuggcgcuugaaagaaagcugaagaaaaugcugggccccucugcuguagagauagggaauggaugcuuugaaaccaaacacaagugcaaccagaccugucucgacagaauagcugcugguaccuuugaugcaggagaauuuucucuccccaccuuugauucacugaauauuacugcugcaucuuuaaaugacgauggauuggauaaucauacuauacugcuuuacuacucaacugcugccuccaguuuggcuguaacacugaugauagcuaucuuuguuguuuauauggucuccagagacaauguuucuugcuccaucugucuauaa

SEQ ID NO: 60163 - RNA, 1755 nt, Artificial Sequence
  derived and/or modified CDS sequence (wt) from hemagglutinin__InfluenzaB__AHL94548
augaaggcaauaauuguacuacuaaugguaguaacauccaaugcagaucgaaucugcacugggauaacaucuucaaacucaccucauguggucaaaacagcuacucaaggggaggucaaugugacuggugugauaccacuaacaacaacaccaauaaaaucuuauuuugcaaaucucaaaggaacaaagaccagagggaaacuaugcccagacugucucaacuguacagaucuggauguggcccugggcaggccaaugugugugggaacuacaccuucugcgaaagcuucaauacuucacgaagucagaccuguuacauccgggugcuucccuauaaugcacgacagaacaaaaaucaggcaacuagccaaucuucucagaggauaugaaaauaucagguuaucaacccaaaacguuaucgaugcagaaagggcaccaggaggacccuacagacuuggaaccucaggaucuugcccuaacgcuaccaguaaaagcggauuuuucgcaacaauggcuugggcugucccaaaggacaacaacaaaaaugcaacgaacccauuaacaguagaaguaccauacauuugugcagaaggggaagaccaaauuacuguuuggggguuccauucagauaacaaaacccaaaugaagaaccucuauggagacucaaauccucaaaaguucaccucaucugcuaauggaguaaccacacauuauguuucucagauuggcggcuucccagaucaaacagaagacggaggacuaccacaaagcggcagaauugucguugauuacaugaugcaaaaaccugggaaaacaggaacaauugucuaucaaagagguguuuuguugccucaaaagguguggugcgcgaguggcaggagcaaaguaauaaaaggguccuugccuuuaauuggugaagcagauugccuucaugaaaaauacgguggauuaaacaaaagcaagccuuacuacacaggagaacaugcaaaagccauaggaaauugcccaauaugggugaaaacaccuuugaagcuugccaauggaaccaaauauagaccuccugcaaaacuauuaaaggaaagggguuucuucggagcuauugcugguuuccuagaaggaggaugggaaggaaugauugcagguuggcacggauacacaucucacggagcacauggaguggcaguugcugcagaccuuaagagcacacaagaagcuauaaacaagauaacaaaaaaucucaacucuuugagugagcuagaaguaaagaaucuucaaaggcuaaguggugccauggaugaacuccacaacgaaauacucgagcuggaugagaaaguggaugaccucagagcugacacuauaaguucacaaauagaacuugcagucuugcuuuccaacgaaggaauaauaaacagugaagacgagcaucuauuggcacuugagagaaaacuaaagaaaaugcugggucccucugcuguagacauaggaaauggaugcuucgaaaccaaacacaaaugcaaccagaccugcuuagacaggauagcugcuggcaccuuuaaugcaggagaguuuucucuccccacuuuugauucauugaacauuacugcugcaucuuuaaaugaugauggauuggauaaccauacuauacugcucuauuacucaacugcugcuucuaguuuggcuguaacauugaugcuagcuauuuuuauuguuuauauggucuccagagacaacguuucaugcuccaucugucuauaa

SEQ ID NO: 60164 - RNA, 1755 nt, Artificial Sequence
  derived and/or modified CDS sequence (wt) from hemagglutinin__InfluenzaB__AHL94559
augaaggcaauaauuguacuacucaugguaguaacauccaaugcagaucgaaucugcacugggauaacaucuucaaacucaccucauguggucaaaacagcuacucaaggggaggucaaugugacuggcgugauaccacugacaacaacaccaacaaaaucuuauuuugcaaaucucaaaggaacaaggaccagagggaaacuaugcccggacugucucaacuguacagaucuggauguggccuugggcaggccaauguguguggggaccacaccuucugcuaaagcuucaauacuccacgaggucagaccuguuacaucugggugcuuuccuauaaugcacgacagaacaaaaaucaggcaacuacccaaucuucucagaggauaugaaaagaucagguuaucaacccaaaacguuaucgaugcagaaaaagcaccaggaggacccuacagacuuggaaccucaggaucuugcccuaacgcuaccaguaaaaucggauuuuucgcaacaauggcuugggcugucccaaaggacaacuacaaaaaugcaacgaacccacuaacaguggaaguaccauacauuuguacagaaggggaagaccaaauuacuguuuggggguuccauucggauaacaaaacccaaaugaagagccucuauggagacucaaauccucaaaaguucaccucaucugcuaauggaguaaccacacauuauguuucucagauuggcgacuucccagaucaaacagaagacggaggacuaccacaaagcggcagaauuguuguugauuacaugaugcaaaaaccugggaaaacaggaacaauugucuaucaaagagguguuuuguugccucaaaagguguggugcgcgaguggcaggagcaaaguaauaaaagggucauugccuuuaauuggugaagcagauugccuucaugaagaauacgguggauuaaacaaaagcaagccuuacuacacaggaaaacaugcaaaagccauaggaaauugcccaauauggguaaaaacaccuuugaagcuugccaauggaaccaaauauagaccuccugcaaaacuauugaaggaaagggguuucuucggagcuauugcugguuuccuagaaggaggaugggaaggaaugauugcagguuggcacggauacacaucucacggagcacauggaguggcaguggcggcagaccuuaagaguacacaagaagcuauaaauaagauaacaaaaaaucucaauucuuugagugaacuagaaguaaagaaccuucaaagacuaaguggugccauggaugaacuccacaacgaaauacucgagcuggaugaaaaaguggaugaucucagagcugacacuauaagcucacaaauagaacuugcagucuugcuuuccaacgaaggaauaauaaacagugaagacgagcaucuauuggcacuugagagaaaacuaaagaaaaugcugggucccucugcuguagacauaggaaacggaugcuucgaaaccaaacacaaaugcaaccagaccugcuuagacaggauagcugcuggcaccuuuaaugcaggagaauuuucucuccccacuuuugauucauugaacauuacugcugcaucuuuaaaugaugauggauuggauaaccauacuauacugcucuauuacucaacugcugcuucuaguuuggcuguaacauuaaugcuagcuauuuuuauuguuuauauggucuccagagacaacguuucaugcuccaucugucuauaa

SEQ ID NO: 60165 - RNA, 1755 nt, Artificial Sequence
  derived and/or modified CDS sequence (wt) from hemagglutinin__InfluenzaB__AHL94570
augaaggcaauaauuguacuacucaugguaguaacauccaaugcagaucgaaucugcacugggauaacaucuucaaacucaccucauguggucaaaacagcuacucaaggggaggucaaugugacuggugugauaccacuaacaacaacaccaacaaaaucuuauuuugcaaaucucaaaggaacaaagaccagagggaaacuauguccagacugucucaacuguacagaucuggauguggccuugggcagaccaaugugugugggaacuacaccuucugcgaaagcuucaauacuucacgaagucagaccuguuacauccgggugcuucccuauaaugcacgacagaacaaaaaucaggcaacuagccaaucuucucagaggauaugaaaauaucagguuaucaacccaaaacguuaucgaugcagaaaaggcaccaggaggacccuacagacuuggaaccucaggaucuugcccuaacgcuaccaguaaaagcggauuuuucgcaacaauggcuugggcugucccaaaggacaacaacaaaaaugcaacgaacccauuaacaguagaaguaccauacauuugugcagaaggagaagaccaaauuacuguuuggggguuccauucagauaacaaaacccaaaugaagaaccucuauggagacucaaauccucaaaaguucaccucaucugcuaauggaguaaccacacauuauguuucucagauuggcggcuucccagaucaaacagaagacggaggacuaccacaaagcggcagaauugucguugauuacaugaugcaaaaaccugggaaaacaggaacaauugucuaucaaagagguguuuuguugccucaaaagguguggugcgcgaguggcaggagcaaaguaauaaaaggguccuugccuuuaauuggugaagcagauugccuucaugaaaaauacgguggauuaaacaaaagcaagccuuacuacacaggagaacaugcaaaagccauaggaaauugcccaauaugggugaaaacaccuuugaagcuugccaauggaaccaaauauagaccuccugcaaaacuauuaaaggaaagggguuucuucggagcuauugcugguuuccuagaaggaggaugggaaggaaugauugcagguuggcacggauacacaucucacggagcacauggaguggcaguugcugcagaccuuaagagcacacaagaagcuauaaacaagauaacaaaaaaucucaacucuuugagugagcuagaaguaaagaaucuucaaaggcuaaguggugccauggaugaacuccacaacgaaauacucgagcuggaugagaaaguggaugaucucagagcugacacuauaaguucacaaauagaacuugcagucuugcuuuccaacgaaggaauaauaaacagugaagacgagcaucuauuggcacuugagagaaaacuaaagaaaaugcugggucccucugcuguagacauaggaaauggaugcuucgaaaccaaacacaaaugcaaccagaccugcuuagacaggauagcugcuggcaccuuuaaugcaggagaauuuucucuccccacuuuugauucauugaacauuacugcugcaucuuuaaaugaugauggauuggauaaccauacuauacugcucuauuacucaacugcugcuucuaguuuggcuguaacauugaugcuagcuauuuuuauuguuuauauggucuccagagacaacguuucaugcuccaucugucuauaa

SEQ ID NO: 60166 - RNA, 1755 nt, Artificial Sequence; identical to SEQ ID NO: 60165
  derived and/or modified CDS sequence (wt) from hemagglutinin__InfluenzaB__AHL94581

SEQ ID NO: 60167 - RNA, 1755 nt, Artificial Sequence; identical to SEQ ID NO: 60165
  derived and/or modified CDS sequence (wt) from hemagglutinin__InfluenzaB__AHL94592

SEQ ID NO: 60168 - RNA, 1758 nt, Artificial Sequence
  derived and/or modified CDS sequence (wt) from hemagglutinin__InfluenzaB__AHL94603
augaaggcaauaauuguacuacucaugguaguaacauccaaugcagaucgaaucugcacugggauaacaucgucaaacucaccacaugucgucaaaacugcuacucagggggaggucaaugugaccgguguaauaccacugacaacaacacccaccaaaucucauuuugcaaaucucaaaggaacagaaaccagggggaaacuaugcccaaaaugccucaacugcacagaucuggacguagccuugggcagaccaaaaugcacggggaaaauacccucggccagaguuucaauacuccaugaagucagaccuguuacaucugggugcuuuccuauaaugcacgauagaacaaaaauuagacagcugccuaaucuucuccgaggauacgaaaauaucagguuaucaacucacaacguuaucaaugcagaaaaugcaccaggaggacccuacaaaauuggaaccucagggucuugcccuaacguuaccaauggaaacggauucuucgcaacaauggcuugggccgucccaaaaaacgacaaaaacaaaacagcaacaaauccauuaacaauagaaguaccauacauuuguacagaaggagaagaccaaauuaccguuuggggguuccacucugacaacgagacccaaauggcaaagcucuauggggacucaaagccccagaaguucaccucaucugccaacggagugaccacacauuacguuucacagauugguggcuucccaaaucaaacagaagacggaggacuaccacaaagugguagaauuguuguugauuacauggugcaaaaaucugggaaaacaggaacaauuaccuaucaaagagguauuuuauugccucaaaagguguggugcgcaaguggcaggagcaagguaauaaaaggauccuugccuuuaauuggagaagcagauugccuccacgaaaaauacgguggauuaaacaaaagcaagccuuacuacacaggggaacaugcaaaggccauaggaaauugcccaauaugggugaaaacacccuugaagcuggccaauggaaccaaauauagaccuccugcaaaacuauuaaaggaaagggguuucuucggagcuauugcugguuucuuagaaggaggaugggaaggaaugauugcagguuggcacggauacacaucccauggggcacauggaguagcgguggcagcugaccuuaagagcacucaagaggccauaaacaagauaacaaaaaaucucaacucuuugagugagcuggaaguaaagaaucuucaaagacuaagcggugccauggaugaacuccacaacgaaauacuagaacuagaugagaaaguggaugaucucagagcugauacaauaagcucacaaauagaacucgcaguccugcuuuccaaugaaggaauaauaaacagugaagaugaacaucucuuggcgcuugaaagaaagcugaagaaaaugcugggccccucugcuguagagauagggaauggaugcuuugaaaccaaacacaagugcaaccagaccugucucgacagaauagcugcugguaccuuugaugcaggagaauuuucucuccccaccuuugauucacugaauauuacugcugcaucuuuaaaugacgauggauuggauaaucauacuauacugcuuuacuauucaacugcugccuccaguuuggcuguaacacugaugauagcuaucuuuguuguuuauauggucuccagagacaauguuucuugcuccaucugucuauaa

SEQ ID NO: 60169 - RNA, 1758 nt, Artificial Sequence
  derived and/or modified CDS sequence (wt) from hemagglutinin__InfluenzaB__AHL94614
augaaggcaauaauuguacuacucaugguaguaacauccaaugcagaucgaaucugcacugggauaacaucgucaaacucaccacaugucgucaaaacugcuacucaaggggaggucaaugugaccgguguaauaccacugacaacaacacccaccaaaucucauuuugcaaaucucaaaggaacagaaaccagggggaaacuaugcccaaaaugccucaacugcacagaucuggacguagccuugggcagaccaaaaugcacggggaaaauacccucggcaagaguuucaauacuccaugaagucagaccuguuacaucugggugcuuuccuauaaugcacgauagaacaaaaauuagacagcugccuaaccuucuccgaggauacgaacauaucagguuaucaacucacaacguuaucaaugcagaaaaugcaccaggaggacccuacaaaauuggaaccucagggucuugcccuaacguuaccaauggaaacggauucuucgcaacaauggcuugggccgucccaaaaaacgacaaaaacaaaacagcaacaaauccauuaacaauagaaguaccauacauuuguacagaaggagaagaccaaauuaccguuuggggguuccacucugacaacgagacccaaauggcaaagcucuauggggacucaaagccccagaaguucaccucaucugccaacggagugaccacacauuacguuucacagauugguggcuucccaaaucaaacagaagacggaggacuaccacaaagugguagaauuguuguugauuacauggugcaaaaaucugggaaaacaggaacaauuaccuaucaaagagguauuuuauugccucaaaagguguggugcgcaaguggcaggagcaagguaauaaaaggauccuugccuuuaauuggagaagcagauugccuccacgaaaaauacgguggauuaaacaaaagcaagccuuacuacacaggggaacaugcaaaggccauaggaaauugcccaauaugggugaaaacacccuugaagcuggccaauggaaccaaauauagaccuccugcaaaacuauuaaaggaaagggguuucuucggagcuauugcugguuucuuagaaggaggaugggaaggaaugauugcagguuggcacggauacauaucccauggggcacauggaguagcgguggcagcugaccuuaagagcacucaagaggccauaaacaagauaacaaaaaaucucaacucuuugagugagcuggaaguaaagaaucuucaaagacuaagcggugccauggaugaacuccacaacgaaauacuagaacuagaugagaaaguggaugaucucagagcugauacaauaagcucacaaauagaacucgcaguccugcuuuccaaugaaggaauaauaaacagugaagaugaacaucucuuggcgcuugaaagaaagcugaagaaaaugcugggccccucugcuguagagauagggaauggaugcuuugaaaccaaacacaagugcaaccagaccugucucgacagaauagcugcugguaccuuugaugcaggagaauuuucucuccccaccuuugauucacugaauauuacugcugcaucuuuaaaugacgauggauuggauaaucauacuauacugcuuuacuacucaacugcugccuccaguuuggcuguaacacugaugauagcuaucuuuguuguuuauauggucuccagagacaauguuucuugcuccaucugucuauaa

SEQ ID NO: 60170 - RNA, 1755 nt, Artificial Sequence; identical to SEQ ID NO: 60143
  derived and/or modified CDS sequence (wt) from hemagglutinin__InfluenzaB__AHL94624

SEQ ID NO: 60171 - RNA, 1758 nt, Artificial Sequence
  derived and/or modified CDS sequence (wt) from hemagglutinin__InfluenzaB__AHL94646
augaaggcaauaauuguacuacucaugguaguaacauccaaugcagaucgaaucugcacugggauaacaucgucaaacucaccacaugucgucaaaacugcuacucaaggggaggucaaugugaccgguguaauaccacugacaacaacacccaccaaaucucauuuugcaaaucucaaaggaacagaaaccagggggaaacuaugcccaaaaugccucaacugcacagaucuggacguagccuugggcagaccaaaaugcacggggaaaauacccucggcaagaguuucaauacuccaugaagucagaccuguuacaucugggugcuuuccuauaaugcacgauagaacaaaaauuagacagcugccuaaccuucuccgaggauacgaacauaucagguuaucaacucacaacguuaucaaugcagaaaaugcaccaggaggacccuauaaaauuggaaccucagggucuugccuuaacguuaccaauggaaacggauucuucgcaacaauggcuugggccgucccaaaaaacgacaaaaacaaaacagcaacaaauccauuaacaauagaaguaccauacauuuguacagaaggagaagaccaaauuaccguuuggggguuccacucugacaacgagacccaaauggcaaagcucuauggggacucaaagccccagaaguucaccucaucugccaacggagugaccacacauuacguuucacagauugguggcuucccaaaucagacagaagacggaggacuaccacaaagugguagaauuguuguugauuacauggugcaaaaaucugggaaaacaggaacaauuaccuaucaaagagguauuuuauugccucaaaagguguggugcgcaaguggcaggagcaagguaauaaaaggauccuugccuuuaauuggagaagcagauugccuccacgaaaaauacgguggauuaaacaaaagcaagccuuacuacacaggggaacaugcaaaggccauaggaaauugcccaauaugggugaaaacacccuugaagcuggccaauggaaccaaauauagaccuccugcaaaacuauuaaaggaaagggguuucuucggagcuauugcugguuucuuagaaggaggaugggaaggaaugauugcagguuggcacggauacacaucccauggggcacauggaguagcgguggcagcugaccuuaagagcacucaagaggccauaaacaagauaacaaaaaaucucaacucuuugagugagcuggaaguaaagaaucuucaaagacuaagcggugccauggaugaacuccacaacgaaauacuagaacuagaugagaaaguggaugaucucagagcugauacaauaagcucacaaauagaacucgcaguccugcuuuccaaugaaggaauaauaaacagugaagaugaacaucucuuggcgcuugaaagaaagcugaagaaaaugcugggccccucugcuguagagauagggaauggaugcuuugaaaccaaacacaagugcaaccagaccugucucgacagaauagcugcugguacuuuugaugcaggagaauuuucucuccccaccuuugauucacugaauauuacugcugcaucuuuaaaugacgauggauuggauaaucauacuauacugcuuuacuacucaacugcugccuccaguuuggcuguaacacugaugauagcuaucuuuguuguuuauauggucuccagagacaauguuucuugcuccaucugucuauaa

SEQ ID NO: 60172 - RNA, 1758 nt, Artificial Sequence
  derived and/or modified CDS sequence (wt) from hemagglutinin__InfluenzaB__AHL94657
augaaggcaauaauuguacuacucaugguaguaacauccaaugcagaucgaaucugcacugggauaacaucgucaaacucaccacaugucgucaaaacugcuacucaaggggaggucaaugugacugguguaauaccacugacaacaacacccaccaaaucucauuuugcaaaucucaaaggaacagaaaccagagggaaacuaugcccaaaaugccccaacugcacagaucuggauguagccuugggcagaccaaaaugcacaggaaaaauacccucggcaagaguuucaauacuccaugaagucagaccuguuacaucugggugcuuuccuauaaugcacgacagaacaaaaauuagacagcugccuaaccuucuccgaggauacgaacauaucagauuaucaacucauaacguuaucaaugcagaaagugcaccaggaggacccuacaaaauuggaaccucagggucuugcccuaauguuaccaauggaaacggauuuuucgcaacaauggcuugggccgucccaaaaaacgacaaaaacaaaacagcaacagauccauuaacaauagaaguaccauacauuuguacagaaggagaagaccaaauuaccguuuggggguuccacucugacaacgagacccaaauggcaaaacucuauggggacucaaagccccagaaguucaccucaucugccaacggagugaccacacauuacguuucacagauugguggcuucccaaaucaaacagaagacggaggacuaccacaaagugguagaauuguuguugauuacauggugcaaaaaucugggaaaacaggaacaauuaccuaucaaagagguauuuuauugccucaaaagguguggugcgcaaguggcaggagcaagguaauaaaaggauccuugccuuuaauuggagaagcagauugccuccacgaaaaauacgguggauuaaacaaaagcaagccuuacuacacaggagaacaugcaaaggccauaggaaauugcccaauaugggugaagacacccuugaagcuggccaauggaaccaaauauagaccuccugcaaaacuauuaaaggaaagggguuucuucggagcuauugcugguuucuuagaaggaggaugggaaggaaugauugcagguuggcacggauacacgucccauggggcacauggaguagcaguggcagcagaccuuaagagcacucaagaagccauaaacaagauaacaaaaaaucuaaacucuuugagugagcuggaaguaaagaaucuucaaagacuaagcggugccauggaugaacuccacaacgaaauacuagaacuagacgagaaaguagaugaucucagagcugauacaauaagcucacaaauagaacucgcaguccugcuuuccaaugaaggaauaauaaacagugaagaugaacaucucuuggcgcuugaaagaaagcugaagaaaaugcugggccccucugcuguagagauagggaauggaugcuuugaaaccaaacacaagugcaaccagaccugucucgacagaauagcugcugguaccuuugaugcaggagaauuuucucuccccaccuuugauucacugaauauuacugcugcaucuuuaaaugacgauggauuggauaaucauaccauacugcuuuacuacucaacugcugccuccaguuuggcuguaacacugaugauagcuaucuuuguuguuuauauggucuccagagacaauguuucuugcuccaucugucuauaa

SEQ ID NO: 60173 - RNA, 1755 nt, Artificial Sequence; identical to SEQ ID NO: 60159
  derived and/or modified CDS sequence (wt) from hemagglutinin__InfluenzaB__AHL94668

SEQ ID NO: 60174 - RNA, 1755 nt, Artificial Sequence
  derived and/or modified CDS sequence (wt) from hemagglutinin__InfluenzaB__AHL94679
augaaggcaauaauuguacuacucaugguaguaacauccaaugcagaucgaaucugcacugggauaacaucuucaaacucaccucauguagucaaaacagcuacucaaggggaggucaaugugacuggcgcgauaccauugacaacaacaccaacaaaaucuuauuuugcaaaucucaaaggaacaaggaccagagggaaacuaugcccggacugucucaacuguacagaucuggauguggccuugggcaggccaauguguguggggaccacaccuucugcuaaagcuucaauacuccacgaagucagaccuguuacaucagggugcuuuccuauaaugcacgacagaacaaaaaucaggcaacuacccaaucuucucagaggauaugaaaauaucagguuaucaacccaaaacguuaucgaugcagaaaaagcaccaggaggacccuacagacuuggaaccucaggaucuugcccuaacgcuaccaguaaaaucggauuuuucgcaacaauggcuugggcugucccaaaggacaacuacaaaaaugcaacgaacccacaaacaguagaaguaccauacauuuguacagaaggggaagaccaaauuacuguuuggggguuccauucagacaacaaaacccaaaugaaaaaccucuacggagacucaaauccucaaaaguucaccucaucugcuaauggaguaaccacacauuauguuucucagauuggcgacuucccagaucaaacagaagacggaggacuaccacaaagcggcagaauuguugucgauuacauggugcaaaaaccugggaaaacaggaacaauugucuaucaaagaggcguuuuguugccucaaaagguguggugcgcgaguggcaggagcaaaguaauaaaagggucauuaccuuuaauuggugaagcagauugccuucaugaaaaauacgguggauuaaacaagagcaagccuuacuacacaggagaacaugcaaaagccauaggaaauugcccaauauggguaaaaacaccuuugaagcuugccaauggaaccaaauauagaccuccugcaaaacuauuaaaggaaagggguuucuucggagcuauugcugguuuccuagaaggaggaugggaaggaaugauugcagguuggcacggauacacaucucacggagcacauggaguggcaguggcggcagaccuuaagaguacacaagaagcuauaaauaagauaacaaaaaaucucaauucuuugagugagcuagaaguaaaaaaccuucaaagacuaaguggugccauggaugaacuccacaacgaaauacucgagcuggaugagaaaguggaugaucucagagcugacacuauaagcucacaaauagaacuugcagucuugcuuuccaacgaaggaauaauaaacagugaagacgagcaucuauuggcacuugagagaaaacuaaagaaaaugcugggucccucugcuguagacauaggaaauggaugcuucgaaaccaaacacaaaugcaaccagaccugcuuagacaggauagcugcuggcaccuuuaaugcaggagaauuuucucuccccacuuuugauucauugaacauuacugcugcaucuuuaaaugaugauggauuggauaaccauacuauacugcucuauuacucaacugcugcuucuaguuuggcuguaacauuaaugcuagcuauuuuuauuguuuauauggucuccagagacaacguuucaugcuccaucugucuauaa

SEQ ID NO: 60175 - RNA, 1758 nt, Artificial Sequence; identical to SEQ ID NO: 60168
  derived and/or modified CDS sequence (wt) from hemagglutinin__InfluenzaB__AHL94690

SEQ ID NO: 60176 - RNA, 1758 nt, Artificial Sequence
  derived and/or modified CDS sequence (wt) from hemagglutinin__InfluenzaB__AHL94701
augaaggcaauaauuguacuacucaugguaguaacauccaaugcagaucgaaucugcacugggauaacaucgucaaacucaccacaugucgucaaaacugcuacucaaggggaggucaaugugaccgguguaauaccacugacaacaacacucaccaaaucucauuuugcaaaucucaaaggaacagaaaccagggggaaacuaugcccaaaaugccucaacugcacagaucuggacguagccuugggcagaccaaaaugcacggggaaaauacccucggcaagaguuucaauacuccaugaagucagaccuguuacaucugggugcuuuccuauaaugcacgauagaacaaaaauuagacagcugccuaaccuucuccgaggauacgaacauaucagguuaucaacucacaacguuaucaaugcagaaaaugcaccaggaggacccuacaaaauuggaaccucagggucuugccuuaacguuaccaauggaaacggauucuucgcaacaauggcuugggccgucccaaaaaacgacaaaaacaaaacagcaacaaauccauuaacaauagaaguaccauacauuuguacagaaggagaagaccaaauuaccguuuggggguuccacucugacaacgagacccaaauggcaaagcucuauggggacucaaagccccagaaguucaccucaucugccaacggagugaccacacauuacguuucacagauugguggcuucccaaaucaaacagaagacggaggacuaccacaaagugguagaauuguuguugauuacauggugcaaaaaucugggaaaacaggaacaauuaccuaucaaagagguauuuuauugccucaaaagguguggugcgcaaguggcaggagcaagguaauaaaaggauccuugccuuuaauuggagaagcagauugccuccacgaaaaauacgguggauuaaacaaaagcaagccuuacuacacaggggaacaugcaaaggccauaggaaauugcccaauaugggugaaaacacccuugaagcuggccaauggaaccaaauauagaccuccugcaaaacuauuaaaggaaagggguuucuucggagcuauugcugguuucuuagaaggaggaugggaaggaaugauugcagguuggcacggauacacaucccauggggcacauggaguagcgguggcagcugaccuuaagagcacucaagaggccauaaacaagauaacaaaaaaucucaacucuuugagugagcuggaaguaaagaaucuucaaagacuaagcggugccauggaugaacuccacaacgaaauacuagaacuagaugagaaaguggaugaucucagagcugauacaauaagcucacaaauagaacucgcaguccugcuuuccaaugaaggaauaauaaacagugaagaugaacaucucuuggcgcuugaaagaaagcugaagaaaaugcugggccccucugcuguagagauagggaauggaugcuuugaaaccaaacacaagugcaaccagaccugucucgacagaauagcugcugguaccuuugaugcaggagaauuuucucuccccaccuuugauucacugaauauuacugcugcaucuuuaaaugacgauggauuggauaaucauacuauacugcuuuacuacucaacugcugccuccaguuuggcuguaacacugaugauagcuaucuuuguuguuuauauggucuccagagacaauguuucuugcuccaucugucuauaa

SEQ ID NO: 60177 - RNA, 1755 nt, Artificial Sequence; identical to SEQ ID NO: 60141
  derived and/or modified CDS sequence (wt) from hemagglutinin__InfluenzaB__AHL94712

SEQ ID NO: 60178 - RNA, 1758 nt, Artificial Sequence; identical to SEQ ID NO: 60172
  derived and/or modified CDS sequence (wt) from hemagglutinin__InfluenzaB__AHL94723

SEQ ID NO: 60179 - RNA, 1755 nt, Artificial Sequence; identical to SEQ ID NO: 60141
  derived and/or modified CDS sequence (wt) from hemagglutinin__InfluenzaB__AHL94734

SEQ ID NO: 60180 - RNA, 1758 nt, Artificial Sequence
  derived and/or modified CDS sequence (wt) from hemagglutinin__InfluenzaB__AHL94745
augaaggcaauaauuguacuacucaugguaguaacauccaacgcagaucgaaucugcacugggauaacaucgucaaacucaccacaugucgucaaaacugcuacucaaggggaggucaaugugaccgguguaauaccacugacaacaacacccaccaaaucucauuuugcaaaucucaaaggaacagaaaccaggggaaaacuaugcccaaaaugccucaacugcacagaucuggacguagccuugggcagaccaaaaugcacggggaaaauacccucggcaagaguuucaauacuccaugaagucagaccuguuacaucugggugcuuuccuauaaugcacgauagaacaaaaauuagacagcugccuaaccuucuccgaggauacgaacauaucagguuaucaacucacaacguuaucaaugcagaaaaugcaccaggaggacccuacaaaauuggaaccucagggucuugccuuaacguuaccaauggaaacggauucuucgcaacaauggcuugggccgucccaaaaaacgacaaaaacaaaacagcaacaaauccauuaacaauagaaguaccauacauuuguacagaaggagaagaccaaauuaccguuuggggguuccacucugacaacgagacccaaauggcaaagcucuauggggacucaaagccccagaaguucaccucaucugccaacggagugaccacacauuacguuucacagauugguggcuucccaaaucaaacagaagacggaggacuaccacaaagugguagaauuguuguugauuacauggugcaaaaaucugggaaaacaggaacaauuaccuaucaaagagguauuuuauugccucaaaagguguggugcgcaaguggcaggagcaagguaauaaaaggauccuugccuuuaauuggagaagcagauugccuccacgaaaaauacgguggauuaaacaaaagcaagccuuacuacacaggggaacaugcaaaggccauaggaaauugcccaauaugggugaaaacacccuugaagcuggccaauggaaccaaauauagaccuccugcaaaacuauuaaaggaaagggguuucuucggagcuauugcugguuucuuagaaggaggaugggaaggaaugauugcagguuggcacggauacacaucccauggggcacauggaguagcgguggcagcugaccuuaagagcacucaagaggccauaaacaagauaacaaaaaaucucaacucuuugagugagcuggaaguaaagaaucuucaaagacuaagcggugccauggaugaacuccacaacgaaauacuagaacuagaugagaaaguggaugaucucagagcugauacaauaagcucacaaauagaacucgcaguccugcuuuccaaugaaggaauaauaaacagugaagaugaacaucucuuggcgcuugaaagaaagcugaagaaaaugcugggccccucugcuguagagauaggaaauggaugcuuugaaaccaaacacaagugcaaccagaccugucucgacagaauagcugcugguaccuuugaugcaggagaauuuucucuccccaccuuugauucacugaauauuacugcugcaucuuuaaauggcgauggauuggauaaucauacuauacugcuuuacuacucaacugcugccuccaguuuggcuguaacacugaugauagcuaucuuuguuguuuauauggucuccagagacaauguuucuugcuccaucugucuauaa

SEQ ID NO: 60181 - RNA, 1755 nt, Artificial Sequence
  derived and/or modified CDS sequence (wt) from hemagglutinin__InfluenzaB__AHL94756
augaaggcaauaauuguacuacuaaugguaguaacauccaaugcagaucgaaucugcacugggauaacaucuucaaacucaccucauguggucaaaacagcuacucaaggggaggucaaugugacuggugugauaccacuaacaacaacaccaacaaaaucuuauuuugcaaaucucaaaggaacaaagaccagagggaaacuaugcccagacugucucaacuguacagaucuggauguggcccugggcaggccaaugugugugggaacuacaccuucugcgaaagcuucaauacuucacgaagucagaccuguuacauccgggugcuucccuauaaugcacgacagaacaaaaaucaggcaacuagccaaucuucucagaggauaugaaaauaucagguuaucaacccaaaacguuaucgaugcagaaaaggcaccaggaggacccuacagacuuggaaccucaggaucuugcccuaacgcuaccaguaaaagcggauuuuucgcaacaauggcuugggcugucccaaaggacaacaacaaaaaugcaacgaacccauuaacaguagaaguaccauacaucugugcagaaggggaagaccaaauuacuguuuggggguuccauucagauaacaaaacccaaaugaagaaccucuauggagacucaaauccucaaaaguucaccucaucugcuaauggaguaaccacacauuauguuucucagauuggcggcuucccagaucaaacagaagacggaggacuaccacaaagcggcagaauugucguugauuacaugaugcaaaaaccugggaaaacaggaacaauugucuaucaaagagguguuuuguugccucaaaagguguggugcgcgaguggcaggagcaaaguaauaaaaggguccuugccuuuaauuggugaagcagauugccuucaugaaaaauacgguggauuaaacaaaagcaagccuuacuacacaggagaacaugcaaaagccauaggaaauugcccaauaugggugaaaacaccuuugaagcuugccaauggaaccaaauauagaccuccugcaaaacuauuaaaggaaagggguuucuucggagcuauugcugguuuccuagaagggggaugggaaggaaugauugcagguuggcacggauacacaucucacggagcacauggaguggcaguugcugcagaccuuaagagcacacaagaagcuauaaacaagauaacaaaaaaucucaacucuuugagugagcuagaaguaaagaaucuucaaaggcuaaguggugccauggaugaacuccacaacgaaauacucgagcuggaugagaaaguggaugaccucagagcugacacuauaaguucacaaauagaacuugcagucuugcuuuccaacgaaggaauaauaaacagugaagacgagcauuuauuggcacuugagagaaaacuaaagaaaaugcugggucccucugcuguagacauaggaaauggaugcuucgaaaccaaacacaaaugcaaccagacuugcuuagacaggauagcugcuggcaccuuuaaugcaggagaguuuucucuccccacuuuugauucauugaacauuacugcugcaucuuuaaaugaugauggauuggauaaccauacuauacugcucuauuacucaacugcugcuucuaguuuggcuguaacauugaugcuagcuauuuuuauuguuuauauggucuccagagacaacguuucaugcuccaucugucuauaa

SEQ ID NO: 60182 - RNA, 1758 nt, Artificial Sequence
  derived and/or modified CDS sequence (wt) from hemagglutinin__InfluenzaB__AHL94766
augaaggcaauaauuguacuacucaugguaguaacauccaaugcagaucgaaucugcacugggauaacaucgucaaacucaccacaugucgucaaaacugcuacucaaggggaggucaaugugaccgguguaauaccacugacaacaacacccaccaaaucucauuuugcaaaucucaaaggaacagaaaccagggggaaacuaugcccaaaaugccucaacugcacagaucuggacguagccuugggcagaccaaaaugcacggggaaaauacccucggcaagaguuucaauacuccaugaagucagaccuguuacaucugggugcuuuccuauaaugcacgauagaacaaaaauuagacagcugccuaaccuucuccgaggauacgaacauaucagguuaucaacucacaacguuaucaaugcagaaaaugcaccaggaggacccuacaaaauuggaaccucagggucuugccuuaacguuaccaauggaaacggauucuucgcaacaauggcuugggccgucccaaaaaacgacaaaaacaaaacagcaacaaauccauuaacaauagaaguaccauacauuuguacagaaggagaagaccaaauuaccguuuggggguuccacucugacaacgagacccaaauggcaaagcucuauggggacucaaagccccagaaguucaccucaucugccaacggagugaccacacauuacguuucacagauugguggcuucccaaaucaaacagaagacggaggacuaccacaaagugguagaauuguuguugauuacauggugcaaaaaucugggaaaacaggaacaauuaccuaucaaagagguauuuuauugccucaaaagguguggugcgcaaguggcaggagcaagguaauaaaaggauccuugccuuuaauuggagaagcagauugccuccacgaaaaauacgguggauuaaacaaaagcaagccuuacuacacaggggaacaugcaaaggccauaggaaauugcccaauaugggugaaaacacccuugaagcuggccaauggaaccaaauauagaccuccugcaaaacuauuaaaggaaagggguuucuucggagcuauugcugguuucuuagaaggaggaugggaaggaaugauugcagguuggcacggauacacaucccauggggcacauggaguagcgguggcagcugaccuuaagagcacucaagaggccauaaacaagauaacaaaaaaucucaacucuuugagugagcuggaaguaaagaaucuucaaagacuaagcggugccauggaugaacuccacaacgaaauacuagaacuagaugagaaaguggaugaucucagagcugauacaauaagcucacaaauagaacucgcaguccugcuuuccaaugaaggaauaauaaacagugaagaugaacaucucuuggcgcuugaaagaaagcugaagaaaaugcugggccccucugcuguagagauagggaauggaugcuuugaaaccaaacacaagugcaaccagaccugucucgacagaauagcugcugguaccuuugaugcaggagaauuuucucuccccaccuuugauucacugaauauuacugcugcaucuuuaaaugacgauggauuggauaaucauacuauacugcuuuacuacucaacugcugccuccaguuuggcuguaacacugaugauagcuaucuuuguuguuuauauggucuccagagacaauguuucuugcuccaucugucuauaa

SEQ ID NO: 60183 - RNA, 1755 nt, Artificial Sequence
  derived and/or modified CDS sequence (wt) from hemagglutinin__InfluenzaB__AHL94777
augaaggcaauaauuguacuacucaugguaguaacauccaaugcagaucgaaucugcacugggauaacaucuucaaacucaccucauguagucaaaacagcuacucaaggggaggucaaugugacuggcgcgauaccauugacaacaacaccaacaaaauccuauuuugcaaaucucaaaggaacaaggaccagagggaaacuaugcccggacuguuucaacuguacagaucuggauguggccuugggcaggccaauguguguggggaccacaccuucugcuaaagcuucaauacuccacgaagucagaccuguuacauccgggugcuuuccuauaaugcacgacagaacaaaaaucaggcaacuacccaaucuucucagaggauaugaaaauaucagguuaucaacccaaaaugcuaucgaugcagaaaaagcaccaggaggacccuacagacuuggaaccucaggaucuugcccuaacgcuaccaguaaaaucggauuuuucgcaacaauggcuugggcugucccaaaggacaacuacaaaaaugcaacgaacccacaaacaguagaaguaccauacauuuguacagaaggggaagaccaaauuacuguuuggggguuccauucagauaacaaaacccaaaugaagaaccucuauggagacucaaauccucaaaaguucaccucaucugcuaauggaguaaccacacauuauguuucucagauuggcgacuucccagaucaaacagaagacggaggacuaccacaaagcggcagaauuguuguugauuacauggugcaaaaaccugggaaaacaggaacaauugucuaucaaagaggcguuuuguugccucaaaagguguggugcgcgaguggcaggagcaaaguaauaaaagggucauugccuuuaauuggugaagcagauugccuucaugaaaaauacgguggauuaaacaaaagcaagccuuacuacacaggagaacaugcaaaagccauaggaaauugcccaauauggguaaaaacaccuuugaagcuugccaauggaaccaaauauagaccuccugcaaaacuauuaaaggaaagggguuucuucggagcuauugcugguuuccuagaaggaggaugggaaggaaugauugcaggcuggcacggauacacaucucacggagcacauggaguggcaguggcggcagaccuuaagaguacacaagaagcuauaaauaagauaacaaaaaaucucaauucuuugagugagcuagaaguaaaaaaccuucaaagacuaaguggugccauggaugaacuccacaacgaaauacucgagcuggaugagaaaguggaugaucucagagcugacacuauaagcucacaaauagaacuugcagucuugcuuuccaacgaaggaauaauaaacagugaagacgagcaucuauuggcacuugagagaaaacuaaagaaaaugcugggucccucugcuguagacauaggaaauggaugcuucgaaaccaaacacaaaugcaaccagaccugcuuagacaggauagcugcuggcaccuuuaaugcaggagaauuuucucuccccacuuuugauucauugaacauuacugcugcaucuuuaaaugaugauggauuggauaaccauacuauacugcucuauuacucaacugcugcuucuaguuuggcuguaacauuaaugcuagcuauuuuuauuguuuauauggucuccagagacaacguuucaugcuccaucugucuauaa

SEQ ID NO: 60184 - RNA, 1758 nt, Artificial Sequence; identical to SEQ ID NO: 60168
  derived and/or modified CDS sequence (wt) from hemagglutinin__InfluenzaB__AHL94797

SEQ ID NO: 60185 - RNA, 1755 nt, Artificial Sequence
  derived and/or modified CDS sequence (wt) from hemagglutinin__InfluenzaB__AHL94808
augaaggcaauaauuguacuacucaugguaguaacauccaaugcagaucgaaucugcacugggauaacaucuucaaacucaccucauguagucaaaacagcuacucaaggggaggucaaugugacuggcgcgauaccauugacaacaacaccaacaaaaucuuauuuugcaaaucucaaaggaauaaggaccagagggaaacuaugcccggacugucucaacuguacagaucuggauguggccuugggcaggccaauguguguggggaccacaccuucugcuaaagcuucaauacuccacgaagucagaccuguuacaucagggugcuuuccuauaaugcacgacagaacaaaaaucaggcaacuacccaaucuucucagaggauaugaaaauaucagguuaucaacccaaaacguuaucgaugcagaaaaagcaccaggaggacccuacagacuuggaaccucaggaucuugcccuaacgcuaccaguaaaaucggguuuuucgcaacaauggcuugggcugucccaaaggacaacuacaaaaaugcaacgaacccacaaacaguagaaguaccauacauuuguacagaaggggaagaccaaauuacuguuuggggguuccauucagauaacaaaacccaaaugaagaaccucuauggagacucaaacccucaaaaguucaccucaucugcuaauggaguaaccacacauuauguuucucagauuggcgacuucccagaucaaacagaagacggaggacuaccacaaagcggcagaauuguuguugauuacauggugcaaaaaccugggaaaacaggaacaauugucuaucaaagaggcguuuuguugccucaaaagguguggugcgcgaguggcaggagcaaaguaauaaaagggucauuaccuuuaauuggugaagcagauugccuucaugaaaaauacgguggauuaaacaagagcaagccuuacuacacaggagaacaugcaaaagccauaggaaauugcccaauauggguaaaaacaccuuugaagcuugccaauggaaccaaauauagaccuccugcaaaacuauuaaaggaaagggguuucuuuggagcuauugcugguuuccuagaaggaggaugggaaggaaugauugcagguuggcacggauacacaucucacggagcacauggaguggcaguggcggcagaccuuaagaguacacaagaagcuauaaauaagauaacaaaaaaucucaauucuuugagugagcuagaaguaaaaaaccuucaaagacuaaguggugccauggaugaacuccacaacgaaauacucgagcuggaugagaaaguggaugaucucagagcugacacuauaagcucacaaauagaacuugcagucuugcuuuccaacgaaggaauaauaaacagugaagacgagcaucuauuggcacuugagagaaaacuaaagaaaaugcugggucccucugcuguagacauaggaaauggaugcuucgaaaccaaacacaaaugcaaccagaccugcuuagacaggauagcugcuggcaccuuuaaugcaggagaauuuucucuccccacuuuugauucauugaacauuacugcugcaucuuuaaaugaugauggauuggauaaccauacuauacugcucuauuacucaacugcugcuucuaguuuggcuguaacauuaaugcuagcuauuuuuauuguuuauauggucuccagagacaacguuucaugcuccaucugucuauaa

SEQ ID NO: 60186 - RNA, 1755 nt, Artificial Sequence
  derived and/or modified CDS sequence (wt) from hemagglutinin__InfluenzaB__AHL94817
augaaggcaauaauuguacuacucaugguaguaacauccaaugcagaucgaaucugcacugggauaacaucuucaaacucaccucauguagucaaaacagcuacucaaggggaggucaaugugacuggcgcgauaccauugacaacaacaccaacaaaaucuuauuuugcaaaucucaaaggaacaaggaccagagggaaacuaugcccggacugucucaacuguacagaucuggauguggccuugggcaggccaauguguguggggaccacaccuucugcuaaagcuucaauacuccacgaagucagaccuguuacaucagggugcuuuccuauaaugcacgacagaacaaaaaucaggcaacuacccaaucuucucagaggauaugaaaauaucagguuaucaacccaaaacguuaucgaugcagaaaaagcaccaggaggacccuacagacuuggaaccucaggaucuugcccuaacgcuaccaguaaaaucggguuuuucgcaacaauggcuugggcugucccaaaggacaacuacaaaaaugcaacgaacccacaaacaguagaaguaccauacauuuguacagaaggggaagaccaaauuacuguuuggggguuccauucagauaacaaaacccaaaugaagaaccucuauggagacucaaauccucaaaaguucaccucaucugcuaauggaguaaccacacauuauguuucucagauuggcgacuucccagaucaaacagaagacggaggacuaccacaaagcggcagaauuguuguugauuacauggugcaaaaaccugggaaaacaggaacaauugucuaucaaagaggcguuuuguugccucaaaagguguggugcgcgaguggcaggagcaaaguaauaaaagggucauuaccuuuaauuggugaagcagauugccuucaugaaaaauacgguggauuaaacaagagcaagccuuacuacacaggagaacaugcaaaagccauaggaaauugcccaauauggguaaaaacaccuuugaagcuugccaauggaaccaaauauagaccuccugcaaaacuauuaaaggaaagggguuucuucggagcuauugcugguuuccuagaaggaggaugggaaggaaugauugcagguuggcacggauacacaucucacggagcacauggaguggcaguggcggcagaccuuaagaguacacaagaagcuauaaauaagauaacaaaaaaucucaauucuuugagugagcuagaaguaaaaaaccuucaaagacuaaguggugccauggaugaacuccacaacgaaauaaucgaacuggaugagaaaguggaugaucucagagcugacacuauaagcucacaaauagaacuugcagucuugcuuuccaacgaaggaauaauaaacagugaagacgagcaucuauuggcacuugagagaaaacuaaagaaaaugcugggucccucugcuguagacauaggaaauggaugcuucgaaaccaaacacaaaugcaaccagaccugcuuagacaggauagcugcuggcaccuuuaaugcaggagaauuuucucuccccacuuuugauucauugaacauuacugcugcaucuuuaaaugaugauggauuggauaaccauacuauacugcucuauuacucaacugcugcuucuaguuuggcuguaacauuaaugcuagcuauuuuuauuguuuauauggucuccagagacaacguuucaugcuccaucugucuauaa

SEQ ID NO: 60187 - RNA, 1758 nt, Artificial Sequence
  derived and/or modified CDS sequence (wt) from hemagglutinin__InfluenzaB__AHL94827
augaaggcaauaauuguacuacucaugguaguaacauccaaugcagaucgaaucugcacugggauaacaucgucaaacucaccacaugucgucaaaacugcuacucaaggggaggucaaugugaccgguguaauaccacugacaacaacacccaccaaaucucauuuugcaaaucucaaaggaacagaaaccagggggaaacuaugcccaaaaugccucaacugcacagaucuggacguagccuugggcagaccaaaaugcacggggaaaauacccucggcaagaguuucaauacuccaugaagucagaccuguuacaucugggugcuuuccuauaaugcacgauagaacaaaaauuagacagcugccuaaccuucuccgaggauacgaacauaucagguuaucaacucacaacguuaucaaugcagaaaaugcaccaggaggacccuacaaaauuggaaccucagggucuugcccuaacguuaccaauggaaacggauucuucgcaacaauggcuugggccgucccaaaaaacgacaaaaacaaaacagcaacaaauccauuaacaauagagguaccauacauuuguacagaaggagaagaccaaauuaccguuuggggguuccacucugacaacgagacccaaauggcaaagcucuauggggacucaaacccccagaaguucaccucaucugccaacggagugaccacacauuacguuucacagauugguggcuucccaaaucaaacagaagacggaggacuaccacaaagugguagaauuguuguugauuacauggugcaaaaaucugggaaaacaggaacaauuaccuaucaaagagguauuuuauugccucaaaagguguggugcgcaaguggcaggagcaagguaauaaaaggauccuugccuuuaauuggagaagcagauugccuccacgaaaaauacgguggguuaaacaaaagcaagccuuacuacacaggggaacaugcaaaggccauaggaaauugcccaauaugggugaaaacacccuugaagcuggccaauggaaccaaauauagaccuccugcaaaacuauuaaaggaaagggguuucuucggagcuauugcugguuucuuagaaggaggaugggaaggaaugauugcagguuggcacggauacacaucccauggggcacauggaguagcgguggcagcugaccuuaagagcacucaagaggccauaaacaagauaacaaaaaaucucaacucuuugagugagcuggaaguaaagaaucuucaaagacuaagcggugccauggaugaacuccacaacgaaauacuagaacuagaugagaaaguggaugaucucagagcugauacaauaagcucacaaauagaacucgcaguccugcuuuccaaugaaggaauaauaaacagugaagaugaacaucucuuggcgcuugaaagaaagcugaagaaaaugcugggccccucugcuguagagauagggaauggaugcuuugaaaccaaacacaagugcaaccagaccugucucgacagaauagcugcugguaccuuugaugcaggagaauuuucucuccccaccuuugauucacugaauauuacugcugcaucuuuaaaugacgauggauuggauaaucauacuauacugcuuuacuacucaacugcugccuccaguuuggcuguaacacugaugauagcuaucuuuguuguuuauauggucuccagagacaauguuucuugcuccaucugucuauaa

SEQ ID NO: 60188 - RNA, 1755 nt, Artificial Sequence
  derived and/or modified CDS sequence (wt) from hemagglutinin__InfluenzaB__AHL94837
augaaggcaauaauuguacuacucaugguaguaacauccaaugcagaucgaaucugcacugggauaacaucuucaaacucaccucauguggucaaaacagcuacucaaggggaggucaaugugacuggcgugauaccacugacaacaacaccagcaaaaucuuauuuugcaaaccucaaaggaacaaggaccagagggaaacuaugcccggacugucucaacuguacagaucuggauguggccuugggcaggccaauguguguggggaccacaccuucugcuaaagcuucaauacuccacgaagucagaccuguuacauccgggugcuuuccuauaaugcacgacagaacaaaaaucaggcaacuacccaaucuucucagaggauaugaaaauaucagguuaucaacccagaacguuaucgaugcagaaaaagcaccaggaggacccuacaaacuuggaaccucaggaucuugcccuaaugcuaccaguaaaaucggauuuuucgcaacaauggcuugggcugucccaaaggacaacuacaaaaaugcaacgaacccacuaacaguagaaguaccauacauuuguaaagaaggggaagaccaaauuacuguuuggggguuccauucagauaacaaaacccaaaugaagaaccucuauggagacucaaauccucaaaaguucaccucaucugcuaauggaguaaccacacauuauguuucucagauuggcgacuucccagaucaaacagaagacggaggacuaccacaaagcggcagaauuguuguugauuacaugaugcaaaaaccugggaaaacaggaacaauugucuaucaaagagguguuuuguugccucaaaagguguggugcgcgaguggcaggagcaaaguaauaaaagggucauugccuuuaauuggugaagcagauugccuucaugaggaauacgguggauuaaacaaaagcaagccuuacuacacaggaaaacaugcaaaagccauaggaaacugcccaauauggguaaaaacaccuuugaagcuugccaaugggaccaaauauagaccuccugcaaaacuauuaaaggaaagggguuucuucggggcuauugcugguuuccuagaaggaggaugggaaggaaugauugcagguuggcacggauacacaucucacggagcacauggaguggcaguggcggcagaccuuaagaguacacaagaagcuauaaauaaaauaacaaaaaaucucaauucuuugagugagcuagaaguaaagaaccuucaaagacuaaguggugccauggaugaacuccacaacgaaauacucgagcuggaugagaaaguggaugaucucagagcugacacuauaagcucacaaauagaacuugcagucuugcuuuccaacgaaggaauaauaaacagugaagacgagcaucuauuggcacuugagagaaaacuaaagaaaaugcugggccccucugcuguagacauaggaaauggaugcuucgaaaccaaacacaaaugcaaccagaccugcuuagacaggauagcugcuggcaccuuuaaugcaggagaauuuucucuccccacuuuugauucauugaacauuacugcugcaucuuuaaaugaugauggauuggauaaccauacuauacugcucuauuacucaacugcugcuucuaguuuggcuguaacauuaaugcuagcuauuuuuauuguuuauauggucuccagagacaacguuucaugcuccaucugucuauaa

SEQ ID NO: 60189 - RNA, 1755 nt, Artificial Sequence
  derived and/or modified CDS sequence (wt) from hemagglutinin__InfluenzaB__AHL94847
augaaggcaauaauuguacuacucaugguaguaacauccaaugcagaucgaaucugcacugggauaacaucuucaaacucaccucauguggucaaaacagcuacucaaggggaggucaaugugacuggugugauaccacuaacaacaacaccaacaaaaucuuauuuugcaaaucucaaaggaacaaagaccagagggaaacuaugcccagacugucucaacuguacagaucuggauguggccuugggcaggccaaugugugugggaacuacaccuucugcgaaagcuucaauacuucacgaagucagaccuguuacauccgggugcuucccuauaaugcacgacagaacaaaaaucaggcaacuagccaaucuucucagaggguaugaaaauaucagguuaucaacccaaaacguuaucgaugcagaaaaagcaccaggaggacccuacagacuuggaaccucaggaucuugcccuaacgcuaccaguaaaagcggauuuuucgcaacaauggcuugggcugucccaaaggacaacaacaaaaaugcaacgaacccauuaacaguagaaguaccauacauuugugcagaaggagaagaccaaauuacuguuuggggguuccauucagauaacaaaacccaaaugaagaaccucuauggagacucaaauccucaaaaguucaccucaucugcuaauggaguaaccacacauuauguuucucagauuggcggcuucccagaucaaacagaagacggaggacuaccacaaagcggcagaauugucguugauuacaugaugcaaaaaccugggaaaacaggaacaauugucuaucaaagagguguuuuguugccucaaaagguguggugcgcgagugguaggagcaaaguaauaaaaggguccuugccuuuaauuggugaagcagauugccuucaugaaaaauacgguggauuaaacaaaagcaagccuuacuacacaggagaacaugcaaaagccauaggaaauugcccaauaugggugaaaacaccuuugaagcuugccaauggaaccaaauauagaccuccugcaaaacuauuaaaggaaagggguuucuucggagcuauugcugguuuccuagaaggaggaugggaaggaaugauugcagguuggcacggauacacaucucacggagcacauggaguggcaguugcugcagaccuuaagagcacacaagaagcuauaaacaagauaacaaaaaaucucaacucuuugagugagcuagaaguaaagaaucuucaaaggcuaaguggugccauggaugaacuccacaacgaaauacucgagcuggaugagaaaguggaugaucucagagcugacacuauaaguucacaaauagaacuugcagucuugcuuuccaacgaaggaauaauaaacagugaagaugagcaucuauuggcacuugagagaaaacuaaagaaaaugcugggucccucugcuguagacauaggaaauggaugcuucgaaaccaaacacaaaugcaaccagaccugcuuagacaggauagcugcuggcaccuuuaaugcaggagaauuuucucuccccacuuuugauucauugaacauuacugcugcaucuuuaaaugaugauggauuggauaaccauacuauacugcucuauuacucaacugcugcuucuaguuuggcuguaacauugaugcuagcuauuuuuauuguuuauauggucuccagagacaacguuucaugcuccaucugucuauaa

SEQ ID NO: 60190 - RNA, 1758 nt, Artificial Sequence
  derived and/or modified CDS sequence (wt) from hemagglutinin__InfluenzaB__AHL94858
augaaggcaauaauuguacuacucaugguaguaacauccaaugcagaucgaaucugcacugggauaacaucgucaaacucaccacauguugucaaaacugcuacucaaggggaggucaaugugacugguguaauaccacugacaacaacacccaccaaaucucauuuugcaaaucucaaaggaacagaaaccagagggaaacuaugcccaaaaugccucaacugcacagaucuggauguggccuugggcagaccaaaaugcacggggaacauacccucggcaagaguuucaauacuccaugaagucagaccuguuacaucugggugcuuuccuauaaugcacgacagaacaaaaauuagacagcugccuaaccuucucagaggauacgaacauaucagauuaucaacucauaacguuaucaaugcagaaaaugcaccaggaggacccuacaaaauuggaaccucagggucuugcccuaacguuaccaauggaaacggauuuuucgcaacaauggcuugggccgucccaaaaaacgacaacaacaaaacagcaacaaauucguuaacaauagaaguaccauacauuuguacagaaggagaagaccaaauuaccguuuggggauuccacucugauaacgagacccaaauggcaaagcucuauggggacucaaagccccagaaguucacuucaucugccaacggagugaccacacauuacguuucgcagauugguggcuucccaaaucaaacagaagacggaggacuaccacaaagugguagaauuguuguugauuacauggugcaaaaaucugggaaagcaggaacaauuaccuaucaaagagguauuuuauugccucaaaagguguggugcgcaaguggcaggagcaagguaauaaaaggaucauugccuuuaauuggagaagcagauugccuccacgaaaaauacgguggauuaaacaaaagcaagccuuacuacacaggggaacaugcaaaggccauaggaaauugcccaauaugggugaaaacacccuugaagcuggccaauggaaccaaauauagaccuccugcaaaacuauuaaaggaaagggguuucuucggagcuauugcugguuucuuagaaggaggaugggaaggaaugauugcagguuggcacggauacacaucccauggggcacaugggguagcgguggcagcagaccuuaagagcacucaagaggccauaaacaagauaacaaaaaaucucaacucuuugagugagcuggaaguaaagaaucuucaaagacuaagcggugccauggaugaacuccacaacgaaauacuagaacuagacgagaaaguggaugaucucagagcugauacaauaagcucacaaauagaacucgcaguccugcuuuccaaugaaggaauaauaaacagugaagaugagcaucucuuggcgcuugaaagaaagcugaagaaaaugcugggccccucugcuguagagauagggaauggaugcuuugaaaccaaacacaagugcaaccagaccugucuugauagaauagcugcugguaccuuugaugcaggagaauuuucucuccccaccuuugauucacugaauauuacugcugcaucuuuaaaugacgauggauuggauaaucauacuauacugcuuuacuacucaacugcugccuccaguuuggcuguaacauugaugauagcuaucuuuguuguuuauauggucuccagagacaauguuucuugcuccaucugucuauaa

SEQ ID NO: 60191 - RNA, 1755 nt, Artificial Sequence; identical to SEQ ID NO: 58838
  derived and/or modified CDS sequence (wt) from hemagglutinin__InfluenzaB__AHL94869

SEQ ID NO: 60192 - RNA, 1758 nt, Artificial Sequence
  derived and/or modified CDS sequence (wt) from hemagglutinin__InfluenzaB__AHL94880
augaaggcaauaauuguacuacucaugguaguaacauccaaugcagaucgaaucugcacugggauaacaucgucaaacucaccacaugucgucaaaacugcuacucaaggggaggucaaugugacugguguaauaccacugacaacaacacccaccaaaucucauuuugcaaaucucaaaggaacagaaaccagggggaaacuaugcccaaaaugccucaacugcacagaucuggacguagccuugggcagaccaaaaugcacggggaaaauacccucggcaagaguuucaauacuccaugaagucagaccuguuacaucuggguguuuuccuauaaugcacgacagaacaaaaauuagacagcugccuaaccuucuccgaggauacgaacauaucagguuaucaacucauaacguuaucaaugcagaaaaugcaccaggaggacccuacaaaauuggaaccucagggucuugcccuaacauuaccaauggaaacggauuuuucgcaacaauggcuugggccgucccaaaaaacgacaaaaacaaaacagcaacaaauccauuaacaauagaaguaccauacauuuguacagaaggagaagaccaaauuaccguuuggggguuccacucugacaacgagacccaaauggcaaagcucuauggggacucaaagccccagaaguucaccucaucugccaacggagugaccacacauuacguuucacagauugguggcuucccaaaucaaacagaagacggaggacuaccacaaagugguagaauuguuguugauuacauggugcaaaaaucugggaaaacaggaacaauuaccuaucaaagggguauuuuauugccucaaaagguguggugcgcaaguggcaggagcaagguaauaaaaggaucuuugccuuuaauuggagaagcagauugccuccacgaaaaauacgguggauuaaacaaaagcaagccuuacuacacaggggaacaugcaaaggccauaggaaauugcccaauaugggugaaaacacccuugaagcuggccaauggaaccaaauauagaccuccugcaaaacuauuaaaggaaagggguuucuucggagcuauugcugguuucuuagaaggaggaugggaaggaaugauugcagguuggcacggauacacaucccauggggcacauggaguagcgguggcagcagaccuuaagagcacucaagaggccauaaacaagauaacaaaaaaucucaacucuuugagugagcuggaaguaaagaaucuucaaagacuaagcggugccauggaugaacuccacaacgaaauacuagaacuagaugagaaaguggaugaucucagagcugauacaauaagcucacaaauagaacucgcaguccugcuuuccaaugaaggaauaauaaacagugaagaugaacaucucuuggcgcuugaaagaaagcugaagaaaaugcugggccccucugcuguagagauagggaauggaugcuuugaaaccaaacacaagugcaaccagaccugucucgacagaauagcugcugguaccuuugaugcaggagaauuuucucuccccaccuuugauucacugaauauuacugcugcaucuuuaaaugacgauggauuggauaaucauacuauacugcuuuacuacucaacugcugccuccaguuuggcuguaacacugaugauagcuaucuuuguuguuuauauggucuccagagacaauguuucuugcuccaucugucuauaa

SEQ ID NO: 60193 - RNA, 1758 nt, Artificial Sequence
  derived and/or modified CDS sequence (wt) from hemagglutinin__InfluenzaB__AHL94889
augaaggcaauaauuguacuacucaugguaguaacauccaaugcagaucgaaucugcacugggauaacaucgucaaacucaccacaugucgucaaaacugcuacucaaggggaggucaaugugacugguguaauaccacugacaacaacacccaccaaaucucauuuugcaaaucucaaaggaacagaaaccagggggaaacuaugcccaaaaugccucaacugcacagaucuggacguagccuugggcagaccaaaaugcacggggaaaauacccucggcaagaguuucaauacuccaugaagucagaccuguuacaucugggugcuuuccuauaaugcacgacagaacaaaaauuagacagcugccuaaccuucuccgaggauacgaacauaucagguuaucaacucauaacguuaucaaugcagaaaaugcaccaggaggacccuacaaaauuggaaccucagggucuugcccuaacauuaccaauggaaacggauuuuucgcaacaauggcuugggccgucccaaaaaacgacaaaaacaaaacagcaacaaauccauuaacaauagaaguaccauacauuuguacagaaggagaagaccaaauuaccguuuggggguuccacucugacaacgagacccaaauggcaaagcucuauggggacucaaagccccagaaguucaccucaucugccaacggagugaccacacauuacauuucacagauugguggcuucccaaaucaaacagaagacggaggacuaccacaaagugguagaauuguuguugauuacauggugcaaaaaucugggaaaacaggaacaauuaccuaucaaagggguauuuuauugccucaaaagguguggugcgcaaguggcaggagcaagguaauaaaaggauccuugccuuuaauuggagaagcagauugccuccacgaaaaauacgguggauuaaacaaaagcaagccuuacuacacaggggaacaugcaaaggccauaggaaauugcccaauaugggugaaaacacccuugaagcuggccaauggaaccaaauauagaccuccugcaaaacuauuaaaggaaagggguuucuucggagcuauugcugguuucuuagaaggaggaugggaaggaaugauugcagguuggcacggauacacaucccauggggcacauggaguagcgguggcagcagaccuuaagagcacucaagaggccauaaacaagauaacaaaaaaucucaacucuuugagugagcuggaaguaaagaaucuucaaagacuaagcggugccauggaugaacuccacaacgaaauacuagaacuagaugagaaaguggaugaucucagagcugauacaauaagcucacaaauagaacucgcaguccugcuuuccaaugaaggaauaauaaacagugaagaugaacaucucuuggcgcuugaaagaaagcugaagaaaaugcugggccccucugcuguagagauagggaauggaugcuuugaaaccaaacacaagugcaaccagaccugucucgacagaauagcugcugguaccuuugaugcaggagaauuuucucuccccaccuuugauucacuaaauauuacugcugcaucuuuaaaugacgauggauuggauaaucauacuauacugcuuuacuacucaacugcugccuccaguuuggcuguaacacugaugauagcuaucuuuguuguuuauauggucuccagagacaauguuucuugcuccaucugucuauaa

SEQ ID NO: 60194 - RNA, 1758 nt, Artificial Sequence
  derived and/or modified CDS sequence (wt) from hemagglutinin__InfluenzaB__AHL94900
augaaggcaauaauuguacuacucaugguaguaacauccaaugcagaucgaaucugcacugggauaacaucgucaaacucaccacaugucgucaaaacugcuacucaaggggaggucaaugugacugguguaauaccacugacaacaacacccaccaaaucucauuuugcaaaucucaaaggaacagaaaccagggggaaacuaugcccaaaaugccucaacugcacagaucuggacguagccuugggcagaccaaaaugcacggggaaaauacccucggcaagaguuucaauacuccaugaagucagaccuguuacaucugggugcuuuccuauaaugcacgacagaacaaaaauuagacaguugccuaaccuucuccgaggauacgaacauaucagguuaucaacucauaacguuaucaaugcagaaaaugcaccaggaggacccuacaaaauuggaaccucagggucuugcccuaacauuaccaauggaaacggauuuuucgcaacaauggcuugggccgucccaaaaaacgacaaaaacaaaacagcaacaaauccauuaacaauagaaguaccauacauuuguacagaaggagaagaccaaauuaccguuuggggguuccacucugacaacgagacccaaauggcaaagcucuauggggacucaaagccccagaaguucaccucaucugccaacggagugaccacacauuacguuucacagauugguggcuucccaaaucaaacagaagacgggggacuaccacaaagugguagaauuguuguugauuacauggugcaaaaaucugggaaaacaggaacaauuaccuaucaaagggguauuuuauugccucaaaagguguggugcgcaaguggcaggagcaagguaauaaaaggauccuugccuuuaauuggagaagcagauugccuccacgaaaaauacgguggauuaaacaaaagcaagccuuacuacacaggggaacaugcaaaggccauaggaaauugcccaauaugggugaaaacacccuugaagcuggccaauggaaccaaauauagaccuccugcaaaacuauuaaaggaaagggguuucuucggagcuauugcugguuucuuagaaggaggaugggaaggaaugauugcagguuggcacggauacacaucccauggggcacauggaguagcgguggcagcagaccuuaagagcacucaagaggccauaaacaagauaacaaaaaaucucaacucuuugagugagcuggaaguaaagaaucuucaaagacuaagcggugccauggaugaacuccacaacgaaauacuagaacuagaugagaaaguggaugaucucagagcugauacaauaagcucacaaauagaacucgcaguccugcuuuccaaugaaggaauaauaaacagugaagaugaacaucucuuggcgcuugaaagaaagcugaagaaaaugcugggccccucugcuguagagauagggaauggaugcuuugaaaccaaacacaagugcaaccagaccugucucgacagaauagcugcugguaccuuugaugcaggagaauuuucucuccccaccuuugauucacugaauauuacugcugcaucuuuaaaugacgauggauuggauaaucauacuauacugcuuuacuacucaacugcugccuccaguuuggcuguaacacugaugauagcuaucuuuguuguuuauauggucuccagagacaauguuucuugcuccaucugucuauaa

SEQ ID NO: 60195 - RNA, 1758 nt, Artificial Sequence
  derived and/or modified CDS sequence (wt) from hemagglutinin__InfluenzaB__AHL94911
augaaggcaauaauuguacuacucaugguaguaacauccaaugcagaucgaaucugcacugggauaacaucgucaaacucaccacaugucgucaaaacugcuacucaaggggaggucaaugugacugguguaauaccacugacaacaacacccaccaaaucucauuuugcaaaucucaaaggaacagaaaccagagggaaacuaugcccaaaaugccccaacugcacagaucuggacguagccuugggcagaccaaaaugcacggggaaaauacccucggcaagaguuucaauacuccaugaagucagaccuguuacaucugggugcuuuccuauaaugcacgacagaacaaaaauuagacagcugccuaaccuucuccgaggauacgaacauaucagguuaucaacucauaacguuaucaaugcagaaaaugcaccaggaggacccuacaaaauuggaaccucagggucuugcccuaacguuaccaauggaaacggauuuuucgcaacaauggcuugggccgucccaaaaaacgacaaaaacaaaacagcaacaaauccauuaacaauagaaguaccauacauuuguacagaaggagaagaccaaauuaccguuuggggguuccacucugauaacgagacccaaauggcaaagcucuauggggacucaaagccccagaaguucaccucaucugccaacggagugaccacacauuacguuucacagauugguggcuucccaaaucaaacagaagacggaggacuaccacaaagugguagaauuguuguugauuacauggugcaaaaaucugggagaacaggaacaauuaccuaucaaagagguauuuuauugccucaaaagguguggugcgcaaguggcaggagcaagguaauaaaaggauccuugccuuuaauuggagaagcagauugccuccacgaaaaauacgguggauuaaacaaaagcaagccuuacuacacaggggaacaugcaaaggccauaggaaauugcccaauaugggugaagacacccuugaagcuggccaauggaaccaaauauagaccuccugcaaaacuauuaaaggaaagggguuucuucggagcuauugcugguuucuuagaaggaggaugggaaggaaugauugcagguuggcacggauacacgucccauggggcacauggaguagcgguggcagcagaccuuaagagcacucaagaggccauaaacaagauaacaaaaaaucucaacucuuugagugagcuggaaguaaagaaucuucaaagacuaagcggugccauggaugaacuccacaacgaaauacuagaacuagacgaaaaaguggaugaucucagagcugauacaauaagcucacaaauagaacucgcaguccugcuuuccaaugaaggaauaauaaacagugaagaugaacaucucuuggcgcuugaaagaaagcugaagaaaaugcugggccccucugcuguagagauagggaauggaugcuuugaaaccaaacacaagugcaaccagaccugucucgacagaauagcugcugguaccuuugaugcaggagaauuuucucuccccaccuuugauucacugaauauuacugcugcaucuuuaaaugacgauggauuggauaaucauacuauacugcuuuacuacucaacugcugccuccaguuuggcuguaacacugaugauagcuaucuuuguuguuuauauggucuccagagacaauguuucuugcuccaucugucuauaa

SEQ ID NO: 60196 - RNA, 1758 nt, Artificial Sequence; identical to SEQ ID NO: 59339
  derived and/or modified CDS sequence (wt) from hemagglutinin__InfluenzaB__AHL94922

SEQ ID NO: 60197 - RNA, 1758 nt, Artificial Sequence
  derived and/or modified CDS sequence (wt) from hemagglutinin__InfluenzaB__AHL94933
augaaggcaauaauuguacuacucaugguaguaacauccaaugcagaucgaaucugcacugggauaacaucgucaaacucaccacaugucgucaaaacugcuacucaaggggaggucaaugugacugguguaauaccacugacaacaacacccaccaaaucucauuuugcaaaucucaaaggaacagaaaccagggggaaacuaugcccaaaaugccucaacugcacagaucuggacguagccuugggcagaccaaaaugcacggggaaaauacccucggcaagaguuucaauacuccaugaagucagaccuguuacaucugggugcuuuccuauaaugcacgacagaacaaaaauuagacagcugccuaaccuucuccgaggauacgaacauaucagguuaucaacucauaacguuaucaaugcagaaaaugcaccaggaggacccuacaaaauuggaaccucagggucuugcccuaacauuaccaauggaaacggauuuuucgcaacaauggcuugggccgucccaaaaaacgacaaaaacaaaacagcaacaaauccauuaacaauagaaguaccauacauuuguacagaaggagaagaccaaauuaccguuuggggguuccacucugauaacgagacccaaauggcaaagcucuauggggacucaaagccccagaaguucaccucaucugccaacggagugaccacacauuacguuucacagauugguggcuucccaaaucaaacagaagacggaggacuaccacaaagugguagaauuguuguugauuacauggugcaaaaaucugggaaagcaggaacaauuaccuaucaaagggguauuuuauugccccaaaagguguggugcgcaaguggcaggagcaagguaauaaaaggauccuugccuuuaauuggagaagcagauugccuccacgaaaaauacgguggauuaaacaaaagcaagccuuacuacacaggggaacaugcaaaggccauaggaaauugcccaauaugggugaaaacacccuugaagcuggccaauggaaccaaauauagaccuccugcaaaacuauuaaaggaaagggguuucuucggagcuauugcugguuucuuagaaggaggaugggaaggaaugauugcagguuggcacggauacacaucccauggggcacauggaguagcgguggcagcagaccuuaagagcacucaagaggccauaaacaagauaacaaaaaaucucaacucuuugagugagcuggaaguaaagaaucuucaaagacuaagcggugccauggaugaacuccacaaugaaauacuagaacuagaugagaaaguggaugaucucagagcugauacaauaagcucacaaauagaacucgcaguccugcuuuccaaugaaggaauaauaaacagugaagaugaacaucucuuggcgcuugaaagaaagcugaagaaaaugcugggccccucugcuguagagauagggaauggaugcuuugaaaccaaacacaagugcaaccagaccugucucgacagaauagcugcugguaccuuugaugcaggagaauuuucucucccuaccuuugauucacugaauauuacugcugcaucuuuaaaugacgauggauuggauaaucauacuauacugcuuuacuacucaacugcugccuccaguuuggcuguaacacugaugauagcuaucuuuguuguuuauauggucuccagagacaauguuucuugcuccaucugucuauaa

SEQ ID NO: 60198 - RNA, 1758 nt, Artificial Sequence; identical to SEQ ID NO: 60084
  derived and/or modified CDS sequence (wt) from hemagglutinin__InfluenzaB__AHL94944

SEQ ID NO: 60199 - RNA, 1758 nt, Artificial Sequence; identical to SEQ ID NO: 59449
  derived and/or modified CDS sequence (wt) from hemagglutinin__InfluenzaB__AHL94955

SEQ ID NO: 60200 - RNA, 1758 nt, Artificial Sequence; identical to SEQ ID NO: 60080
  derived and/or modified CDS sequence (wt) from hemagglutinin__InfluenzaB__AHL94965

SEQ ID NO: 60201 - RNA, 1758 nt, Artificial Sequence; identical to SEQ ID NO: 60080
  derived and/or modified CDS sequence (wt) from hemagglutinin__InfluenzaB__AHL94975

SEQ ID NO: 60202 - RNA, 1755 nt, Artificial Sequence; identical to SEQ ID NO: 58915
  derived and/or modified CDS sequence (wt) from hemagglutinin__InfluenzaB__AHM00986

SEQ ID NO: 60203 - RNA, 1758 nt, Artificial Sequence; identical to SEQ ID NO: 58899
  derived and/or modified CDS sequence (wt) from hemagglutinin__InfluenzaB__AHM00997

SEQ ID NO: 60204 - RNA, 1758 nt, Artificial Sequence
  derived and/or modified CDS sequence (wt) from hemagglutinin__InfluenzaB__AHM01008
augaaggcaauaauuguacuacucaugguaguaacauccaaugcagaucgaaucugcacugggauaacaucgucaaacucaccacaugucgucaaaacugcuacucaaggggaggucaaugugaccgguguaauaccacugacaacaacacccaccaaaucucauuuugcaaaucucaaaggaacagaaaccagggggaaacuaugcccaaaaugccucaacugcacagaucuggacguagccuugggcagaccaaaaugcacagggaaaauacccucggcaagaguuucaauacuccaugaagucagaccuguuacaucugggugcuuuccuauaaugcacgauagaacaaaaauuagacagcugccuaaccuucuccgaggauacgaacauaucagguuaucaacucacaacguuaucaaugcagaagaugcaccaggaggacccuacaaaauuggaaccucagggucuugcccuaacguuaccaauggaaacggauucuucgcaacaauggcuuggaccgucccaaaaaacgacaaaaacaaaacagcaacaaauccauuaacaauagaaguaccauacauuuguacagaaggagaagaccaaauuaccguuuggggguuccacucugacaacgagacccaaauggcaaagcucuauggggacucaaagccccagaaguucaccucaucugccaacggagugaccacacauuacguuucacagauugguggcuucccaaaucaaacagaagacggaggacuaccacaaagugguagaauuguuguugauuacauggugcaaaaaucuggaaaaacaggaacaauuaccuaucaaagagguauuuuauugccucaaaagguguggugcgcaaguggcaggagcaagguaauaaaaggauccuugccuuuaauuggagaagcagauugccuccacgaaaaauacgguggauuaaacaaaagcaagccuuacuacacaggggaacaugcaaaggccauaggaaauugcccaauaugggugaaaacacccuugaagcuggccaauggaaccaaauauagaccuccugcaaaacuauuaaaggaaagggguuucuucggagcuauugcugguuucuuagaaggaggaugggaaggaaugauugcagguuggcacggauacacaucccauggggcacauggaguagcgguggcagcugaccuuaagagcacucaagaggccauaaacaagauaacaaaaaaucucaacucuuugagugagcuggaaguaaagaaucuucaaagacuaagcggugccauggaugaacuccacaacgaaauacuagaacuagaugagaaaguggaugaucucagagcugauacaauaagcucacaaauagaacucgcaguccugcuuuccaaugaaggaauaauaaacagugaagaugaacaucuuuuggcgcuugaaagaaagcugaagaaaaugcugggccccucugcuguagagauagggaauggaugcuuugaaaccaaacacaagugcaaccagaccugucucgacagaauagcugcugguaccuuugaugcaggagaauuuucucuccccaccuuugauucacugaauauuacugcugcaucuuuaaaugacgauggauuggauaaucauacuauacugcuuuacuacucaacugcugccuccaguuuggcuguaacacugaugauagcuaucuuuguuguuuauauggucuccagagacaauguuucuugcuccaucugucuauaa

SEQ ID NO: 60205 - RNA, 1758 nt, Artificial Sequence
  derived and/or modified CDS sequence (wt) from hemagglutinin__InfluenzaB__AHM01019
augaaggcaauaauuguacuacucaugguaguaacauccaaugcagaucgaaucugcacugggauaacaucgucaaacucaccacaugucgucaaaacugcuacucaaggggaggucaaugugaccgguguaauaccacugacaacaacacccaccaaaucucauuuugcaaaucucaaaggaacagaaaccagggggaaacuaugcccaaaaugccucaacugcacagaucuggacguagccuugggcagaccaaaaugcacagggaaaauacccucggcaagaguuucaauacuccaugaagucagaccuguuacaucugggugcuuuccuauaaugcacgauagaacaaaaauuagacagcugccuaaccuucuccgaggauacgaacauaucaggcuaucaacucacaacguuaucaaugcagaagaugcaccaggaggacccuacaaaauuggaaccucagggucuugcccuaacguuaccaauggaaacggauucuucgcaacaauggcuugggccgucccaaaaaacgacaaaaacaaaacagcaacaaauccauuaacaauagaaguaccauacauuuguacagaaggagaagaccaaauuaccguuuggggguuccacucugacaacgagacccaaauggcaaagcucuauggggacucaaagccccagaaguucaccucaucugccaacggagugaccacacauuacguuucacagauugguggcuucccaaaucaaacagaagacggaggacuaccacaaagugguagaauuguuguugauuacauggugcaaaaaucuggaaaaacaggaacaauuaccuaucaaagagguauuuuauugccucaaaagguguggugcgcaaguggcaggagcaagguuauaaaaggauccuugccuuuaauuggagaagcagauugccuccacgaaaaauacgguggauuaaacaaaagcaagccuuacuacacaggggaacaugcaaaggccauaggaaauugcccaauaugggugaaaacacccuugaagcuggccaauggaaccaaauauagaccuccugcaaaacuauuaaaggaaagggguuucuucggagcuauugcugguuucuuagaaggaggaugggaaggaaugauugcagguuggcacggauacacaucccauggggcacauggaguagcgguggcagcugaccuuaagagcacucaagaggccauaaacaagauaacaaaaaaucucaacucuuugagugagcuggaaguaaagaaucuucaaagacuaagcggugccauggaugaacuccacaacgaaauacuagaacuagaugagaaaguggaugaucucagagcugauacaauaagcucacaaauagaacucgcaguccugcuuuccaaugaaggaauaauaaacagugaagaugaacaucucuuggcgcuugaaagaaagcugaagaaaaugcugggccccucugcuguagagauagggaauggaugcuuugaaaccaaacacaagugcaaccagaccugucucgacagaauagcugcugguaccuuugaugcaggagaauuuucucuccccaccuuugauucacugaauauuacugcugcaucuuuaaaugacgauggauuggauaaucauacuauacugcuuuacuacucaacugcugccuccaguuuggcuguaacacugaugauagcuaucuuuguuguuuauauggucuccagagacaauguuucuugcuccaucugucuauaa

SEQ ID NO: 60206 - RNA, 1758 nt, Artificial Sequence; identical to SEQ ID NO: 58899
  derived and/or modified CDS sequence (wt) from hemagglutinin__InfluenzaB__AHM01030

SEQ ID NO: 60207 - RNA, 1758 nt, Artificial Sequence
  derived and/or modified CDS sequence (wt) from hemagglutinin__InfluenzaB__AHM01041
augaaggcaauaauuguacuacucaugguaguaacauccaaugcagaucgaaucugcacugggauaacaucgucaaacucaccacaugucgucaaaacugcuacucaaggggaggucaaugugaccgguguaauaccacugacaacaacacccaccaaaucucauuuugcaaaucucaaaggaacagaaaccagggggaaacuaugcccaaaaugccucaacugcacagaucuggacguagccuugggcagaccaaaaugcacagggaaaauacccucggcaagaguuucaauacuccaugaagucagaccuguuacaucugggugcuuuccuauaaugcacgauagaacaaaaauuagacagcugccuaaccuucuccgaggauacgaacauaucagguuaucaacucacaacguuaucaaugcagaagaugcaccaggaggacccuacaaaauuggaaccucagggucuugcccuaacguuaccaauggaaacggauucuucgcaacaauggcuugggccgucccaaaaaacgacaaaaacaaaacagcaacaaauccauuaacaauagaaguaccauacauuuguacagaaggagaagaccaaauuaccguuuggggguuccacucugacaacgagacccaaauggcaaagcucuauggggacucaaagccccagaaguucaccucaucugccaacggagugaccacacauuacguuucacagauugguggcuucccaaaucaaacagaagacggaggacuaccacaaagugguagaauuguuguugauuacauggugcaaaaaucugaaaaaacaggaacaauuaccuaucaaagagguauuuuauugccucaaaagguguggugcgcaaguggcaggagcaagguaauaaaaggauccuugccuuuaauuggagaagcagauugccuccacgaaaaauacgguggauuaaacaaaagcaagccuuacuacacaggggaacaugcaaaggccauaggaaauugcccaauaugggugaaaacacccuugaagcuggccaauggaaccaaauauagaccuccugcaaaacuauuaaaggaaagggguuucuucggagcuauugcugguuucuuagaaggaggaugggaaggaaugauugcagguuggcacggauacacaucccauggggcacauggaguagcgguggcagcugaccuuaagagcacucaagaggccauaaacaagauaacaaaaaaucucaacucuuugagugagcuggaaguaaagaaucuucaaagacuaagcggugccauggaugaacuccacaacgaaauacuagaacuagaugagaaaguggaugaucucagagcugauacaauaagcucacaaauagaacucgcaguccugcuuuccaaugaaggaauaauaaacagugaagaugaacaucucuuggcgcuugaaagaaagcugaagaaaaugcugggccccucugcuguagagauagggaauggaugcuuugaaaccaaacacaagugcaaccagaccugucucgacagaauagcugcugguaccuuugaugcaggagaauuuucucuccccaccuuugauucacugaauauuacugcugcaucuuuaaaugacgauggauuggauaaucauacuauacugcuuuacuacucaacugcugccuccaguuuggcuguaacacugaugauagcuaucuuuguuguuuauauggucuccagagacaauguuucuugcuccaucugucuauaa

SEQ ID NO: 60208 - RNA, 1758 nt, Artificial Sequence
  derived and/or modified CDS sequence (wt) from hemagglutinin__InfluenzaB__AHM01052
augaaggcaauaauuguacuacucaugguaguaacauccaaugcagaucgaaucugcacugggauaacaucgucaaacucaccacaugucgucaaaacugcuacucaaggggaggucaaugugaccgguguaauaccacugacaacaacacccaccaaaucucauuuugcaaaucucaaaggaacagaaaccagggggaaacuaugcccaaaaugccucaacugcacagaucuggacguagccuugggcagaccaaaaugcacggggaaaauacccucggcaagaguuucaauacuccaugaagucagaccuguuacaucugggugcuuuccuauaaugcacgauagaacaaaaauuagacagcugccuaaccuucuccgaggauacgaacauaucagguuaucaacucacaacguuaucaaugcagaaaaugcaccaggaggacccuacaaaauuggaaccucagggucuugcccuaacguuaccaauggaaacggauucuucgcaacaauggcuugggccgucccaaaaaacgacaaaaacaaaacagcaacaaauccauuaacaauagaaguaccauacauuuguacagaaggagaagaccaaauuaccguuuggggguuccacucugacaacgagacccaaauggcaaagcucuauggggacucaaagccccagaaguucaccucaucugccaacggagugaccacacauuacguuucacagauugguggcuucccaaaucaaacagaagacggaggacuaccacaaagugguagaauuguuguugauuacauggugcaaaaaucugggaaaacaggaacaauuaccuaucaaagagguauuuuauugccucaaaagguguggugcgcaaguggcaggagcaagguaauaaaaggauccuugccuuuaauuggagaagcagauugccuccacgaaaaauacgguggauuaaacaaaagcaagccuuacuacacaggggaacaugcaaaggccauaggaaauugcccaauaugggugaaaacacccuugaagcuggccaauggaaccaaauauagaccuccugcaaaacuauuaaaggaaagggguuucuucggagcuauugcugguuucuuagaaggaggaugggaaggaaugauugcagguuggcacggauacacaucccauggggcacauggaguagcgguggcagcugaccuuaagagcacucaagaggccauaaacaagauaacgaaaaaucucaacucuuugagugagcuggaaguaaagaaucuucaaagacuaagcggugccauggaugaacuccacaacgaaauacuagaacuagaugagaaaguggaugaucucagagcugauacaauaagcucacaaauagaacucgcaguccugcuuuccaaugaaggaauaauaaacagugaagaugaacaucucuuggcgcuugaaagaaagcugaagaaaaugcugggccccucugcuguagagauagggaauggaugcuuugaaaccaaacacaagugcaaccagaccugucucgacagaauagcugcugguaccuuugaugcaggagaauuuucucuccccaccuuugauucacugaauauuacugcugcaucuuuaaaugacgauggauuggauaaucauacuauaaugcuuuacuacucaacugcugccuccaguuuggcuguaacacugaugauagcuaucuuuguuguuuauauggucuccagagacaauguuucuugcuccaucugucuauaa

SEQ ID NO: 60209 - RNA, 1758 nt, Artificial Sequence
  derived and/or modified CDS sequence (wt) from hemagglutinin__InfluenzaB__AHM01063
augaaggcaauaauuguacuacucaugguaguaacauccaaugcagaucgaaucugcacugggauaacaucgucaaacucaccacaugucgucaaaacugcuacucaaggggaggucaaugugaccgguguaauaccacugacaacaacacccaccaaaucucauuuugcaaaucucaaaggaacagaaaccagggggaaacuaugcccaaaaugccucaacugcacagaucuggacguagccuugggcagaccaaaaugcacagggaaaauacccucggcaagaguuucaauacuccaugaagucagaccuguuacaucugggugcuuuccuauaaugcacgauagaacaaaaauuagacagcugccuaaccuucuccgaggauacgaacauaucagguuaucaacucacaacguuaucaaugcagaagaugcaccaggaggacccuacaaaauuggaaccucagggucuugcccuaacguuaccaauggaaacggauucuucgcaacaauggcuugggccgucccaaaaaacgacaaaaacaaaacagcaacaaauccauuaacaauagaaguaccauacauuuguacagaaggagaagaccaaauuaccguuuggggguuccacucugacaacgagacccaaauggcaaagcucuauggggauucaaagccccagaaguucaccucaucugccaacggagugaccacacauuacguuucacagauugguggcuucccaaaucaaacagaagacggaggacuaccacaaagugguagaauuguuguugauuacauggugcaaaaaucuggaaaaacaggaacaauuaccuaucaaagagguauuuuauugccucaaaagguguggugcgcaaguggcaggagcaagguaauaaaaggauccuugccuuuaauuggagaagcagauugccuccacgaaaaauacgguggauuaaacaaaagcaagccuuacuacacaggggaacaugcaaaggccauaggaaauugcccaauaugggugaaaacacccuugaagcuggccaauggaaccaaauauagaccuccugcaaaacuauuaaaggaaagggguuucuucggagcuauugcugguuucuuagaaggaggaugggaaggaaugauugcagguuggcacggauacacaucccauggggcacauggaguagcgguggcagcugaccuuaagagcacucaagaggccauaaacaagauaacaaaaaaucucaacucuuugagugagcuggaagugaagaaucuucaaagacuaagcggugccauggaugaacuccacaacgaaauacuagaacuagaugagaaaguggaugaucucagagcugauacaauaagcucacaaauagaacucgcaguccugcuuuccaaugaaggaauaauaaacagugaagaugaacaucucuuggcgcuugaaagaaagcugaagaaaaugcugggccccucugcuguagagauagggaauggaugcuuugaaaccaaacacaagugcaaccagaccugucucgacagaauagcugcugguaccuuugaugcaggagaauuuucucuccccaccuuugauucacugaauauuacugcugcaucuuuaaaugacgauggauuggauaaucauacuauacugcuuuacuacucaacugcugccuccaguuuggcuguaacacugaugauagcuaucuuuguuguuuauauggucuccagagacaauguuucuugcuccaucugucuauaa

SEQ ID NO: 60210 - RNA, 1755 nt, Artificial Sequence
  derived and/or modified CDS sequence (wt) from hemagglutinin__InfluenzaB__AHM01074
augaaggcaauaauuguacuacucaugguaguaacauccaaugcagaucgaaucugcacugggauaacaucuucaaacucaccucauguggucaaaacagcuacucaaggggaggucaaugugacuggugugauaccacuaacaacaacaccaacaaaaucuuauuuugcaaaucucaaaggaacaaagaccagagggaaacuaugcccagacugucucaacuguacagaucuggauguggccuugggcaggccaaugugugugggaacuacaccuucugcgaaagcuucaauacuucacgaagucagaccuguuacauccgggugcuucccuauaaugcacgacagaacaaaaaucaggcaacuagccaaucuucucagaggauaugaaaauaucagguuaucaacccaaaacguuaucgaugcagaaaaagcaccaggaggacccuacagacuuggaaccucaggaucuugcccuaacgcuaccaguaaaagcggauuuuucgcaacaauggcuugggcugucccaaaggacaacaacaaaaaugcaacgaacccauuaacaguagagguaccauacauuugugcagaaggagaagaccaaauuacuguuuggggguuccauucggauaacaaaacccaaaugaagaaccucuauggagacucaaauccucaaaaguucaccucaucugcuaauggaguaaccacacauuauguuucucagauuggcggcuucccagaucaaacagaagacggaggacuaccacaaagcggcagaauugucguugauuacaugaugcaaaaaccugggaaaacaggaacaauugucuaucaaagagguguuuuguugccucaaaagguguggugcgcgaguggcaggagcaaaguaauaaaaggguccuugccuuuaauuggugaagcagauugccuucaugaaaaauacgguggcuuaaacaaaagcaagccuuacuacacaggagaacaugcaaaagccauaggaaauugcccaauaugggugaaaacaccuuugaagcuugccaauggaaccaaauauagaccuccugcaaaacuauuaaaggaaagggguuucuucggagcuauugcugguuuccuagaaggaggaugggaaggaaugauugcagguuggcacggauacacaucucacggagcacauggaguggcaguugcugcagaccuuaagagcacacaagaagcuauaaacaagauaacaaaaaaucucaacucuuugagugagcuagaaguaaagaaucuucaaaggcuaaguggugccauggaugaacuccacaacgaaauacucgagcuggaugagaaaguggaugaucucagagcugacacuauaaguucacaaauagaacuugcagucuugcuuuccaacgaaggaauaauaaacagugaagaugagcaucuauuggcacuugagagaaaacuaaagaaaaugcugggucccucugcuguagacauagggaauggaugcuucgaaaccaaacacaaaugcaaccagaccugcuuagacaggauagcugcuggcaccuuuaaugcaggagaauuuucucuccccacuuuugauucauugaacauuacugcugcaucuuuaaaugaugauggauuggauaaccauacuauacugcucuauuacucaacugcugcuucuaguuuggcuguaacauugaugcuagcuauuuuuauuguuuauauggucuccagagacaacguuucaugcuccaucugucuauaa

SEQ ID NO: 60211 - RNA, 1755 nt, Artificial Sequence
  derived and/or modified CDS sequence (wt) from hemagglutinin__InfluenzaB__AHM01096
augaaggcaauaauuguacuacucaugguaguaacauccaaugcagaucgaaucugcacugggauaacaucuucaaacucaccucauguggucaaaacagcuacucaaggggaggucaaugugacuggugugauaccacuaacaacaacaccaacaaaaucuuauuuugcaaaucucaaaggaacaaagaccagagggaaacuaugcccagacugucucaacuguacagaucuggauguggccuugggcaggccaaugugugugggaacuacaccuucugcgaaagcuucaauacuucacgaagucagaccuguuacauccgggugcuucccuauaaugcacgacagaacaaaaaucaggcaacuagccaaucuucucagaggauaugaaaauaucagguuaucaacucaaaacguuaucgaugcagaaaaagcaccaggaggacccuacagacuuggaaccucaggaucuugcccuaacgcuaccaguaaaagcggauuuuucgcaacaauggcuugggcugucccaaaggacaacaacaaaaaugcaacgaacccauuaacaguagaaguaccauacauuugugcagaaggagaagaccaaauuacuguuuggggguuccauucagauaacaaaacccaaaugaagaaccucuauggagacucaaauccucaaaaguucaccucaucugcuaauggaguaaccacacauuauguuucucagauuggcggcuucccagaucaaacagaagacggaggacuaccacaaagcggcagaauugucguugauuacaugaugcaaaaaccugggaaaacaggaacaauugucuaucaaagaggcauuuuguugccucaaaagguguggugcgcgaguggcaggagcaaaguaauaaaaggguccuugccuuuaauuggugaagcagauugccuccaugaaaaauacgguggauuaaacaaaagcaagccuuacuacacaggagaacaugcaaaagccauaggaaauugcccaauaugggugaaaacaccuuugaagcuugccaauggaaccaaauauagaccuccugcaaaacuguuaaaggaaagggguuucuucggagcuauugcugguuuccuagaaggaggaugggaaggaaugauugcagguuggcacggauacacaucucacggagcacauggaguggcaguugcugcagaccuuaagagcacacaagaagcuauaaacaagauaacaaaaaaucucaacucuuugagugagcuagaaguaaagaaucuucaaaggcuaaguggugccauggaugaacuccacaacgaaauacucgagcuggaugagaaaguggaugaucucagagcugacacuauaaguucacaaauagaacuugcagucuugcuuuccaacgaaggaauaauaaacagugaagaugagcaucuauuggcacuugagagaaaacuaaagaaaaugcugggucccucugcuguagacauaggaaauggaugcuucgaaaccaaacacaaaugcaaccagaccugcuuagacaggauagcugcuggcaccuuuaaugcaggagaauuuucucuccccacuuuugauucauugaacauuacugcugcaucuuuaaaugaugauggauuggauaaccauacuauacugcucuauuacucaacugcugcuucuaguuuggcuguaacauugaugcuagcuauuuuuauuguuuauauggucuccagagacaacguuucaugcuccaucugucuauaa

SEQ ID NO: 60212 - RNA, 1758 nt, Artificial Sequence
  derived and/or modified CDS sequence (wt) from hemagglutinin__InfluenzaB__AHM01107
augaaggcaauaauuguacuacucaugguaguaacauccaaugcagaucgaaucugcacugggauaacaucgucaaacucaccacaugucgucaaaacugcuacucaaggggaggucaaugugaccgguguaauaccacugacaacaacacccaccaaaucucauuuugcaaaucucaaaggaacagaaaccagggggaaacuaugcccaaaaugccucaacugcacagaucuggacguagccuugggcagaccaaaaugcacagggaaaauacccucggcaagaguuucaauacuccaugaagucagaccuguuacaucugggugcuuuccuauaaugcacgauagaacaaaaauuagacagcugccuaaccuucuccgaggauacgaacauaucagguuaucaacucacaacguuaucaaugcagaagaugcaccaggaggacccuacaaaauuggaaccucagggucuugcccuaacguuaccaauggaaacggauucuucgcaacaauggcuugggccgucccaaaaaacgacaaaaacaaaacagcaacaaauccauuaacaauagaaguaccauacauuuguacagaaggagaagaccaaauuaccguuuggggguuccacucugacaacgagacccaaauggcaaagcucuauggggacucaaagccccagaaguucaccucaucugccaacggagugaccacacauuacguuucacagauugguggcuucccaaaucaaacagaagacggaggacuaccacaaagugguagaauuguuguugauuacauggugcaaaaaucuggaaaaacaggaacaauuaccuaucaaagagguauuuuauugccucaaaagguguggugcgcaaguggcaggagcaagguaauaaaaggauccuugccuuuaauuggagaagcagauugccuccacgaaaaauacgguggauuaaacaaaagcaagccuuacuacacaggggaacaugcaaaggccauaggaaauugcccaauaugggugaaaacacccuugaagcuggccaauggaaccaaauauagaccuccugcaaaacuauuaaaggaaagggguuucuucggagcuauugcugguuucuuagaaggaggaugggaaggaaugauugcagguuggcacggauacacaucccauggggcacauggaguagcgguggcagcugaccuuaagagcacucaagaggccauaaacaagauaacaaaaaaucucaacucuuugagugagcuggaagugaagaaucuucaaagacuaagcggugccauggaugaacuccacaacgaaauacuagaacuagaugagaaaguggaugaucucagagcugauacaauaagcucacaaauagaacucgcaguccugcuuuccaaugaaggaauaauaaacagugaagaugaacaucucuuggcgcuugaaagaaagcugaagaaaaugcugggccccucugcuguagagauagggaauggaugcuuugaaaccaaacacaagugcaaccagaccugucucgacagaauagcugcugguaccuuugaugcaggagaauuuucucuccccaccuuugauucacugaauauuacugcugcaucuuuaaaugacgauggauuggauaaucauacuauacugcuuuacuacucaacugcugccuccaguuuggcuguaacacugaugauagcuaucuuuguuguuuauauggucuccagagacaauguuucuugcuccaucugucuauaa

SEQ ID NO: 60213 - RNA, 1758 nt, Artificial Sequence
  derived and/or modified CDS sequence (wt) from hemagglutinin__InfluenzaB__AHM01118
augaaggcaauaauuguacuacucaugguaguaacauccaaugcagaucgaaucugcacugggauaacaucgucaaacucaccacaugucgucaaaacugcuacucaaggggaggucaaugugaccgguguaauaccacugacaacaacacccaccaaaucucauuuugcaaaucucaaaggaacagaaaccagggggaaacuaugcccaaaaugccucaacugcacagaucuggacguagccuugggcagaccaaaaugcacagggaaaauacccucggcaagaguuucaauacuccaugaagucagaccuguuacaucugggugcuuuccuauaaugcacgauagaacaaaaauuagacagcugccuaaccuucuccgaggauacgaacauaucagguuaucaacucacaacguuaucaaugcagaagaugcaccaggaggacccuacaaaauuggaaccucagggucuugcccuaacguuaccaauggaaacggauucuucgcaacaauggcuugggccgucccaaaaaacgacaaaaacaaaacagcaacaaauccauuaacaauagaaguaccauacauuuguacagaaggagaagaccaaauuaccguuuggggguuccacucugacaacgagacccaaauggcaaagcucuauggggacucaaagccccagaaguucaccucaucugccaacggagugaccacacauuacguuucacagauugguggcuucccaaaucaaacagaagacggaggacuaccacaaagugguagaauuguuguugauuacauggugcaaaaaucuggaaaaacaggaacaauuaccuaucaaagagguauuuuauugccucaaaagguguggugcgcaaguggcaggagcaagguaauaaaaggauccuugccuuuaauuggagaagcagauugccuccacgaaaaauacgguggauuaaacaaaagcaagccuuacuacacaggggaacaugcaaaggccauaggaaauugcccaauaugggugaaaacacccuugaagcuggccaauggaaccaaauauagaccuccugcaaaacuauuaaaggaaagggguuucuucggagcuauugcugguuucuuagaaggaggaugggaaggaaugauugcagguuggcacggauacacaucccauggggcacauggaguagcgguggcagcugaccuuaagagcacucaagaggccauaaacaagauaacaaaaaaucucaacucuuugagugagcuggaaguaaagaaucuucaaagacuaagcggugccauggaugaacuccacaacgaaauacuagaacuagaugagaaaguggaugaucucagagcugauacaauaagcucacaaauagaacucgcaguccugcuuuccaaugaaggaauaauaaacagugaagaugaacaucucuuggcgcuugaaagaaagcugaagaaaaugcugggccccucugcuguagagauagggaauggaugcuuugaaaccaaacacaagugcaaccagaccugucucgacagaauagcugcugguaccuuugaugcaggagaauuuucucuccccaccuuugauucacugaauauuacugcuguaucuuuaaaugacgauggauuggauaaucauacuauacugcuuuacuacucaacugcugccuccaguuuggcuguaacacugaugauagcuaucuuuguuguuuauauggucuccagagacaauguuucuugcuccaucugucuauaa

SEQ ID NO: 60214 - RNA, 1758 nt, Artificial Sequence; identical to SEQ ID NO: 58899
  derived and/or modified CDS sequence (wt) from hemagglutinin__InfluenzaB__AHM01129

SEQ ID NO: 60215 - RNA, 1758 nt, Artificial Sequence
  derived and/or modified CDS sequence (wt) from hemagglutinin__InfluenzaB__AHM01140
augaaggcaauaauuguacuacucaugguaguaacauccaaugcagaucgaaucugcacugggauaacaucgucaaacucaccacaugucgucaaaacugcuacucaaggggaggucaaugugaccgguguaauaccacugacaacaacacccaccaaaucucauuuugcaaaucucaaaggaacagaaaccagggggaaacuaugcccaaaaugccucaacugcacagaucuggacguagccuugggcagaccaaaaugcacggggaaaauacccucggcaagaguuucaauacuccaugaagucagaccuguuacaucugggugcuuuccuauaaugcacgauagaacaaaaauuagacagcugccuaaccuucuccgaggauacgaacauaucagguuaucagcucacaacguuaucaaugcagaaaaugcaccaggaggacccuacaaaauuggaaccucagggucuugcccuaacguuaccaauggaaacggauucuucgcaacaauggcuugggccgucccaaaaaacgacaaaaacaaaacagcaacaaauccauuaacaauagaaguaccauacauuuguacagaaggagaagaccaaauuaccguuuggggguuccacucugacaacgagacccaaauggcaaagcucuauggggacucaaagccccagaaguucaccucaucugccaacggagugaccacacauuacguuucacaaauugguggcuucccaaaucaaacagaagacggaggacuaccacaaagugguagaauuguuguugauuacauggugcaaaaaucugggaaaacaggaacaauuaccuaucaaagagguauuuuauugccucaaaagguguggugcgcaaguggcagaagcaagguaauaaaaggauccuugccuuuaauuggagaagcagauugccuccacgaaaaauacgguggguuaaacaaaagcaagccuuacuacacaggggaacaugcaaaggccauaggaaauugcccaauaugggugaaaacacccuugaagcuggccaauggaaccaaauauagaccuccugcaaaacuauuaaaggaaagggguuucuucggagcuauugcugguuucuuagaaggaggaugggaaggaaugauugcagguuggcacggauacacaucccacggggcacauggaguagcgguggcagcugaccuuaagagcacucaagaggccauaaacaagauaacaaaaaaucucaacucuuugagugagcuggaaguaaagaaucuucaaagacuaagcggugccauggaugaacuccacaacgaaauacuagaacuagaugagaaaguggaugaucucagagcugauacaauaagcucacaaauagaacuagcaguccugcuuuccaaugaaggaauaauaaacagugaagaugaacaucucuuggcgcuugaaagaaagcugaagaaaaugcugggccccucugcuguagagauagggaauggaugcuuugaaaccaaacacaaaugcaaccagaccugucucgacagaauagcugcugguaccuuugaugcaggagaauuuucucuccccaccuuugauucacugaauauuacugcugcaucuuuaaaugacgauggauuggauaaucauacuauacugcuuuacuacucaacugcugcuuccaguuuggcuguaacacugaugauagcuaucuuuguuguuuauauggucuccagagacaauguuucuugcuccaucugucuauaa

SEQ ID NO: 60216 - RNA, 1758 nt, Artificial Sequence
  derived and/or modified CDS sequence (wt) from hemagglutinin__InfluenzaB__AHM01151
augaaggcaauaauuguacuacucaugguaguaacauccaaugcagaucgaaucugcacuggaauaacaucgucaaacucaccacaugucgucaaaacugcuacucaaggggaggucaaugugaccgguguaauaccacugacaacaacacccaccaaaucucauuuugcaaaucucaaaggaacagaaaccagggggaaacuaugcccaaaaugccuuaacugcacagaucuggacguagccuugggcagaccaaaaugcacggggaaaauacccucggcaagaguuucaauacuccaugaagucagaccuguuacaucugggugcuuuccuauaaugcacgauagaacaaaaauuagacagcugccuaaccuucuccgaggauacgaacauaucagguuaucaacucacaacguuaucaaugcagaaaaugcaccaggaggacccuacaaaauuggaaccucagggucuugcccuaacguuaccaauggaaacggauucuucgcaacaauggcuugggccgucccaaaaaacgacaaaaacaaaacagaaacaaauccauuaacaauagaaguaccauacauuuguacagaaggagaagaccaaauuaccguuuggggguuccacucugacaacgagacccaaauggcaaagcucuauggggacucaaagccccagaaguucaccucaucugccaacggagugaccacacauuacguuucacagauugguggcuucccaaaucaaacagaagacggaggacuaccacaaagugguagaauuguuguugauuacauggugcaaaaaucugggaaaacaggaacaauuaccuaucaaagagguauuuuauugccucaaaagguguggugcgcaaguggcaggagcaagguaauaaaaggauccuugccuuuaauuggagaagcagauugccuccacgaaaaauacgguggauuaaacaaaagcaagccuuacuacacaggggaacaugcaaaggccauaggaaauugcccaauaugggugaaaacacccuugaagcuggccaauggaaccaaauauagaccuccugcaaaacuauuaaaggaaagggguuucuucggagcuauugcugguuucuuagaaggaggaugggaaggaaugauugcagguuggcacggauacacaucccauggggcacauggaguagcgguggcagcugaccuuaagagcacucaagaggccauaaacaagauaacaaaaaaucucaacucuuugagugagcuggaaguaaagaaucuucaaagacuaagcggugccauggaugaacuccacaaugaaauacuagaacuagaugagaaaguggaugaucucagagcugauacaauaagcucacaaauagaacucgcaguccugcuuuccaaugaaggaauaauaaacagugaagaugaacaucucuuggcgcuugaaagaaagcugaagaaaaugcugggccccucugcuguagagauagggaauggaugcuuugaaaccaaacacaagugcaaccagaccugucucgacagaauagcugcugguaccuuugaugcaggagaauuuucucuccccacuuuugauucacugaauauuacugcugcaucuuuaaaugacgauggauuggauaaucauacuauacugcuuuacuauucaacugcugccuccaguuuggcuguaacacugaugauagcuaucuuuguuguuuauauggucuccagagacaauguuucuugcuccaucugucuauaa

SEQ ID NO: 60217 - RNA, 1758 nt, Artificial Sequence
  derived and/or modified CDS sequence (wt) from hemagglutinin__InfluenzaB__AHM01162
augaaggcaauaauuguacuacucaugguaguaacauccaaugcagaucgaaucugcacugggauaacaucgucaaacucaccacaugucgucaaaacugcuacucaaggggaggucaaugugaccgguguaauaccacugacaacaacacccaccaaaucucauuuugcaaaucucaaaggaacagaaaccagggggaaacuaugcccaaaaugccucaacugcacagaucuggacguagccuugggcagaccaaaaugcacagggaaaauacccucggcaagaguuucaauacuccaugaagucagaccuguuacaucugggugcuuuccuauaaugcacgauagaacaaaaauuagacagcugccuaaccuucuccgaggauacgaacauaucagguuaucaacucacaacguuaucaaugcaaaagaugcaccaggaggacccuacaaaauuggaaccucagggucuugcccuaacguuaccaauggaaacggauucuucgcaacaauggcuugggccgucccaaaaaacgacaaaaacaaaacagcaacaaauccauuaacaauagaaguaccauacauuuguacagaaggagaagaccaaauuaccguuuggggguuccacucugacaacgagacccaaauggcaaagcucuauggggacucaaagccccagaaguucaccucaucugccaacggagugaccacacauuacguuucacagauugguggcuucccaaaucaaacagaagacggaggacuaccacaaagugguagaauuguuguugauuacauggugcaaaaaucuggaaaaacaggaacaauuaccuaucaaagagguauuuuauugccucaaaagguguggugcgcaaguggcaggagcaagguaauaaaaggauccuugccuuuaauuggagaagcagauugccuccacgaaaaauacgguggauuaaacaaaagcaagccuuacuacacaggggaacaugcaaaggccauaggaaauugcccaauaugggugaaaacacccuugaagcuggccaauggaaccaaauauagaccuccugcaaaacuauuaaaggaaagggguuucuucggagcuauugcugguuucuuagaaggaggaugggaaggaaugauugcagguuggcacggauacacaucccauggggcacauggaguagcgguggcagcugaccuuaagagcacucaagaggccauaaacaagauaacaaaaaaucucaacucuuugagugagcuggaaguaaagaaucuucaaagacuaagcggugccauggaugaacuccacaacgaaauacuagaacuagaugagaaaguggaugaucucagagcugauacaauaagcucacaaauagaacucgcaguccugcuuuccaaugaaggaauaauaaacagugaagaugaacaucucuuggcgcuugaaagaaagcugaagaaaaugcugggccccucugcuguagagauagggaauggaugcuuugaaaccaaacacaagugcaaccagaccugucucgacagaauagcugcugguaccuuugaugcaggagaauuuucucuccccaccuuugauucacugaauauuacugcugcaucuuuaaaugacgauggauuggauaaucauacuauacugcuuuacuacucaacugcugccuccaguuuggcuguaacacugaugauagcuaucuuuguuguuuauauggucuccagagacaauguuucuugcuccaucugucuauaa

SEQ ID NO: 60218 - RNA, 1755 nt, Artificial Sequence
  derived and/or modified CDS sequence (wt) from hemagglutinin__InfluenzaB__AHM01173
augaaggcaauaauuguacuacucaugguaguaacauccaaugcagaucgaaucugcacugggauaacaucuucaaacucaccucauguggucaaaacagcuacucaaggggaggucaaugugacuggugugauaccacuaacaacaacaccaacaaaaucuuauuuugcaaaucucaaaggaacaaagaccagagggaaacuaugcccagacugucucaacuguacagaucuggauguggccuugggcaggccaaugugugugggaacuacaccuucugcgaaagcuucaauacuucacgaagucagaccuguuacauccgggugcuucccuauaaugcacgacagaacaaaaaucaggcaacuagccaaucuucucagaggauaugaaaauaucagguuaucaacccaaaacguuaucgaugcagaaaaagcaccaggaggacccuacagacuuggaaccucaggaucuugcccuaacgcuaccaguaaaagcggauuuuucgcaacaauggcuugggcugucccaaaggacaacaacaaaaaugcaacgaacccauuaacaguagaaguaccauacauuugugcagaaggagaagaccaaauuacuguuuggggguuccauucagauaacaaaacccaaaugaagaaccucuauggagacucaaauccucaaaaguucaccucaucugcuaauggaguaaccacacauuauguuucucagauuggcggcuucccagaucaaacagaagacggaggacuaccacaaagcggcagaauugucguugauuacaugaugcaaaaaccugggaaaacaggaacaauugucuaucaaagagguguuuuguugccucaaaagguguggugcgcgaguggcaggagcaaaguaauaaaaggguccuugccuuuaauuggugaagcagauugccuucaugaaaaauacgguggauuaaacaaaagcaagccuuacuacacaggagaacaugcaaaagccauaggaaauugcccaauaugggugaaaacaccuuugaagcuugccaauggaaccaaauauagaccuccugcaaaacuauuaaaggaaagggguuucuucggagcuauugcugguuuccuagaaggaggaugggaaggaaugauugcagguuggcacggauacacaucucacggagcacauggaguggcaguugcugcagaccuuaagagcacacaagaagcuauaaacaagauaacaaaaaaucucaacucguugagugagcuagaaguaaagaaucuucaaaggcuaaguggugccauggaugaacuccacaacgaaauacuugagcuggaugagaaaguggaugaucucagagcugacacuauaaguucacaaauagaacuugcagucuugcuuuccaacgaaggaauaauaaacagugaagaugagcaucuauuggcacuugagagaaaacuaaagaaaaugcugggucccucugcuguagacauaggaaauggaugcuucgaaaccaaacacaaaugcaaccagaccugcuuagacaggauagcugcuggcaccuuuaaugcaggagaauuuucucuccccacuuuugauucauugaacauuacugcugcaucuuuaaaugaugauggauuggauaaccauacuauacugcucuauuacucaacugcugcuucuaguuuggcuguaacauugaugcuagcuauuuuuauuguuuauauggucuccagagacaacguuucaugcuccaucugccuauaa

SEQ ID NO: 60219 - RNA, 1758 nt, Artificial Sequence
  derived and/or modified CDS sequence (wt) from hemagglutinin__InfluenzaB__AHM01184
augaaggcaauaauuguacuacucaugguaguaacauccaaugcagaucgaaucugcacugggauaacaucgucaaacucaccacaugucgucaaaacugcuacucaaggggaggucaaugugaccgguguaauaacacugacaacaacacccaccaaaucucauuuugcaaaucucaaaggaacagaaaccagggggaaacuaugcccaaaaugccucaacugcacagaucuggacguagccuugggcagaccaaaaugcacagggaaaauacccucggcaagaguuucaauacuccaugaagucagaccuguuacaucugggugcuuuccuauaaugcacgauagaacaaaaauuagacagcugccuaaccuucuccgaggauacgaacauaucagguuaucaacucacaacguuaucaaugcagaagaugcaccaggaggacccuacaaaauuggaaccucagggucuugcccuaacguuaccaauggaaacggauucuucgcaacaauggcuugggccgucccaaaaaacgacaaaaacaaaacagcaacaaauccauuaacaauagaaguaccauacauuuguacagaaggagaagaccaaauuaccguuuggggguuccacucugacaacgagacccaaauggcaaagcucuauggggacucaaagccccagaaguucaccucaucugccaacggagugaccacacauuacguuucacagauugguggcuucccaaaucaaacagaagacggaggacuaccacaaagugguagaauuguuguugauuacauggugcaaaaaucuggaaaaacaggaacaauuaccuaucaaagagguauuuuauugccucaaaagguguggugcgcaaguggcaggagcaagguaauaaaaggauccuugccuuuaauuggagaagcagauugccuccacgaaaaauacgguggauuaaacaaaagcaagccuuacuacacaggggaacaugcaaaggccauaggaaauugcccaauaugggugaaaacacccuugaagcuggccaauggaaccaaauauagaccuccugcaaaacuauuaaaggaaagggguuucuucggagcuauugcugguuucuuagaaggaggaugggaaggaaugauugcagguuggcacggauacacaucccauggggcacauggaguagcgguggcagcugaccuuaagagcacucaagaggccauaaacaagauaacaaaaaaucucaacucuuugagugagcuggaaguaaagaaucuucaaagacuaagcggugccauggaugaacuccacaacgaaauacuagaacuagaugagaaaguggaugaucucagagcugauacaauaagcucacaaauagaacucgcaguccugcuuuccaaugaaggaauaauaaacagugaagaugaacaucucuuggcgcuugaaagaaagcugaagaaaaugcugggccccucugcuguagagauagggaauggaugcuuugaaaccaaacacaagugcaaccagaccugucucgacagaauagcugcugguaccuuugaugcaggagaauuuucucuccccaccuuugauucacugaauauuacugcugcaucuuuaaaugacgauggauuggauaaucauacuauacugcuuuacuacucaacugcugccuccaguuuggcuguaacacugaugauagcuaucuuuguuguuuauauggucuccagagacaauguuucuugcuccaucugucuauaa

SEQ ID NO: 60220 - RNA, 1758 nt, Artificial Sequence
  derived and/or modified CDS sequence (wt) from hemagglutinin__InfluenzaB__AHM01195
augaaggcaauaauuguacuacucaugguaguaacauccaaugcagaucgaaucugcacugggauaacaucgucaaacucaccacaugucgucaaaacugcuacucaaggggaggucaaugugaccgguguaauaccacugacaacaacacccaccaaaucucauuuugcaaaucucaaaggaacagaaaccagggggaaacuaugcccaaaaugccucaacugcacagaucuggacguagccuugggcagaccaaaaugcacggggaaaauacccucggcaagaguuucaauacuccaugaagucagaccuguuacaucugggugcuuuccuauaaugcacgauagaacaaaaauuagacagcugccuaaccuucuccgaggauacgaacauaucagguuaucagcucacaacguuaucaaugcagaaaaugcaccaggaggacccuacaaaauuggaaccucagggucuugcccuaacguuaccaauggaaacggauucuucgcaacaauggcuugggccgucccaaaaaacgacaaaaacaaaacagcaacaaauccauuaacaauagaaguaccauacauuuguacagaaggagaagaccaaauuaccguuuggggguuccacucugacaacgagacccaaauggcaaagcucuauggggacucaaagccccagaaguucaccucaucugccaacggagugaccacacauuacguuucacaaauugguggcuucccaaaucaaacagaagacggaggacuaccacaaagugguagaauuguuguugauuacauggugcaaaaaucugggaaaacaggaacaauuaccuaucaaagagguauuuuauugccucaaaagguguggugcgcaaguggcaggagcaagguaauaaaaggauccuugccuuuaauuggagaagcagauugccuccacgaaaaauacgguggguuaaacaaaagcaagccuuacuacacaggggaacaugcaaaggccauaggaaauugcccaauaugggugaaaacacccuugaagcuggccaauggaaccaaauauagaccuccugcaaaacuauuaaaggaaagggguuucuucggagcuauugcugguuucuuagaaggaggaugggaaggaaugauugcagguuggcacggauacacaucccacggggcacauggaguagcgguggcagcugaccuuaagagcacucaagaggccauaaacaagauaacaaaaaaucucaacucuuugagugagcuggaaguaaagaaucuucaaagacuaagcggugccauggaugaacuccacaacgaaauacuagaacuagaugagaaaguggaugaucucagagcugauacaauaagcucacaaauagaacuagcaguccugcuuuccaaugaaggaauaauaaacagugaagaugaacaucucuuggcgcuugaaagaaagcugaagaaaaugcugggccccucugcuguagagauagggaauggaugcuuugaaaccaaacacaagugcaaccagaccugucucgacagaauagcugcugguaccuuugaugcaggagaauuuucucuccccaccuuugauucacugaauauuacugcugcaucuuuaaaugacgauggauuggauaaucauacuauacugcuuuacuacucaacugcugcuuccaguuuggcuguaacacugaugauagcuaucuuugucguuuauauggucuccagagacaauguuucuugcuccaucugucuauaa

SEQ ID NO: 60221 - RNA, 1758 nt, Artificial Sequence
  derived and/or modified CDS sequence (wt) from hemagglutinin__InfluenzaB__AHM01206
augaaggcaauaauuguacuacucaugguaguaacauccaaugcagaucgaaucugcacugggauaacaucgucaaacucaccacaugucgucaaaacugcuacucaaggggaggucaaugugaccgguguaauaccacugacaacaacacccaccaaaucucauuuugcaaaucucaaaggaacagaaaccagggggaaacuaugcccaaaaugccucaacugcacagaucuggacguagccuugggcagaccaaaaugcacagggaaaauacccucggcaagaguuucaauacuccaugaagucagaccuguuacaucugggugcuuuccuauaaugcacgauagaacaaaaauuagacagcugccuaaccuucuccgaggauacgaacauaucagguuaucaacucacaacguuaucaaugcagaagaugcaccaggaggacccuacaaaauuggaaccucagggucuugcccuaacguuaccaauggaaacggauucuucgcaacaauggcuugggccgucccaaaaaacgacaaaaacaaaacagcaacaaauccauuaacaauagaaguaccauacauuuguacagaaggagaagaccaaauuaccguuuggggguuccacucugacaacgagacccaaauggcaaagcucuauggggacucaaagccccagaaguucaccucaucugccaacggagugaccacacauuacguuucacagauugguggcuucccaaaucaaacagaagacggaggacuaccacaaagugguagaauuguuguugauuacauggugcaaaaaucugaaaaaacaggaacaauuaccuaucaaagagguauuuuauugccucaaaagguguggugcgcaaguggcaggagcaagguaauaaaaggauccuugccuuuaauuggagaagcagauugccuccacgaaaaauacgguggauuaaacaaaagcaagccuuacuacacaggggaacaugcaaaggccauaggaaauugcccaauaugggugaaaacacccuugaagcuggccaauggaaccaaauauagaccuccugcaaaacuauuaaaggaaagggguuucuucggagcuauugcugguuucuuagaagguggaugggaaggaaugauugcagguuggcacggauacacaucccauggggcacauggaguagcgguggcagcugaccuuaagagcacucaagaggccauaaacaagauaacaaaaaaucucaacucuuugagugagcuggaaguaaagaaucuucaaagacuaagcggugccauggaugaacuccacaacgaaauacuagaacuagaugagaaaguggaugaucucagagcugauacaauaagcucacaaauagaacucgcaguccugcuuuccaaugaaggaauaauaaacagugaagaugaacaucucuuggcgcuugaaagaaagcugaagaaaaugcugggccccucugcuguagagauagggaauggaugcuuugaaaccaaacacaagugcaaccagaccugucucgacagaauagcugcugguaccuuugaugcaggagaauuuucucuccccaccuuugauucacugaauauuacugcugcaucuuuaaaugacgauggauuggguaaucauacuauacugcuuuacuacucaacugcugccuccaguuuggcuguaacacugaugauagcuaucuuuguuguuuauauggucuccagagacaauguuucuugcuccaucugucuauaa

SEQ ID NO: 60222 - RNA, 1758 nt, Artificial Sequence
  derived and/or modified CDS sequence (wt) from hemagglutinin__InfluenzaB__AHM01217
augaaggcaauaauuguacuacucaugguaguaacauccaaugcagaucgaaucugcacuggaauaacaucgucaaacucaccacaugucgucaaaacugcuacucaaggggaggucaaugugaccgguguaauaccacugacaacaacacccaccaaaucucauuuugcaaaucucaaaggaacagaaaccagggggaaacuaugcccaaaaugccuuaacugcacagaucuggacguagccuugggcagaccaaaaugcacggggaaaauacccucggcaagaguuucaauacuccaugaagucagaccuguuacaucugggugcuuuccuauaaugcacgauagaacaaaaauuagacagcugccuaaccuucuccgaggauacgaacauaucagguuaucaacucacaacguuaucaaugcagaaaaugcaccaggaggacccuacaaaauuggaaccucagggucuugcccuaacguuaccaauggaaacggauucuucgcaacaauggcuugggccgucccaaaaaacgacaaaaacaaaacagaaacaaauccauuaacaauagaaguaccauacauuuguacagaaggagaagaccaaauuaccguuuggggguuccacucugacaacgagacccaaauggcaaagcucuauggggacucaaagccccagaaguucaccucaucugccaacggagugaccacacauuacguuucacagauugguggcuucccaaaucaaacagaagacggaggacuaccacaaagugguagaauuguuguugauuacauggugcaaaaaucugggaaaacaggaacaauuaccuaucaaagagguauuuuauugccucaaaagguguggugcgcaaguggcaggagcaagguaauaaaaggauccuugccuuuaauuggagaagcagauugccuccacgaaaaauacgguggauuaaacaaaagcaagccuuacuacacaggggaacaugcaaaggccauaggaaauugcccaauaugggugaaaacacccuugaagcuggccaauggaaccaaauauagaccuccugcaaaacuauuaaaggaaagggguuucuucggagcuauugcugguuucuuagaaggaggaugggaaggaaugauugcagguuggcacggguacacaucccauggggcacauggaguagcgguggcagcugaccuuaagagcacucaagaggccauaaacaagauaacaaaaaaucucaacucuuugagugagcuggaaguaaagaaucuucaaagacuaagcggugccauggaugaacuccacaaugaaauacuagaacuagaugagaaaguggaugaucucagagcugauacaauaagcucacaaauagaacucgcaguccugcuuuccaaugaaggaauaauaaacagugaagaugaacaucucuuggcgcuugaaagaaagcugaagaaaaugcugggccccucugcuguagagauagggaauggaugcuuugaaaccaaacacaagugcaaccagaccugucucgacagaauagcugcugguaccuuugaugcaggagaauuuucucuccccaccuuugauucacugaauauuacugcugcaucuuuaaaugacgauggauuggauaaucauacuauacugcuuuacuauucaacugcugccuccaguuuggcuguaacacugaugauagcuaucuuuguuguuuauauggucuccagagacaauguuucuugcuccaucugucuauaa

SEQ ID NO: 60223 - RNA, 1755 nt, Artificial Sequence; identical to SEQ ID NO: 58868
  derived and/or modified CDS sequence (wt) from hemagglutinin__InfluenzaB__AHM01228

SEQ ID NO: 60224 - RNA, 1758 nt, Artificial Sequence; identical to SEQ ID NO: 60212
  derived and/or modified CDS sequence (wt) from hemagglutinin__InfluenzaB__AHM01239

SEQ ID NO: 60225 - RNA, 1758 nt, Artificial Sequence
  derived and/or modified CDS sequence (wt) from hemagglutinin__InfluenzaB__AHM01250
augaaggcaauaauuguacuacucaugguaguaacauccaaugcagaucgaaucugcacugggauaacaucgucaaacucaccacaugucgucaaaacugcuacucaaggggaggucaaugugaccgguguaauaccacugacaacaacacccaccaaaucucauuuugcaaaucucaaaggaacagaaaccagggggaaacuaugcccaaaaugccucaacugcacagaucuggacguagccuugggcagaccaaaaugcacagggaaaauacccucggcaagaguuucaauacuccaugaagucagaccuguuacaucugggugcuuuccuauaaugcacgauagaacaaaaauuagacagcugccuaaccuucuccgaggauacgaacauaucagguuaucaacucacaacguuaucaaugcagaagaugcaccaggaggacccuacaaaauuggaaccucagggucuugcccuaacguuaccaauggaaacggauucuucgcaacaauggcuugggccgucccaaaaaacgacaagaacaaaacagcaacaaauccauuaacaauagaaguaccauacauuuguacagaaggagaagaccaaauuaccguuuggggguuccacucugacaacgagacccaaauggcaaagcucuauggggacucaaagccccagaaguucaccucaucugccaacggagugaccacacauuacguuucacagauugguggcuucccaaaucaaacagaagacggaggacuaccacaaagugguagaauuguuguugauuacauggugcaaaaaucuggaaaaacaggaacaauuaccuaucaaagagguauuuuauugccucaaaagguguggugcgcaaguggcaggagcaagguaauaaaaggauccuugccuuuaauuggagaagcagauugccuccacgaaaaauacgguggauuaaacaaaagcaagccuuacuacacaggggaacaugcaaaggccauaggaaauugcccaauaugggugaaaacacccuugaagcuggccaauggaaccaaauauagaccuccugcaaaacuauuaaaggaaagggguuucuucggagcuauugcugguuucuuagaaggaggaugggaaggaaugauugcagguuggcacggauacacaucccauggggcacauggaguagcgguggcagcugaccuuaagagcacucaagaggccauaaacaagauaacaaaaaaucucaacucuuugagugagcuggaaguaaagaaucuucaaagacuaagcggugccauggaugaacuccacaacgaaauacuagaacuagaugagaaaguggaugaucucagagcugauacaauaagcucacaaauagaacucgcaguccugcuuuccaaugaaggaauaauaaacagugaagaugaacaucucuuggcgcuugaaagaaagcugaagaaaaugcugggccccucugcuguagagauagggaauggaugcuuugaaaccaaacacaagugcaaccagaccugucucgacagaauagcugcugguaccuuugaugcaggagaauuuucucuccccaccuuugauucacugaauauuacugcugcaucuuuaaaugacgauggauuggauaaucauacuauacugcuuuacuacucaacugcugccuccaguuuggcuguaacacugaugauagcuaucuuuguuguuuauauggucuccagagacaauguuucuugcuccaucugucuauaa

SEQ ID NO: 60226 - RNA, 1758 nt, Artificial Sequence
  derived and/or modified CDS sequence (wt) from hemagglutinin__InfluenzaB__AHM01261
augaaggcaauaauuguacuacucaugguaguaacauccaaugcagaucgaaucugcacugggauaacaucgucaaacucaccacaugucgucaaaacugcuacucaaggggaggucaaugugaccgguguaauaccacugacaacaacacccaccaaaucucauuuugcaaaucucaaaggaacagaaaccagggggaaacuaugcccaaaaugccucaacugcacagaucuggacguagccuugggcagaccaaaaugcacggggaaaauacccucggcaagaguuucaauacuccaugaagucagaccuguuacaucugggugcuuuccuauaaugcacgauagaacaaaaauuagacagcugccuaaccuucuccgaggauacgaacauaucagguuaucaacucacaacguuaucaaugcagaaaaugcaccaggaggacccuacaaaauuggaaccucagggucuugcccuaacguuaccaauggaaacggauucuucgcaacaauggcuugggccgucccaaaaaacgacaaaaacaaaacagcaacaaauccauuaacaauagaaguaccauacauuuguacagaaggagaagaccaaauuaccauuuggggguuccacucugacaacgagacccaaauggcaaagcucuauggggacucaaauccccagaaguucaccucaucugccaacggagugaccacacauuacguuucacagauugguggcuucccaaaucaaacagaagacggaggacuaccacaaagugguagaauuguuguugauuacauggugcaaaaaucugggaaaacaggaacaauuaccuaucaaagagguauuuuauugccucaaaagguguggugcgcagguggcaggagcaagguaauaaaaggauccuugccuuuaauuggagaagcagauugccuccacgaaaaauacgguggguuaaacaaaagcaagccuuacuacacaggggaacaugcaaaggccauaggaaauugcccaauaugggugaaaacacccuugaagcuggccaauggaaccaaguauagaccuccugcaaaacuauuaaaggaaagggguuucuucggagcuauugcugguuucuuagaaggaggaugggaaggcaugauugcagguuggcacggauacacaucccauggggcacauggaguagcaguggcagcugaccuuaagagcacucaagaagccauaaacaagauaacaaaaaaucucaacucuuugagugagcuggaaguaaagaaucuucaaagacuaagcggugccauggaugaacuccacaacgaaauacuagaacuagaugagaaaguggaugaucucagagcugauacaauaagcucacaaauagaacucgcaguccugcuuuccaaugaaggaauaauaaacagugaagaugaacaucucuuggcgcuugaaagaaagcugaagaaaaugcugggccccucugcuguagagauagggaauggaugcuuugaaaccaaacacaagugcaaccagaccugucucgacagaauagcugcugguaccuuugaugcaggagaauuuucucuccccacuuuugauucacugaauauuacugcugcaucuuuaaaugacgauggauuggauaaucauacuauacugcuuuacuacucaacugcugccuccaguuuggcuguaacacugaugauagcuaucuuuguuguuuauauggucuccagagacaauguuucuugcuccaucugucuauaa

SEQ ID NO: 60227 - RNA, 1755 nt, Artificial Sequence
  derived and/or modified CDS sequence (wt) from hemagglutinin__InfluenzaB__AHM01272
augaaggcaauaauuguacuacucaugguaguaacauccaaugcagaucgaaucugcacugggauaacaucuucaaacucaccucauguggucaaaacagcuacucaaggggaggucaaugugacuggugugauaccacuaacaacaacaccaacaaaaucuuauuuugcaaaucucaaaggaacaaagaccagagggaaacuaugcccagacugucucaacuguacagaucuggauguggccuugggcaggccaaugugugugggaacuacaccaucugcgaaagcuucaauacuucacgaagucagaccuguuacauccgggugcuucccuauaaugcacgacagaacaaaaaucaggcaacuagccaaucuucucagaggauaugaaaauaucagguuaucaacccaaaacguuaucgaugcagaaaaagcaccaggaggacccuacagacuugggaccucaggaucuugcccuaacgcuaccaguaaaagcggauuuuucgcaacaauggcuugggcugucccaaaggacaacaacaaaaaugcaacgaacccauuaacaguagaaguaccauacauuugugcagaaggagaagaccaaauuacuguuuggggguuccauucagauaacaaaacccaaaugaagaaccucuauggagacucaaauccucaaaaguucaccucaucugcuaauggaguaaccacacauuauguuucucagauuggcggcuucccagaucaaacagaagacggaggacuaccacaaagcggcagaauugucguugauuacaugaugcaaaaaccugggaaaacaggaacaauugucuaucaaagagguguuuuguugccucaaaagguguggugcgcgaguggcaggagcaaaguaauaaaaggguccuugccuuuaauuggugaagcagauugccuucaugaaaaauacgguggauuaaacaaaagcaagccuuacuacacaggagaacaugcaaaagccauaggaaauugcccaauaugggugaaaacaccuuugaagcuugccaauggaaccaaauauagaccuccugcaaaacuauuaaaggaaagggguuucuucggagcuauugcugguuuccuagaaggaggaugggaaggaaugauugcagguuggcacggauacacaucucacggagcacauggaguggcaguugcugcagaccuuaagagcacgcaagaagcuauaaacaagauaacaaaaaaucucaacucuuugagugagcuagaaguaaagaaucuucaaaggcuaaguggugccauggaugaacuccacaacgaaauacucgagcuggaugagaaaguggaugaucucagagcugacacuauaaguucacaaauagaacuugcagucuugcuuuccaacgaaggaauaauaaacagugaagaugagcaucuauuggcacuugagagaaagcuaaagaaaaugcugggucccucugcuguagacauaggaaauggaugcuucgaaaccaaacacaaaugcaaccagaccugcuuagacaggauagcugcuggcaccuuuaaugcaggagaauuuucucuccccacuuuugauucauugaacauuacugcugcaucuuuaaaugaugauggauuggauaaccauacuauacugcucuauuacucaacugcugcuucuaguuuggcuguaacauugaugcuagcuauuuuuauuguuuauauggucuccagagacaacguuucaugcuccaucugucuauaa

SEQ ID NO: 60228 - RNA, 1758 nt, Artificial Sequence
  derived and/or modified CDS sequence (wt) from hemagglutinin__InfluenzaB__AHM01283
augaaggcaauaauuguacuacucaugguaguaacauccaaugcagaucgaaucugcacugggauaacaucgucaaacucaccacaugucgucaaaacugcuacucaaggggaggucaaugugaccgguguaauaccacugacaacaacacccaccaaaucucauuuugcaaaucucaaaggaacagaaaccagggggaaacuaugcccaaaaugccucaacugcacagaucuggacguagccuugggcagaccaaaaugcacggggaaaauacccucggcaagaguuucaauacuccaugaagucagaccuguuacaucugggugcuuuccuauaaugcacgauagaacaaaaauuagacagcugccuaaccuucuccgaggauacgaacauaucagguuaucagcucacaacguuaucaaugcagaaaaugcaccaggaggacccuacaaaauuggaaccucagggucuugcccuaacguuaccaauggaaacggauucuucgcaacaauggcuugggccgucccaaaaaacgacaaaaacaaaacagcaacaaauccauuaacaauagaaguaccauacauuuguacagaaggagaagaccaaauuaccguuuggggguuccacucugacaacgagacccaaauggcaaagcucuauggggacucaaagccccagaaguucaccucaucugccaacggagugaccacacauuacguuucacaaauugguggcuucccaaaucaaacagaagacggaggacuaccacaaagugguagaauuguuguugauuacauggugcaaaaaucugggaaaacaggaacaauuaccuaucaaagagguauuuuauugccucaaaagguguggugcgcaaguggcaggagcaagguaauaaaaggauccuugccuuuaauuggagaagcagauugccuccacgaaaaauacgguggguuaaacaaaagcaagccuuacuacacaggggaacaugcaaaggccauaggaaauugcccaauaugggugaaaacacccuugaagcuggccaauggaaccaaauauagaccuccugcaaaacuauuaaaggaaagggguuucuucggagcuauugcugguuucuuagaaggaggaugggaaggaaugauugcagguuggcacggauacacaucccacggggcacauggaguagcgguggcagcugaccuuaagagcacucaagaggccauaaacaagauaacaaaaaaucucaacucuuugagugagcuggaaguaaagaaucuucaaagacuaagcggugccauggaugaacuccacaacgaaauacuagaacuagaugagaaaguggaugaucucagagcugauacaauaagcucacaaauagaacuagcaguccugcuuuccaaugaaggaauaauaaacagugaagaugaacaucucuuggcgcuugaaagaaagcugaagaaaaugcugggccccucugcuguagagauagggaauggaugcuuugaaaccaaacacaagugcaaccagaccugucucgacagaauagcugcugguaccuuugaugcaggagaauuuucucuccccaccuuugauucacugaauauuacugcugcaucuuuaaaugacgauggauuggauaaucauacuauacugcuuuacuacucaacugcugcuuccaguuuggcuguaacacugaugauagcuaucuuuguuguuuauauggucuccagagacaauguuucuugcuccaucugucuauaa

SEQ ID NO: 60229 - RNA, 1758 nt, Artificial Sequence
  derived and/or modified CDS sequence (wt) from hemagglutinin__InfluenzaB__AHM01294
augaaggcaauaauuguacuacucaugguaguaacauccaaugcagaucgaaucugcacugggauaacaucgucaaacucaccacaugucgucaaaacugcuacucaaggggaggucaaugugaccgguguaauaccacugacaacaacacccaccaaaucucauuuugcaaaucucaaaggaacagaaaccagggggaaacuaugcccaaaaugccucaacugcacagaucuggacguagccuugggcagaccaaaaugcacggggaaaauacccucggcaagaguuucaauacuccaugaagucagaccuguuacaucugggugcuuuccuauaaugcacgauagaacaaaaauuagacagcugccuaaccuucuccgaggauacgaacauaucagguuaucagcucacaacguuaucaaugcagaaaaugcaccaggaggacccuacaaaauuggaaccucagggucuugcccuaacguuaccaauggaaacggauucuucgcaacaauggcuugggccgucccaaaaaacgacaaaaacaaaacagcaacaaauccauuaacaauagaaguaccauacauuuguacagaaggagaagaccaaauuaccguuuggggguuccacucugacaacgagacccaaauggcaaagcucuauggggacucaaagccccagaaguucaccucaucugccaacggagugaccacacauuacguuucacaaauugguggcuucccaaaucaaacagaagacggaggacuaccacaaagugguagaauuguuguugauuacauggugcaaaaaucugggaaaacaggaacaauuaccuaucaaagagguauuuuauugccucaaaagguguggugcgcaaguggcaggagcaagguaauaaaaggauccuugccuuuaauuggagaagcagauugccuccacgaaaaauacgguggguuaaacaaaagcaagccuuacuacacaggggaacaugcaaaggccauaggaaauugcccaauaugggugaaaacacccuugaagcuggccaauggaaccaaauauagaccuccugcaaaacuauuaaaggaaagggguuucuucggagcuauugcugguuucuuagaaggaggaugggaaggaaugauugcagguuggcacggauacacaucccacggggcacauggaguagcgguggcagcugaccuuaagagcacucaagaggccauaaacaagauaacaaaaaaucucaacucuuugagugagcuggaaguaaagaaucuucaaagacuaagcggugccauggaugaacuccacaacgaaauacuagaacuagaugagaaaguggaugaucucagagcugauacaauaagcucacaaauagaacuagcaguccugcuuuccaaugaaggaauaauaaacagugaagaugaacaucucuuggcgcuugaaagaaagcugaagaaaaugcugggccccucugcuguagagauagggaauggaugcuuugaaaccaaacacaaaugcaaccagaccugucucgacagaauagcugcugguaccuuugaugcaggagaauuuucucuccccaccuuugauucacugaauauuacugcugcaucuuuaaaugacgauggauuggauaaucauacuauacugcuuuacuacucaacugcugcuuccaguuuggcuguaacacugaugauagcuaucuuuguuguuuauauggucuccagagacaauguuucuugcuccaucugucuauaa

SEQ ID NO: 60230 - RNA, 1755 nt, Artificial Sequence; identical to SEQ ID NO: 58891
  derived and/or modified CDS sequence (wt) from hemagglutinin__InfluenzaB__AHM01305

SEQ ID NO: 60231 - RNA, 1758 nt, Artificial Sequence; identical to SEQ ID NO: 58899
  derived and/or modified CDS sequence (wt) from hemagglutinin__InfluenzaB__AHM01316

SEQ ID NO: 60232 - RNA, 1758 nt, Artificial Sequence
  derived and/or modified CDS sequence (wt) from hemagglutinin__InfluenzaB__AHM01327
augaaggcaauaauuguacuacucaugguaguaacauccaaugcagaucgaaucugcacugggauaacaucgucaaacucaccacaugucgucaaaacugcuacucaaggggaggucaaugugaccgguguaauaccacugacaacaacacccaccaaaucucauuuugcaaaucucaaaggaacagaaaccagggggaaacuaugcccaaaaugccucaacugcacagaucuggacguagccuugggcagaccaaaaugcacggggaaaauacccucggcaagaguuucaauacuccaugaagucagaccuguuacaucugggugcuuuccuauaaugcacgauagaacaaaaauuagacagcugccuaaccuucuccgaggauacgaacauaucagguuaucagcucacaacguuaucaaugcagaaaaugcaccaggaggacccuacaaaauuggaaccucagggucuugcccuaacguuaccaauggaaacggauucuucgcaacaauggcuugggccgucccaaaaaacgacaaaaacaaaacagcaacaaauccauuaacaauagaaguaccauacauuuguacagaaggagaagaccaaauuaccguuuggggguuccacucugacaacgagacccaaauggcaaagcucuauggggacucaaagccccagaaguucaccucaucugccaacggagugaccacacauuacguuucacaaauugguggcuucccaaaucaaacagaagacggaggacuaccacaaagugguagaauuguuguugauuacauggugcaaaaaucugggaaaacaggaacaauuaccuaucaaagagguauuuuauugccucaaaagguguggugcgcaaguggcaggagcaagguaauaaaaggauccuugccuuuaauuggagaagcagauugccuccacgaaaaauacgguggguuaaacaaaagcaagccuuacuacacaggggaacaugcaaaggccauaggaaauugcccaauaugggugaaaacacccuugaagcuggccaauggaaccaaauauagaccuccugcaaaacuauuaaaggaaagggguuucuucggagcuauugcugguuucuuagaaggaggaugggaaggaaugauugcagguuggcacggauacacaucccacggggcacauggaguagcgguggcagcugaccuuaagagcacucaagaggccauaaacaagauaacaaaaaaucucaacucuuugagugagcuagaaguaaagaaucuucaaagacuaagcggugccauggaugaacuccacaacgaaauacuagaacuagaugagaaaguggaugaucucagagcugauacaauaagcucacaaauagaacuagcaguccugcuuuccaaugaaggaauaauaaacagugaagaugaacaucucuuggcgcuugaaagaaagcugaagaaaaugcugggccccucugcuguagagauagggaauggaugcuuugaaaccaaacacaagugcaaccagaccugucucgacagaauagcugcugguaccuuugaugcaggagaauuuucucuccccaccuuugauucacugaauauuacugcugcaucuuuaaaugacgauggauuggauaaucauacuauacugcuuuacuacucaacugcugcuuccaguuuggcuguaacacugaugauagcuaucuuuguuguuuauauggucuccagagacaauguuucuugcuccaucugucuauaa

SEQ ID NO: 60233 - RNA, 1758 nt, Artificial Sequence; identical to SEQ ID NO: 58899
  derived and/or modified CDS sequence (wt) from hemagglutinin__InfluenzaB__AHM01338

SEQ ID NO: 60234 - RNA, 1758 nt, Artificial Sequence; identical to SEQ ID NO: 58899
  derived and/or modified CDS sequence (wt) from hemagglutinin__InfluenzaB__AHM01349

SEQ ID NO: 60235 - RNA, 1758 nt, Artificial Sequence
  derived and/or modified CDS sequence (wt) from hemagglutinin__InfluenzaB__AHM01360
augaaggcaauaauuguacuacucaugguaguaacauccaaugcagaucgaaucugcacugggauaacaucgucaaacucaccacaugucgucaaaacugcuacucaaggggaggucaaugugaccgguguaauaccacugacaacaacacccaccaaaucucauuuugcaaaucucaaaggaacagaaaccagggggaaacuaugcccaaaaugccucaacugcacagaucuggacguagccuugggcagaccaaaaugcacggggaaaauacccucggcaagaguuucaauacuccaugaagucagaccuguuacaucugggugcuuuccuauaaugcacgauagaacaaaaauuagacagcugccuaaccuucuccgaggauacgaacauaucagguuaucaacucacaacguuaucaaugcagaaaaugcaccaggaggacccuacaaaauuggaaccucagggucuugcccuaacguuaccaauggaaacggauucuucgcaacaauggcuugggccgucccaaaaaacgacaaaaacaaaacagcaacaaauccauuaacaauagaaguaccauacauuuguacaaaaggagaagaccaaauuaccguuuggggguuccacucugacaacgagacccaaauggcaaagcucuauggggacucaaacccccagaaguucaccucaucugccaacggagugaccacacauuacguuucacagauugguggcuucccaaaucaaacagaagacggaggacuaccacaaagugguagaauuguuguugauuacauggugcaaaaaucugggaaaacaggaacaauuaccuaucaaagagguauuuuauugccucaaaagguguggugcgcaaguggcaggagcaagguaauaaaaggauccuugccuuuaauuggagaagcagauugccuccacgaaaaauacgguggguuaaacaaaagcaagccuuacuacacaggggaacaugcaaaggccauaggaaauugcccaauaugggugaaaacacccuugaagcuggccaauggaaccaaauauagaccuccugcaaaacuauuaaaggaaagggguuucuucggagcuauugcugguuucuuagaaggaggaugggaaggaaugauugcagguuggcacggauacacaucccauggggcacauggaguagcgguggcagcugaccuuaagagcacucaagaggccauaaacaagauaacaaaaaaucucaacucuuugagugagcuggaaguaaagaaucuucaaagacuaagcggugccauggaugaacuccacaacgaaauacuagaacuagaugagaaaguggaugaucucagagcugauacaauaagcucacaaauagaacucgcaguccugcuuuccaaugaaggaauaauaaacagugaagaugaacaucucuuggcgcuugaaagaaagcugaagaaaaugcugggccccucugcuguagagauagggaauggaugcuuugaaaccaaacacaagugcaaccagaccugucucgacagaauagcugcugguaccuuugaugcaggagaauuuucucuccccacuuuugauucacugaauauuacugcugcaucuuuaaaugacgauggauuggauaaucauacuauacugcuuuacuacucaacugcugccuccaguuuggcuguaacacugaugauagcuaucuuuguuguuuauauggucuccagagacaauguuucuugcuccaucugucuauaa

SEQ ID NO: 60236 - RNA, 1755 nt, Artificial Sequence
  derived and/or modified CDS sequence (wt) from hemagglutinin__InfluenzaB__AHM01371
augaaggcaauaauuguacuacucaugguaguaacauccaaugcagaucgaaucugcacugggauaacaucuucaaacucaccucauguggucaaaacagcuacucaaggggaggucaaugugacuggugugauaccacuaacaacaacaccaacaaaaucuuauuuugcaaaucucaaaggaacaaagaccagagggaaacuaugcccagacugucucaacuguacagaucuggauguggccuugggcaggccaaugugugugggaacuacaccuucugcgaaagcuucaauacuucacgaagucagaccuguuacauccgggugcuucccuauaaugcacgacagaacaaaaaucaggcaacuagccaaucuucucagaggauaugaaaauaucagguuaucaacccaaaacguuaucgaugcagaaaaagcaccaggagggcccuacagacuuggaaccucaggaucuugcccuaacgcuaccaguaaaaacggauuuuucgcaacaauggcuugggcugucccaaaggacaacaacaaaaaugcaacgaacccauuaacaguagaaguaccauacauuugugcagaaggagaagaccaaauugcuguuuggggguuccauucagauaacaaaacccaaaugaagaaccucuauggagacucaaauccucaaaaguucaccucaucugcuaauggaguaaccacacauuauguuucucagauuggcggcuucccagaucaaacagaagacggaggacuaccacaaagcggcagaauugucguugauuacaugaugcaaaaaccugggaaaacaggaacaauugucuaucaaagagguguuuuguugccucaaaagguguggugcgcgaguggcaggagcaaaguaauaaaaggguccuugccuuuaauuggugaagcagauugucuucaugaaaaauacgguggauuaaacaaaagcaagccuuacuacacaggagaacaugcaaaagccauaggaaauugcccaauaugggugaaaacaccuuugaagcuugccaauggaaccaaauauagaccuccugcaaaacuauuaaaggaaagggguuucuucggagcuauugcugguuuccuagaaggaggaugggaaggaaugauugcagguuggcacggauacacaucucacggagcacauggaguggcaguugcugcagaccuuaagagcacacaagaagcuauaaacaagauaacaaaaaaucucaacucuuugagugagcuagaaguaaagaaucuucaaaggcuaaguggugccauggaugaacuccacaacgaaauacucgagcuggaugagaaaguggaugaucucagagcugacacuauaaguucacaaauagaacuugcagucuugcuuuccaacgaaggaauaauaaacagugaagaugagcaucuauuggcacuugagagaaaacuaaagaaaaugcugggucccucugcuguagacauaggaaauggaugcuucgaaaccaaacacaaaugcaaccagaccugcuuagacaggauagcugcuggcaccuuuaaugcaggagaauuuucucuccccacuuuugauucauugaacauuacugcugcaucuuuaaaugaugauggauuggauaaccauaccauacugcucuauuacucaacugcugcuucuaguuuggcuguaacauugaugcuagcuauuuuuauuguuuauauggucuccagagacaacguuucaugcuccaucugucuauaa

SEQ ID NO: 60237 - RNA, 1755 nt, Artificial Sequence; identical to SEQ ID NO: 58891
  derived and/or modified CDS sequence (wt) from hemagglutinin__InfluenzaB__AHM01382

SEQ ID NO: 60238 - RNA, 1758 nt, Artificial Sequence
  derived and/or modified CDS sequence (wt) from hemagglutinin__InfluenzaB__AHM01393
augaaggcaauaauuguacuacucaugguaguaacauccaaugcagaucgaaucugcacugggauaacaucgucaaacucaccacauaucgucaaaacugcuacucaaggggaggucaaugugaccgguguaauaccacugacaacaacacccaccaaaucucauuuugcaaaucucaaaggaacagaaaccagggggaaacuaugcccaaaaugccucaacugcacagaucuggacguagccuugggcagaccaaaaugcacggggaaaauacccucggcaagaguuucaauacuccaugaagucagaccuguuacaucugggugcuuuccuauaaugcacgauagaacaaaaauuagacagcugccuaaccuucuccgaggauacgaacauaucagguuaucaacucacaacguuaucaaugcagaaaaugcaccaggaggacccuacaaaauuggaaccucagggucuugcccuaacguuaccaauggaaacggauucuucgcaacaauggcuugggccgucccaaaaaacgacaaaaacaaaacagcaacaaauccauuaacaauagaaguaccauacauuuguacagaaggagaagaccaaauuaccguuuggggguuccacucugacaacgagacccaaauggcaaagcucuauggggacucaaagccccagaaguucaccucaucugccaacggagugaccacacauuacguuucacagauugguggcuucccaaaucaaacagaagacggaggacuaccacaaagugguagaauuguuguugauuacauggugcaaaaaucugggaaaacaggaacaauuaccuaucaaagagguauuuuauugccucaaaagguguggugcgcaaguggcaggagcaagguaauaaaaggauccuugccuuuaauuggagaagcagauugccuccacgaaaaauacgguggauuaaacaaaagcaagccuuacuacacaggggaacaugcaaaggccauaggaaauugcccaauaugggugaaaacacccuugaagcuggccaauggaaccaaauauagaccuccugcaaaacuauuaaaggaaagggguuucuucggagcuauugcugguuucuuagaaggaggaugggaaggaaugauugcagguuggcacggauacacaucccauggggcacauggaguagcgguggcagcugaccuuaagagcacucaagaggccauaaacaagauaacgaaaaaucucaacucuuugagugagcuggaaguaaagaaucuucaaagacuaagcggugccauggaugaacuccacaacgaaauacuagaacuagaugagaaaguggaugaucucagagcugauacaauaagcucacaaauagaacuagcaguccugcuuuccaaugaaggaauaauaaacagugaagaugaacaucucuuggcgcuugaaagaaagcugaagaaaaugcugggccccucugcuguagagauagggaauggaugcuuugaaaccaaacacaagugcaaccagaccugucucgacagaauagcugcugguaccuuugaugcaggagaauuuucucuccccaccuuugauucacugaauauuacugcugcaucuuuaaaugacgauggauuggacaaucauacuauacugcuuuacuacucaacugcugccuccaguuuggcuguaacacugaugauagcuaucuuuguuguuuauauggucuccagagacaauguuucuugcuccaucugucuauaa

SEQ ID NO: 60239 - RNA, 1758 nt, Artificial Sequence
  derived and/or modified CDS sequence (wt) from hemagglutinin__InfluenzaB__AHM01404
augaaggcaauaauuguacuacucaugguaguaacauccaaugcagaucgaaucugcacugggauaacaucgucaaacucaccacaugucgucaaaacugcuacucaaggggaggucaaugugaccgguguaauaccacugacaacaacacccaccaaaucucauuuugcaaaucucaaaggaacagaaaccagggggaaacuaugcccaaaaugccucaacugcacagaucuggacguagccuugggcagaccaaaaugcacagggaaaauacccucggcaagaguuucaauacuccaugaagucagaccuguuacaucugggugcuuuccuauaaugcacgauagaacaaaaauuagacagcugccuaaccuucuccgaggauacgaacauaucagguuaucaacucacaacguuaucaaugcagaagaugcaccaggaggacccuacaaaauuggaaccucagggucuugcccuaacguuaccaauggaaacggauucuucgcaacaauggcuugggccgucccaaaaaacgacaaaaacaaaacagcaacaaauccauuaacaauagaaguaccauacauuuguacagaaggagaagaccaaauuacuguuuggggguuccacucugacaacgagacccaaauggcaaagcucuauggggacucaaagccccagaaguucaccucaucugccaacggagugaccacacauuacguuucacagauugguggcuucccaaaucaaacagaagacggaggacuaccacaaagugguagaauuguuguugauuacauggugcaaaaaucuggaaaaacaggaacaauuaccuaucaaagagguauuuuauugccucaaaagguguggugcgcaaguggcaggagcaagguaauaaaaggauccuugccuuuaauuggagaagcagauugccuccacgaaaaauacgguggauuaaacaaaagcaagccuuacuacacaggggaacaugcaaaggccauaggaaauugcccaauaugggugaaaacacccuugaagcuggccaauggaaccaaauauagaccuccugcaaaacuauuaaaggaaagggguuucuucggagcuauugcugguuucuuagaaggaggaugggaaggaaugauugcagguuggcacggauacacaucccauggggcacauggaguagcgguggcagcugaccuuaagagcacucaagaggccauaaacaagauaacaaaaaaucucaacucuuugagugagcuggaaguaaagaaucuucaaagacuaagcggugccauggaugaacuccacaacgaaauacuagaacuagaugagaaaguggaugaucucagagcugauacaauaagcucacaaauagaacucgcaguccugcuuuccaaugaaggaauaauaaacagugaagaugaacaucucuuggcgcuugaaagaaagcugaagaaaaugcugggccccucugcuguagagauagggaauggaugcuuugaaaccaaacacaagugcaaccagaccugucucgacagaauagcugcugguaccuuugaugcaggagaauuuucucuccccaccuuugauucacugaauauuacugcugcaucuuuaaaugacgauggauuggauaaucauacuauacugcuuuacuacucaacugcugccuccaguuuggcuguaacacugaugauagcuaucuuuguuguuuauauggucuccagagacaauguuucuugcuccaucugucuauaa

SEQ ID NO: 60240 - RNA, 1758 nt, Artificial Sequence
  derived and/or modified CDS sequence (wt) from hemagglutinin__InfluenzaB__AHM01415
augaaggcaauaauuguacuacucaugguaguaacauccaaugcagaucgaaucugcacugggauaacaucgucaaacucaccacaugucgucaaaacugcuacucaaggggaggucaaugugaccgguguaauaccacugacaacaacacccaccaaaucucauuuugcaaaucucaaaggaacagaaaccagggggaaacuaugcccaaaaugccucaacugcacagaucuggacguagccuugggcagaccaaaaugcacagggaaaauacccucggcaagaguuucaauacuccaugaagucagaccuguuacaucugggugcuuuccuauaaugcacgauagaacaaaaauuagacagcugccuaaccuucuccgaggauacgaacauaucagguuaucaacucacaacguuaucaaugcagaagaugcaccaggaggacccuacaaaauuggaaccucagggucuugcccuaacguuaccaauggaaacggauucuucgcaacaauggcuugggccgucccaaaaaacgacaaaaacaaaacagcaacaaauccauuaacaauagaaguaccauacauuuguacagaaggagaagaccaaauuaccguuuggggguuccacucugacaacgagacccaaauggcaaagcucuauggggacucaaagccccagaaguucaccucaucugccaacggagugaccacacauuacguuucacagauugguggcuucccaaaucaaacagaagauggaggacuaccacaaagugguagaauuguuauugauuacauggugcaaaaaucuggaaaaacaggaacaauuaccuaucaaagagguauuuuauugccucaaaagguguggugcgcaaguggcaggagcaagguaauaaaaggauccuugccuuuaauuggagaagcagauugccuccacgaaaaauacgguggauuaaacaaaagcaagccuuacuacacaggggaacaugcaaaggccauaggaaauugcccaauaugggugaaaacacccuugaagcuggccaauggaaccaaauauagaccuccugcaaaacuauuaaaggaaagggguuucuucggagcuauugcugguuucuuagaaggaggaugggaaggaaugauugcagguuggcacggauacacaucccauggggcacauggaguagcgguggcagcugaccuuaagagcacucaagaggccauaaacaagauaacaaaaaaucucaacucuuugagugagcuggaaguaaagaaucuucaaagacuaagcggugccauggaugaacuccacaacgaaauacuagaacuagaugagaaaguggaugaucucagagcugauacaauaagcucacaaauagaacucgcaguccugcuuuccaaugaaggaauaauaaacagugaagaugaacaucucuuggcgcuugaaagaaagcugaagaaaaugcugggccccucugcuguagagauagggaauggaugcuuugaaaccaaacacaagugcaaccagaccugucucgacagaauagcugcugguaccuuugaugcaggagaauuuucucuccccaccuuugauucacugaauauuacugcugcaucuuuaaaugacgauggauuggauaaucauacuauacugcuuuacuacucaacugcugccuccaguuuggcuguaacacugaugauagcuaucuuuguuguuuauauggucuccagagacaauguuucuugcuccaucugucuauaa

SEQ ID NO: 60241 - RNA, 1758 nt, Artificial Sequence
  derived and/or modified CDS sequence (wt) from hemagglutinin__InfluenzaB__AHM01426
augaaggcaauaauuguacuacucaugguaguaacauccaaugcagaucgaaucugcacugggauaacaucgucaaacucaccacaugucgucaaaacugcuacucaaggggaggucaaugugaccgguguaauaccacugacaacaacacccaccaaaucucauuuugcaaaucucaaaggaacagaaaccagggggaaacuaugcccaaaaugccucaacugcacagaucuggacguagccuugggcagaccaaaaugcacggggaaaauacccucggcaagaguuucaauacuccaugaagucagaccuguuacaucugggugcuuuccuauaaugcacgauagaacaaaaauuagacagcugccuaaccuucuccgaggauacgaacauaucagguuaucaacucacaacguuaucaaugcagaaaaugcaccaggaggacccuacaaaauuggaaccucagggucuugcccuaacguuaccaauggaaacggauucuucgcaacaauggcuugggccgucccaaaaaacgacaaaaacaaaacagcaacaaauccauuaacaauagaaguaccauacauuuguacagaaggagaagaccaaauuaccauuuggggguuccacucugacaacgagacccaaauggcaaagcucuauggggacucaaauccccagaaguucaccucaucugccaacggagugaccacacauuacguuucacagauugguggcuucccaaaucaaacagaagacggaggacuaccacaaagugguagaauuguuguugauuacauggugcaaaaaucugggaaaacaggaacaauuaccuaucaaagagguauuuuauugccucaaaagguguggugcgcaaguggcaggagcaagguaauaaaaggauccuugccuuuaauuggagaagcagauugccuccacgaaaaauacgguggguuaaacaaaagcaagccuuacuacacaggggaacaugcaaaggccauaggaaauugcccaauaugggugaaaacacccuugaagcuggccaauggaaccaaguauagaccuccugcaaaacuauuaaaggaaagggguuucuucggagcuauugcugguuucuuagaaggaggaugggaaggcaugauugcagguuggcacggauacacaucccauggggcacauggaguagcaguggcagcugaccuuaagagcacucaagaggccauaaacaagauaacaaaaaaucucaacucuuugagugagcuggaaguaaagaaucuucaaagacuaagcggugccauggaugaacuccacaacgaaauacuagaacuagaugagaaaguggaugaucucagagcugauacaauaagcucacaaauagaacucgcaguccugcuuuccaaugaaggaauaauaaacagugaagaugaacaucucuuggcgcuugaaagaaagcugaagaaaaugcugggccccucugcuguagagauagggaauggaugcuuugaaaccaaacacaagugcaaccagaccugucucgacagaauagcugcugguaccuuugaugcaggagaauuuucucuccccacuuuugauucacugaauauuacugcugcaucuuuaaaugacgauggauuggauaaucauacuauacugcuuuacuacucaacugcugccuccaguuuggcuguaacacugaugauagcuaucuuuguuguuuauauggucuccagagacaauguuucuugcuccaucugucuauaa

SEQ ID NO: 60242 - RNA, 1755 nt, Artificial Sequence
  derived and/or modified CDS sequence (wt) from hemagglutinin__InfluenzaB__AHM01437
augaaggcaguaauuguacuacucaugguaguaacauccaaugcagaucgaaucugcacuggaauaacaucuucaaacucaccucauguggucaaaacagcuacucaaggggaggucaaugugacuggugugauaccacuaacaacaacaccaacaaaaucuuauuuugcaaaucucaaaggaacaaagaccagagggaaacuaugcccagacugucucaacuguacagaucuggauguggccuugggcaggccaaugugugugggaacuacaccuucugcgaaagcuucaauacuucacgaagucagaccuguuacauccgggugcuucccuauaaugcacgacagaacaaaaaucaggcaacuagccaaucuucucagaggauaugaaaauaucagguuaucaacccaaaacguuaucgaugcagaaaaagcaccaggaggacccuacagacuuggaaccucaggaucuugcccuaacgcuaccaguaaaagcggauuuuucgcaacaauggcuugggcugucccaaaggacaacaacaaaaaugcaacgaacccauuaacaguagaaguaccauacauuugugcagaagaagaagaccaaauuacuguuuggggguuccauucagauaacaaaacccaaaugaagaaccucuauggagacucaaauccucaaaaguucaccucaucugcuaauggaguaaccacacauuauguuucucagauuggcggcuucccagaucaaacagaagacggaggacuaccacaaagcggcagaauugucguugauuacaugaugcaaaaaccugggaaaacaggaacaauugucuaucaaagagguguuuuguugccucaaaagguguggugcgcgaguggcaggagcaaaguaauaaaaggguccuugccuuuaauuggugaagcagauugccuucaugaaaaauacgguggauuaaacaaaagcaagccuuacuacacaggagaacaugcaaaagccauaggaaauugcccaauaugggugaaaacaccuuugaagcuugccaauggaaccaaauauagaccuccugcaaaacuauuaaaggaaagggguuucuucggagcuauugcugguuuccuagaaggaggaugggaaggaaugauugcagguuggcacggauacacaucucacggagcacauggaguggcaguugcugcagaccuuaagagcacacaagaagcuauaaacaagauaacaaaaaaucucaacucuuugagugagcuagaaguaaagaaucuucaaaggcuaaguggugccauggaugaacuccacaacgaaauacucgagcuggaugagaaaguggaugaucucagagcugacacuauaaguucacaaauagaacuugcagucuugcuuuccaacgaaggaauaauaaacagugaagaugagcaucuauuggcacuugagagaaaacuaaagaaaaugcugggucccucugcuguagacauaggaaauggaugcuucgaaaccaaacacaaaugcaaccagaccugcuuagacaggauagcugcuggcaccuuuaaugcaggagaauuuucucuccccacuuuugauucauugaacauuacugcugcaucuuuaaaugaugauggauuggauaaccauacuauacugcucuauuacucaacugcugcuucuaguuuggcuguaacauugaugcuagcuauuuuuauuguuuauauggucuccagagacaacguuucaugcuccaucugucuauaa

SEQ ID NO: 60243 - RNA, 1755 nt, Artificial Sequence
  derived and/or modified CDS sequence (wt) from hemagglutinin__InfluenzaB__AHM01448
augaaggcaauaauuguacuacucaugguaguaacauccaaugcagaucgaaucugcacugggauaacaucuucaaacucaccucauguggucaaaacagcuacucaaggggaggucaaugugacuggugugauaccacuaacaacaacaccaacaaaaucuuauuuugcaaaucucaaaggaacaaagaccagagggaaacuaugcccagacugucucaacuguacagaucuggauguggccuugggcaggccaaugugugugggaacuacaccuucugcgaaagcuucaauacuucacgaagucagaccuguuacauccgggugcuucccuauaaugcacgacagaacaaaaaucaggcaacuagccaaucuucucagaggauaugaaaauaucagguuaucaacccaaaacguuaucgaugcagaaaaagcaccaggaggacccuacagacuuggaaccucaggaucuugcccuaacgcuaccaguaaaagcggauuuuucgcaacaauggcuugggcugucccaaaggacaacaacaaaaaugcaacgaacccauuaacagcagagguaccauacauuugugcagaaggagaagaccaaauuacuguuuggggguuccauucagauaacaaaacccaaaugaagaaccucuauggagacucaaauccucaaaaguucaccucaucugcuaauggaguaaccacacauuauguuucucagauuggcggcuucccagaucaaacagaagacggaggacuaccacaaagcggcagaauugucguugauuacaugaugcaaaaaccugggaaaacaggaacaauugucuaucaaagagguguuuuguugccucaaaagguguggugcgcgaguggcaggagcaaaguaauaaaaggguccuugccuuuaauuggugaagcagauugccuucaugaaaaauacgguggauuaaacaaaagcaagccuuacuacacaggagaacaugcaaaagccauaggaaauugcccaauaugggugaaaacaccuuugaagcuugccaauggaaccaaauauagaccuccugcaaaacuauuaaaggaaagggguuucuucggagcuauugcugguuuccuagaaggaggaugggaaggaaugauugcagguuggcacggauacacaucucacggagcgcauggaguggcaguugcugcagaccuuaagagcacacaagaagcuauaaacaagauaacaaaaaaucucaacucuuugagugagcuagaaguaaagaaucuucaaaggcuaaguggugccauggaugaacuccacaacgaaauacucgagcuggaugagaaaguggaugaucucagagcugacacuauaaguucacaaauagaacuugcagucuugcuuuccaacgaaggaauaauaaacagugaagaugagcaucuauuggcacuugagagaaaacuaaagaaaaugcugggucccucugcuguagacauagggaauggaugcuucgaaaccaaacacaaaugcaaccagaccugcuuagacaggauagcugcuggcaccuuuaaugcaggagaauuuucucuccccacuuuugauucauugaacauuacugcugcaucuuuaaaugaugauggauuggauaaccauacuauacugcucuauuacucaacugcugcuucuaguuuggcuguaacauugaugcuagcuauuuuuauuguuuauauggucuccagagacaacguuucaugcuccaucugucuauaa

SEQ ID NO: 60244 - RNA, 1758 nt, Artificial Sequence
  derived and/or modified CDS sequence (wt) from hemagglutinin__InfluenzaB__AHM01459
augaaggcaauaauuguacuacucaugguaguaacauccaaugcagaucgaaucugcacugggauaacaucgucaaacucaccacaugucgucaaaacugcuacucaaggggaggucaaugugaccgguguaauaccacugacaacaacacccaccaaaucucauuuugcaaaucucaaaggaacagaaaccagggggaaacuaugcccaaaaugccucaacugcacagaucuggacguagccuugggcagaccaaaaugcacggggaaaauacccucggcaagaguuucaauacuccaugaagucagaccuguuacaucugggugcuuuccuauaaugcacgauagaacaaaaauuagacagcugccuaaccuucuccgaggauacgaacauaucagguuaucaacucacaacguuaucaaugcagaaaaugcaccaggaggacccuacaaaauuggaaccucagggucuugcccuaacguuaccaauggaaacggauucuucgcaacaauggcuugggccgucccaaaaaacgacaaaaacaaaacagcaacaaauccauuaacaauagaaguaccauacauuuguacagaaggagaagaccaaauuaccguuuggggguuccacucugacaacgagacccaaauggcaaagcucuauggggacucaaagccccagaaguucaccucaucugccaacggagugaccacacauuacguuucacagauugguggcuucccaaaucaaacagaagacggaggacuaccacaaagugguagaauuguuguugauuacauggugcaaaaaucugggaaaacaggaacaauuaccuaucaaagagguauuuuauugccucaaaagguguggugcgcaaguggcaggagcaagguaauaaaaggauccuugccuuuaauuggagaagcagauugccuccacgaaaaauacgguggauuaaacaaaagcaagccuuacuacacaggggaacaugcaaaggccauaggaaauugcccaauaugggugaaaacacccuugaagcuggccaauggaaccaaauauagaccuccugcaaaacuauuaaaggaaagggguuucuucggagcuauugcugguuucuuagaaggaggaugggaaggaaugauugcagguuggcacggauacacaucccauggggcacauggaguagcgguggcagcugaccuuaagagcacucaagaggccauaaacaagauaacgaaaaaucucaacucuuugagugagcuggaaguaaagaaucuucaaagacuaagcggugccauggaugaacuccacaacgaaauacuagaacuagaugagaaaguggaugaucucagagcugauacaauaagcucacaaauagaacuagcaguccugcuuuccaaugaaggaauaauaaacagugaagaugaacaucucuuggcgcuugaaagaaagcugaagaaaaugcugggccccucugcuguagagauagggaauggaugcuuugaaaccaaacacaagugcaaccagaccugucucgacagaauagcugcugguaccuuugaugcaggagaauuuucucuccccaccuuugauucacugaauauuacugcugcaucuuuaaaugacgauggauuggauaaucauacuauacugcuuuacuacucaacugcugccuccaguuuggcuguaacacugaugauagcuaucuuuguuguuuauauggucuccagagacaauguuucuugcuccaucugucuauaa

SEQ ID NO: 60245 - RNA, 1755 nt, Artificial Sequence
  derived and/or modified CDS sequence (wt) from hemagglutinin__InfluenzaB__AHM01470
augaaggcaauaauuguacuacucaugguaguaacauccaaugcagaucgaaucugcacugggauaacaucuucaaacucaccucauguggucaaaacagcuacucaaggggaggucaaugugacuggugugauaccacuaacaacaacaccaacaaaaucuuauuuugcaaaucucaaaggaacaaagaccagagggaaacuaugcccagacugucucaacuguacagaucuggauguggccuugggcaggccaaugugugugggaacuacaccuucugcgaaagcuucaauacuucacgaagucagaccuguuacauccgggugcuucccuauaaugcacgacagaacaaaaaucaggcaacuagccaaucuucucagaggauaugaaaauaucagguuaucaacccaaaacguuaucgaugcagaaaaagcaccaggaggacccuacagacuuggaaccucaggaucuugcccuaacgcuaccaguaaaagcggauuuuucgcaacaauggcuugggcugucccaaaggacaacaacaaaaaugcaacgaacccauuaacaguagaaguaccauacauuuguacagaaggagaagaccaaauugcuguuuggggguuccauucagauaacaaaacccaaaugaagaaccucuauggagacucaaauccucaaaaguucaccucaucugcuaauggaguaaccacacauuauguuucucagauuggcggcuucccagaucaaacagaagacggaggacuaccacaaagcggcagaauugucguugauuacaugaugcaaaaaccugggaaaacaggaacaauugucuaucaaagagguguuuuguugccucaaaagguguggugcgcgaguggcaggagcaaaguaauaaaaggguccuugccuuuaauuggugaagcagauugucuucaugaaaaauacgguggauuaaacaaaagcaagccuuacuacacaggagaacaugcaaaagccauaggaaauugcccaauaugggugaaaacaccuuugaagcuugccaauggaaccaaauauagaccuccugcaaaacuauuaaaggaaagggguuucuucggagcuauugcugguuuccuagaaggaggaugggaaggaaugauugcagguuggcacggauacacaucucacggagcacauggaguggcaguugcugcagaccuuaagagcacacaagaagcuguaaacaagauaacaaaaaaucucaacucuuugagugagcuagaaguaaagaaucuucaaaggcuaaguggugccauggaugaacuccacaacgaaauacucgagcuggaugagaaaguggaugaucucagagcugacacuauaaguucacaaauagaacuugcagucuugcuuuccaacgaaggaauaauaaacagugaagaugagcaucuauuggcacuugagagaaaacuaaagaaaaugcugggucccucugcuguagacauaggaaauggaugcuucgaaaccaaacacaaaugcaaccagaccugcuuagacaggauagcugcuggcaccuuuaaugcaggagaauuuucucuccccacuuuugauucauugaacauuacugcugcaucuuuaaaugaugauggauuggauaaccauacuauacugcucuauuacucaacugcugcuucuaguuuggcuguaacauugaugcuagcuauuuuuauuguuuauauggucuccagagacaacguuucaugcuccaucugucuauaa

SEQ ID NO: 60246 - RNA, 1755 nt, Artificial Sequence
  derived and/or modified CDS sequence (wt) from hemagglutinin__InfluenzaB__AHM01481
augaaggcaauaauuguacuacucaugguaguaacauccaaugcagaucgaaucugcacugggauaacaucuucaaacucaccucauguggucaaaacagcuacucaaggggaggucaaugugacuggugugauaccacuaacaacaacaccaacaaaaucuuauuuugcaaaucucaaaggaacaaagaccagagggaaacuaugcccagacugucucaacuguacagaucuggauguggccuugggcaggccaaugugugugggaacuacaccuucugcgaaagcuucaauacuucacgaagucagaccuguuacauccgggugcuucccuauaaugcacgacagaacaaaaaucaggcaacuagccaaucuucucagaggauaugaaaauaucagguuaucaacccaaaacguuaucgaugcagaaaaagcaccaggaggacccuacagacuuggaaccucaggaucuugcccuaacgcuaccaguaaaagcggauuuuucgcaacaauggcuugggcugucccaaaggacaacaacaaaaaugcaacgaacccauuaacaguagaaguaccauacauuugugcagaaggagaagaccaaauuacuguuuggggguuccauucagauaacaaaacccaaaugaagaaccucuauggagacucaaauccucaaaaguucaccucaucugcuaauggaguaaccacacauuauguuucucagauuggcggcuucccagaucaaacagaagacggaggacuaccacaaagcggcagaauugucguugauuacaugaugcaaaaaccugggaaaacaggaacaauugucuaucaaagagguguuuuguugccucaaaggguguggugcgcgaguggcaggagcaaaguaauaaaaggguccuugccuuuaauuggugaagcagauugccuucaugaaaaauacgguggauuaaacaaaagcaagccuuacuacacaggagaacaugcaaaagccauaggaaauugcccaauaugggugaaaacaccuuugaagcuugccaauggaaccaaauauagaccuccugcaaaacuauuaaaggaaagggguuucuucggagcuauugcugguuuccuagaaggaggaugggaaggaaugauugcagguuggcacggauacacaucucacggagcacauggaguggcaguugcugcagaccuuaagagcacacaagaagcuauaaacaagauaacaaaaaaucucaacucuuugagugagcuagaaguaaagaaucuucaaaggcuaaguggugccauggaugaacuccacaacgaaauacucgagcuggaugagaaaguggaugaucucagagcugacacuauaaguucacaaauagaacuugcagucuugcuuuccaacgaaggaauaauaaacagugaagaugagcaucuauuggcacuugagagaaaacuaaagaaaaugcugggucccucugcuguagacauaggaaauggaugcuucgaaaccaaacacaaaugcaaccagaccugcuuagacaggauagcugcuggcaccuuuaaugcaggagaauuuucucuccccacuuuugauucauugaacauuacugcugcaucuuuaaaugaugauggauuggauaaccauacuauacugcucuauuacucaacugcugcuucuaguuuggcuguaacauugaugcuagcuauuuuuauuguuuauauggucuccagagacaacguuucaugcuccaucugucuauaa

SEQ ID NO: 60247 - RNA, 1755 nt, Artificial Sequence; identical to SEQ ID NO: 58933
  derived and/or modified CDS sequence (wt) from hemagglutinin__InfluenzaB__AHM01492

SEQ ID NO: 60248 - RNA, 1755 nt, Artificial Sequence; identical to SEQ ID NO: 58867
  derived and/or modified CDS sequence (wt) from hemagglutinin__InfluenzaB__AHM01503

SEQ ID NO: 60249 - RNA, 1755 nt, Artificial Sequence
  derived and/or modified CDS sequence (wt) from hemagglutinin__InfluenzaB__AHM01514
augaaggcaauaauuguacuacucaugguaguaacauccaaugcagaucgaaucugcacugggauaacaucuucaaacucaccucauguggucaaaacagcuacucaaggggaggucaaugugacuggugugauaccacuaacaacaacaccaacaaaaucuuauuuugcaaaccucaaaggaacaaagaccagagggaaacuaugcccagacugucucaacuguacagaucuggauguggccuugggcaggccaaugugugugggaacuacaccuucugcgaaagcuucaauacuucacgaagucagaccuguuacauccgggugcuucccuauaaugcacgacagaacaaaaaucaggcaacuagccaaucuucucagaggauaugaaaauaucagguuaucaacccaaaacguuaucgaugcagaaaaagcaccaggaggacccuacagacuuggaaccucaggaucuugcccuaacgcuaccaguaaaagcggauuuuucgcaacaauggcuugggcugucccaaaggacaacaacaaaaaugcaacgaacccauuaacaguagaaguaccauacauuugugcagaaggagaagaccaaauuacuguuuggggguuccauucagauaacaaaacccaaaugaagaaccucuauggagacucaaauccucaaaaguucaccucaucugcuaauggaguaaccacacauuauguuucucagauuggcggcuucccagaucaaacagaagacggaggacuaccacaaagcggcagaauugucguugauuacaugaugcaaaaaccugggaaaacaggaacaauugucuaucaaagagguguuuuguugccucaaaagguguggugcgcgaguggcaggagcaaaguaauaaaaggguccuugccuuuaauuggugaagcagauugccuucaugaaaaauacgguggauuaaacaaaagcaagccuuacuacacaggagaacaugcaaaagccauaggaaauugcccaauaugggugaaaacacccuugaagcuugccaauggaaccaaauauagaccuccugcaaaacuauuaaaggaaagggguuucuucggagcuauugcugguuuccuagaaggaggaugggaaggaaugauugcagguuggcacggauacacaucucacggagcacauggaguggcaguugcugcagaccuuaagagcacacaagaagcuauaaacaagauaacaaaaaaucucaacucuuugagugagcuagaaguaaagaaucuucaaaggcuaaguggugccauggaugaacuccacaacgaaauacucgagcuggaugagaaaguggaugaucucagagcugacacuauaaguucacaaauagaacuugcagucuugcuuuccaacgaaggaauaauaaacagugaagaugagcaucuauuggcacuugagagaaaacuaaagaaaaugcugggccccucugcuguagacauaggaaauggaugcuucgaaaccaaacacaaaugcaaccagaccugcuuagacaggauagcugcuggcaccuuuaaugcaggagaauuuucucuccccacuuuugauucauugaacauuacugcugcaucuuuaaaugaugauggauuggauaaccauacuauacugcucuauuacucaacugcugcuucuaguuuggcuguaacauugaugcuagcuauuuuuauuguuuauauggucuccagagacaacguuucaugcuccaucugucuauaa

SEQ ID NO: 60250 - RNA, 1755 nt, Artificial Sequence
  derived and/or modified CDS sequence (wt) from hemagglutinin__InfluenzaB__AHM01525
augaaggcaauaauuguacuacucaugguaguaacauccaaugcagaucgaaucugcacugggauaacaucuucaaacucaccucauguggucaaaacagcuacucaaggggaggucaaugugacuggugugauaccacuaacaacaacaccaacaaaaucuuauuuugcaaaucucaaaggaacaaagaccagagggaaacuaugcccagacugucucaacuguacagaucuggauguggccuugggcaggccaaugugugugggaacuacaccuucugcgaaagcuucaauacuucacgaagucagaccuguuacauccgggugcuucccuauaaugcacgacagaacaaaaaucaggcaacuagccaaucuucucagaggauaugaaaauaucagguuaucaacccaaaacguuaucgaugcagaaaaagcaccaggaggacccuacagacuuggaaccucaggaucuugcccuaacgcuaccaguaaaagcggauuuuucgcaacaauggcuugggcugucccaaaggacaacaacaaaaaugcaacgaacccauuaacaguagaaguaccauacauuugugcagaaggagaagaccaaauuacuguuuggggguuccauucagauaacaaaacccaaaugaagaaccucuauggagacucaaauccucaaaaguucaccucaucugcuaauggaguaaccacacauuauguuucucagauuggcggcuucccagaucaaacagaagacggaggacuaccacaaagcggaagaauugucguugauuacaugauacaaaaaccugggaaaacaggaacaauugucuaucaaagagguguuuuguugccucaaaagguguggugcgcgaguggcaggagcaaaguaauaaaaggguccuugccuuuaauuggugaagcagauugccuucaugaaaaauacgguggauuaaacaaaagcaagccuuacuacacaggagaacaugcaaaagccauaggaaauugcccaauaugggugaaaacaccuuugaagcuugccaauggaaccaaauauagaccuccugcaaaacuauuaaaggaaagggguuucuucggagcuauugcugguuuccuagaaggaggaugggaaggaaugauugcagguuggcacggauacacaucucacggagcacauggaguugcaguugcugcagaccuuaagagcacacaagaagcuauaaacaagauaacaaaaaaucucaacucuuugagugagcuagaaguaaagaaucuucaaaggcuaaguggugccauggaugaacuccacaacgaaauacucgagcuggaugagaaaguggaugaucucagagcugacacuauaaguucacaaauagaacuugcagucuugcuuuccaacgaaggaauaauaaacagugaagaugagcaucuauuggcacuugagagaaaacuaaagaaaaugcugggucccucugcuguagacauaggaaauggaugcuucgaaaccaaacacaaaugcaaccagaccugcuuagacaggauagcugcuggcaccuuuaaugcaggagaauuuucucuccccacuuuugauucauugaacauuacugcugcaucuuuaaaugaugauggauuggauaaccauacuauacugcucuauuacucaacugcugcuucuaguuuggcuguaacauugaugcuagcuauuuuuauuguuuauauggucuccagagacaacguuucaugcuccaucugucuauaa

SEQ ID NO: 60251 - RNA, 1755 nt, Artificial Sequence
  derived and/or modified CDS sequence (wt) from hemagglutinin__InfluenzaB__AHM01536
augaaggcaauaauuguacuacucaugguaguaacauccaaugcagaucgaaucugcacugggauaacaucuucaaacucaccucauguggucaaaacagcuacucaaggggaggucaaugugacuggugugauaccacuaacaacaacaccaacaaaaucuuauuuugcaaaucucaaaggaacaaagaccagagggaaacuaugcccagacugucucaacuguacagaucuggauguggccuugggcaggccaaugugugugggaacuacaccuucugcgaaagcuucaauacuucacgaagucagaccuguuacauccgggugcuucccuauaaugcacgacagaacaaaaaucaggcaacuagccaaucuucucagaggauaugaaaauaucagguuaucaacccaaaacguuaucgaugcagaaaaagcaccaggaggacccuacagacuuggaaccucaggaucuugcccuaacgcuaccaguaaaagcggauuuuucgcaacaauggcuugggcugucccaaaggacaacaacaaaaaugcaacgaacccauuaacaguagagguaccauacauuugugcagaaggagaagaccaaauuacuguuuggggguuccauucagauaacaaaacccaaaugaagaaccucuauggagacucaaauccucaaaaguucaccucaucugcuaauggaguaaccacacauuauguuucucagauuggcggcuucccagaucaaacagaagacggaggacuaccacaaagcggcagaauugucguugauuacaugaugcaaaaaccugggaaaacaggaacaauugucuaucaaagagguguuuuguugccucaaaagguguggugcgcgaguggcaggagcaaaguaauaaaaggguccuugccuuuaauuggugaagcagauugccuucaugaaaaauacgguggauuaaacaaaagcaagccuuacuacacaggagaacaugcaaaagccauaggaaauugcccaauaugggugaaaacaccuuugaagcuugccaauggaaccaaauauagaccuccugcaaaacuauuaaaggaaagggguuucuucggagcuauugcugguuuccuagaaggaggaugggaaggaaugauugcagguuggcacggauacacaucucacggaguacauggaguggcaguugcugcagaccuuaagagcacacaagaagcuauaaacaagauaacaaaaaaucucaauucuuugagugagcuagaaguaaagaaucuucaaaggcuaaguggugccauggaugaacuccacaacgaaauacucgagcuggaugagaaaguggaugaucucagagcugacacuauaaguucacaaauagaacuugcagucuugcuuuccaacgaaggaauaauaaacagugaagaugagcaucuauuggcacuugagagaaaacuaaagaaaaugcugggucccucugcuguagacauagggaauggaugcuucgaaaccaaacacaaaugcaaccagaccugcuuagacaggauagcugcuggcaccuuuaaugcaggagaauuuucucuccccacuuuugauucauugaacauuacugcugcaucuuuaaaugaugauggauuggauaaccauacuauacugcucuauuacucaacugcugcuucuaguuuggcuguaacauugaugcuagcuauuuuuauuguuuauauggucuccagagacaacguuucaugcuccaucugucuauaa

SEQ ID NO: 60252 - RNA, 1755 nt, Artificial Sequence; identical to SEQ ID NO: 58904
  derived and/or modified CDS sequence (wt) from hemagglutinin__InfluenzaB__AHM01547

SEQ ID NO: 60253 - RNA, 1755 nt, Artificial Sequence
  derived and/or modified CDS sequence (wt) from hemagglutinin__InfluenzaB__AHM01558
augaaggcaauaauuguacuacucaugguaguaacauccaaugcagaucgaaucugcacugggauaacaucuucaaacucaccucauguggucaaaacagcuacucaaggggaggucaaugugacuggugugauaccacuaacaacaacaccaacaaaaucuuauuuugcaaaucucaaaggaacaaagaccagagggaaacuaugcccagacugucucaacuguacagaucuggauguggccuugggcaggccaaugugugugggaacuacaccuucugcgaaagcuucaauacuucacgaagucagaccuguuacauccgggugcuucccuauaaugcacgacagaacaaaaaucaggcaacuagccaaucuucucagaggauaugaaaauaucagguuaucaacccaaaacguuaucgaugcagaaaaagcaccaggaggacccuacagacuuggaaccucaggaucuugcccuaacgcuaccaguaaaagcggauuuuucgcaacaauggcuugggcugucccaaaggacaacaacaaaaaugcaacgaacccauuaacaguagaaguaccauacauuugugcagaaggagaagaccaaauugcuguuuggggguuccauucagauaacaaaacccaaaugaagaaccucuauggagacucaaauccucaaaaguucaccucaucugcuaauggaguaaccacacauuauguuucucagauuggcggcuucccagaucaaacagaagacggaggacuaccacaaagcggcagaauugucguugauuacaugaugcaaaaaccugggaaaacaggaacaauugucuaucaaagagguguuuuguugccucaaaagguguggugcgcgaguggcaggagcaaaguaauaaaaggguccuugccuuuaauuggugaagcagauugucuucaugaaaaauacgguggauuaaacaaaagcaagccuuacuacacaggagaacaugcaaaagccauaggaaauugcccaauaugggugaaaacaccuuugaagcuugccaauggaaccaaauauagaccuccugcaaaacuauuaaaggaaagggguuucuucggagcuauugcugguuuccuagaaggaggaugggaaggaaugauugcagguuggcauggauacacaucucacggagcacauggaguggcaguugcugcagaccuuaagagcacacaagaagcuauaaacaagauaacaaaaaaucucaacucuuugagugagcuagaaguaaagaaucuucaaaggcuaaguggugccauggaugaacuccacaacgaaauacucgagcuggaugagaaaguggaugaucucagagcugacacuauaaguucacaaauagaacuugcagucuugcuuuccaacgaaggaauaauaaacagugaagaugagcaucuauuggcacuugagagaaaacuaaagaaaaugcugggucccucugcuguagacauaggaaauggaugcuucgaaaccaaacacaaaugcaaccagaccugcuuagacaggauagcugcuggcaccuuuaaugcaggagaauuuucucuccccacuuuugauucauugaacauuacugcugcaucuuuaaaugaugauggauuggauaaccauacuauacugcucuauuacucaacugcugcuucuaguuuggcuguaacauugaugcuagcuauuuuuauuguuuauauggucuccagagacaacguuucaugcuccaucugccuauaa

SEQ ID NO: 60254 - RNA, 1758 nt, Artificial Sequence; identical to SEQ ID NO: 58752
  derived and/or modified CDS sequence (wt) from hemagglutinin__InfluenzaB__AHV83951

SEQ ID NO: 60255 - RNA, 1755 nt, Artificial Sequence
  derived and/or modified CDS sequence (wt) from hemagglutinin__InfluenzaB__AHV83952
augaaggcaauaauuguacuacucaugguaguaacauccaaugcagaucgaaucugcacugggauaacaucuucaaacucaccucauguggucaaaacagcuacucaaggggaggucaaugugacuggcgugauaccacugacaacaacaccaacaaaaucuuauuuugcaaaucucaaaggaacaaggaccagagggaaacuaugcccggacugucucaacuguacagaucuggauguggccuugggcaggccaauguguguggggaccacaccuucugcuaaagcuucaauacuccaugaggucagaccuguuacauccgggugcuuuccuauaaugcacgacagaacaaaaaucaggcaacuacccaaucuucucagaggauaugaaaagaucagguuaucaacccaaaacguuaucgaugcagaaaaagcaccaggaggacccuacagacuuggaaccucaggaucuugcccuaacgcuaccaguaaaaucggauuuuuugcaacaauggcuugggcugucccaaaggacaacuacaaaaaugcaacgaacccacuaacaguggaaguaccauacauuuguacagaaggggaagaccaaauuacuguuuggggguuccauucggauaacaaaacccaaaugaagagccucuauggagacucaaauccucaaaaguucaccucaucugcuaauggaguaaccacacauuauguuucucagauuggcgacuucccagaucaaacagaagacggaggacuaccacaaagcggcagaauuguuguugauuacaugaugcaaaaaccugggaaaacaggaacaauugucuaucaaagggguguuuuguugccucaaaagguguggugcgcgaguggcaggagcaaaguaauaaaagggucauugccuuuaauuggugaagcagauugccuucaugaagaauacgguggauuaaacaaaagcaagccuuacuacacaggaaaacaugcaaaagccauaggaaauugcccaauauggguaaaaacaccuuugaagcuugccaauggaaccaaauauagaccuccugcaaaacuauugaaggaaagggguuucuucggagcuauugcugguuuccuagaaggaggaugggaaggaaugauugcagguuggcacggauacacaucucacggagcacauggaguggcaguggcggcagaccuuaagaguacacaagaagcuauaaauaagauaacaaaaaaucucaauucuuugagugaacuagaaguaaagaaccuucaaagacuaaguggugccauggaugaacuccacaacgaaauacucgagcuggaugaaaaaguggaugaucucagagcugacacuauaagcucacaaauagaacuugcagucuugcucuccaacgaaggaauaauaaacagugaagacgagcaucuauuggcacuugagagaaaacuaaagaaaaugcugggucccucugcuguagacauaggaaacggaugcuuugaaaccaaacacaaaugcaaccagaccugcuuagacaggauagcugcuggcaccuuuaaugcaggagaauuuucucuccccacuuuugauucauugaacauuacugcugcaucuuuaaaugaugauggauuggauaaccauacuauacugcucuauuacucaacugcugcuucuaguuuggcuguaacauuaaugcuagcuauuuuuauuguuuauauggucuccagagacaacguuucaugcuccaucugucuauaa

SEQ ID NO: 60256 - RNA, 1758 nt, Artificial Sequence
  derived and/or modified CDS sequence (wt) from hemagglutinin__InfluenzaB__AHZ36697
augaaggcaauaauuguacuacucaugguaguaacauccaaugcagaucgaaucugcacugggauaacaucgucaaacucaccacauaucgucaaaacugcuacucaaggggaggucaaugugacugguguaauaccacugacgacaacacccaccaaaucucauuuugcaaaucucaaaggaacagaaaccagggggaaacuaugcccaaaaugccucaacugcacagaucuggacguagccuugggcagaccaaaaugcacggggaaaauacccucggcaagaguuucaauacuccaugaagucagaccuguuacaucugggugcuuuccuauaaugcacgacagaacaaaaauuagacagcugccuaaccuucucagaggauacgaacauaucagguuaucaacccauaacguuaucaaugcagaaaaugcaccaggaggacccuacaaaauuggaaccucagggucuugcccuaacauuaccaauggaaacggauuuuucgcaacaauggcuugggccgucccaaaaaacgacaaaaacaaaacagcaacaaauccauuaacaauagaaguaccauacauuuguacagaaggagaagaccaaauuaccguuuggggguuccacucugacaaugagacccaaauggcaaagcucuauggggacucaaagccccagaaguucaccucaucugccaacggagugaccacacauuacguuucacagauugguggcuucccaaaucaaacagaagacggaggacuaccacaaagugguagaauuguuguugauuacauggugcaaaaaucugggaaaacaggaacaauuaccuaucaaagggguauuuuauugccucaaaagguguggugcgcaaguggcaggagcaagguaauaaaaggaucuuugccuuuaauuggagaagcagauugccuccacgaaaaauacgguggauuaaacaaaagcaagccuuacuacacaggggaacaugcaaaggccauaggaaauugcccaauaugggugaaaacacccuugaagcuggccaauggaaccaaauauagaccuccugcaaaacuauuaaaggaaagggguuucuucggagcuauugcuggcuucuuagaaggaggaugggaaggaaugauugcagguuggcacggauacacaucccauggggcacauggaguagcgguggcagcagaccuuaagagcacucaagaggccauaaacaagauaacaaaaaaucucaacucuuugagugagcuggaaguaaagaaucuucaaagacuaagcggugccauggaugaacuccacaaugaaauacuagaauuagaugagaaaguggaugaucucagagcugauacaauaagcucacaaauagaacucgcaguccugcuuuccaaugaaggaauaauaaacagugaagaugaacaucucuuggcgcuugaaagaaagcugaagaaaaugcugggccccucugcuguagagauagggaauggaugcuuugaaaccaaacacaagugcaaccagaccugucucgacagaauagcugcugguaccuuugaugcaggagaauuuucucuccccacuuuugauucacugaauauuacugcugcaucuuuaaaugacgauggauuggauaaucauacuauacugcuuuacuacucaacugcugccuccaguuuggcuguaacacugaugauagcuaucuuuguuguuuauauggucuccagagacaauguuucuugcuccaucugucuauaa

SEQ ID NO: 60257 - RNA, 1758 nt, Artificial Sequence
  derived and/or modified CDS sequence (wt) from hemagglutinin__InfluenzaB__AHZ36708
augaaggcaauaauuguacuacucaugguaguaacauccaaugcagaucgaaucugcacugggauaacaucgucaaacucaccacaugucgucaaaacugcuacucaaggggaggucaaugugaccgguguaauaccacugacaacaacacccaccaaaucucauuuugcaaaucucaaaggaacagaaaccagggggaaacuaugcccaaaaugccucaacugcacagaucuggacguagccuugggcagaccaaaaugcacggggaaaauacccucggcaagaguuucaauacuccaugaagucagaccuguuacaucugggugcuuuccuauaaugcacgauagaacaaaaauuagacagcugccuaaccuucuccgaggauacgaacauaucagguuaucaacucacaacguuaucaaugcagaaaaugcaccaggaggacccuacaaaauuggaaccucagggucuugccuuaacguuaccaauggaaacggauucuucgcaacaauggcuugggccgucccaaaaaacgacaaaaacaaaacagcaacaaauccauuaacaauagaaguaccauacauuuguacagaaggagaagaccaaauuaccguuuggggguuccacucugacaacgagacccaaauggcaaagcucuauggggacucaaagccccagaaguucaccucaucugccaacggagugaccacacauuacguuucacagauugguggcuucccaaaucaaacagaagacggaggacuaccacaaagugguagaauuguuguugauuacauggugcaaaaaucugggaaaacaggaacaauuaccuaucaaagagguauuuuauugccucaaaagguguggugcacaaguggcaggagcaagguaauaaaaggauccuugccuuuaauuggagaagcagauugccuccacgaaaaauacgguggauuaaacaaaagcaagccuuacuacacaggggaacaugcaaaggccauaggaaauugcccaauaugggugaaaacacccuugaagcuggccaauggaaccaaauauagaccuccugcaaaacuauuaaaggaaagggguuuuuucggagcuauugcugguuucuuagaaggaggaugggaaggaaugauugcagguuggcacggauacacaucccauggggcacauggaguagcgguggcagcugaccuuaagagcacucaagaggccauaaacaagauaacaaaaaaucucaacucuuugagugagcuggaaguaaagaaucuucaaagacuaagcggugccauggaugaacuccacaacgaaauacuagaacuagaugagaaaguggaugaucucagagcugauacaauaagcucacaaauagaacucgcaguccugcuuuccaaugaaggaauaauaaacagugaagaugaacaucucuuggcgcuugaaagaaagcugaagaaaaugcugggccccucugcuguagagauagggaauggaugcuuugaaaccaaacacaagugcaaccagaccugucucgacagaauagcugcugguaccuuugaugcaggagaauuuucucuccccaccuuugauucacugaauauuacugcugcaucuuuaaaugacgauggauuggauaaucauacuauacugcuuuacuacucaacugcugccuccaguuuggcuguaacacugaugauagcuaucuuuguuguuuauauggucuccagagacaauguuucuugcuccaucugucuauaa

SEQ ID NO: 60258 - RNA, 1758 nt, Artificial Sequence
  derived and/or modified CDS sequence (wt) from hemagglutinin__InfluenzaB__AHZ36719
augaaggcaauaauuguacuacucaugguaguaacauccaaugcagaucgaaucugcacugggauaacaucgucaaacucaccacaugucgucaaaacugcuacucaaggggaggucaaugugaccgguguaauaccacugacaacaacacccaccaaaucucauuuugcaaaucucaaaggaacagaaaccagggggaaacuaugcccaaaaugccucaacugcacagaucuggacguagccuugggcagaccaaaaugcacggggaaaauacccucggcaagaguuucaauacuccaugaagucagaccuguuacaucugggugcuuuccuauaaugcacgauagaacaaaaauuagacagcugccuaaucuucuccgaggauacgaacauaucagguuaucaacucacaacguuaucaaugcagaaaaugcaccaggaggacccuacaaaauuggaaccucagggucuugcccuaacguuaccaauggaaacggauucuucgcaacaauggcuugggccgucccaaaaaacgacaaaaacaaaacagcaacaaauccauuaacaauagaaguaccauacguuuguacagaaggagaagaccaaauuaccguuuggggguuccauucugacaacgagacccaaauggcaaagcucuauggggacucaaagccccagaaguucaccucaucugccaacggagugaccacacauuacguuucacagauugguggcuucccaaaucaaacagaagacggaggacuaccacaaagugguagaauuguuguugauuacaugguucaaaaaucugggaaaacaggaacaauuaccuaucaaagagguauuuuauugccucaaaagguguggugcgcaaguggcaggagcaagguaauaaaaggauccuugccuuuaauuggagaagcagauugccuccacgaaaaauacgguggauuaaacaaaagcaagccuuacuacacaggggaacaugcaaaggccauaggaaauugcccaauaugggugaaaacacccuugaagcuggccaauggaaccaaauauagaccuccugcaaaacuauuaaaggaaagggguuucuucggagcuauugcugguuucuuagaaggaggaugggaaggaaugauugcagguuggcacggauacacaucccauggggcacauggaguagcgguggcagcugaccuuaaaagcacucaagaggccauaaacaagauaacaaaaaaucucaacucuuugagugagcuggaaguaaagaaucuucaaagacuaagcggugccauggaugaacuccacaacgaaauacuagaacuagaugagaaaguggaugaucucagagcugauacaauaagcucacaaauagaacucgcaguccugcuuuccaaugaaggaauaauaaacagugaagaugaacaucucuuggcgcuugaaagaaagcugaagaaaaugcugggccccucugcuguagagauagggaauggaugcuuugaaaccaaacacaagugcaaccagaccugucucgacagaauagcugcugguaccuuugaugcaggagaauuuucucuccccaccuuugauucacugaauauuacugcugcaucuuuaaaugacgauggauuggauaaucauacuauacugcuuuacuacucaacugcugccuccaguuuggcuguaacacugaugauagcuaucuuuguuguuuauauggucuccagagacaauguuucuugcuccaucugucuauaa

SEQ ID NO: 60259 - RNA, 1758 nt, Artificial Sequence
  derived and/or modified CDS sequence (wt) from hemagglutinin__InfluenzaB__AHZ36730
augaaggcaauaauuguacuacucaugguaguaacauccaaugcagaucgaaucugcacugggauaacaucgucaaacucaccacauaucgucaaaacugcuacucaaggggaggucaaugugacugguguaauaccacugacgacaacacccaccaaaucucauuuugcaaaucucaaaggaacagaaaccagggggaaacuaugcccaaaaugccucaacugcacagaucuggacguagccuugggcagaccaaaaugcacggggaaaauacccucggcaagaguuucaauacuccaugaagucagaccuguuacaucugggugcuuuccuauaaugcacgacagaacaaaaauuagacagcugccuaaccuucucagaggauacgaacauaucagguuaucaacccauaacguuaucaaugcagaaaaugcaccaggaggacccuacaaaauuggaaccucagggucuugcccuaacauuaccaauggaaacggauuuuucgcaacaauggcuugggccgucccaaaaaacgacaaaaacaaaacagcaacaaauccauuaacaauagaaguaccauacauuuguacagaaggagaagaccaaauuaccguuuggggguuccacucugacaaugagacccaaauggcaaagcucuauggggacucaaagccccagaaguucaccucaucugccaacggagugaccacacauuacguuucacagauugguggcuucccaaaucaaacagaagacggaggacuaccacaaagugguagaauuguuguugauuacauggugcaaaaaucugggaaaacaggaacaauuaccuaucaaagggguauuuuauugccucaaaagguguggugcgcaaguggcaggagcaagguaauaaaaggauccuugccuuuaauuggagaagcagauugccuccacgaaaaauacgguggauuaaacaaaagcaagccuuacuacacaggggaacaugcaaaggccauaggaaauugcccaauaugggugaaaacacccuugaagcuggccaauggaaccaaauauagaccuccugcaaaacuauuaaaggaaagggguuuuuucggagcuauugcuggcuucuuagaaggaggaugggaaggaaugauugcagguuggcacggauacacaucccauggggcacauggaguagcgguggcagcagaccuuaagagcacucaagaggccauaaacaagauaacaaaaaaucucaacucuuugagugagcuggaaguaaagaaucuucaaagacuaagcggugccauggaugaacuccacaaugaaauacuagaauuagaugagaaaguggaugaucucagagcugauacaauaagcucacaaauagaacucgcaguccugcuuuccaaugaaggaauaauaaacagugaagaugaacaucucuuggcgcuugaaagaaagcugaagaaaaugcugggccccucugcuguagagauagggaauggaugcuuugaaaccaaacacaagugcaaccagaccugucucgacagaauagcugcugguaccuuugaugcaggagaauuuucucuccccacuuuugauucacugaauauuacugcugcaucuuuaaaugacgauggauuggauaaucauacuauacugcuuuacuacucaacugcugccuccaguuuggcuguaacacugaugauagcuaucuuuguuguuuauauggucuccagagacaauguuucuugcuccaucugucuauaa

SEQ ID NO: 60260 - RNA, 1758 nt, Artificial Sequence
  derived and/or modified CDS sequence (wt) from hemagglutinin__InfluenzaB__AHZ36752
augaaggcaauaauuguacuacucaugguaguaacauccaaugcagaucgaaucugcacugggauaacaucgucaaacucaccacauaucgucaaaacugcuacucaaggggaggucaaugugacugguguaauaccacugacgacaacacccaccaaaucucauuuugcaaaucucaaaggaacagaaaccagggggaaacuaugcccaaaaugccucaacugcacagaucuggacguagccuugggcagaccaaaaugcacggggaaaauacccucggcaagaguuucaauacuccaugaagucagaccuguuacaucugggugcuuuccuauaaugcacgacagaacaaaaauuagacagcugccuaaccuucucagaggauacgaacauaucagguuaucaacccauaacguuaucaaugcagaaaaugcaccaggaggacccuacaaaauuggaaccucagggucuugcccuaacauuaccaauggaaacggauuuuucgcaacaauggcuugggccgucccaaaaaacgacaaaaacaaaacagcaacaaauccauuaacaauagaaguaccauacauuuguacagaaggagaagaccaaauuaccguuuggggguuccacucugacaaugagacccaaauggcaaagcucuauggggacucaaagccccagaaguucaccucaucugccaacggagugaccacacauuacguuucacagauugguggcuucccaaaucaaacagaagacggaggacuaccacaaagugguagaauuguuguugauuacauggugcaaaaaucugggaaaacaggaacaauuaccuaucaaagggguauuuuauugccucaaaagguguggugcgcaaguggcaggagcaagguaauaaaaggauccuugccuuuaauuggagaagcagauugccuccacgaaaaauacgguggauuaaacaaaagcaagccuuacuacacaggggaacaugcaaaggccauaggaaauugcccaauaugggugaaaacacccuugaagcuggccaauggaaccaaauauagaccuccugcaaaacuauuaaaggaaagggguuucuucggagcuauugcuggcuucuuagaaggaggaugggaaggaaugauugcagguuggcacggauacacaucccauggggcacauggaguagcgguggcagcagaccuuaagagcacucaagaggccauaaacaagauaacaaaaaaucucaacucuuugagugagcuggaaguaaagaaucuucaaagacuaagcggugccauggaugaacuccacaaugaaauacuagaauuagaugagaaaguggaugaucucagagcugauacaauaagcucacaaauagaacucgcaguccugcuuuccaaugaaggaauaauaaacagugaagaugaacaucucuuggcgcuugaaagaaagcugaagaaaaugcugggccccucugcuguagagauagggaauggaugcuuugaaaccaaacacaagugcaaccagaccugucucgacagaauagcugcugguaccuuugaugcaggagaauuuucucuccccacuuuugauucacugaauauuacugcugcaucuuuaaaugacgauggauuggauaaucauacuauacugcuuuacuacucaacugcugccuccaguuuggcuguaacacugaugauagcuaucuuuguuguuuauauggucuccagagacaauguuucuugcuccaucugucuauaa

SEQ ID NO: 60261 - RNA, 1758 nt, Artificial Sequence
  derived and/or modified CDS sequence (wt) from hemagglutinin__InfluenzaB__AHZ36763
augaaggcaauaauuguacuacucaugguaguaacauccaaugcagaucgaaucugcacugggauaacaucgucaaacucaccacaugucgucaaaacugcuacucaaggggaggucaaugugaccgguguaauaccacugacaacaacacccaccaaaucucauuuugcaaaucucaaaggaacagaaaccagggggaaacuaugcccaaaaugccucaacugcacagaucuggacguagccuugggcagaccaaaaugcacggggaaaauacccucggcaagaguuucaauacuucaugaagucagaccuguuacaucugggugcuuuccuauaaugcacgauagaacaaaaauuagacagcugccuaaucuucuccgaggauacgaacauaucagguuaucaacucacaacguuaucaaugcagaaaaugcaccaggaggacccuacaaaauuggaaccucagggucuugcccuaacguuaccaauggaaacggauucuucgcaacaauggcuugggccgucccaaaaaacgacaaaaacaaaacagcaacaaauccauuaacaauagaaguaccauacauuuguacagaaggagaagaccaaauuaccguuuggggguuccauucugacaacgagacccaaauggcaaagcucuauggggacucaaagccccagaaguucaccucaucugccaacggagugaccacacauuacguuucacagauugguggcuucccaaaucaaacagaagacggaggacuaccacaaagugguagaauuguuguugauuacaugguucaaaaaucugggaaaacaggaacaauuaccuaucaaagagguauuuuauugccucaaaagguguggugcgcaaguggcaggagcaagguaauaaaaggauccuugccuuuaauuggagaagcagauugccuccacgaaaaauacgguggauuaaacaaaagcaagccuuacuacacaggggaacaugcaaaggccauaggaaauugcccaauaugggugaaaacacccuugaagcuggccaauggaaccaaauauagaccuccugcaaaacuauuaaaggaaagggguuucuucggagcuauugcugguuucuuagaaggaggaugggaaggaaugauugcagguuggcacggauacacaucccauggggcacauggaguagcgguggcagcugaccuuaaaagcacucaagaggccauaaacaagauaacaaaaaaucucaacucuuugagugagcuggaaguaaagaaucuucaaagacuaagcggugccauggaugaacuccacaacgaaauacuagaacuagaugagaaaguggaugaucucagagcugauacaauaagcucacaaauagaacucgcaguccugcuuuccaaugaaggaauaauaaacagugaagaugaacaucucuuggcgcuugaaagaaagcugaagaaaaugcugggccccucugcuguagagauagggaauggaugcuuugaaaccaaacacaagugcaaccagaccugucucgacagaauagcugcugguaccuuugaugcaggagaauuuucucuccccaccuuugauucacugaauauuacugcugcaucuuuaaaugacgauggauuggauaaucauacuauacugcuuuacuacucaacugcugccuccaguuuggcuguaacacugaugauagcuaucuuuguuguuuauaugguuuccagagacaauguuucuugcuccaucugucuauaa

SEQ ID NO: 60262 - RNA, 1758 nt, Artificial Sequence
  derived and/or modified CDS sequence (wt) from hemagglutinin__InfluenzaB__AHZ36774
augaaggcaauaauuguacuacucaugguaguaacauccaaugcagaucgaaucugcacugggauaacaucgucaaacucaccacaugucgucaaaacugcuacucaaggggagguaaaugugacugguguaauaccacugacaacaacacccaccaaaucucauuuugcaaaucucaaaggaacagaaaccagagggaaacuaugcccaaaaugccccaacugcacagaucuggacguagccuugggcagaccaaaaugcacgggaaaaauacccucggcaagaguuucaauacuccaugaagucagaccuguuacaucugggugcuuuccuauaaugcacgacagaacaaaaauuagacagcugccuaaccuucucagaggauacgaacauaucagauuaucaacucauaacguuaucaaugcagaaagugcaccaggaggacccuacaaaauuggaaccucagggucuugcccuaacguuaccaauggaaacggauuuuucgcaacaauggcuugggccguccccaaaaacgacaaaaacaaaacagcaacagauccauuaacaauagaaguaccauacauuuguacagaagaagaagaccaaauuaccguuuggggguuccacucugacaacgagacccaaauggcaaagcucuauggggacucaaagccccagaaguucaccucaucugccaacggagugaccacacauuauguuucacagauugguggcuucccaaaucaaacagaagacggaggacuaccacaaagugguagaauuguuguugauuacaugguacaaaaaucugggaaaacaggaacaauuaccuaucaaagagguauuuuauugccucaaaagguguggugcgcaaguggcaggagcaagguaauaaaaggauccuugccuuuaauuggagaagcagauugccuccacgaaaaauacgguggauuaaacaaaagcaagccuuacuacacaggggaacaugcaaaggccauaggaaauugcccaauaugggugaagacacccuugaagcuggccaauggaaccaaauauagaccuccugcaaaacuauuaaaggaaagggguuucuucggagcuauugcugguuucuuagaaggaggaugggaaggaaugauugcagguuggcacggauacacgucccauggggcacauggaguagcgguggcagcagaccuuaagagcacucaagaggccauaaacaagguaacaaaaaaucuaaacucuuugagugagcuggaaguaaagaaucuucaaagacuaagcggugccauggaugaacuccacaacgaaauacuagaacuagacgagaaaguagaugaucucagagcugauacaauaagcucacaaauagaacucgcaguccugcuuuccaaugaaggaauaauaaacagugaagaugaacaucucuuggcgcuugaaagaaagcugaagaaaaugcugggccccucugcuguagagauagggaauggaugcuuugaaaccaaacacaagugcaaccagaccugucucgacagaauagcugcugguaccuuugaugcaggagaauuuucucuccccaccuuugauucacugaauauuacugcugcaucuuuaaaugacgauggauuggauaaucauaccauacugcuuuacuacucaacugcugccuccaguuuggcuguaacacugaugauagcuaucuuuguuguuuauauggucuccagagacaauguuucuugcuccaucugucuauaa

SEQ ID NO: 60263 - RNA, 1758 nt, Artificial Sequence
  derived and/or modified CDS sequence (wt) from hemagglutinin__InfluenzaB__AHZ36785
augaaggcaauaauuguacuacucaugguaguaacauccaaugcagaucgaaucugcacugggauaacaucgucaaacucaccacaugucgucaaaacugcuacucaaggggaggucaaugugaccgguguaauaccacugacaacaacacccaccaaaucucauuuugcaaaucucaaaggaacagaaaccagggggaaacuaugcccaaaaugccucaacugcacagaucuggacguagccuugggcagaccaaaaugcacggggaaaauacccucggcaagaguuucaauacuccaugaagucagaccuguuacaucugggugcuuuccuauaaugcacgauagaacaaaaauuagacagcugccuaaccuucuccgaggauacgaacauaucagguuaucaacucacaacguuaucaaugcagaaaaugcaccaggaggacccuacaaaauuggaaccucagggucuugccuuaacguuaccaauggaaacggauucuucgcaacaauggcuugggccgucccaaaaaacgacaaaaacaaaacagcaacaaauccauuaacaauagaaguaccauacauuuguacagaaggagaagaccaaauuaccguuuggggguuccacucugacaacgagacccaaauggcaaagcucuauggggacucaaagccccagaaguucaccucaucugccaacggagugaccacacauuacguuucacagauugguggcuucccaaaucaaacagaagacggaggacuaccacaaagugguagaauuguuguugauuacauggugcaaaaaucugggaaaacaggaacaauuaccuaucaaagagguauuuuauugccucaaaagguguggugcgcaaguggcaggagcaagguaauaaaaggauccuugccuuuaauuggagaagcagauugccuccacgaaaaauacgguggauuaaacaaaagcaagccuuacuacacaggggaacaugcaaaggccauaggaaauugcccaauaugggugaaaacacccuugaagcuggccaauggaaccaaauauagaccuccugcaaaacuauuaaaggaaagggguuuuuucggagcuauugcugguuucuuagaaggaggaugggaaggaaugauugcagguuggcacggauacacaucccauggggcacauggaguagcgguggcagcugaccuuaagagcacucaagaggccauaaacaagauaacaaaaaaucucaacucuuugagugagcuggaaguaaagaaucuucaaagacuaagcggugccauggaugaacuccacaacgaaauacuagaacuagaugagaaaguggaugaucucagagcugauacaauaagcucacaaauagaacucgcaguccugcuuuccaaugaaggaauaauaaacagugaagaugaacaucucuuggcgcuugaaagaaagcugaagaaaaugcugggccccucugcuguagagauagggaauggaugcuuugaaaccaaacacaagugcaaccagaccugucucgacagaauagcugcugguaccuuugaugcaggagaauuuucucuccccaccuuugauucacugaauauuacugcugcaucuuuaaaugacgauggauuggauaaucauacuauacugcuuuacuacucaacugcugccuccaguuuggcuguaacacugaugauagcuaucuuuguuguuuauauggucuccagagacaauguuucuugcuccaucugucuauaa

SEQ ID NO: 60264 - RNA, 1758 nt, Artificial Sequence; identical to SEQ ID NO: 60263
  derived and/or modified CDS sequence (wt) from hemagglutinin__InfluenzaB__AHZ36796

SEQ ID NO: 60265 - RNA, 1755 nt, Artificial Sequence
  derived and/or modified CDS sequence (wt) from hemagglutinin__InfluenzaB__AHZ36807
augaaggcaauaauuguacuacucaugguaguaacauccaaugcagaucgaaucugcacugggauaacaucuucaaacucaccucauguggucaaaacagcuacucaaggggaggucaaugugacuggugugauaccacuaacaacaacaccaacaaaaucuuauuuugcaaaucucaaaggaacaaagaccagagggaaacuaugcccagacugucucaacuguacagaucuggauguggccuugggcaggccaaugugugugggaacuacaccuucugcgaaagcuucaauacuucacgaagucagaccuguuacauccgggugcuucccuauaaugcacgacagaacaaaaaucaggcaacuagccaaucuucucagaggauaugaaaauaucagguuaucaacccaaaacguuaucgaugcagaaaaagcaccaggaggacccuacagacuuggaaccucaggaucuugcccuaacgcuaccaguaaaagcggauuuuucgcaacaauggcuugggcugucccaaaggacaacaacaaaaaugcaacgaacccauuaacaguagaaguaccauacauuugugcagaaggagaagaccaaauuacuguuuggggguuccauucagauaacaaaacccaaaugaagaaccucuauggagacucaaauccucaaaaguucaccucaucugcuaauggaguaaccacacauuauguuucucagauuggcggcuucccagaucaaacagaagacggaggacuaccacaaagcggcagaauugucguugauuacaugaugcaaaaaccugagaaaacaggaacaauugucuaucaaagagguguuuuguugccucaaaagguguggugcgcgaguggcaggagcaaaguaauaaaaggguccuugccuuuaauuggugaagcagauugccuucaugaaaaauacgguggauuaaacaaaagcaagccuuacuacacaggagaacaugcaaaagccauaggaaauugcccaauaugggugaaaacaccuuugaagcuugccaauggaaccaaauauagaccuccugcaaaacuauuaaaggaaagggguuucuucggagcuauugcugguuuccuagaaggaggaugggaaggaaugauugcagguuggcacggauacacaucucacggagcacauggaguggcaguugcugcagaccuuaagagcacacaagaagcuauaaacaagauaacaaaaaaucucaacucuuugagugagcuagaaguaaagaaucuucaaaggcuaaguggugccauggaugaacuccacaacgaaauacucgagcuggaugagaaaguggaugaucucagagcugacacuauaaguucacaaauagaacuugcagucuugcuuuccaacgaaggaauaauaaacagugaagaugagcaucuauuggcacuugagagaaaacuaaagaaaaugcugggucccucugcuguagacauaggaaauggaugcuucgaaaccaaacacaaaugcaaccagaccugcuuagacaggauagcugcuggcaccuuuaaugcaggagaauuuucucuccccacuuuugauucauugaacauuacugcugcaucuuuaaaugaugauggauuggauaaccauacuauacugcucuauuacucaacugcugcuucuaguuuggcuguaacauugaugcuagcuauuuuuauuguuuauauggucuccagagacaacguuucaugcuccaucugucuauaa

SEQ ID NO: 60266 - RNA, 1758 nt, Artificial Sequence; identical to SEQ ID NO: 60260
  derived and/or modified CDS sequence (wt) from hemagglutinin__InfluenzaB__AHZ36818

SEQ ID NO: 60267 - RNA, 1758 nt, Artificial Sequence
  derived and/or modified CDS sequence (wt) from hemagglutinin__InfluenzaB__AHZ36829
augaaggcaauaauuguacuacucaugguaguaacauccaaugcagaucgaaucugcacugggauaacaucgucaaacucaccacaugucgucaaaacugcuacucaaggggaggucaaugugaccgguguaauaccacugacaacaacacccaccaaaucucauuuugcaaaucucaaaggaacagaaaccagggggaaacuaugcccaaaaugccucaacugcacagaucuggacguagccuugggcagaccaaaaugcacggggaaaauacccucggcaagaguuucaauacuccaugaagucagaccuguuacaucugggugcuuuccuauaaugcacgauagaacaaaaauuagacagcugccuaaucuucuccgaggauacgaacauaucagguuaucaacucacaacguuaucaaugcagaaaaugcaccaggaggacccuacaaaauuggaaccucagggucuugcccuaacguuaccaauggaaacggauucuucgcaacaauggcuugggccgucccaaaaaacgacaaaaacaaaacagcaacaaauccauuaacaauagaaguaccauacauuuguacagaaggagaagaccaaauuaccguuuggggguuccauucugacaacgagacccaaauggcaaagcucuauggggacucaaagccccagaaguucaccucaucugccaacggagugaccacacauuacguuucacagauugguggcuucccaaaucaaacagaagacggaggacuaccacaaagugguagaauuguuguugauuacaugguucaaaaaucugggaaaacaggaacaauuaccuaucaaagagguauuuuauugccucaaaagguguggugcgcaaguggcaggagcaagguaauaaaaggauccuugccuuuaauuggagaagcagauugccuccacgaaaaauacgguggauuaaacaaaagcaagccuuacuacacaggggaacaugcaaaggccauaggaaauugcccaauaugggugaaaacacccuugaagcuggccaauggaaccaaauauagaccuccugcaaaacuauuaaaggaaagggguuucuucggagcuauugcugguuucuuagaaggaggaugggaaggaaugauugcagguuggcacggauacacaucccauggggcacauggaguagcgguggcagcugaccuuaaaagcacucaagaggccauaaacaagauaacaaaaaaucucaacucuuugagugagcuggaaguaaagaaucuucaaagacuaagcggugccauggaugaacuccacaacgaaauacuagaacuagaugagaaaguggaugaucucagagcugauacaauaagcucacaaauagaacucgcaguccugcuuuccaaugaaggaauaauaaacagugaagaugaacaucucuuggcgcuugaaagaaagcugaagaaaaugcugggccccucugcuguagagauagggaauggaugcuuugaaaccaaacacaagugcaaccagaccugucucgacagaauagcugcugguaccuuugaugcaggagaauuuucucuccccaccuuugauucacugaauauuacugcugcaucuuuaaaugacgauggauuggauaaucauacuauacugcuuuacuacucaacugcugccuccaguuuggcuguaacacugaugauagcuaucuuuguuguuuauauggucuccagagacaauguuucuugcuccaucugucuauaa

SEQ ID NO: 60268 - RNA, 1758 nt, Artificial Sequence
  derived and/or modified CDS sequence (wt) from hemagglutinin__InfluenzaB__AHZ36840
augaaggcaauaauuguacuacucaugguaguaacauccaaugcagaucgaaucugcacugggauaacaucgucaaacucaccacaugucgucaaaacugcuacucaaggggaggucaaugugaccgguguaauaccacugacaacaacacccaccaaaucucauuuugcaaaucucaaaggaacagaaaccagggggaaacuaugcccaaaaugccucaacugcacagaucuggacguagccuugggcagaccaaaaugcacggggaaaauacccucggcaagaguuucaauacuccaugaagucagaccuguuacaucugggugcuuuccuauaaugcacgauagaacaaaaauuagacagcugccuaaucuucuccgaggauacgaacauaucagguuaucaacucacaacguuaucaaugcagaaaaugcaccaggaggacccuacaaaauuggaaccucagggucuugcccuaacguuaccaauggaaacggauucuucgcaacaauggcuugggccgucccaaaaaacgacaaaaacaaaacagcaacaaauccauuaacaauagaaguaccauacauuuguacagaaggagaagaccaaauuaccguuuggggguuccauucugacaacgagacccaaauggcaaagcucuauggggacucaaagccccagaaguucaccucaucugccaacggagugaccacacauuacguuucacagauugguggcuucccaaaucaaacagaagacggaggacuaccacaaagugguagaauuguuguugauuacaugguucaaaaaucugggaaaacaggaacaauuaccuaucaaagagguauuuuauugccucaaaagguguggugcgcaaguggcaggagcaagguaauaaaaggauccuugccuuuaauuggagaagcagauugccuccacgaaaaauacgguggauuaaacaaaagcaagccuuacuacacaggggaacaugcaaaggccauaggaaauugcccaauaugggugaaaacacccuugaagcuggccaauggaaccaaauauagaccuccugcaaaacuauuaaaggaaagggguuucuucggagcuauugcugguuucuuagaaggaggaugggaaggaaugauugcagguuggcacggauacacaucccauggggcacauggaguagcgguggcagcugaccuuaaaagcacucaagaggccauaaacaagauaacaaaaaaucucaacucuuugagugagcuggaaguaaagaaucuucaaagacuaagcggugccauggaugaacuccacaacgaaauacuagaacuagaugagaaaguggaugaucucagagcugauacaauaagcucacaaauagaacucgcaguccugcuuuccaaugaaggaauaauaaacagugaagaugaacaucucuuggcgcuugaaagaaagcugaagaaaaugcugggccccucugcuguagagauagggaauggaugcuuugaaaccaaacacaagugcaaccagaccugucucgacagaauagcugcugguaccuuugaugcaggagaauuuucucuccccaccuuugauucacugaauauuacugcugcaucuuuaaaugacgauggauuggauaaucauacuauacugcuuuacuacucaacugcugccuccaguuuggcuguaacacugaugauagcuaucuuuguuguuuauaugguuuccagagacaauguuucuugcuccaucugucuauaa

SEQ ID NO: 60269 - RNA, 1758 nt, Artificial Sequence
  derived and/or modified CDS sequence (wt) from hemagglutinin__InfluenzaB__AHZ36851
augaaggcaauaauuguacuacucaugguaguaacauccaaugcagaucgaaucugcacugggauaacaucgucaaacucaccacaugucgucaaaacugcuacucaaggggaggucaaugugaccgguguaauaccacugacaacaacacccaccaaaucucauuuugcaaaucucaaaggaacagaaaccagggggaaacuaugcccaaaaugccucaacugcacagaucuggacguagccuugggcagaccaaaaugcacggggaaaauacccucggcaagaguuucaauacuccaugaagucagaccuguuacaucugggugcuuuccuauaaugcacgauagaacaaaaauuagacagcugccuaaccuucuccgaggauacgaacauaucagguuaucaacucacaacguuaucaaugcagaaaaugcaccaggaggacccuacaaaauuggaaccucagggucuugccuuaacguuaccaauggaaacggauucuucgcaacaauggcuugggccgucccaaaaaacgacaaaaacaaaacagcaacaaauccauuaacaauagaaguaccauacauuuguacagaaggagaagaccaaauuaccguuuggggguuccacucugacaacgagacccaaauggcaaagcucuauggggacucaaagccccagaaguucaccucaucugccaacggagugaccacacauuacguuucacagauugguggcuucccaaaucaaacagaagacggaggacuaccacaaagugguagaauuguuguugauuacauggugcaaaaaucugggaaaacaggaacaauuaccuaucaaagagguauuuuauugccucaaaagguguggugcgcaaguggcaggagcaagguaauaaaaggauccuugccuuuaauuggagaagcagauugccuccacgaaaaauacgguggauuaaacaaaagcaagccuuacuacacaggggaacaugcaaaggccauaggaaauugcccaauaugggugaaaacacccuugaagcuggccaauggaaccaaauauagaccuccugcaaaacuauuaaaggaaagggguuuuuucggagcuauugcugguuucuuagaaggaggaugggaaggaaugauugcagguuggcacggauauacaucccauggggcacauggaguagcgguggcagcugaccuuaagagcacucaagaggccauaaacaagauaacaaaaaaucucaacucuuugagugagcuggaaguaaagaaucuucaaagacuaagcggugccauggaugaacuccacaacgaaauacuagaacuagaugagaaaguggaugaucucagagcugauacaauaagcucacaaauagaacucgcaguccugcuuuccaaugaaggaauaauaaacagugaagaugaacaucucuuggcgcuugaaagaaagcugaagaaaaugcugggccccucugcuguagagauagggaauggaugcuuugaaaccaaacacaagugcaaccagaccugucucgacagaauagcugcugguaccuuugaugcaggagaauuuucucuccccaccuuugauucacugaauauuacugcugcaucuuuaaaugacgauggauuggauaaucauacuauacugcuuuacuacucaacugcugccuccaguuuggcuguaacacugaugauagcuaucuuuguuguuuauauggucuccagagacaauguuucuugcuccaucugucuauaa

SEQ ID NO: 60270 - RNA, 1758 nt, Artificial Sequence; identical to SEQ ID NO: 60260
  derived and/or modified CDS sequence (wt) from hemagglutinin__InfluenzaB__AHZ36862

SEQ ID NO: 60271 - RNA, 1758 nt, Artificial Sequence
  derived and/or modified CDS sequence (wt) from hemagglutinin__InfluenzaB__AHZ36873
augaaggcaauaauuguacuacucaugguaguaacauccaaugcagaucgaaucugcacugggauaacaucgucaaacucaccacaugucgucaaaacugcuacucaaggggaggucaaugugaccgguguaauaccacugacaacaacacccaccaaaucucauuuugcaaaucucaaaggaacagaaaccagggggaaacuaugcccaaaaugccucaacugcacagaucuggacguagccuugggcagaccaaaaugcacggggaaaauacccucggcaagaguuucaauacuccaugaagucagaccuguuacaucugggugcuuuccuauaaugcacgauagaacaaaaauuagacagcugccuaaccuucuccgaggauacgaacauaucagguuaucaacucacaacguuaucaaugcagaaaaugcaccaggaggacccuacaaaauuggaaccucagggucuugcccuaacguuaccaauggaaacggauucuucgcaacaauggcuugggccgucccaaaaaacgacaaaaacaaaacagcaacaaauccauuaacaauagaagugccauacauuuguacagaaggagaagaccaaauuaccguuuggggguuccacucugacaacgagacccaaauggcaaagcucuauggagacucaaagccccagaaguucaccucaucugccaacggagugaccacacauuacguuucacagauugguggcuucccaaaucaaacagaagacggaggacuaccacaaagugguagaauuguuguugauuacauggugcaaaaaucugggaaaacaggaacaauuaccuaucaaagagguauuuuauugccucaaaagguguggugcgcaaguggcaggagcaagguaauaaaaggauccuugccuuuaauuggagaagcagauugccuccacgaaaaauacgguggauuaaacaaaagcaagccuuacuacacaggggaacaugcaaaggccauaggaaauugcccaauaugggugaaaacacccuugaagcuggccaauggaaccaaauauagaccuccugcaaaacuauuaaaggaaagggguuucuucggagcuauugcugguuucuuagaaggaggaugggaaggaaugauugcagguuggcacggauacacaucccauggggcacauggaguagcgguggcagcugaccuuaagagcacucaagaggccauaaacaagauaacaaaaaaucucaacucuuugagugagcuggaaguaaagaaucuucaaagacuaagcggugccauggaugaacuccacaacgaaauacuagaacuagaugagaaaguggaugaucucagagcugauacaauaagcucacaaauagaacucgcaguccugcuuuccaaugaaggaauaauaaacagugaagaugaacaucucuuggcgcuugaaagaaagcugaagaaaaugcugggccccucugcuguagagauagggaauggaugcuuugaaaccaaacacaagugcaaccagaccugucucgacagaauagcugcugguaccuuugaugcaggagaauuuucucuccccaccuuugauucacugaauauuacugcugcaucuuuaaaugacgauggauuggauaaucauacuauacugcuuuacuacucaacugcugccuccaguuuggcuguaacacugaugauagcuaucuuuguuguuuauauggucuccagagacaauguuucuugcuccaucugucuauaa

SEQ ID NO: 60272 - RNA, 1758 nt, Artificial Sequence
  derived and/or modified CDS sequence (wt) from hemagglutinin__InfluenzaB__AHZ36884
augaaggcaauaauuguacuacucaugguaguaacauccaaugcagaucgaaucugcacugggauaacaucgucaaacucaccacauaucgucaaaacugcuacucaaggggaggucaaugugacugguguaauaccacugacgacaacacccaccaaaucucauuuugcaaaucucaaaggaacagaaaccagggggaaacuaugcccaaaaugccucaacugcacagaucuggacguagccuugggcagaccaaaaugcacggggaaaauacccucggcaagaguuucaauacuccaugaagucagaccuguuacaucugggugcuuuccuauaaugcacgacagaacaaaaauuagacagcugccuaaccuucucagaggauacgaacauaucagguuaucaacccauaacguuaucaaugcagaaaaugcaccaggaggacccuacaaaauuggaaccucagggucuugcccuaacauuaccaauggaaacggauuuuucgaaacaauggcuugggccgucccaaaaaacgacaaaaacaaaacagcaacaaauccauuaacaauagaaguaccauacauuuguacggaaggagaagaccaaauuaccguuuggggguuccacucugacaaugagacccaaauggcaaagcucuauggggacucaaagccccagaaguucaccucaucugccaacggagugaccacacauuacguuucacagauugguggcuucccaaaucaaacagaagacggaggacuaccacaaagugguagaauuguuguugauuacauggugcaaaaaucugggaaaacaggaacaauuaccuaucaaagggguauuuuauugccucaaaagguguggugcgcaaguggcaggagcaagguaauaaaaggauccuugccuuuaauuggagaagcagauugccuccacgaaaaauacgguggauuaaacaaaagcaagccuuacuacacaggggaacaugcaaaggccauaggaaauugcccaauaugggugaaaacacccuugaagcuggccaauggaaccaaauauagaccuccugcaaaacuauuaaaggaaagggguuucuucggagcuauugcuggcuucuuagaaggaggaugggaaggaaugauugcagguuggcacggauacacaucccauggggcacauggaguagcgguggcagcagaccuuaagagcacucaagaggccauaaacaagauaacaaaaaaucucaacucuuugagugagcuggaaguaaagaaucuucaaagacuaagcggugccauggaugaacuccacaaugaaauacuagaauuagaugagaaaguggaugaucucagagcugauacaauaagcucacaaauagaacucgcaguccugcuuuccaaugaaggaauaauaaacagugaagaugaacaucucuuggcgcuugaaagaaagcugaagaaaaugcugggccccucugcuguagagauagggaauggaugcuuugaaaccaaacacaagugcaaccagaccugucucgacagaauagcugcugguaccuuugaugcaggagaauuuucucuccccacuuuugauucacugaauauuacugcugcaucuuuaaaugacgauggauuggauaaucauacuauacugcuuuacuacucaacugcugccuccaguuuggcuguaacacugaugauagcuaucuuuguuguuuauauggucuccagagacaauguuucuugcuccaucugucuauaa

SEQ ID NO: 60273 - RNA, 1758 nt, Artificial Sequence
  derived and/or modified CDS sequence (wt) from hemagglutinin__InfluenzaB__AHZ36895
augaaggcaauaauuguacuacucaugguaguaacauccaaugcagaucgaaucugcacugggauaacaucgucaaacucaccacauaucgucaaaacugcuacucaaggggaggucaaugugacugguguaauaccacugacgacaacacccaccaaaucucauuuugcaaaucucaaaggaacagaaaccagggggaaacuaugcccaaaaugccucaacugcacagaucuggacguagccuugggcagaccaaaaugcacggggaaaauacccucggcaagaguuucaauacuccaugaagucagaccuguuacaucugggugcuuuccuauaaugcacgacagaacaaaaauuagacagcugccuaaccuucucagaggauacgaacauaucagguuaucaacccauaacguuaucaaugcagaaaaugcaccaggaggacccuacaaaauuggaaccucagggucuugcccuaacauuaccaauggaaacggauuuuucgcaacaauggcuugggccgucccaaaaaacgacaaaaacaaaacagcaacaaauccauuaacaauagaaguaccauacauuuguacagaaggagaagaccaaauuaccguuuggggguuccacucugacaaugagacccaaauggcaaagcucuauggggacucaaagccccagaaguucaccucaucugccaacggagugaccacacauuacguuucacagauugguggcuucccaaaucaaacagaagacggaggacuaccacaaagugguagaauuguuguugauuacauggugcaaaaaucugggaaaacagggacaauuaccuaucaaagggguauuuuauugccucaaaagguguggugcgcaaguggcaggagcaagguaauaaaaggauccuugccuuuaauuggagaagcagauugccuccacgaaaaauacgguggauuaaacaaaagcaagccuuacuacacaggggaacaugcaaaggccauaggaaauugcccaauaugggugaaaacacccuugaagcuggccaauggaaccaaauauagaccuccugcaaaacuauuaaaggaaagggguuucuucggagcuauugcuggcuucuuagaaggaggaugggaaggaaugauugcagguuggcacggauacacaucccauggggcacauggaguagcgguggcagcagaccuuaagagcacucaagaggccauaaacaagauaacaaaaaaucucaacucuuugagugagcuggaaguaaagaaucuucaaagacuaagcggugccauggaugaacuccacaaugaaauacuagaauuagaugagaaaguggaugaucucagagcugauacaauaagcucacaaauagaacucgcaguccugcuuuccaaugaaggaauaauaaacagugaagaugaacaucucuuggcgcuugaaagaaagcugaagaaaaugcugggccccucugcuguagagauagggaauggaugcuuugaaaccaaacacaagugcaaccagaccugucucgacagaauagcugcugguaccuuugaugcaggagaauuuucucuccccacuuuugauucacugaauauuacugcugcaucuuuaaaugacgauggauuggauaaucauacuauacugcuuuacuacucaacugcugccuccaguuuggcuguaacacugaugauagcuaucuuuguuguuuauauggucuccagagacaauguuucuugcuccaucugucuauaa

SEQ ID NO: 60274 - RNA, 1758 nt, Artificial Sequence
  derived and/or modified CDS sequence (wt) from hemagglutinin__InfluenzaB__AHZ36906
augaaggcaauaauuguacuacucaugguaguaacauccaaugcagaucgaaucugcacugggauaacaucgucaaacucaccacauaucgucaaaacugcuacucaaggggaggucaaugugacugguguaauaccacugacgacaacacccaccaaaucucauuuugcaaaucucaaaggaacagaaaccagggggaaacuaugcccaaaaugccucaacugcacagaucuggacguagccuugggcagaccaaaaugcacggggaaaauacccucagcaagaguuucaauacuccaugaagucaggccuguuacaucugggugcuuuccuauaaugcacgacagaacaaaaauuagacagcugccuaaccuucucagaggauacgaacauaucagguuaucaacccauaacguuaucaaugcagaaaaugcaccaggaggacccuacaaaauuggaaccucagggucuugcccuaacauuaccaauggaaacggauuuuucgcaacaauggcuugggccgucccaaaaaacgacaaaaacaaaacagcaacaaauccauuaacaauagaaguaccauacauuuguacagaaggagaagaccaaauuaccguuuggggguuccacucugacaaugagacccaaauggcaaagcucuauggggacucaaagccccagaaguucaccucaucugccaacggagugaccacacauuacguuucacagauugguggcuucccaaaucaaacagaagacggaggacuaccacaaagugguagaauuguuguugauuacauggugcaaaaaucugggaaaacaggaacaauuaccuaucaaagggguauuuuauugccucaaaagguguggugcgcaaguggcaggagcaagguaauaaaaggauccuugccuuuaauuggagaagcagauugccuccacgaaaaauacgguggauuaaacaaaagcaagccuuacuacacaggggaacaugcaaaggccauaggaaauugcccaauaugggugaaaacacccuugaagcuggccaauggaaccaaauauagaccuccugcaaaacuauuaaaggaaagggguuucuucggagcuauugcuggcuucuuagaaggaggaugggaaggaaugauugcagguuggcacggauacacaucccauggggcacauggaguagcgguggcagcagaccuuaagagcacucaagaggccauaaacaagauaacaaaaaaucucaacucuuugagugagcuggaaguaaagaaucuucaaagacuaagcggugccauggaugaacuccacaaugaaauacuagaauuagaugagaaaguggaugaucucagagcugauacaauaagcucacaaauagaacucgcaguccugcuuuccaaugaaggaauaauaaacagugaagaugaacaucucuuggcgcuugaaagaaagcugaagaaaaugcugggccccucugcuguagagauagggaauggaugcuuugaaaccaaacacaagugcaaccagaccugucucgacagaauagcugcugguaccuuugaugcaggagaauuuucucuccccacuuuugauucacugaauauuacugcugcaucuuuaaaugacgauggauuggauaaucauacuauacugcuuuacuacucaacugcugccuccaguuuggcuguaacacugaugauagcuaucuuuguuguuuauauggucuccagagacaauguuucuugcuccaucugucuauaa

SEQ ID NO: 60275 - RNA, 1758 nt, Artificial Sequence
  derived and/or modified CDS sequence (wt) from hemagglutinin__InfluenzaB__AHZ36928
augaaggcaauaauuguacuacucaugguaguaacauccaaugcagaucgaaucugcacugggauaacaucgucaaacucaccacaugucgucaaaacugcuacucaaggggaggucaaugugaccgguguaauaccacugacaacaacacccaccaaaucucauuuugcaaaucucaaaggaacaaaaaccagggggaaacuaugcccaaaaugccucaacugcacagaucuggacguagccuugggcagaccaaaaugcacggggaaaauacccucggcaagaguuucaauacuccaugaagucagaccuguuacaucugggugcuuuccuauaaugcacgauagaacaaaaauuagacagcugccuaaccuucuccgaggauacgaacauaucagguuaucaacucacaacguuaucaaugcagaaaaugcaccaggaggacccuacaaaauuggaaccucagggucuugccuuaacguuaccaauggaaacggauucuucgcaacaauggcuugggccgucccaaaaaacgacaaaaacaaaacagcaacaaauccauuaacaauagaaguaccauacauuuguacagaaggagaagaccaaauuaccguuuggggguuccacucugacaacgagacccaaauggcaaagcucuauggggacucaaagccccagaaguucaccucaucugccaacggagugaccacacauuacguuucacagauugguggcuucccaaaucaaacagaagacggaggacuaccacaaagugguagaauuguuguugauuacauggugcaaaaaucugggaaaacaggaacaauuaccuaucaaagagguauuuuauugccucaaaagguguggugcgcaaguggcaggagcaagguaauaaaaggauccuugccuuuaauuggagaagcagauugccuccacgaaaaauacgguggauuaaacaaaagcaagccuuacuacacaggggaacaugcaaaggccauaggaaauugcccaauaugggugaaaacacccuugaagcuggccaauggaaccaaauauagaccuccugcaaaacuauuaaaggaaagggguuuuuucggagcuauugcugguuucuuagaaggaggaugggaaggaaugauugcagguuggcacggauacacaucccauggggcacauggaguagcgguggcagcugaccuuaagagcacucaagaggccauaaacaagauaacaaaaaaucucaacucuuugagugagcuggaaguaaagaaucuucaaagacuaagcggugccauggaugaacuccacaacgaaauacuagaacuagaugagaaaguggaugaucucagagcugauacaauaagcucacaaauagaacucgcaguccugcuuuccaaugaaggaauaauaaacagugaagaugaacaucucuuggcgcuugaaagaaagcugaagaaaaugcugggccccucugcuguagagauagggaauggaugcuuugaaaccaaacacaagugcaaccagaccugucucgacagaauagcugcugguaccuuugaugcaggagaauuuucucuccccaccuuugauucacugaauauuacugcugcaucuuuaaaugacgauggauuggauaaucauacuauacugcuuuacuacucaacugcugccuccaguuuggcuguaacacugaugauagcuaucuuuguuguuuauauggucuccagagacaauguuucuugcuccaucugucuauaa

SEQ ID NO: 60276 - RNA, 1758 nt, Artificial Sequence; identical to SEQ ID NO: 60182
  derived and/or modified CDS sequence (wt) from hemagglutinin__InfluenzaB__AHZ36939

SEQ ID NO: 60277 - RNA, 1758 nt, Artificial Sequence
  derived and/or modified CDS sequence (wt) from hemagglutinin__InfluenzaB__AHZ36950
augaaggcaauaauuguacuacucaugguaguaacauccaaugcagaucgaaucugcacugggauaacaucgucaaacucaccacauaucgucaaaacugcuacucaaggggaggucaaugugacugguguaauaccacugacgacaacacccaccaaaucucauuuugcaaaucucaaaggaacagaaaccagggggaaacuaugcccaaaaugccucaacugcacagaucuggacguagccuugggcagaccaaaaugcacggggaaaauacccucggcaagaguuucaauacuccaugaagucagaccuauuacaucugggugcuuuccuauaaugcacgacagaacaaaaauuagacagcugccuaaccuucucagaggauacgaacauaucagguuaucaacccauaacguuaucaaugcagaaaaugcaccaggaggacccuacaaaauuggaaccucagggucuugcccuaacauuaccaauggaaacggauuuuucgcaacaauggcuugggccgucccaaaaaacgacaaaaacaaaacagcaacaaauccauuaacaauagaaguaccauacauuuguacagaaggagaagaccaaauuaccguuuggggguuccacucugacaaugagacccaaauggcaaagcucuauggggacucaaagccccagaaguucaccucaucugccaacggagugaccacacauuacguuucacagauugguggcuucccaaaucaaacagaagacggaggacuaccacaaagugguagaauuguuguugauuacauggugcaaaaaucugggaaaacaggaacaauuaccuaucaaagggguauuuuauugccucaaaagguguggugcgcaaguggcaggagcaagguaauaaaaggauccuugccuuuaauuggagaagcagauugccuccacgaaaaauacgguggauuaaacaaaagcaagccuuacuacacaggggaacaugcaaaggccauaggaaauugcccaauaugggugaaaacacccuugaagcuggccaauggaaccaaauauagaccuccugcaaaacuauuaaaggaaagggguuucuucggagcuauugcuggcuucuuagaaggaggaugggaaggaaugauugcagguuggcacggauacacaucccauggggcacauggaguagcgguggcagcagaccuuaagagcacucaagaggccauaaacaagauaacaaaaaaucucaacucuuugagugagcuggaaguaaagaaucuucaaagacuaagcggugccauggaugaacuccacaaugaaauacuagaauuagaugagaaaguggaugaucucagagcugauacaauaagcucacaaauagaacucgcaguccugcuuuccaaugaaggaauaauaaacagugaagaugaacaucucuuggcgcuugaaagaaagcugaagaaaaugcugggccccucugcuguagagauagggaauggaugcuuugaaaccaaacacaagugcaaccagaccugucucgacagaauagcugcugguaccuuugaugcaggagaauuuucucuccccacuuuugauucacugaauauuacugcugcaucuuuaaaugacgauggauuggauaaucauacuauacugcuuuacuacucaacugcugccuccaguuuggcuguaacacugaugauagcuaucuuuguuguuuauauggucuccagagacaauguuucuugcuccaucugucuauaa

SEQ ID NO: 60278 - RNA, 1758 nt, Artificial Sequence
  derived and/or modified CDS sequence (wt) from hemagglutinin__InfluenzaB__AHZ36961
augaaggcaauaauuguacuacucaugguaguaacauccaaugcagaucgaaucugcacugggauaacaucgucaaacucaccacaugucgucaaaacugcuacucaaggggaggucaaugugaccgguguaauaccacugacaacaacacccaccaaaucucauuuugcaaaucucaaaggaacagaaaccagggggaaacuaugcccaaaaugccucaacugcacagaucuggacguagccuugggcagaccaaaaugcacugggaaaauacccucggcaagaguuucaauacuccaugaagucagaccuguuacaucugggugcuuuccuauaaugcacgauagaacaaaaauuagacagcugccuaaccuucuccgaggauacgaacauaucagguuaucaacucacaacguuaucaaugcagaaaaugcaccaggaggacccuacaaaauuggaaccucagggucuugcccuaacguuaccaauggaaacggauucuucgcaacaauggcuugggccgucccaaaaaacgacaaaaacaaaacagcaacaaauccauuaacaauagaaguaccauacauuuguacagaaggagaagaccaaauuaccguuuggggguuccacucugacaacgagacccaaauggcaaagcucuauggagacucaaagccccagaaguucaccucaucugccaacggagugaccacacauuacguuucacagauugguggcuucccaaaucaaacagaagacggaggacuaccacaaagugguagaauuguuguugauuacauggugcaaaaaucugggaaaacaggaacaauuaccuaucaaagagguauuuuauugccucaaaagguguggugcgcaaguggcgggagcaagguaauaaaaggauccuugccuuuaauuggagaagcagauugccuccacgaaaaauacgguggauuaaacaaaagcaagccuuacuacacaggggaacaugcaaaggccauaggaaauugcccaauaugggugaaaacacccuugaagcuggccaauggaaccaaauauagaccuccugcaaaacuauuaaaggaaagggguuucuucggagcuauugcugguuucuuagaaggaggaugggaaggaaugauugcagguuggcacggauacacaucccauggggcacauggaguagcgguggcagcugaccuuaagagcacucaagaggccauaaacaagauaacaaaaaaucucaacucuuugagugagcuggaaguaaagaaucuucaaagacuaagcggugccauggaugaacuccacaacgaaauacuagaacuagaugagaaaguggaugaucucagagcugauacaauaagcucacaaauagaacucgcaguccugcuuuccaaugaaggaauaauaaacagugaagaugaacaucucuuggcgcuugaaagaaagcugaagaaaaugcugggccccucugcuguagagauagggaauggaugcuuugaaaccaaacacaagugcaaccagaccugucucgacagaauagcugcugguaccuuugaugcaggagaauuuucucuccccaccuuugauucacugaauauuacugcugcaucuuuaaaugacgauggauuggauaaucauacuauacugcuuuacuacucaacugcugccuccaguuuggcuguaacacugaugauagcuaucuuuguuguuuauauggucuccagagacaauguuucuugcuccaucugucuauaa

SEQ ID NO: 60279 - RNA, 1758 nt, Artificial Sequence
  derived and/or modified CDS sequence (wt) from hemagglutinin__InfluenzaB__AHZ36972
augaaggcaauaauuguacuacucaugguaguaacauccaaugcagaucgaaucugcacugggauaacaucgucaaacucaccacauaucgucaaaacugcuacucaaggggaggucaaugugacugguguaauaccacugacgacaacacccaccaaaucucauuuugcaaaucucaaaggaacagaaaccagggggaaacuaugcccaaaaugccucaacugcacagaucuggacguagccuugggcagaccaaaaugcacggggaaaauacccucggcaagaguuucaauacuccaugaagucagaccuguuacaucugggugcuuuccuauaaugcacgacagaacaaaaauuagacagcugccuaaccuucucagaggauacgaacauaucagguuaucaacccauaacguuaucaaugcagaaaaugcaccaggaggacccuacaaaauuggaaccucaggaucuugcccuaacauuaccaauggaaacggauuuuucgcaacaauggcuugggccgucccaaaaaacgacaaaaacaaaacagcaacaaauccauuaacaauagaaguaccauacauuuguacagaaggagaagaccaaauuaccguuuggggguuccacucugacaaugagacccaaauggcaaagcucuauggggacucaaagccccagaaguucaccucaucugccaacggagugaccacacauuacguuucacagauugguggcuucccaaaucaaacagaagacggaggacuaccacaaagugguagaauuguuguugauuacauggugcaaaaaucugggaaaacaggaacaauuaccuaucaaagggguauuuuauugccucaaaagguguggugcgcaaguggcaggagcaagguaauaaaaggauccuugccuuuaauuggagaagcagauugccuccacgaaaaauacgguggauuaaacaaaagcaagccuuacuacacaggggaacaugcaaaggccauaggaaauugcccaauaugggugaaaacacccuugaagcuggccaauggaaccaaauauagaccuccugcaaaacuauuaaaggaaagggguuucuucggagcuauugcuggcuucuuagaaggaggaugggaaggaaugauugcagguuggcacggauacacaucccauggggcacauggaguagcgguggcagcagaccuuaagagcacucaagaggccauaaacaagauaacaaaaaaucucaacucuuugagugagcuggaaguaaagaaucuucaaagacuaagcggugccauggaugaacuccacaaugaaauacuagaauuagaugagaaaguggaugaucucagagcugauacaauaagcucacaaauagaacucgcaguccugcuuuccaaugaaggaauaauaaacagugaagaugaacaucucuuggcgcuugaaagaaagcugaagaaaaugcugggccccucugcuguagagauagggaauggaugcuuugaaaccaaacacaagugcaaccagaccugucucgacagaauagcugcugguaccuuugaugcaggagaauuuucucuccccacuuuugauucacugaauauuacugcugcaucuuuaaaugacgauggauuggauaaucauacuauacugcuuuacuacucaacugcugccuccaguuuggcuguaacacugaugauagcuaucuuuguuguuuauauggucuccagagacaauguuucuugcuccaucugucuauaa

SEQ ID NO: 60280 - RNA, 1758 nt, Artificial Sequence
  derived and/or modified CDS sequence (wt) from hemagglutinin__InfluenzaB__AHZ36983
augaaggcaauaauuguacuacucaugguaguaacauccaaugcagaucgaaucugcacugggauaacaucgucaaacucaccacauaucgucaaaacugcuacucaaggggaggucaaugugacugguguaauaccacugacgacaacacccaccaaaucucauuuugcaaaucucaaaggaacagaaaccagggggaaacuaugcccaaaaugccucaacugcacagaucuggacguagccuugggcagaccaaaaugcacggggaaaauacccucggcaagaguuucaauacuccaugaagucagaccuguuacaucugggugcuuuccuauaaugcacgacagaacaaaaauuagacagcugccuaaccuucucagaggauacgaacauaucagguuaucaacccauaacguuaucaaugcagaaaaugcaccaggaggacccuacaaaauuggaaccucagggucuugcccuaacauuaccaauggaaacggauuuuucgcaacaauggcuugggccgucccaaaaaacgacaaaaacaaaacagcaacaaauccauuaacaauagaaguaccauacauuuguacagaaggagaagaccaaauuaccguuuggggguuccacucugacaaugagacccaaauggcaaagcucuauggggacucaaagccccagaaguucaccucaucugccaacggagugaccgcacauuacguuucacagauugguggcuucccaaaucaaacagaagacggaggacuaccacaaagugguagaauuguuguugauuacauggugcaaaaaucugggaaaacaggaacaauuaccuaucaaagggguauuuuauugccucaaaagguguggugcgcaaguggcaggagcaagguaauaaaaggauccuugccuuuaauuggagaagcagauugccuccacgaaaaauacgguggauuaaacaaaagcaagccuuacuacacaggggaacaugcaaaggccauaggaaauugcccaauaugggugaaaacacccuugaagcuggccaauggaaccaaauauagaccuccugcaaaacuauuaaaggaaagggguuucuucggagcuauugcuggcuucuuagaaggaggaugggaaggaaugauugcagguuggcacggauacacaucccauggggcacauggaguagcgguggcagcagaccuuaagagcacucaagaggccauaaacaagauaacaaaaaaucucaacucuuugagugagcuggaaguaaagaaucuucaaagacuaagcggugccauggaugaacuccacaaugaaauacuagaauuagaugagaaaguggaugaucucagagcugauacaauaagcucacaaauagaacucgcaguccugcuuuccaaugaaggaauaauaaacagugaagaugaacaucucuuggcgcuugaaagaaagcugaagaaaaugcugggccccucugcuguagagauagggaauggaugcuuugaaaccaaacacaagugcaaccagaccugucucgacagaauagcugcugguaccuuugaugcaggagaauuuucucuccccacuuuugauucacugaauauuacugcugcaucuuuaaaugacgauggauuggauaaucauacuauacugcuuuacuacucaacugcugccuccaguuuggcuguaacacugaugauagcuaucuuuguuguuuauauggucuccagagacaauguuucuugcuccaucugucuauaa

SEQ ID NO: 60281 - RNA, 1758 nt, Artificial Sequence
  derived and/or modified CDS sequence (wt) from hemagglutinin__InfluenzaB__AHZ37005
augaaggcaauaauuguacuacucaugguaguaacauccaaugcagaucgaaucugcacugggauaacaucgucaaacucaccacaugucgucaaaacugcuacucaaggggagguaaaugugacugguguaauaccacugacaacaacacccaccaaaucucauuuugcaaaucucaaaggaacagaaaccagagggaaacuaugcccaaaaugccccaacugcacagaucuggacguagccuugggcagaccaaaaugcacgggaaaaauacccucggcaagaguuucaauacuccaugaagucagaccuguuacaucugggugcuuuccuauaaugcacgacagaacaaaaauuagacagcugccuaaccuucucagaggauacgaacauaucagauuaucaacucauaacguuaucaaugcagaaagugcaccaggaggacccuacaaaauuggaaccucagggucuugcccuaacguuaccaauggaaacggauuuuucgcaacaauggcuugggccguccccaaaaacgacaaaaacaaaacagcaacagauccauuaacaauagaaguaccauacauuuguacagaagaagaagaccaaauuaccguuuggggguuccacucugacaacgagacccaaauggcaaagcucuauggggacucaaagccccagaaguucaccucaucugccaacggagugaccacacauuauguuucacagauugguggcuucccaaaucaaacagaagacggaggacuaccacaaagugguagaauuguuguugauuacaugguacaaaaaucugggaaaacaggaacaauuaccuaucaaagagguauuuuauugccucaaaagguguggugcgcaaguggcaggagcaagguaauaaaaggauccuugccuuuaauuggagaagcagauugccuccacgaaaaauacgguggauuaaacaaaagcaagccuuacuacacaggggaacaugcaaaggccauaggaaauugcccaauaugggugaagacacccuugaagcuggccaauggaaccaaauauagaccuccugcaaaacuauuaaaggaaagggguuucuucggagcuauugcugguuucuuagaaggaggaugggaaggaaugauugcagguuggcacggauacacgucccauggggcacauggaguagcgguggcagcagaccuuaagagcacucaagaggccauaaacaagauaacaaaaaaucuaaacucuuugagugagcuggaaguaaagaaucuucaaagacuaagcggugccauggaugaacuccacaacgaaauacuagaacuagacgagaaaguagaugaucucagagcugauacaauaagcucacaaauagaacucgcaguccugcuuuccaaugaaggaauaauaaacagugaagaugaacaucucuuggcgcuugaaagaaagcugaagaaaaugcugggccccucugcuguagagauagggaauggaugcuuugaaaccaaacacaagugcaaccagaccugucucgacagaauagcugcugguaccuuugaugcaggagaauuuucucuccccaccuuugauucacugaauauuacugcugcaucuuuaaaugacgauggauuggauaaucauaccauacugcuuuacuacucaacugcugccuccaguuuggcuguaacacugaugauagcuaucuuuguuguuuauauggucuccagagacaauguuucuugcuccaucugucuauaa

SEQ ID NO: 60282 - RNA, 1758 nt, Artificial Sequence; identical to SEQ ID NO: 60267
  derived and/or modified CDS sequence (wt) from hemagglutinin__InfluenzaB__AHZ37016

SEQ ID NO: 60283 - RNA, 1758 nt, Artificial Sequence
  derived and/or modified CDS sequence (wt) from hemagglutinin__InfluenzaB__AHZ37027
augaaggcaauaauuguacuacucaugguaguaacauccaaugcagaucgaaucugcacugggauaacaucgucaaacucaccacaugucgucaaaacugcuacucaaggggaggucaaugugaccgguguaauaccacugacaacaacacccaccaaaucucauuuugcaaaucucaaaggaacagaaaccagggggaaacuaugcccaaaaugccucaacugcacagaucuggacguagccuugggcagaccaaaaugcacggggaaaauacccucggcaagaguuucaauaauccaugaagucagaccuguuacaucugggugcuuuccuauaaugcacgauagaacaaaaauuagacagcugccuaaccuucuccgaggauacgaacauaucagguuaucaacucacaacguuaucaaugcagaaaaugcaccaggaggacccuacaaaauuggaaccucagggucuugccuuaacguuaccaauggaaacggauucuucgcaacaauggcuugggccgucccaaaaaacgacaaaaacaaaacagcaacaaauccauuaacaauagaaguaccauacauuuguacagaaggagaagaccaaauuaccguuuggggguuccacucugacaacgagacccaaauggcaaagcucuauggggacucaaagccccagaaguucaccucaucugccaacggagugaccacacauuacguuucacagauugguggcuucccaaaucaaacagaagacggaggacuaccacaaagugguagaauuguuguugauuacauggugcaaaaaucugggaaaacaggaacaauuaccuaucaaagagguauuuuauugccucaaaagguguggugcgcaaguggcaggagcaagguaauaaaaggauccuugccuuuaauuggagaagcagauugccuccacgaaaaauacgguggauuaaacaaaagcaagccuuacuacacaggggaacaugcaaaggccauaggaaauugcccaauaugggugaaaacacccuugaagcuggccaauggaaccaaauauagaccuccugcaaaacuauuaaaggaaagggguuuuuucggagcuauugcugguuucuuagaaggaggaugggaaggaaugauugcagguuggcacggauacacaucccauggggcacauggaguagcgguggcagcugaccuuaagagcacucaagaggccauaaacaagauaacaaaaaaucucaacucuuugagugagcuggaaguaaagaaucuucaaagacuaagcggugccauggaugaacuccacaacgaaauacuagaacuagaugagaaaguggaugaucucagagcugauacaauaagcucacaaauagaacucgcaguccugcuuuccaaugaaggaauaauaaacagugaagaugaacaucucuuggcgcuugaaagaaagcugaagaaaaugcugggccccucugcuguagagauagggaauggaugcuuugaaaccaaacacaagugcaaccagaccugucucgacagaauagcugcugguaccuuugaugcaggagaauuuucucuccccaccuuugauucacugaauauuacugcugcaucuuuaaaugacgauggauuggauaaucauacuauacugcuuuacuacucaacugcugccuccaguuuggcuguaacacugaugauagcuaucuuuguuguuuauauggucuccagagacaauguuucuugcuccaucugucuauaa

SEQ ID NO: 60284 - RNA, 1758 nt, Artificial Sequence; identical to SEQ ID NO: 60267
  derived and/or modified CDS sequence (wt) from hemagglutinin__InfluenzaB__AHZ37038

SEQ ID NO: 60285 - RNA, 1758 nt, Artificial Sequence; identical to SEQ ID NO: 60182
  derived and/or modified CDS sequence (wt) from hemagglutinin__InfluenzaB__AHZ37049

SEQ ID NO: 60286 - RNA, 1758 nt, Artificial Sequence
  derived and/or modified CDS sequence (wt) from hemagglutinin__InfluenzaB__AHZ37060
augaaggcaauaauuguacuacucaugguaguaacauccaaugcagaucgaaucugcacugggauaacaucgucaaacucaccacaugucgucaaaacugcuacucaaggggaggucaaugugaccgguguaauaccacugacaacaacacccaccaaaucucauuuugcaaaucucaaaggaacagaaaccagggggaaacuaugcccaaaaugccucaacugcacagaucuggacguagccuugggcagaccaaaaugcacggggaaaauacccucggcaagaguuucaauacuccaugaagucagaccuguuacaucugggugcuuuccuauaaugcacgauagaacaaaaauuagacagcugccuaaccuucuccgaggauacgaacauaucagguuaucaacucacaacguuaucaaugcagaaaaugcaccaggaggacccuacaaaauuggaaccucagggucuugccuuaacguuaccaauggaaacggauucuucgcaacaauggcuugggccgucccaaaaaacgacaaaaacaaaacagcaacaaauccauuaacaauagaaguaccauacauuuguacagaaggagaagaccaaauuaccguuuggggguuccacucugacaacgagacccaaauggcaaagcucuauggggacucaaagccccagaaguucaccucaucugccaauggagugaccacacauuacguuucacagauugguggcuucccaaaucaaacagaagacggaggacuaccacaaagugguagaauuguuguugauuacauggugcaaaaaucugggaaaacaggaacaauuaccuaucaaagagguauuuuauugccucaaaagguguggugcgcaaguggcaggagcaagguaauaaaaggauccuugccuuuaauuggagaagcagauugccuccacgaaaaauacgguggauuaaacaaaagcaagccuuacuacacaggggaacaugcaaaggccauaggaaauugcccaauaugggugaaaacacccuugaagcuggccaauggaaccaaauauagaccuccugcaaaacuauuaaaggaaagggguuuuuucggagcuauugcugguuucuuagaaggaggaugggaaggaaugauugcagguuggcacggauacacaucccauggggcacauggaguagcgguggcagcugaccuuaagagcacucaagaggccauaaacaagauaacaaaaaaucucaacucuuugagugagcuggaaguaaagaaucuucaaagacuaagcggugccauggaugaacuccacaacgaaauacuagaacuagaugagaaaguggaugaucucagagcugauacaauaagcucacaaauagaacucgcaguccugcuuuccaaugaaggaauaauaaacagugaagaugaacaucucuuggcgcuugaaagaaagcugaagaaaaugcugggccccucugcuguagagauagggaauggaugcuuugaaaccaaacacaagugcaaccagaccugucucgacagaauagcugcugguaccuuugaugcaggagaauuuucucuccccaccuuugauucacugaauauuacugcugcaucuuuaaaugacgauggauuggauaaucauacuauacugcuuuacuacucaacugcugccuccaguuuggcuguaacacugaugauagcuaucuuuguuguuuauauggucuccagagacaauguuucuugcuccaucugucuauaa

SEQ ID NO: 60287 - RNA, 1758 nt, Artificial Sequence
  derived and/or modified CDS sequence (wt) from hemagglutinin__InfluenzaB__AHZ37071
augaaggcaauaauuguacuacucaugguaguaacauccaaugcagaucgaaucugcacugggauaacaucgucaaacucaccacaugucgucaaaacugcuacucaaggggaggucaaugugaccgguguaauaccacugacaacaacacccaccaaaucucauuuugcaaaucucaaaggaacagaaaccagggggaaacuaugcccaaaaugccucaacugcacagaucuggacguagccuugggcagaccaaaaugcacggggaaaauacccucggcaagaguuucaauacuccaugaagucagaccuguuacaucugggugcuuuccuauaaugcacgauagaacaaaaauuagacagcugccuaaucuucuccgaggauacgaacauaucagguuaucaacucacaacguuaucaaugcagaaaaugcaccaggaggacccuacaaaauuggaaccucagggucuugcccuaacguuaccaauggaaacggauucuucgcaacaauggcuugggccgucccaaaaaacgacaaaaacaaaacagcaacaaauccauuaacaauagaaguaccauacauuuguacagaaggagaagaccaaauuaccguuuggggguuccauucugacaacgagacccaaauggcaaagcucuauggggacucaaagccccagaaguucaccucaucugccaacggagugaccacacauuacguuucacagauugguggcuucccaaaucaaacagaagacggaggacuaccacaaagugguagaauuguuguugauuacaugguucaaaaaucugggaaaacaggaacaauuaccuaucaaagagguauuuuauugccucaaaagguguggugcgcaaguggcaggagcaagguaauaaaaggauccuugccuuuaauuggggaagcagauugccuccacgaaaaauacgguggauuaaacaaaagcaagccuuacuacacaggggaacaugcaaaggccauaggaaauugcccaauaugggugaaaacacccuugaagcuggccaauggaaccaaauauagaccuccugcaaaacuauuaaaggaaagggguuucuucggagcuauugcugguuucuuagaaggaggaugggaaggaaugauugcagguuggcacggauacacaucccauggggcacauggaguagcgguggcagcugaccuuaaaagcacucaagaggccauaaacaagauaacaaaaaaucucaacucuuugagugagcuggaaguaaagaaucuucaaagacuaagcggugccauggaugaacuccacaacgaaauacuagaacuagaugagaaaguggaugaucucagagcugauacaauaagcucacaaauagaacucgcaguccugcuuuccaaugaaggaauaauaaacagugaagaugaacaucucuuggcgcuugaaagaaagcugaagaaaaugcugggccccucugcuguagagauagggaauggaugcuuugaaaccaaacacaagugcaaccagaccugucucgacagaauagcugcugguaccuuugaugcaggagaauuuucucuccccaccuuugauucacugaauauuacugcugcaucuuuaaaugacgauggauuggauaaucauacuauacugcuuuacuacucaacugcugccuccaguuuggcuguaacacugaugauagcuaucuuuguuguuuauauggucuccagagacaauguuucuugcuccaucugucuauaa

SEQ ID NO: 60288 - RNA, 1758 nt, Artificial Sequence; identical to SEQ ID NO: 60267
  derived and/or modified CDS sequence (wt) from hemagglutinin__InfluenzaB__AHZ37082

SEQ ID NO: 60289 - RNA, 1758 nt, Artificial Sequence; identical to SEQ ID NO: 60182
  derived and/or modified CDS sequence (wt) from hemagglutinin__InfluenzaB__AHZ37093

SEQ ID NO: 60290 - RNA, 1758 nt, Artificial Sequence
  derived and/or modified CDS sequence (wt) from hemagglutinin__InfluenzaB__AHZ37104
augaaggcaauaauuguacuacucaugguaguaacauccaaugcagaucgaaucugcacugggauaacaucgucaaacucaccacaugucgucaaaacugcuacucaaggggaggucaaugugaccgguguaauaccacugacaacaacacccaccaaaucucauuuugcaaaucucaaaggaacagaaaccagggggaaacuaugcccaaaaugccucaacugcacagaucuggacguagccuugggcagaccaaaaugcacggggaaaauacccucggcaagaguuucaauacuccaugaagucagaccuguuacaucugggugcuuuccuauaaugcacgauagaacaaaaauuagacagcugccuaaucuucuccgaggauacgaacauaucagguuaucaacucacaacguuaucaaugcagaaaaugcaccaggaggacccuacaaaauuggaaccucagggucuugcccuaacguuaccaauggaaacggauucuucgcaacaauggcuugggccgucccaaaaaacgacaaaaacaaaacagcaacaaauccauuaacaauagaaguaccauacauuuguacagaaggagaagaccaaauuaccguuuggggguuccauucugacaacgagacccaaauggcaaagcucuauggggacucaaagccccagaaguucaccucaucugccaacggagugaccacacauuacguuucacagauugguggcuucccaaaucaaacagaagacggaggacuaccacaaagugguagaauuguuguugaucacaugguucaaaaaucugggaaaacaggaacaauuaccuaucaaagagguauuuuauugccucaaaagguguggugcgcaaguggcaggagcaagguaauaaaaggauccuugccuuuaauuggagaagcagauugccuccacgaaaaauacgguggauuaaacaaaagcaagccuuacuacacaggggaacaugcaaaggccauaggaaauugcccaauaugggugaaaacacccuugaagcuggccaauggaaccaaauauagaccuccugcaaaacuauuaaaggaaagggguuucuucggagcuauugcugguuucuuagaaggaggaugggaaggaaugauugcagguuggcacggauacacaucccauggggcacauggaguagcgguggcagcugaccuuaaaagcacucaagaggccauaaacaagauaacaaaaaaucucaacucuuugagugagcuggaaguaaagaaucuucaaagacuaagcggugccauggaugaacuccacaacgaaauacuagaacuagaugagaaaguggaugaucucagagcugauacaauaagcucacaaauagaacucgcaguccugcuuuccaaugaaggaauaauaaacagugaagaugaacaucucuuggcgcuugaaagaaagcugaagaaaaugcugggccccucugcuguagagauagggaauggaugcuuugaaaccaaacacaagugcaaccagaccugucucgacagaauagcugcugguaccuuugaugcaggagaauuuucucuccccaccuuugauucacugaauauuacugcugcaucuuuaaaugacgauggauuggauaaucauacuauacugcuuuacuacucaacugcugccuccaguuuggcuguaacacugaugauagcuaucuuuguuguuuauauggucuccagagacaauguuucuugcuccaucugucuauaa

SEQ ID NO: 60291 - RNA, 1758 nt, Artificial Sequence
  derived and/or modified CDS sequence (wt) from hemagglutinin__InfluenzaB__AHZ41770
augaaggcaauaauuguacuacucaugguaguaacauccaaugcagaucgaaucugcacugggauaacaucgucaaacucaccacauaucgucaaaacugcuacucaaggggaggucaaugugacugguguaauaccacugacaacaacacccaccaaaucucauuuugcaaaucucaaaggaacagaaaccagggggaaacuaugcccaaaaugccucaacugcacagaucuggacguagccuugggcagaccaaaaugcacggggaaaauacccucggcaagaguuucaauacuccaugaagucagaccuguuacaucugggugcuuuccuauaaugcacgacagaacaaaaauuagacagcugccuaaccuucucagaggauacgaacauaucagguuaucaacucauaacguuaucaaugcagaaaaugcaccaggaggacccuacaaaauuggaaccucagggucuugcccuaacauuaccaauggaaacggauuuuucgcaacaauggcuugggccgucccaaaaaacgacaaaaacaaaacagcaauaaauccauuaacaauagaaguaccauacauuuguacagaaggagaagaccaaauuaccguuuggggguuccacucugacaaugaaacccaaauggcaaagcucuauggggacucagagccccagaaguucaccucaucugccaacggagugaccacacauuacguuucacagauugguggcuucccaaaucaaacagaagacggaggacuaccacaaagugguagaauuguuguugauuacauggugcaaaaaucugggaaaacaggaacaauuaccuaucaaagggguauuuuauugccucaaaagguguggugcgcaaguggcaggagcaagguaauaaaaggauccuugccuuuaauuggagaagcagauugccuccacgaaaaauacgguggauuaaacaaaagcaagccuuacuacacaggggaacaugcaaaggccauaggaaauugcccaauaugggugaaaacacccuugaagcuggcaaauggaaccaaauauagaccuccugcaaaacuauuaaaggaaagggguuucuucggugcuauugcuggcuucuuagaaggaggaugggaaggaaugauugcagguuggcacggauacacaucccauggggcacauggaguagcgguggcagcagaccuuaagagcacucaagaggccauaaacaagauaacaaaaaaucucaacucuuugagugagcuugaaguaaagaaucuucaaagacuaagcggugccauggaugaacuccacaaugaaauacuagaauuagaugagaaaguggaugaucucagagcugauacaauaagcucacaaauagaacucgcaguccugcuuuccaaugaaggaauaauaaacagugaagaugaacaucucuuggcgcuugaaagaaagcugaagaaaaugcugggccccucugcuguagagauagggaauggaugcuuugaaaccaaacacaagugcaaccagaccugucucgacagaauagcugcugguaccuuugaugcaggagaauuuucucuccccacuuuugauucacugaauauuacugcugcaucuuuaaaugacgauggauuggauaaucauacuauacugcuuuacuacucaacugcugccuccaguuuggcuguaacacugaugauagcuaucuuuguuguuuauauggucuccagagacaauguuucuugcuccaucugucuauaa

SEQ ID NO: 60292 - RNA, 1758 nt, Artificial Sequence; identical to SEQ ID NO: 58738
  derived and/or modified CDS sequence (wt) from hemagglutinin__InfluenzaB__AHZ41781

SEQ ID NO: 60293 - RNA, 1758 nt, Artificial Sequence; identical to SEQ ID NO: 60080
  derived and/or modified CDS sequence (wt) from hemagglutinin__InfluenzaB__AHZ41792

SEQ ID NO: 60294 - RNA, 1758 nt, Artificial Sequence
  derived and/or modified CDS sequence (wt) from hemagglutinin__InfluenzaB__AHZ41803
augaaggcaauaauuguacuacucaugguaguaacauccaaugcagaucgaaucugcacugggauaacaucgucaaacucaccacauaucgucaaaacugcuacucaaggggaggucaaugugacugguguaauaccacugacaacaacacccaccaaaucucauuuugcaaaucucaaaggaacagaaaccagggggaaacuaugcccaaaaugccucaacugcacagaucuggacguagccuugggcagaccaaaaugcacggggaaaauacccucggcaagaguuucaauacuccaugaagucagaccuguuacaucugggugcuuuccuauaaugcacgacagaacaaaaauuagacagcugccuaaccuucucagaggauacgaacauaucagguuaucaacucauaacguuaucaacgcagaaaaugcaccaggaggacccuacaaaauuggaaccucagggucuugcccuaacauuaccaauggaaacggauuuuucgcaacaauggcuugggccgucccaaaaaacgacaaaaacaaaacagcaacaaauccauuaacaauagaaguaccauacauuuguacagaaggagaagaccaaauuaccguuuggggguuccacucugacaaugaaacccaaauggcaaagcucuauggggacucaaagccccagaaguucaccucaucugccaacggagugaccacacauuacguuucacagauugguggcuucccaaaucaaacagaagacggaggacuaccacaaagugguagaauuguuguugauuacauggugcaaaaaucugggaaaacaggaacaauuaccuaucaaagggguauuuuauugccucaaaagguguggugcgcaaguggcaggagcaaggugauaaaaggauccuugccuuuaauuggagaagcagauugccuccacgaaaaauacgguggauuaaacaaaagcaagccuuacuacacaggggaacaugcaaaggccauaggaaauugcccaauaugggugaaaacacccuugaagcuggccaauggaaccaaauauagaccuccugcaaaacuauuaaaggaaagggguuucuucggugcuauugcuggcuucuuagaaggaggaugggaaggaaugauugcagguuggcacggauacacaucccauggggcacauggaguagcgguggcagcagaccuuaagagcacucaagaggccauaaacaagauaacaaaaaaucucaacucuuugagugagcuggaaguaaagaaucuucaaagacuaagcggugccauggaugaacuccacaaugaaauacuagaauuagaugagaaaguggaugaucucagagcugauacaauaagcucacaaauagaacucgcaguccugcuuuccaaugaaggaauaauaaacagugaagaugaacaucucuuggcgcuugaaagaaagcugaagaaaaugcugggccccucugcuguagagauagggaauggaugcuuugaaaccaaacacaagugcaaccagaccugucucgacagaauagcugcugguaccuuugaugcaggagaauuuucucuccccacuuuugauucacugaauauuacugcugcaucuuuaaaugacgauggauuggauaaucauacuauacugcuuuacuacucaacugcugccuccaguuuggcuguaacacugaugauagcuaucuuuguuguuuauauggucuccagagacaauguuucuugcuccaucugucuauaa

SEQ ID NO: 60295 - RNA, 1758 nt, Artificial Sequence
  derived and/or modified CDS sequence (wt) from hemagglutinin__InfluenzaB__AHZ41814
augaaggcaauaauuguacuacucaugguaguaacauccaaugcagaucgaaucugcacugggauaacaucgucaaacucaccacaugucgucaaaacugcuacucaaggggaggucaaugugacugguguaauaccacugacaacaacacccaccaaaucucauuuugcaaaucucaaaggaacagaaaccagagggaaacuaugcccaaaaugccccaacugcacagaucuggacguagccuugggcagaccaaaaugcacggggaaaauacccucggcaagaguuucaauacuccaugaagucagaccuguuacaucugggugcuuuccuauaaugcacgacagaacaaaaauuagacagcugccuaaccuucuccgaggauacgaacauaucagguuaucaacucauaacguuaucaaugcagaaaaugcaccaggaggacccuacaaaauuggaaccucagggucuugcccuaauguuaccaauggaaacggauuuuucgcaacaauggcuugggccgucccaaaaaacgacaaaaacaaaacagcaacaaauccauuaacaauagaaguaccauacauuuguacagaaggagaagaccaaauuaccguuuggggguuccacucugauaacgagacccaaauggcaaagcucuauggggacucaaagccccagaaguucaccucaucugccaacggagugaccacacauuacguuucacagauugguggcuucccaaaucaaacagaagacggaggacuaccacaaagugguagaauuguuguugauuacauggugcaaaaaucugggaaaacaggaacaguuaccuaucaaagagguauuuuauugccucaaaagguguggugcgcaaguggcaggagcaagguaauaaaaggauccuugccuuuaauuggagaagcagauugccuccacgaaaaauacgguggauuaaacaaaagcaagccuuacuacacaggggaacaugcaaaggccauaggaaauugcccaauaugggugaagacacccuugaagcuggccaaugggaccaaauauagaccuccugcaaaacuauuaaaggaaagggguuucuucggagcuauugcugguuucuuagaaggaggaugggaaggaaugauugcagguuggcacggauacacgucccauggggcacauggaguagcaguggcagcagaccuuaagagcacucaagaggccauaaacaagauaacaaaaaaucucaacucuuugagugagcuggaaguaaagaaucuucaaagacuaagcggugccauggaugaacuccacaacgaaauacuagaacuagacgagaaaguggaugaucucagagcugauacaauaagcucacaaauagaacucgcaguccugcuuuccaaugaaggaauaauaaacagugaagaugaacaucucuuggcgcuugaaagaaagcugaagaaaaugcugggccccucugcuguagagauagggaauggaugcuuugaaaccaaacacaagugcaaccagaccugucucgacagaauagcugcugguaccuuugaugcaggagaauuuucucuccccaccuuugauucacugaauauuacugcugcaucuuuaaaugacgauggauuggauaaucauacuauacugcuuuacuacucaacugcugccuccaguuuggcuguaacacugaugauagcuaucuuuguuguuuauauggucuccagagacaauguuucuugcuccaucugucuauaa

SEQ ID NO: 60296 - RNA, 1758 nt, Artificial Sequence; identical to SEQ ID NO: 60080
  derived and/or modified CDS sequence (wt) from hemagglutinin__InfluenzaB__AHZ41825

SEQ ID NO: 60297 - RNA, 1758 nt, Artificial Sequence
  derived and/or modified CDS sequence (wt) from hemagglutinin__InfluenzaB__AHZ41836
augaaggcaauaauuguacuacucaugguaguaacauccaaugcagaucgaaucugcacugggauaacaucgucaaacucaccacauaucgucaaaacugcuacucaaggggaggucaaugugacugguguaauaccacugacaacaacacccaccaaaucucauuuugcaaaucucaaaggaacagaaaccagggggaaacuaugcccaaaaugccucaacugcacagaucuggacguagccuugggcagaccaaaaugcacggggaaaauacccucggcaagaguuucaauacuccaugaagucagaccuguuacaucugggugcuuuccuauaaugcacgacagaacaaaaauuagacagcugccuaaccuucucagaggauacgaacauaucagguuaucaacucauaacguuaucaaugcagaaaaugcaccaggaggacccuacaaaauuggaaccucagggucuugcccuaacauuaccaauggaaacggauuuuucgcaacaauggcuugggccgucccaaaaaacgacaaaaacaaaacagcaacaaauccauuaacaauagaaguaccauacauuuguacagaaggagaagaccaaauuaccguuuggggguuccacucugacaaugaaacccaaauggcaaagcucuauggggacucaaagccccagaaguucaccucaucugccaacggagugaccacacauuacguuucacagauugguggcuucccaaaucaaacagaagacggaggacuaccacaaagugguagaauuguuguugauuacaugguccaaaaaucugggaaaacaggaacaauuaccuaucaaagggguauuuuauugccucaaaagguguggugcgcaaguggcaggagcaagguaauaaaaggauccuugccuuuaauuggagaagcagauugccuccacgaaaaauacgguggauuaaacaaaagcaagccuuacuacacaggggaacaugcaaaggccauaggaaauugcccaauaugggugaaaacacccuugaagcuggccaauggaaccaaauauagaccuccugcaaaacuauuaaaggaaagggguuucuucggugcuauugcuggcuucuuagaaggaggaugggaaggaaugauugcagguuggcacggauacacaucccauggggcacauggaguagcgguggcagcagaccuuaagagcacucaagaggccauaaacaagauaacaaaaaaucucaacucuuugagugagcuggaaguaaagaaucuucaaagacuaagcggugccauggaugaacuccacaaugaaauacuagaauuagaugagaaaguggaugaucucagagcugauacaauaagcucacaaauagaacucgcaguccugcuuuccaaugaaggaauaauaaacagugaagaugaacaucucuuggcgcuugaaagaaagcugaagaaaaugcugggccccucugcuguagagauagggaauggaugcuuugaaaccaaacacaagugcaaccagaccugccucgacagaauagcugcugguaccuuugaugcaggagaauuuucucuccccacuuuugauucacugaauauuacugcugcaucuuuaaaugacgauggauuggauaaucauacuauacugcuuuacuacucaacugcugccuccaguuuggcuguaacacugaugauagcuaucuuuguuguuuauauggucuccagagacaauguuucuugcuccaucugucuauaa

SEQ ID NO: 60298 - RNA, 1758 nt, Artificial Sequence; identical to SEQ ID NO: 58738
  derived and/or modified CDS sequence (wt) from hemagglutinin__InfluenzaB__AHZ41847

SEQ ID NO: 60299 - RNA, 1755 nt, Artificial Sequence
  derived and/or modified CDS sequence (wt) from hemagglutinin__InfluenzaB__AHZ41858
augaaggcaauaauuguacuacucaugguaguaacauccaaugcagaucgaaucugcacugggauaacaucuucaaacucaccucauguagucaaaacagcuacucaaggggaggucaaugugacuggcgcgauaccauugacaacaacaccaacaaaaucuuauuuugcaaaucucaaaggaacaaggaccagagggaaacuaugcccggacugucucaacuguacagaucuggauguggccuugggcaggccaauguguguggggaccacaccuucugcuaaagcuucaauacuccacgaagucagaccuguuacaucagggugcuuuccuauaaugcacgacagaacaaaaaucaggcaacuacccaaucuucucagaggauaugaaaauaucagguuaucaacccaaaacguuaucgaugcagaaaaagcaccaggaggacccuacagacuuggaaccucaggaucuugcccuaacgcuaccaguaaaaucggguuuuucgcaacaauggcuugggcugucccaaaggacaacuacaaaaaugcaacgaacccacaaacaguagaaguaccauacauuuguacagaaggggaagaccaaauuacuguuuggggguuccauucagauaacaaaacccaaaugaagaaccucuauggagacucaaauccucaaaaguucaccucaucugcuaauggaguaaccacacauuauguuucucagauuggcgacuucccagaucaaacagaagacggaggacuaccacaaagcggcagaauuguuguugauuacauggugcaaaaaccugggaaaacaggaacaauugucuaucaaagaggcguuuuguugccucaaaagguguggugcgcgaguggcaggagcaaaguaauaaaagggucauuaccuuuaauuggugaagcagauugccuucaugaaaaauacgguggauuaaacaagagcaagccuuacuacacaggagaacaugcaaaagccauaggaaacugcccaauauggguaaaaacaccuuugaagcuugccaauggaaccaaauauagaccuccugcaaaacuauuaaaggaaagggguuucuucggagcuauugcugguuuccuagaaggaggaugggaaggaaugauugcagguuggcacggauacacaucucacggagcacauggaguggcaguggcggcagaccuuaagaguacacaagaagcuauaaauaagauaacaaaaaaucucaauucuuugagugagcuagaaguaaaaaaccuucaaagacuaaguggugccauggaugaacuccacaacgaaauacucgaacuggaugagaaaguggaugaucucagagcugacacuauaagcucacaaauagaacuugcagucuugcuuuccaacgaaggaauaauaaacagugaagacgagcaucuauuggcacuugagagaaaacuaaagaaaaugcugggucccucugcuguagacauaggaaauggaugcuucgaaaccaaacacaaaugcaaccagaccugcuuagacaggauagcugcuggcaccuuuaaugcaggagaauuuucucuccccacuuuugauucauugaacauuacugcugcaucuuuaaaugaugauggauuggauaaccauacuauacugcucuauuacucaacugcugcuucuaguuuggcuguaacauuaaugcuagcuauuuuuauuguuuauauggucuccagagacaacguuucaugcuccaucugucuauaa

SEQ ID NO: 60300 - RNA, 1758 nt, Artificial Sequence; identical to SEQ ID NO: 60168
  derived and/or modified CDS sequence (wt) from hemagglutinin__InfluenzaB__AHZ41869

SEQ ID NO: 60301 - RNA, 1755 nt, Artificial Sequence
  derived and/or modified CDS sequence (wt) from hemagglutinin__InfluenzaB__AIC73844
augaaggcaauaauuguacuacucaugguaguaacauccaaugcagaucgaaucugcacugggauaacaucuucaaacucaccucauguggucaaaacagcuacucaaggggaggucaaugugacuggcgugauaccacugacaacaacaccaacaaaaucuuauuuugcaaaucucaaaggaacaaggaccagagggaaacuaugcccggacugucucaacuguacagaucuggauguggccuugggcaggccaauguguguggggaccacaccuucugcuaaagcuucaauacuccaugaggucagaccuguuacauccgggugcuuuccuauaaugcacgacagaacaaaaaucaggcaacuacccaaucuucucagaggauaugaaaagaucagguuaucaacccaaaacguuaucgaugcagaaaaagcaccaggaggacccuacagacuuggaaccucaggaucuugcccuaacgcuaccaguaaaaucggauuuuuugcaacaauggcuugggcugucccaaaggacaacuacaaaaaugcaacgaacccacaaacaguggaaguaccauacauuuguacagaaggggaagaccaaauuacuguuuggggguuccauucggauaacaaaacccaaaugaagagccucuauggagacucaaauccucaaaaauucaccucaucugcuaauggaguaaccacacauuauguuucucagauuggcgacuucccagaucaaacagaagacggaggacuaccacaaagcggcagaauuguuguugauuacaugaugcaaaaaccugggaaaacaggaacaauugucuaucaaagggguguuuuguugccucaaaagguguggugcgcgaguggcaggagcaaaguaauaaaagggucauugccuuuaauuggugaagcagauugccuucaugaagaauacgguggauuaaacaaaagcaagccuuacuacacaggaaaacaugcaaaagccauaggaaauugcccaauauggguaaaaacaccuuugaagcuugccaauggaaccaaauauagaccuccugcaaaacuauugaaggaaagggguuucuucggagcuauugcugguuuccuagaaggaggaugggaaggaaugauugcagguuggcacggauacacaucucacggagcacauggaguggcaguggcggcagaccuuaagaguacacaagaagcuauaaauaagauaacaaaaaaucucaauucuuugagugaacuagaaguaaagaaccuucaaagacuaaguggugccauggaugaacuccacaacgaaauacucgagcuggaugaaaaaguggaugaucucagagcugacacuauaagcucacaaauagaacuugcagucuugcuuuccaacgaaggaauaauaaacagugaagacgagcaucuauuggcacuugagagaaaacuaaagaaaaugcugggucccucugcuguagacauaggaaacggaugcuucgaaaccaaacacaaaugcaaccagaccugcuuagacaggauagcugcuggcaccuuuaaugcaggagaauuuucucuccccacuuuugauucauugaacauuacugcugcaucuuuaaaugaugauggauuggauaaccauacuauacugcucuauuacucaacugcugcuucuaguuuggcuguaacauuaaugcuagcuauuuuuauuguuuauauggucuccagagacaacguuucaugcuccaucugucuauaa

SEQ ID NO: 60302 - RNA, 1758 nt, Artificial Sequence
  derived and/or modified CDS sequence (wt) from hemagglutinin__InfluenzaB__AIC73845
augaaggcaauaauuguacuacucaugguaguaacauccaaugcagaucgaaucugcacugggauaacaucgucaaacucaccacaugucgucaaaacugcuacucaaggggaggucaaugugaccgguguaauaccacugacaacaacacccaccaaaucucauuuugcaaaucucaaaggaacagaaaccagggggaaacuaugcccaaaaugccucaacugcacagaucuggacguagccuugggcagaccaaaaugcacggggaaaauacccucggcaagaguuucaauacuccaugaagucagaccuguuacaucugggugcuuuccuauaaugcacgauagaacaaaaauuagacagcugccuaaccuucuccgaggauacgaacauaucagguuaucaacucacaacguuaucaaugcagaaaaugcaccaggagggcccuacaaaauuggaaccucagggucuugcccuaacguuaccaauggaaacggauucuucgcaacaauggcuugggccgucccaaaaaacgacaaaaacaaaacagcaacaaauccauuaacaauagaaguaccauacauuuguacagaaggagaagaccaaauuaccguuuggggguuccacucugacaacgagacccaaauggcaaagcucuauggggacucaaauccccagaaguucaccucaucugccaacggagugaccacacauuacguuucacagauugguggcuucccaaaucaaacagaagacggaggacuaccacaaagugguagaauuguuguugauuacauggugcaaaaaucugggaaaacaggaacaauuacuuaucaaagagguauuuuauugccucaaaagguguggugcgcaaguggcaggagcaagguaauaaaaggauccuugccuuuaauuggagaagcagauugccuccacgaaaaauacgguggguuaaacaaaagcaagccuuacuacacaggggaacaugcaaaggccauaggaaauugcccaauaugggugaaaacacccuugaagcuggccaauggaaccaaauauagaccuccugcaaaacuauuaaaggaaagggguuucuucggagcuauugcugguuucuuagaaggagggugggaaggaaugauugcagguuggcacggauacacaucccauggggcacauggaguagcgguggcagcugaccuuaagagcacucaagaggccauaaacaagauaacaaaaaaucucaacucuuugagugagcuggaaguaaagaaucuucaaagacuaagcggugccauggaugaacuccacaacgaaauacuagaacuagaugagaaaguggaugaucucagagcugauacaauaagcucacaaauagaacucgcaguccugcuuuccaaugaaggaauaauaaacagugaagaugaacaucucuuggcgcuugaaagaaagcugaagaaaaugcugggccccucugcuguagagauagggaauggaugcuuugaaaccaaacacaagugcaaccagaccugucucgacagaauagcugcugguaccuuugaugcaggagaauuuucucuccccacuuuugauucacugaauauuacugcugcaucuuuaaaugacgauggauuggauaaucauacuauacugcuuuacuacucaacugcugccuccaguuuggcuguaacacugaugauagcuaucuuuguuguuuauauggucuccagagacaauguuucuugcuccaucugucuauaa

SEQ ID NO: 60303 - RNA, 1758 nt, Artificial Sequence; identical to SEQ ID NO: 60302
  derived and/or modified CDS sequence (wt) from hemagglutinin__InfluenzaB__AIC73846

SEQ ID NO: 60304 - RNA, 1758 nt, Artificial Sequence
  derived and/or modified CDS sequence (wt) from hemagglutinin__InfluenzaB__AIC73847
augaaggcaauaauuguacuacucaugguaguaacauccaaugcagaucgaaucugcacugggauaacaucgucaaacucaccacaugucgucaaaacugcuacucaaggggaggucaaugugaccgguguaauaccacugacaacaacacccaccaaaucucauuuugcaaaucucaaaggaacagaaaccagggggaaacuaugcccaaaaugccucgacugcacagaucuggauguagccuugggcagaccaaaaugcacagggaaaauacccucggcaagaguuucaauacuccaugaagucagaccuguuacaucugggugcuuuccuauaaugcacgauagaacaaaaauuagacagcugccuaaccuucuccgaggauacgaacauaucagguuaucaacucacaacguuaucaaugcagaagaugcaccaggaggacccuacaaaauuggaaccucagggucuugcccuaacguuaccaauggaaacggauucuucgcaacaauggcuugggccgucccaaaaaacgacaaaaacaaaacagcaacaaauccauuaacaauagaaguaccauacauuuguacagaaggagaagaccaaauuaccguuuggggguuccacucugacaacgagacccaaauggcaaagcucuauggggacucaaagccccagaaguucaccucaucugccaacggagugaccacacauuacguuucacagauugguggcuucccaaaucaaacagaagacggaggacuaccacaaagugguagaauuguuguugauuacauggugcaaaaaucuggaaaaacaggaacaauuaccuaucaaagagguauuuuauugccucaaaagguguggugcgcaaguggcaggagcaagguaauaaaaggauccuugccuuuaauuggagaagcagauugccuccacgaaaaauacgguggauuaaacaaaagcaagccuuacuacacaggggaacaugcaaaggccauaggaaauugcccaauaugggugaaaacacccuugaagcuggccaauggaaccaaauauagaccuccugcaaaacuauuaaaggaaagggguuucuucggagcuauugcugguuucuuagagggaggaugggaaggaaugauugcagguuggcacggauacacaucccauggggcacauggaguagcgguggcagcugaccuuaagagcacucaagaggccauaaacaagauaacaaaaaaucucaacucuuugagugagcuggaaguaaagaaucuucaaagacuaagcggugccauggaugaacuccacaacgaaauacuagaacuagaugagaaaguggaugaucucagagcugauacaauaagcucacaaauagaacucgcaguccugcuuuccaaugaaggaauaauaaacagugaagaugaacaucucuuggcgcuugaaagaaagcugaagaaaaugcugggccccucugcuguagagauagggaauggaugcuuugaaaccaaacacaagugcaaccagaccugucucgacagaauagcugcugguaccuuugaugcaggagaauuuucucuccccaccuuugauucacugaauauuacugcugcaucuuuaaaugacgauggauuggauaaucauacuauacugcuuuacuacucaacugcugccuccaguuuggcuguaacacugaugauagcuaucuuuguuguuuauauggucuccagagacaauguuucuugcuccaucugucuauaa

SEQ ID NO: 60305 - RNA, 1758 nt, Artificial Sequence; identical to SEQ ID NO: 60302
  derived and/or modified CDS sequence (wt) from hemagglutinin__InfluenzaB__AIC73848

SEQ ID NO: 60306 - RNA, 1755 nt, Artificial Sequence
  derived and/or modified CDS sequence (wt) from hemagglutinin__InfluenzaB__AIC73849
augaaggcaauaauuguacuacucaugguaguaacauccaaugcagaucgaaucugcacugggauaacaucuucaaacucaccucauguggucaaaacagcuacucaaggggaggucaaugugacuggcgugauaccacugacaacaacaccaacaaaaucuuauuuugcaaaucucaaaggaacaaggaccagagggaaacuaugcccggacugucucaacuguacagaucuggauguggccuugggcaggccaauguguguggggaccacaccuucugcuaaagcuucaauacuccacgaggucagaccuguuacauccgggugcuuuccuauaaugcacgacagaacaaaaaucaggcaacuacccaaucuucucagaggauaugaaaagaucagguuaucaacccaaaacguuaucgaugcagaaaaagcaccaggaggacccuacagacuuggaaccucaggaucuugcccuaacgcuaccaguaaaaucggauuuuucgcaacaauggcuugggcugucccaaaggacaacuacaaaaaugcaacgaacccacuaacaguggaaguaccauacauuuguacagaaggggaagaccaaauuacuguuuggggguuccauucagauaacaaaacccaaaugaagagccuauauggagacucaaauccucaaaaguucaccucaucugcuaauggaguaaccacacauuauguuucucagauuggcgacuucccagaucaaacagaagacggaggacuaccacaaagcggcagaauuguuguugauuacaugaugcaaaaaccugggaaaacaggaacaauugucuaucaaagagguguuuuauugccucaaaagguguggugcgcgaguggcaggagcaaaguaauaaaagggucauugccuuuaauuggugaagcagauugccuucaugaagaauacgguggauuaaacaaaagcaagccuuacuacacaggaaaacaugcaaaagccauaggaaauugcccaauauggguaaaaacaccuuugaagcuugccaauggaaccaaauauagaccuccugcaaaacuauugaaggaaagggguuucuucggagcuauugcugguuuccuagaaggaggaugggaaggaaugauugcagguuggcacggauacacaucucacggagcacauggaguggcaguggcggcagaccuuaagaguacacaagaagccauaaauaagauaacaaaaaaucucaauucuuugagugagcuagaaguaaagaaccuucaaagacuaaguggugccauggaugaacuccacaacgaaauacucgagcuggaugagaaaguggaugaucucagagcugacacuauaagcucacaaauagaacuugcagucuugcuuuccaacgaaggaauaauaaacagugaagacgagcaucuauuggcacuugagagaaaacuaaagaaaaugcugggucccucugcuguagacauaggaaacggaugcuucgaaaccaaacacaaaugcaaccagaccugcuuagacaggauagcugcuggcaccuuuaaugcaggagaauuuucccuccccacuuuugauucauugaacauuacugcugcaucuuuaaaugaugauggauuggauaaccauacuauacugcucuauuacucaacugcugcuucuaguuuggcuguaacauuaaugcuagcuauuuuuauuguuuauauggucuccagagacaacguuucaugcuccaucugucuauaa

SEQ ID NO: 60307 - RNA, 1758 nt, Artificial Sequence
  derived and/or modified CDS sequence (wt) from hemagglutinin__InfluenzaB__AIC73850
augaaggcaauaauuguacuacucaugguagcaacauccaaugcagaucgaaucugcacugggauaacaucgucaaacucaccacaugucgucaaaacugcuacucaaggggaggucaaugugaccgguguaauaccacugacaacaacacccaccaaaucucauuuugcaaaucucaaaggaacagaaaccagggggaaacuaugcccaaaaugccucaacugcacagaucuggauguagccuugggcagaccaaaaugcacagggaaaauacccucggcaagaguuucaauacuccaugaagucagaccuguuacaucugggugcuuuccuauaaugcacgauagaacaaaaauuagacagcugccuaaccuucuccgaggauacgaacauaucagguuaucaacucacaacguuaucaaugcagaagaugcaccaggaggacccuacaaaauuggaaccucagggucuugcccuaacguuaccaauggaaacggauucuucgcaacaauggcuugggccgucccaaaaaacgacaaaaacaaaacagcaacaaauccauuaacaauagaaguaccauacauuuguacagaaggagaagaccaaauuaccguuuggggguuccacucugacaacgagacccaaauggcaaagcucuauggggacucaaagccccagaaguucaccucaucugccaacggagugaccacacauuacguuucacagauugguggcuucccaaaucaaacagaagacggaggacuaccacaaagugguagaauuguuguugauuacauggugcaaaaaucuggaaaaacaggaacaauuaccuaucaaagagguauuuuauugccucaaaagguguggugcgcaaguggcaggagcaagguaauaaaaggauccuugccuuuaauuggagaagcagauugccuccacgaaaaauacgguggauuaaacaaaagcaagccuuacuacacaggggaacaugcaaaggccauaggaaauugcccaauaugggugaaaacacccuugaagcuggccaauggaaccaaauauagaccuccugcaaaacuauuaaaggaaagggguuucuucggagcuauugcugguuucuuagagggaggaugggaaggaaugauugcagguuggcacggauacacaucccauggggcacauggaguagcgguggcagcugaccuuaagagcacucaagaggccauaaacaagauaacaaaaaaucucaacucuuugagugagcuggaaguaaagaaucuucaaagacuaagcggugccauggaugaacuccacaacgaaauacuagaacuagaugagaaaguggaugaccucagagcugauacaauaagcucacaaauagaacucgcaguccugcuuuccaaugaaggaauaauaaacagugaagaugaacaucucuuggcgcuugaaagaaagcugaagaaaaugcugggccccucugcuguagagauagggaauggaugcuuugaaaccaaacacaagugcaaccagaccugucucgacagaauagcugcugguaccuuugaugcaggagaauuuucucuccccaccuuugauucacugaauauuacugcugcaucuuuaaaugacgauggauuggauaaucauacuauacugcuuuacuacucaacugcugccuccaguuuggcuguaacacugaugauagcuaucuuuguuguuuauauggucuccagagacaauguuucuugcuccaucugucuauaa

SEQ ID NO: 60308 - RNA, 1758 nt, Artificial Sequence
  derived and/or modified CDS sequence (wt) from hemagglutinin__InfluenzaB__AIC73851
augaaggcaauaauuguacuacucaugguaguaacauccaaugcagaucgaaucugcacugggauaacaucgucaaacucaccacaugucgucaaaacugcuacucaaggggaggucaaugugaccgguguaauaccacugacaacaacacccaccaaaucucauuuugcaaaucucaaaggaacagaaaccagggggaaacuaugcccaaaaugccucaacugcacagaucuggauguagccuugggcagaccaaaaugcacagggaaaauacccucggcaagaguuucaauacuccaugaagucagaccuguuacaucugggugcuuuccuauaaugcacgauagaacaaaaauuagacagcugccuaaccuucuccgaggauacgaacauaucagguuaucaacucacaacguuaucaaugcagaagaugcaccaggaggacccuacaaaauuggaaccucagggucuugcccuaacguuaccaauggaaacggauucuucgcaacaauggcuugggccgucccaaaaaacgacaaaaacaaaacagcaacaaauccauuaacaauagaaguaccauacauuuguacagaaggagaagaccaaauuaccguuuggggguuccacucugacaacgagacccaaauggcaaagcucuauggggacucaaagccccagaaguucaccucaucugccaacggagugaccacacauuacguuucacagauugguggcuucccaaaucaaacagaagacggaggacuaccacaaagugguagaauuguuguugauuacauggugcaaaaaucuggaaaaacaggaacaauuaccuaucaaagagguauuuuauugccucaaaagguguggugcgcaaguggcaggagcaagguaauaaaaggauccuugccuuuaauuggagaagcagauugccuccacgaaaaauacgguggauuaaacaaaagcaagccuuacuacacaggggaacaugcaaaggccauaggaaauugcccaauaugggugaaaacacccuugaagcuggccaauggaaccaaauauagaccuccugcaaaacuauuaaaggaaagggguuucuucggagcuauugcugguuucuuagagggaggaugggaaggaaugauugcagguuggcacggauacacaucccauggggcacauggaguagcgguggcagcugaccuuaagagcacucaagaggccauaaacaagauaacaaaaaaucucaacucuuugagugagcuggaaguaaagaaucuucaaagacuaagcggugccauggaugaacuccacaacgaaauacuagaacuagaugagaaaguggaugaccucagagcugauacaauaagcucacaaauagaacucgcaguccugcuuuccaaugaaggaauaauaaacagugaagaugaacaucucuuggcgcuugaaagaaagcugaagaaaaugcugggccccucugcuguagagauagggaauggaugcuuugaaaccaaacacaagugcaaccagaccugucucgacagaauagcugcugguaccuuugaugcaggagaauuuucucuccccaccuuugauucacugaauauuacugcugcaucuuuaaaugacgauggauuggauaaucauacuauacugcuuuacuacucaacugcugccuccaguuuggcuguaacacugaugauagcuaucuuuguuguuuauauggucuccagagacaauguuucuugcuccaucugucuauaa

SEQ ID NO: 60309 - RNA, 1755 nt, Artificial Sequence
  derived and/or modified CDS sequence (wt) from hemagglutinin__InfluenzaB__AIC73852
augaaggcaauaauuguacuacucaugguaguaacauccaaugcagaucgaaucugcacugggauaacaucuucaaacucaccucauguggucaaaacagcuacucaaggggaggucaaugugacuggcgugauaccacugacaacaacaccaacaaaaucuuauuuugcaaaucucaaaggaacaaggaccagagggaaacuaugcccggacugucucaacuguacagaucuggauguggccuugggcaggccaauguguguggggaccacaccuucugcuaaagcuucaauacuccaugaggucagaccuguuacauccgggugcuuuccuauaaugcacgacagaacaaaaaucaggcaacuacccaaucuucucagaggauaugaaaagaucagguuaucaacccaaaacguuaucgaugcagaaaaagcaccaggaggacccuacagacuuggaaccucaggaucuugcccuaacgcuaccaguaaaaucggauuuuuugcaacaauggcuugggcugucccaaaggacaacuacaaaaaugcaacgaacccacaaacaguggaaguaccauacauuuguacagaaggggaagaccaaauuacuguuuggggguuccauucggauaacaaaacccaaaugaagagccucuauggagacucaaauccucaaaaguucaccucaucugcuaauggaguaaccacacauuauguuucucagauuggcgacuucccagaucaaacagaagacggaggacuaccacaaagcggcagaauuguuguugauuacaugaugcaaaaaccugggaaaacaggaacaauugucuaucaaagggguguuuuguugccucaaaagguguggugcgcgaguggcaggagcaaaguaauaaaagggucauugccuuuaauuggugaagcagauugccuucaugaagaauacgguggauuaaacaaaagcaagccuuacuacacaggaaaacaugcaaaagccauaggaaauugcccaauauggguaaaaacaccuuugaagcuugccaauggaaccaaauauagaccuccugcaaaacuauugaaggaaagggguuucuucggagcuauugcugguuuccuagaaggaggaugggaaggaaugauugcagguuggcacggauacacaucucacggagcacauggaguggcaguggcggcagaccuuaagaguacacaagaagcuauaaauaagauaacaaaaaaucucaauucuuugagugaacuagaaguaaagaaccuucaaagacuaaguggugccauggaugaacuccacaacgaaauacucgagcuggaugaaaaaguggaugaucucagagcugacacuauaagcucacaaauagaacuugcagucuugcuuuccaacgaaggaauaauaaacagugaagacgagcaucuauuggcacuugagagaaaacuaaagaaaaugcugggucccucugcuguagacauaggaaacggaugcuucgaaaccaaacacaaaugcaaccagaccugcuuagacaggauagcugcuggcaccuuuaaugcaggagaauuuucucuccccacuuuugauucauugaacauuacugcugcaucuuuaaaugaugauggauuggacaaccauacuauacugcucuauuacucaacugcugcuucuaguuuggcuguaacauuaaugcuagcuauuuuuauuguuuauauggucuccagagacaacguuucgugcuccaucugucuauaa

SEQ ID NO: 60310 - RNA, 1755 nt, Artificial Sequence
  derived and/or modified CDS sequence (wt) from hemagglutinin__InfluenzaB__AIC73853
augaaggcaauaauuguacuacucaugguaguaacauccaaugcagaucgaaucugcacugggauaacaucuucaaacucaccucauguggucaaaacagcuacucaaggggaggucaaugugacuggcgugauaccacugacaacaacaccaacaaaaucuuauuuugcaaaucucaaaggaacaaggaccagagggaaacuaugcccggacugucucaacuguacagaucuggauguggccuugggcaggccaauguguguggggaccacaccuucugcuaaagcuucaauacuccaugaggucagaccuguuacauccgggugcuuuccuauaaugcacgacagaacaaaaaucaggcaacuacccaaucuucucagaggauaugaaaagaucagguuaucaacccaaaacguuaucgaugcagaaaaagcaccaggaggacccuacagacuuggaaccucaggaucuugcccuaacgcuaccaguaaaaucggauuuuuugcaacaauggcuugggcugucccaaaggacaacuacaaaaaugcaacgaacccacaaacaguggaaguaccauacauuuguacagaaggggaagaccaaauuacuguuuggggguuccauucggauaacaaaacccaaaugaagagccucuauggagacucaaauccucaaaaguucaccucaucugcuaauggaguaaccacacauuauguuucucagauuggcgacuucccagaucaaacagaagacggaggacuaccacaaagcggcagaauuguuguugauuacaugaugcaaaaaccugggaaaacaggaacaauugucuaucaaagggguguuuuguugccucaaaagguguggugcgcgaguggcaggagcaaaguaauaaaagggucauugccuuuaauuggugaagcagauugccuucaugaagaauacgguggauuaaacaaaagcaagccuuacuacacaggaaaacaugcaaaagccauaggaaauugcccaauauggguaaaaacaccuuugaagcuugccaauggaaccaaauauagaccuccugcaaaacuauugaaggaaagggguuucuucggagcuauugcugguuuccuagaaggaggaugggaaggaaugauugcagguuggcacggauacacaucucacggagcacauggaguggcaguggcggcagaccuuaagaguacacaagaagcuauaaauaagauaacaaaaaaucucaauucuuugagugaacuagaaguaaagaaccuucaaagacuaaguggugccauggaugaacuccacaacgaaauacucgagcuggaugaaaaaguggaugaucucagagcugacacuauaagcucacaaauagaacuugcagucuugcuuuccaacgaaggaauaauaaacagugaagacgagcaucuauuggcacuugagagaaaacuaaagaaaaugcugggucccucugcuguagauauaggaaacggaugcuucgaaaccaaacacaaaugcaaccagaccugcuuagacaggauagcugcuggcaccuuuaaugcaggagaauuuucucuccccacuuuugauucauugaacauuacugcugcaucuuuaaaugaugauggauuggauaaccauacuauacugcucuauuacucaacugcugcuucuaguuuggcuguaacauuaaugcuagcuauuuuuauuguuuauauggucuccagagacaacguuucaugcuccaucugucuauaa

SEQ ID NO: 60311 - RNA, 1758 nt, Artificial Sequence
  derived and/or modified CDS sequence (wt) from hemagglutinin__InfluenzaB__AIC73855
augaaggcaauaauuguacuacucaugguaguaacauccaaugcagaucgaaucugcacugggauaacaucgucaaacucaccacaugucgucaaaacugcuacucaaggggaggucaaugugaccgguguaauaccacugacaacaacacccaccaaaucucauuuugcaaaucucaaaggaacagaaaccagggggaaacuaugcccaaaaugccucaacugcacagaucuggacguagccuugggcagaccaaaaugcacggggaaaauacccucggcaagaguuucaauacuccaugaagucagaccuguuacaucugggugcuuuccuauaaugcacgauagaacaaaaauuagacagcugccuaaccuucuccgaggauacgaacauaucagguuaucaacucacaacguuaucaaugcagaaaaugcaccaggagggcccuacauaauuggaaccucagggucuugcccuaacguuaccaauggaaacggauucuucgcaacaauggcuugggccgucccaaaaaacgacaaaaacaaaacagcaacaaauccauuaacaauagaaguaccauacauuuguacagaaggagaagaccaaauuaccguuuggggguuccacucugacaacgagacccaaauggcaaagcucuauggggacucaaauccccagaaguucaccucaucugccaacggagugaccacacauuacguuucacagauugguggcuucccaaaucaaacagaagacggaggacuaccacaaagugguagaauuguuguugauuacauggugcaaaaaucugggaaaacaggaacaauuacuuaucaaagagguauuuuauugccucaaaagguguggugcgcaaguggcaggagcaagguaauaaaaggauccuugccuuuaauuggagaagcagauugccuccacgaaaaauacgguggguuaaacaaaagcaagccuuacuacacaggggaacaugcaaaggccauaggaaauugcccaauaugggugaaaacacccuugaagcuggccaauggaaccaaauauagaccuccugcaaaacuauuaaaggaaagggguuucuucggagcuauugcugguuucuuagaaggagggugggaaggaaugauugcagguuggcacggauacacaucccauggggcacauggaguagcgguggcagcugaccuuaagagcacucaagaggccauaaacaagauaacaaaaaaucucaacucuuugagugagcuggaaguaaagaaucuucaaagacuaagcggugccauggaugaacuccacaacgaaauacuagaacuagaugagaaaguggaugaucucagagcugauacaauaagcucacaaauagaacucgcaguccugcuuuccaaugaaggaauaauaaacagugaagaugaacaucucuuggcgcuugaaagaaagcugaagaaaaugcugggccccucugcuguagagauagggaauggaugcuuugaaaccaaacacaagugcaaccagaccugucucgacagaauagcugcugguaccuuugaugcaggagaauuuucucuccccacuuuugauucacugaauauuacugcugcaucuuuaaaugacgauggauuggauaaucauacuauacugcuuuacuacucaacugcugccuccaguuuggcuguaacacugaugauagcuaucuuuguuguuuauauggucuccagagacaauguuucuugcuccaucugucuauaa

SEQ ID NO: 60312 - RNA, 1758 nt, Artificial Sequence
  derived and/or modified CDS sequence (wt) from hemagglutinin__InfluenzaB__AIC73856
augaaggcaauaauuguacuacucaugguaguaacauccaaugcagaucgaaucugcacugggauaacaucgucaaacucaccacaugucgucaaaacugcuacucaaggggaggucaaugugaccgguguaauaccacugacaacaacacccaccaaaucucauuuugcaaaucucaaaggaacagaaaccagggggaaacuaugcccaaaaugccucaacugcacagaucuggacguagccuuaggcagaccaaaaugcacggggaaaauacccucggcaagaguuucaauacuccaugaagucagaccuguuacaucugggugcuuuccuauaaugcacgauagaacaaaaauuagacagcugccuaaccuucuccgaggauacgaacauaucagguuaucaacucacaacguuaucaaugcagaaaaugcaccaggaggacccuacaagauuggaaccucagggucuugcccuaacguuaccaauggaaacggauucuucgcaacaauggcuugggccgucccaaaaaacgacaaaaacaaaacagcaacaaauccauuaacaauagaaguaccauacauuuguacagaaggagaagaccaaauuaccguuuggggguuccacucugacaacgagacccaaauggcaaagcucuauggggacucaaauccccagaaguucaccucaucugccaacggagugaccacacauuacguuucacagauugguggcuucccaaaucaaacagaagacggaggacuaccacaaagugguagaauuguuguugauuacauggugcaaaaaucugggaaaacaggaacaauuaccuaucaaagagguauuuuauugccucaaaagguguggugcgcaaguggcaggagcaagguaauaaaaggauccuugccuuuaauuggagaagcagauugccuccacgaaaaauacgguggguuaaacaaaagcaagccuuacuacacaggggaacaugcaaaggccauaggaaauugcccaauaugggugaaaacacccuugaagcuggccaauggaaccaaauauagaccuccugcaaaacuauuaaaggaaagggguuucuucggagcuauugcugguuucuuagaaggaggaugggaaggaaugauugcagguuggcacggauacacaucccauggggcacauggaguagcgguggcagcugaccuuaagagcacucaagaggccauaaacaagauaacaaaaaaucucaacucuuugagugagcuggaaguaaagaaucuucaaagacuaagcggugccauggaugaacuccacaacgaaauacuagaacuagaugagaaaguggaugaucucagagcugauacaauaagcucacaaauagaacucgcaguccugcuuuccaaugaaggaauaauaaacagugaagaugaacaucucuuggcgcuugaaagaaagcugaagaaaaugcugggccccucugcuguagagauagggaauggaugcuuugaaaccaaacacaagugcaaccagaccugucucgacagaauagcugcugguaccuuugaugcaggagaauuuucucuccccacuuuugauucacugaauauuacugcugcaucuuuaaaugacgauggauuggauaaucauacuauacugcuuuacuacucaacugcugccuccaguuuggcuguaacacugaugauagcuaucuuuguuguuuauauggucuccagagacaauguuucuugcuccaucugucuauaa

SEQ ID NO: 60313 - RNA, 1758 nt, Artificial Sequence; identical to SEQ ID NO: 60312
  derived and/or modified CDS sequence (wt) from hemagglutinin__InfluenzaB__AIC73857

SEQ ID NO: 60314 - RNA, 1758 nt, Artificial Sequence
  derived and/or modified CDS sequence (wt) from hemagglutinin__InfluenzaB__AIC73859
augaaggcaauaauuguacuacucaugguaguaacauccaaugcagaucgaaucugcacugggauaacaucgucaaacucaccacaugucgucaaaacugcuacucaaggggaggucaaugugaccgguguaauaccacugacaacaacacccaccaaaucucauuuugcaaaucucaaaggaacagaaaccagggggaaacuaugcccaaaaugccucaacugcacagaucuggacguagccuuaggcagaccaaaaugcacggggaaaauacccucggcaagaguuucaauacuccaugaagucagaccuguuacaucugggugcuuuccuauaaugcacgauagaacaaaaauuagacagcugccuaaccuucuccgaggauacgaacauaucagguuaucaacucacaacguuaucaaugcagaaaaugcaccaggaggacccuacaagauuggaaccucagggucuugcccuaacguuaccaauggaaacggauucuucgcaacaauggcuugggccgucccaaaaaacgacaaaaacaaaacagcaacaaauccauuaacaauagaaguaccauacauuuguacagaaggagaagaccaaauuaccguuuggggguuccacucugacaacgagacccaaauggcaaagcucuauggggacucaaauccccagaaguucaccucaucugccaacggagugaccacacauuacguuucacagauugguggcuucccaaaucaaacagaagacggaggacuaccacaaagugguagaauuguuguugauuacauggugcaaaaaucugggaaaacaggaacaauuaccuaucaaagagguauuuuauugccucaaaagguguggugcgcaaguggcaggagcaagguaauaaaaggauccuugccuuuaauuggagaagcagauugccuccacgaaaaauacgguggguuaaacaaaagcaagccuuacuacacaggggaacaugcaaaggccauaggaaauugcccaauaugggugaaaacacccuugaagcuggccaauggaaccaaauauagaccuccugcaaaacuauuaaaggaaagggguuucuucggagcuauugcugguuucuuagaaggaggaugggaaggaaugauugcagguuggcacggguacacaucccauggggcacauggaguagcgguggcagcugaccuuaagagcacucaagaggccauaaacaagauaacaaaaaaucucaacucuuugagugagcuggaaguaaagaaucuucaaagacuaagcggugccauggaugaacuccacaacgaaauacuagaacuagaugagaaaguggaugaucucagagcugauacaauaagcucacaaauagaacucgcaguccugcuuuccaaugaaggaauaauaaacagugaagaugaacaucucuuggcgcuugaaagaaagcugaagaaaaugcugggccccucugcuguagagauagggaauggaugcuuugaaaccaaacacaagugcaaccagaccugucucgacagaauagcugcugguaccuuugaugcaggagaauuuucucuccccacuuuugauucacugaauauuacugcugcaucuuuaaaugacgauggauuggauaaucauacuauacugcuuuacuacucaacugcugccuccaguuuggcuguaacacugaugauagcuaucuuuguuguuuauauggucuccagagacaauguuucuugcuccaucugucuauaa

SEQ ID NO: 60315 - RNA, 1758 nt, Artificial Sequence
  derived and/or modified CDS sequence (wt) from hemagglutinin__InfluenzaB__AIC73860
augaaggcaauaauuguacuacucaugguaguaacauccaaugcagaucgaaucugcacugggauaacaucgucaaacucaccacaugucgucaaaacugcuacucaaggggaggucaaugugaccgguguaauaccacugacaacaacacccaccaaaucucauuuugcaaaucucaaaggaacagaaaccagggggaaacuaugcccaaaaugccucaacugcacagaucuggacguagccuuaggcagaccaaaaugcacggggaaaauacccucggcaagaguuucaauacuccaugaagucagaccuguuacaucugggugcuuuccuauaaugcacgauagaacaaaaauuagacagcugccuaaccuucuccgaggauacgaacauaucagguuaucaacucacaacguuaucaaugcagaaaaugcaccaggaggacccuacaagauuggaaccucagggucuugcccuaacguuaccaauggaaacggauucuucgcaacaauggcuugggccgucccaaaaaacgacaaaaacaaaacagcaacaaauccauuaacaauagaaguaccauacauuuguacagaaggagaagaccaaauuaccguuuggggguuccacucugacaacgagacccaaauggcaaagcucuauggggacucaaauccccagaaguucaccucaucugccaacggagugaccacacauuacguuucacagauugguggcuucccaaaucaaacagaagacggaggacuaccacaaagugguagaauuguuguugauuacauggugcaaaaaucugggaaaacaggaacaauuaccuaucaaagagguauuuuauugccucaaaagguguggugcgcaaguggcaggagcaagguaauaaaaggauccuugccuuuaauuggagaagcagauugccuccacgaaaaauacgguggguuaaacaaaagcaagccuuacuacacaggggaacaugcaaaggccauaggaaauugcccaauaugggugaaaacacccuugaagcuggccaauggaaccaaauauagaccuccugcaaaacuauuaaaggaaagggguuucuucggagcuauugcugguuucuuagaaggaggaugggaaggaaugauugcagguuggcacggauacacaucccauggggcacauggaguagcgguggcagcugaccuuaagagcacucaagaggccauaaacaagauaacaaaaaaucucaacucuuugagugagcuggaaguaaagaaucuucaaagacuaagcggugccauggaugaacuccacaacgaaauacuagaacuagaugagaaaguggaugaucucagagcugauacaaugagcucacaaauagaacucgcaguccugcuuuccaaugaaggaauaauaaacagugaagaugaacaucucuuggcgcuugaaagaaagcugaagaaaaugcugggccccucugcuguagagauagggaauggaugcuuugaaaccaaacacaagugcaaccagaccugucucgacagaauagcugcugguaccuuugaugcaggagaauuuucucuccccacuuuugauucacugaauauuacugcugcaucuuuaaaugacgauggauuggauaaucauacuauacugcuuuacuacucaacugcugccuccaguuuggcuguaacacugaugauagcuaucuuuguuguuuauauggucuccagagacaauguuucuugcuccaucugucuauaa

SEQ ID NO: 60316 - RNA, 1758 nt, Artificial Sequence
  derived and/or modified CDS sequence (wt) from hemagglutinin__InfluenzaB__AIC73861
augaaggcaauaauuguacuacucaugguaguaacauccaaugcagaucgaaucugcacugggauaacaucgucaaacucaccacaugucgucaaaacugcuacucaaggggaggucaaugugaccgguguaauaccacugacaacaacacccaccaaaucucauuuugcaaaucucaaaggaacagaaaccagggggaaacuaugcccaaaaugccucaacugcacagaucuggacguagccuugggcagaccaaaaugcacggggaaaauacccucggcaagaguuucaauacuccaugaagucagaccuguuacaucugggugcuuuccuauaaugcacgauagaacaaaaauuagacagcugccuaaccuucuccgaggauacgaacauaucagguuaucaacucacaacguuaucaauacagaaaaugcaccaggaggacccuacaagauuggaaccucagggucuugcccuaacguuaccaauggaaacggauucuucgcaacaauggcuugggccgucccaaaaaacgacaaaaacaaaacagcaacaaauccauuaacaauagaaguaccauacauuuguacagaaggagaagaccaaauuaccguuuggggguuccacucugacaacgagacccaaauggcaaagcucuauggggacucaaauccccagaaguucaccucaucugccaacggagugaccauacauuacguuucacagauugguggcuucccaaaucaaacagaagacggaggacuaccacaaagugguagaauuguuguugauuacauggugcaaaaaucugggaaaacaggaacaauuaccuaucaaagagguauuuuauugccucaaaagguguggugcgcaaguggcaggagcaagguaauaaaaggauccuugccuuuaauuggagaagcagauugccuccacgaaaaauacgguggguuaaacaaaagcaagccuuacuacacaggggaacaugcaaaggccauaggaaauugcccaauaugggugaaaacacccuugaagcuggccaauggaaccaaauauagaccuccugcaaaacuauuaaaggaaagggguuucuucggagcuauugcugguuucuuagaaggaggaugggaaggaaugauugcagguuggcacggauacacaucccauggggcacauggaguagcgguggcagcugaccuuaagagcacucaagaggccauaaacaagauaacaaaaaaucucaacucuuugagugagcuggaaguaaagaaucuucaaagacuaagcggugccauggaugaacuccacaacgaaauacuagaacuagaugagaaaguggaugaucucagagcugauacaauaagcucacaaauagaacucgcaguccugcuuuccaaugaaggaauaauaaacagugaagaugaacaucucuuggcgcuugaaagaaagcugaagaaaaugcugggccccucugcuguagagauagggaauggaugcuuugaaaccaaacacaagugcaaccagaccugucucgacagaauagcugcugguaccuuugaugcaggagaauuuucucuccccacuuuugauucacugaauauuacugcugcaucuuuaaaugacgauggauuggauaaucauacuauacugcuuuacuacucaacugcugccuccaguuuggcuguaacacugaugauagcuaucuuuguuguuuauauggucuccagagacaauguuucuugcuccaucugucuauaa

SEQ ID NO: 60317 - RNA, 1758 nt, Artificial Sequence; identical to SEQ ID NO: 60315
  derived and/or modified CDS sequence (wt) from hemagglutinin__InfluenzaB__AIC73862

SEQ ID NO: 60318 - RNA, 1758 nt, Artificial Sequence; identical to SEQ ID NO: 60315
  derived and/or modified CDS sequence (wt) from hemagglutinin__InfluenzaB__AIC73863

SEQ ID NO: 60319 - RNA, 1758 nt, Artificial Sequence; identical to SEQ ID NO: 60315
  derived and/or modified CDS sequence (wt) from hemagglutinin__InfluenzaB__AIC73864

SEQ ID NO: 60320 - RNA, 1755 nt, Artificial Sequence
  derived and/or modified CDS sequence (wt) from hemagglutinin__InfluenzaB__AIC73865
augaaggcaauaauuguacuacucaugguaguaacauccaaugcagaucgaaucugcacugggauaacaucuucaaacucaccucauguggucaaaacagcuacucaaggggaggucaaugugacuggugugauaccacuaacaacaacaccaacaaaaucuuauuuugcaaaucucaaaggaacaaagaccagagggaaacuaugcccagacugucucaacuguacagaucuggauguggccuugggcaggccaaugugugugggaacuacaccuucugcgaaagcuucaauacuucaugaagucagaccuguuacauccgggugcuucccuauaaugcacgacagaacaaaaaucaggcaacuagccaaucuucucagaggauaugaaaauaucagguuaucaacccaaaacguuaucgaugcagaaaaagcaccaggaggacccuacagacuuggaaccucaggaucuugcccuaacgcuaccaguaaaagcggauuuuucgcaacaauggcuugggcugucccaaaggacaacaacaaaaaugcaacgaacccauuaacaguagagguaccauacauuugugcagaaggagaagaccaaauuacuguuuggggguuccauucggauaacaaaacccaaaugaagaaccucuauggagacucaaauccccaaaaguucaccucaucugcuaauggaguaaccacacauuauguuucucagauuggcggcuucccagaucaaagagaagacggaggacuaccacaaagcggcagaauugucguugauuacaugaugcaaaaaccugggaaaacaggaacaauugucuaucaaagagguguuuuguugccucaaaagguguggugcgcgaguggcaggagcaaaguaauaaaaggguccuugccuuuaauuggugaagcagauugccuucaugaaaaauacgguggauuaaacaaaagcaagccuuacuacacaggagaacaugcaaaagccauaggaaauugcccaauaugggugaaaacaccuuugaagcuugccaauggaaccaaauauagaccuccugcaaaacuauuaaaggaaagggguuucuucggagcuauugcugguuuccuagaaggaggaugggaaggaaugauugcagguuggcacggauauacaucucacggagcacauggaguggcaguugcugcagaccuuaagagcacacaagaagcuauaaacaagauaacaaaaaaucucaacucuuugagugagcuagaaguaaagaaucuucaaaggcuaaguggugccauggaugaacuccacaacgaaauacucgagcuggaugagaaaguggaugaucucagagcugacacuauaaguucacaaauagaacuugcagucuugcuuuccaacgaaggaauaauaaacagugaagaugagcaucuauuggcacuugagagaaaacuaaagaaaaugcugggucccucugcuguagacauagggaauggaugcuucgaaaccaaacacaaaugcaaccagaccugcuuagacaggauagcugcuggcaccuuuaaugcaggagaauuuucucuccccacuuuugauucauugaacauuacugcugcaucuuuaaaugaugauggauuggauaaccauacuauacugcucuauuacucaacugcugcuucuaguuuggcuguaacauugaugcuagcuauuuuuauuguuuauauggucuccagagacaacguuucaugcuccaucugucuauaa

SEQ ID NO: 60321 - RNA, 1758 nt, Artificial Sequence
  derived and/or modified CDS sequence (wt) from hemagglutinin__InfluenzaB__AIC73867
augaaggcaauaauuguacuacucaugguaguaacauccaaugcagaucgaaucugcacugggauaacaucgucaaacucaccacaugucgucaaaacugcuacucaaggggaggucaaugugaccgguguaauaccacugacaacaacacccaccaaaucucauuuugcaaaucucaaaggaacagaaaccagggggaaacuaugcccaaaaugccucaacugcacagaucuggacguagccuugggcagaccaaaaugcacggggaaaauacccucggcaagaguuucaauacuccaugaagucagaccuguuacaucugggugcuuuccuauaaugcacgauagaacaaaaauuagacagcugccuaaccuucuccgaggauacgaacauaucagguuaucaacucacaacguuaucgaugcagaaaaugcaccaggaggacccuacaaaauuggaaccucagggucuugcccuaacguuaccaauggaaacggauucuucgcaacaauggcuugggccgucccaaaaaacgacaaaaacaaaacagcaacaaauccauuaacaauagaaguaccauacauuuguacagaaggagaagaccaaauuaccguuuggggguuccacucugacaacgagacccaaauggcaaagcucuauggggacucaaauccccagaaguucaccucaucugccaacggagugaccacacauuacguuucacagauugguggcuucccaaaucaaacagaagacggaggacuaccacaaagugguagaauuguuguugauuacaugguacaaaaaucugggaaaacaggaacaauuaccuaucaaagagguauuuuauugccucaaaagguguggugcgcaaguggcaggagcaagguaauaaaaggauccuugccuuuaauuggagaagcagauugccuccacgaaaaauacgguggguuaaacaaaagcaagccuuacuacacaggggaacaugcaaaggccauaggaaauugcccaauaugggugaaaacacccuugaagcuggccaauggaaccaaauauagaccuccugcaaaacuauuaaaggaaagggguuucuucggagcuauugcugguuucuuagaaggaggaugggaaggaaugauugcagguuggcacggauacacaucccauggggcacauggaguagcgguggcagcugaccuuaagagcacucaagaggccauaaacaagauaacaaaaaaucucaacucuuugagugagcuggaaguaaagaaucuucaaagacuaagcggugccauggaugaacuccacaacgaaauacuagaacuagaugagaaaguggaugaucucagagcugauacaauaagcucacaaauagaacucgcaguccugcuuuccaaugaaggaauaauaaacagugaagaugaacaucucuuggcgcuugaaagaaagcugaagaaaaugcugggccccucugcuguagagauagggaauggaugcuuugaaaccaaacacaagugcaaccagaccugucuugacagaauagcugcugguaccuuugaugcaggagaauuuucucuccccacuuuugauucacugaauauuacugcugcaucuuugaaugacgauggauuggauaaucauacuauacugcuuuacuacucaacugcugccuccaguuuggcuguaacacugaugauagcuaucuuuguuguuuauauggucuccagagacaauguuucuugcuccaucugucuauaa

SEQ ID NO: 60322 - RNA, 1758 nt, Artificial Sequence
  derived and/or modified CDS sequence (wt) from hemagglutinin__InfluenzaB__AIC73868
augaaggcaauaauuguacuacucaugguaguaacauccaaugcagaucgaaucugcacugggauaacaucgucaaacucaccacaugucgucaaaacugcuacucaaggggaggucaaugugaccgguguaauaccacugacaacaacacccaccaaaucucauuuugcaaaucucaaaggaacagaaaccagggggaaacuaugcccaaaaugccucaacugcacagaucuggauguagccuugggcagaccaaaaugcacagggaaaauacccucggcaagaguuucaauacuccaugaagucagaccuguuacaucugggugcuuuccuauaaugcacgauagaacaaaaauuagacagcugccuaaccuucuccgaggauacgaacauaucagguuaucaacucacaacguuaucaaugcagaagaugcaccaggaggacccuacaaaauuggaaccucagggucuugcccuaacguuaccaauggaaacggauucuucgcaacaauggcuugggccgucccaaaaaacgacaaaaacaaaacagcaacaaauccauuaacaauagaaguaccauacauuuguacagaaggagaagaccaaauuaccguuuggggguuccacucugacaacgagacccaaauggcaaagcucuauggggacucaaagccccagaaguucaccucaucugccaacggagugaccacacauuacguuucacagauugguggcuucccaaaucaaacagaagacggaggacuaccacaaagugguagaauuguuguugauuacauggugcaaaaaucuggaaaaacaggaacaauuaccuaucaaagagguauuuuauugccucaaaagguguggugcgcaaguggcaggagcaagguaauaaaaggauccuugccuuuaauuggagaagcagauugccuccacgaaaaauacgguggauuaaacaaaagcaagccuuacuacacaggggaacaugcaaaggccauaggaaauugcccaauaugggugaaaacacccuugaagcuggccaauggaaccaaauauagaccuccugcaaaacuauuaaaggaaagggguuucuucggagcuauugcugguuucuuagagggaggaugggaaggaaugauugcagguuggcacggauacacaucccauggggcacauggaguagcgguggcagcugaccuuaagagcacucaagaggccauaaacaagauaacaaaaaaucucaacucuuugagugagcuggaaguaaagaaucuucaaagacuaagcggugccauggaugaacuccacaacgaaauacuagaacuagaugagaaaguggaugaucucagagcugauacaauaagcucacaaauagaacucgcaguccugcuuuccaaugaaggaauaauaaacagugaagaugaacaucucuuggcgcuugaaagaaagcugaagaaaaugcugggccccucugcuguagagauagggaauggaugcuuugaaaccaaacacaagugcaaccagaccugucucgacagaauagcugcugguaccuuugaugcaggagaauuuucucuccccaccuuugauucacugaauauuacugcugcaucuuuaaaugacgauggauuggauaaucauacuauacugcuuuacuacucaacugcugccuccaguuuggcuguaacacugaugauagcuaucuuuguuguuuauauggucuccagagacaauguuucuugcuccaucugucuauaa

SEQ ID NO: 60323 - RNA, 1758 nt, Artificial Sequence; identical to SEQ ID NO: 60315
  derived and/or modified CDS sequence (wt) from hemagglutinin__InfluenzaB__AIC73869

SEQ ID NO: 60324 - RNA, 1758 nt, Artificial Sequence; identical to SEQ ID NO: 60315
  derived and/or modified CDS sequence (wt) from hemagglutinin__InfluenzaB__AIC73870

SEQ ID NO: 60325 - RNA, 1758 nt, Artificial Sequence
  derived and/or modified CDS sequence (wt) from hemagglutinin__InfluenzaB__AIC73871
augaaggcaauaauuguacuacucaugguaguaacauccaaugcagaucgaaucugcacugggauaacaucgucaaacucaccacaugucgucaaaacugcuacucaaggggaggucaaugugaccgguguaauaccacugacaacaacacccaccaaaucucauuuugcaaaucucaaaggaacagaaaccagggggaaacuaugcccaaaaugccucaacugcacagaucuggacguagcuuugggcagaccaaaaugcacggggaaaauacccucggcaagaguuucaauacuccaugaagucagaccuguuacaucugggugcuuuccuauaaugcacgauagaacaaaaauuagacagcugccuaaccuucuccgaggauacgaacauaucagguuaucaacucacaacguuaucaaugcagaaaaugcaccaggaggacccuacaaaauuggaaccucagggucuugcccuaacguuaccaauggaaacggauucuucgcaacaauggcuugggccgucccaaaaaacgacaaaaacaaaacagcaacaaauccauuaacaauagaaguaccauacauuuguacagaaggagaagaccaaauuaccguuuggggguuccacucugacaacgagacccaaauggcaaagcucuauggggacucaaauccccagaaguucaccucaucugccaacggagugaccacacauuacguuucacagauugguggcuucccaaaucaaacagaagacggaggacuaccacaaagugguagaauuguuguugauuacauggugcaaaaaucugggaaaacaggaacaauuaccuaucaaagagguauuuuauugccucaaaagguguggugcgcaaguggcaggagcaagguaauaaaaggauccuugccuuuaauuggagaagcagauugccuccacgaaaaauacgguggguuaaacaaaagcaagccuuacuacacaggagaacaugcaaaggccauaggaaauugcccaauaugggugaaaacacccuugaagcuggccaauggaaccaaauauagaccuccugcaaaacuauuaaaggaaagggguuucuucggagcuauugcugguuucuuagaaggagggugggaaggaaugauugcagguuggcacggauacacaucccauggggcacauggaguagcgguggcagcugaccuuaagagcacucaagaggccauaaacaagauaacaaaaaaucucaacucuuugagugagcuggaaguaaagaaucuucaaagacuaagcggugccauggaugaacuccacaacgaaauacuagaacuagaugagaaaguggaugaucucagagcugauacaauaagcucacaaauagaacucgcaguccugcuuuccaaugaaggaauaauaaacagugaagaugaacaucucuuggcgcuugaaagaaagcugaagaaaaugcugggccccucugcuguagagauagggaauggaugcuuugaaaccaaacacaagugcaaccagaccugucucgacagaauagcugcugguaccuuugaugcaggagaauuuucucuccccacuuuugauucacugaauauuacugcugcaucuuuaaaugacgauggauuggauaaucauacuauacugcuuuacuacucaacugcugccuccaguuuggcuguaacacugaugauagcuaucuuuguuguuuacauggucuccagagacaauguuucuugcuccaucugucuauaa

SEQ ID NO: 60326 - RNA, 1755 nt, Artificial Sequence
  derived and/or modified CDS sequence (wt) from hemagglutinin__InfluenzaB__AIC73872
augaaggcaauaauuguacuacucaugguaguaacauccaaugcagaucgaaucugcacugggauaacaucuucaaacucaccucauguggucaaaacagcuacucaaggggaggucaaugugacuggcgugauaccacugacaacaacaccaacaaaaucuuauuuugcaaaucucaaaggaacaaggaccagagggaaacuaugcccggacugucucaacuguacagaucuggauguggccuugggcaggccaauguguguggggaccacaccuucugcuaaagcuucaauacuccaugaggucagaccuguuacauccgggugcuuuccuauaaugcacgacagaacaaaaaucaggcaacuacccaaucuucucagaggauaugaaaagaucagguuaucaacccaaaacguuaucgaugcagaaaaagcaccaggaggacccuacagacuuggaaccucaggaucuugcccuaacgcuaccaguaaaaucggauuuuuugcaacaauggcuugggcugucccaaaggacaacuacaaaaaugcaacgaacccacaaacaguggaaguaccauacauuuguacagaaggggaagaccaaauuacuguuuggggguuccauucggauaacaaaacccaaaugaagagccucuauggagacucaaauccucaaaaguucaccucaucugcuaauggaguaaccacacauuauguuucucagauuggcgacuucccagaucaaacagaagacggaggacuaccacaaagcggcagaauuguuguugauuacaugaugcaaaaaccugggaaaacaggaacaauugucuaucaaagggguguuuuguugccucaaaagguguggugcgcgaguggcaggagcaaaguaauaaaagggucauugccuuuaauuggugaagcagauugccuucaugaagaauacgguggauuaaacaaaaguaagccuuacuacacaggaaaacaugcaaaagccauaggaaauugcccaauauggguaaaaacaccuuugaagcuugccaauggaaccaaauauagaccuccugcaaaacuauugaaggaaagggguuucuucggagcuauugcugguuuccuagaaggaggaugggaaggaaugauugcagguuggcacggauacacaucucacggagcacauggaguggcaguggcggcagaccuuaagaguacacaagaagcuauaaauaagauaacaaaaaaucucaauucuuugagugaacuagaaguaaagaaccuucaaagacuaaguggugccauggaugaacuccacaacgaaauacucgagcuggaugaaaaaguggaugaucucagagcugacacuauaagcucacaaauagaacuugcagucuugcuuuccaacgaaggaauaauaaacagugaagacgagcaucuauuggcacuugagagaaaacuaaagaaaaugcugggucccucugcuguagacauaggaaacggaugcuucgaaaccaaacacaaaugcaaccagaccugcuuagacaggauagcugcuggcaccuuuaaugcaggagaauuuucucuccccacuuuugauucauugaacauuacugcugcaucuuuaaaugaugauggauuggauaaccauacuauacugcucuauuacucaacugcugcuucuaguuuggcuguaacauuaaugcuagcuauuuuuauuguuuauauggucuccagagacaacguuucaugcuccaucugucuauaa

SEQ ID NO: 60327 - RNA, 1755 nt, Artificial Sequence
  derived and/or modified CDS sequence (wt) from hemagglutinin__InfluenzaB__AIC73873
augaaggcaauaauuguacuacucaugguaguaacauccaaugcagaucgaaucugcacugggauaacaucuucaaacucaccucauguggucaaaacagcuacucaaggggaggucaaugugacuggcgugauaccacugacaacaacaccaacaaaaucuuauuuugcaaaucucaaaggaacaaggaccagagggaaacuaugcccggacugucucaacuguacagaucuggauguggccuugggcaggccaauguguguggggaccacaccuucugcuaaagcuucaauacuccaugaggucagaccuguuacauccgggugcuuuccuauaaugcacgacagaacaaaaaucaggcaacuacccaaucuucucagaggauaugaaaagaucagguuaucaacccaaaacguuaucgaugcagaaaaagcaccaggaggacccuacagacuuggaaccucaggaucuugcccuaacgcuaccaguaaaauuggauuuuuugcaacaauggcuugggcugucccaaaggacaacuacaaaaaugcaacgaacccacuaacaguggaaguaccauacauuuguacagaaggggaagaccaaauuacuguuuggggguuccauucggauaacaaaacccaaaugaagagccucuauggagacucaaauccucaaaaguucaccucaucugcuaauggaguaaccacacauuauguuucucagauuggcgacuucccagaucaaacagaagacggaggacuaccacaaagcggcagaauuguuguugauuacaugaugcaaaaaccugggaaaacaggaacaauugucuaucaaagggguguuuuguugccucaaaagguguggugcgcgaguggcaggagcaaaguaauaaaagggucauugccuuuaauuggugaagcagauugccuucaugaagaauacgguggauuaaacaaaagcaagccuuacuacacaggaaaacaugcaaaagccauaggaaauugcccaauauggguaaaaacaccuuugaagcuugccaauggaaccaaauauagaccuccugcaaaacuauugaaggaaagggguuucuucggagcuauugcugguuuccuagaaggaggaugggaaggaaugauugcagguuggcacggauacacaucucacggagcacauggaguggcaguggcggcagaccuuaagaguacacaagaagcuauaaauaagauaacaaaaaaucucaauucuuugagugaacuagaaguaaagaaccuucaaagacuaaguggugccauggaugaacuccacaacgaaauacucgagcuggaugaaaaaguggaugaucucagagcugacacuauaagcucacaaauagaacuugcagucuugcuuuccaacgaaggaauaauaaacagugaagacgagcaucuauuggcacuugagagaaaacuaaagaaaaugcugggucccucugcuguagacauaggaaacggaugcuucgaaaccaaacacaaaugcaaccagaccugcuuagacaggauagcugcuggcaccuuuaaugcaggagaauuuucucuccccacuuuugauucauugaacauuacugcugcaucuuuaaaugaugauggauuggauaaccauacuauacugcucuauuacucaacugcugcuucuaguuuggcuguaacauuaaugcuagcuauuuuuauuguuuauauggucuccagagacaacguuucaugcuccaucugucuauaa

SEQ ID NO: 60328 - RNA, 1755 nt, Artificial Sequence; identical to SEQ ID NO: 60326
  derived and/or modified CDS sequence (wt) from hemagglutinin__InfluenzaB__AIC73874

SEQ ID NO: 60329 - RNA, 1755 nt, Artificial Sequence; identical to SEQ ID NO: 60320
  derived and/or modified CDS sequence (wt) from hemagglutinin__InfluenzaB__AIC73875

SEQ ID NO: 60330 - RNA, 1755 nt, Artificial Sequence
  derived and/or modified CDS sequence (wt) from hemagglutinin__InfluenzaB__AIC73876
augaaggcaauaauuguacuacucaugguaguaacauccaaugcagaucgaaucugcacugggauaacaucuucaaacucaccucaugugguuaaaacagcuacucaaggggaggucaaugugacuggugugauaccacuaacaacaacaccaacaaaaucuuauuuugcaaaucucaaaggaacaaagaccagagggaaacuaugcccagacugucucaacuguacagaucuggauguggccuugggcaggccaaugugugugggaacuacaccuucugcgaaagcuucaauacuucaugaagucagaccuguuacauccgggugcuucccuauaaugcacgacagaacaaaaaucaggcaacuagccaaucuucucagaggauaugaaaauaucagguuaucaacccaaaacguuaucgaugcagaaaaagcaccaggaggacccuacagacuuggaaccucaggaucuugcccuaacgcuaccaguaaaagcggauuuuucgcaacaauggcuugggcugucccaaaggacaacaacaaaaaugcaacgaacccauuaacaguagagguaccauacauuugugcagaaggagaagaccaaauuacuguuuggggguuccauucggauaacaaaacccaaaugaagaaccucuauggagacucaaauccccaaaaguucaccucaucugcuaauggaguaaccacacauuauguuucucagauuggcggcuucccagaucaaagagaagacggaggacuaccacaaagcggcagaauugucguugauuacaugaugcaaaaaccugggaaaacaggaacaauugucuaucaaagagguguuuuguugccucaaaagguguggugcgcgaguggcaggagcaaaguaauaaaaggguccuugccuuuaauuggugaagcagauugccuucaugaaaaauacgguggauuaaacaaaagcaagccuuacuacacaggagaacaugcaaaagccauaggaaauugcccaauaugggugaaaacaccuuugaagcuugccaauggaaccaaauauagaccuccugcaaaacuauuaaaggaaagggguuucuucggagcuauugcugguuuccuagaaggaggaugggaaggaaugauugcagguuggcacggauauacaucucacggagcacauggaguggcaguugcugcagaccuuaagagcacacaagaagcuauaaacaagauaacaaaaaaucucaacucuuugagugagcuagaaguaaagaaucuucaaaggcuaaguggugccauggaugaacuccacaacgaaauacucgagcuggaugagaaaguggaugaucucagagcugacacuauaaguucacaaauagaacuugcagucuugcuuuccaacgaaggaauaauaaacagugaagaugagcaucuauuggcacuugagagaaaacuaaagaaaaugcugggucccucugcuguagacauagggaauggauguuucgaaaccaaacacaaaugcaaccagaccugcuuaaacaggauagcugcuggcaccuuuaaugcaggagaauuuucucuccccacuuuugauucauugaacauuacugcugcaucuuuaaaugaugauggauuggauaaccauacuauacugcucuauuacucaacugcugcuucuaguuuggcuguaacauugaugcuagcuauuuuuauuguuuauauggucuccagagacaacguuucaugcuccaucugucuauaa

SEQ ID NO: 60331 - RNA, 1755 nt, Artificial Sequence
  derived and/or modified CDS sequence (wt) from hemagglutinin__InfluenzaB__AIC73877
augaaggcaauaauuguacuacucaugguaguaacauccaaugcagaucgaaucugcacugggauaacaucuucaaacucaccucaugugguuaaaacagcuacucaaggggaggucaaugugacuggugugauaccacuaacaacaacaccaacaaaaucuuauuuugcaaaucucaaaggaacaaagaccagagggaaacuaugcccagacugucucaacuguacagaucuggauguggccuugggcaggccaaugugugugggaacuacaccuucugcgaaagcuucaauacuucaugaagucagaccuguuacauccgggugcuucccuauaaugcacgacagaacaaaaaucaggcaacuagccaaucuucucagaggauaugaaaauaucagguuaucaacccaaaacguuaucgaugcagaaaaagcaccaggaggacccuacagacuuggaaccucaggaucuugcccuaacgcuaccaguaaaagcggauuuuucgcaacaauggcuugggcugucccaaaggacaacaacaaaaaugcaacgaacccauuaacaguagagguaccauacauuugugcagaaggagaagaccaaauuacuguuuggggguuccauucggauaacaaaacccaaaugaagaaccucuauggagacucaaauccccaaaaguucaccucaucugcuaauggaguaaccacacauuauguuucucagauuggcggcuucccagaucaaagagaagacggaggacuaccacaaagcggcagaauugucguugauuacaugaugcaaaaaccugggaaaacaggaacaauugucuaucaaagagguguuuuguugccucaaaagguguggugcgcgaguggcaggagcaaaguaauaaaaggguccuugccuuuaauuggugaagcagauugccuucaugaaaaauacgguggauuaaacaaaagcaagccuuacuacacaggagaacaugcaaaagccauaggaaauugcccaauaugggugaaaacaccuuugaagcuugccaauggaaccaaauauagaccuccugcaaaacuauuaaaggaaagggguuucuucggagcuauugcugguuuccuagaaggaggaugggaaggaaugauugcagguuggcacggauauacaucucacggagcacauggaguggcaguugcugcagaccuuaagagcacacaagaagcuauaaacaagauaacaaaaaaucucaacucuuugagugagcuagaaguaaagaaucuucaaaggcuaaguggugccauggaugaacuccacaacgaaauacucgagcuggaugagaaaguggaugaucucagagcugacacuauaaguucacaaauagaacuugcagucuugcuuuccaacgaaggaauaauaaacagugaagaugagcaucuauuggcacuugagagaaaacuaaagaaaaugcugggucccucugcuguagacauagggaauggaugcuucgaaaccaaacacaaaugcaaccagaccugcuuagacaggauagcugcuggcaccuuuaaugcaggagaauuuucucuccccacuuuugauucauugaacauuacugcugcaucuuuaaaugaugauggauuggauaaccauacuauacugcucuauuacucaacugcugcuucuaguuuggcuguaacauugaugcuagcuauuuuuauuguuuauauggucuccagagacaacguuucaugcuccaucugucuauaa

SEQ ID NO: 60332 - RNA, 1755 nt, Artificial Sequence; identical to SEQ ID NO: 60331
  derived and/or modified CDS sequence (wt) from hemagglutinin__InfluenzaB__AIC73878

SEQ ID NO: 60333 - RNA, 1755 nt, Artificial Sequence; identical to SEQ ID NO: 60331
  derived and/or modified CDS sequence (wt) from hemagglutinin__InfluenzaB__AIC73879

SEQ ID NO: 60334 - RNA, 1755 nt, Artificial Sequence
  derived and/or modified CDS sequence (wt) from hemagglutinin__InfluenzaB__AIC73880
augaaggcaauaauuguacuacucaugguaguaacauccaaugcagaucgaaucugcacugggauaacaucuucaaacucaccucaugugguuaaaacagcuacucaaggggaggucaaugugacuggugugauaccacuaacaacaacaccaacaaaaucuuauuuugcaaaucucaaaggaacaaagaccagagggaaacuaugcccagacugucucaacuguacagaucuggauguggccuugggcaggccaaugugugugggaacuacaccuucugcgaaagcuucaauacuucaugaagucagaccuguuacauccgggugcuucccuauaaugcacgacagaacaaaaaucaggcaacuagccaaucuucucagaggauaugaaaauaucagguuaucaacccaaaacguuaucgaugcagaaaaagcaccaggaggacccuacagacuuggaaccucaggaucuugcccuaacgcuaccaguaaaagcggauuuuucgcaacaauggcuugggcugucccaaaggacaacaacaaaaaugcaacgaacccauuaacaguagagguaccauacauuugugcagaaggagaagaccaaauuacuguuuggggguuccauucggauaacaaaacccaaaugaagaaucucuauggagacucaaauccccaaaaguucaccucaucugcuaauggaguaaccacacauuauguuucucagauuggcggcuucccagaucaaagagaagacggaggacuaccacaaagcggcagaauugucguugauuacaugaugcaaaaaccugggaaaacaggaacaauugucuaucaaagagguguuuuguugccucaaaagguguggugcgcgaguggcaggagcaaaguaauaaaaggguccuugccuuuaauuggugaagcagauugccuucaugaaaaauacgguggauuaaacaaaagcaagccuuacuacacaggagaacaugcaaaagccauaggaaauugcccaauaugggugaaaacaccuuugaagcuugccaauggaaccaaauauagaccuccugcaaaacuauuaaaggaaagggguuucuucggagcuauugcugguuuccuagaaggaggaugggaaggaaugauugcagguuggcacggauauacaucucacggagcacauggaguggcaguugcugcagaccuuaagagcacacaagaagcuauaaacaagauaacaaaaaaucucaacucuuugagugagcuagaaguaaagaaucuucaaaggcuaaguggugccauggaugaacuccacaacgaaauacucgagcuggaugagaaaguggaugaucucagagcugacacuauaaguucacaaauagaacuugcagucuugcuuuccaacgaaggaauaauaaacagugaagaugagcaucuauuggcacuugagagaaaacuaaagaaaaugcugggucccucugcuguagacauagggaauggaugcuucgaaaccaaacacaaaugcaaccagaccugcuuagacaggauagcugcuggcaccuuuaaugcaggagaauuuucucuccccacuuuugauucauugaacauuacugcugcaucuuuaaaugaugauggauuggauaaccauacuauacugcucuauuacucaacugcugcuucuaguuuggcuguaacauugaugcuagcuauuuuuauuguuuauauggucuccagagacaacguuucaugcuccaucugucuauaa

SEQ ID NO: 60335 - RNA, 1755 nt, Artificial Sequence; identical to SEQ ID NO: 60331
  derived and/or modified CDS sequence (wt) from hemagglutinin__InfluenzaB__AIC73881

SEQ ID NO: 60336 - RNA, 1755 nt, Artificial Sequence; identical to SEQ ID NO: 60331
  derived and/or modified CDS sequence (wt) from hemagglutinin__InfluenzaB__AIC73882

SEQ ID NO: 60337 - RNA, 1755 nt, Artificial Sequence
  derived and/or modified CDS sequence (wt) from hemagglutinin__InfluenzaB__AIC73883
augaaggcaauaauuguacuacucaugguaguaacauccaaugcagaucgaaucugcacugggauaacaucuucaaacucaccucauguggucaaaacagcuacucaaggggaggucaaugugacuggcgugauaccacugacaacaacaccaacaaaaucuuauuuugcaaaucucaaaggaacaaggaccagagggaaacuaugcccggacugucucaacuguacagaucuggauguggccuugggcaggccaauguguguggggaccacaccuucugcuaaagcuucaauacuccaugaggucagaccuguuacauccgggugcuuuccuauaaugcacgacagaacaaaaaucaggcaacuacccaaucuucucagaggauaugaaaagaucagguuaucaacccaaaacguuaucgaugcagaaaaagcaccaggaggacccuacagacuuggaaccucaggaucuugcccuaacgcuaccaguaaaaucggauuuuuugcaacaauggcuugggcugucccaaaggacaacuacaaaaaugcaacgaacccacuaacaguggaaguaccauacauuuguacagaaggggaagaccaaauuacuguuuggggguuccauucggauaacaaaacccaaaugaagagccucuauggagacucaaauccucaaaaguucaccucaucugcuaauggaguaaccacacauuauguuucucagauuggcgacuucccagaucaaacagaagacggaggacuaccacaaagcggcagaauuguuguugauuacaugaugcaaaaaccugggaaaacaggaacaauugucuaucaaagggguguuuuguugccucaaaagguguggugcgcgaguggcaggagcaaaguaauaaaagggucauugccuuuaauuggugaagcagauugccuucaugaagaauacgguggauuaaacaaaagcaagccuuacuacacaggaaaacaugcaaaagccauaggaaauugcccaauauggguaaaaacaccuuugaagcuugccaauggaaccaaauauagaccuccugcaaaacuauugaaggaaagggguuuuuucggagcuauugcugguuuccuagaaggaggaugggaaggaaugauugcagguuggcacggauacacaucucacggagcacauggaguggcaguggcggcagaccuuaagaguacacaagaagcuauaaauaagauaacaaaaaaucucaauucuuugagugaacuagaaguaaagaaccuucaaagacuaaguggugccauggaugaacuccacaacgaaauacucgagcuggaugaaaaaguggaugaucucagagcugacacuauaagcucacaaauagaacuugcagucuugcuuuccaacgaaggaauaauaaacagugaagacgagcaucuauuggcacuugagagaaaacuaaagaaaaugcugggucccucugcuguagacauaggaaacggaugcuucgaaaccaaacacaaaugcaaccagaccugcuuagacaggauagcugcuggcaccuuuaaugcaggagaauuuucucuccccacuuuugauucauugaacauuacugcugcaucuuuaaaugaugauggauuggauaaccauacuauacugcucuauuacucaacugcugcuucuaguuuggcuguaacauuaaugcuagcuauuuuuauuguuuauauggucuccagagacaacguuucaugcuccaucugucuauaa

SEQ ID NO: 60338 - RNA, 1755 nt, Artificial Sequence; identical to SEQ ID NO: 60331
  derived and/or modified CDS sequence (wt) from hemagglutinin__InfluenzaB__AIC73884

SEQ ID NO: 60339 - RNA, 1758 nt, Artificial Sequence
  derived and/or modified CDS sequence (wt) from hemagglutinin__InfluenzaB__AIC73885
auggaggcaauaauuguacuacucaugguaguaacauccaaugcagaucgaaucugcacugggauaacaucgucaaacucaccacaugucgucaaaacugcuacucaaggggaggucaaugugaccgguguaauaccacugacaacaacacccaccaaaucucauuuugcaaaucucaaaggaacagaaaccagggggaaacuaugcccaaaaugccucaacugcacagaucuggauguagccuugggcagaccaaaaugcacagggaaaauacccucggcaagaguuucaauacuccaugaagucagaccuguuacaucugggugcuuuccuauaaugcacgauagaacaaaaauuagacagcugccuaaccuucuccgaggauacgaacauaucagguuaucaacucacaacguuaucaaugcagaagaugcaccaggaggacccuacaaaauuggaaccucagggucuugcccuaacguuaccaauggaaacggauucuucgcaacaauggcuugggcugucccaaaaaacgacaaaaacaaaacagcaacaaauccauuaacaauagaaguaccauacauuuguacagaaggagaagaccaaauuaccguuuggggguuccacucugacaacgagacccaaauggcaaagcucuauggggacucaaagccccagaaguucaccucaucugccaacggagugaccacacacuacguuucacagauugguggcuucccaaaucaaacagaagacggaggacuaccacaaagugguagaauuguuguugauuacauggugcaaaaaucuggaaaaacaggaacaauuaccuaucaaagagguauuuuauugccucaaaagguguggugcgcaaguggcaggagcaagguaauaaaaggauccuugccuuuaauuggagaagcagauugccuccacgaaaaauacgguggauuaaacaaaagcaagccuuacuacacaggggaacaugcaaaggccauaggaaauugcccaauaugggugaaaacacccuugaagcuggccaauggaaccaaauauagaccuccugcaaaacuauuaaaggaaagggguuucuucggagcuauugcugguuucuuagagggaggaugggaaggaaugauugcagguuggcacggauacacaucccauggggcacauggaguagcgguggcagcugaccuuaagagcacucaagaggccauaaacaagauaacaaaaaaucucaacucuuugagugagcuggaaguaaagaaucuucaaagacuaagcggugccauggaugaacuccacaacgaaauacuagaacuagaugagaaaguggaugaucucagagcugauacaauaagcucacaaauagaacucgcaguccugcuuuccaaugaaggaauaauaaacagugaagaugaacaucucuuggcgcuugaaagaaagcugaagaaaaugcugggccccucugcuguagagauagggaauggaugcuuugaaaccaaacacaagugcaaccagaccugucucgacagaauagcugcugguaccuuugaugcaggagaauuuucucuccccaccuuugauucacugaauauuacugcugcaucuuuaaaugacgauggauuggauaaucauacuauacugcuuuacuacucaacugcugccuccaguuuggcuguaacacugaugauagcuaucuuuguuguuuauauggucuccagagacaauguuucuugcuccaucugucuauaa

SEQ ID NO: 60340 - RNA, 1758 nt, Artificial Sequence
  derived and/or modified CDS sequence (wt) from hemagglutinin__InfluenzaB__AIC73886
augaaggcaauaauuguacuacucaugguaguaacauccaaugcagaucgaaucugcacugggauaacaucgucaaacucaccacaugucgucaaaacugcuacucaaggggaggucaaugugaccgguguaauaccacugacaacaacacccaccaaaucucauuuugcaaaucuaaaaggaacagaaaccagggggaaacuaugcccaaaaugccucaacugcacagaucuggacguagccuugggcagaccaaaaugcacggggaaaauacccucggcaagaguuucaauacuccaugaagucagaccuguuacaucugggugcuuuccuauaaugcacgauagaacaaaaauuagacagcugccuaaccuucuccgaggauacgaacauaucagauuaucaacucacaacguuaucaaugcagaaaaugcaccaggaggacccuacaaaauuggaaccucagggucuugcccuaacguuaccaauggaaacggauucuucgcaacaauggcuugggccgucccaaaaaacgacaaaaacaaaacagcaacaaauccauuaacaauagaaguaccauacauuuguacagaaggagaagaccaaauuaccguuuggggguuccacucugacaacgagacccaaauggcaaagcucuauggggacucaaauccccagaaguucaccucaucugccaacggagugaccacacauuacguuucacagauugguggcuucccaaaucaaacagaagacggaggacuaccacaaagugguagaauuguuguugauuacauggugcaaaaaucugggaaaacaggaacaauuaccuaucaaagagguauuuuauugccucaaaagguguggugcgcaaguggcaggagcaagguaauaaaaggauccuugccuuuaauuggagaagcagauugccuccacgaaaaauacgguggguuaaacaaaagcaagccuuacuacacaggggaacaugcaaaggccauaggaaauugcccaauaugggugaaaacacccuugaagcuggccaauggaaccaaauauagaccuccugcaaaacuauuaaaggaaagggguuucuucggagcuauugcugguuucuuagaaggaggaugggaaggaaugauugcagguuggcacggauacacaucccauggggcacauggaguagcgguggcagcugaccuuaagagcacucaagaggccauaaacaagauaacaaaaaaucucaacucuuugagugagcuggaaguaaagaaucuucaaagacuaagcggugccauggaugaacuccacaacgaaauacuagaacuagaugagaaaguggaugaucucagagcugauacaauaagcucacaaauagaacucgcaguccugcuuuccaaugaaggaauaauaaacagugaagaugaacaucucuuggcgcuugaaagaaagcugaagaaaaugcugggccccucugcuguagagauagggaauggaugcuuugaaaccaaacacaagugcaaccagaccugucucgacagaauagcugcugguaccuuugaugcaggagaauuuucucuccccacuuuugauucacugaauauuacugcugcaucuuuaaaugacgauggauuggauaaucauacuauacugcuuuacuacucaacugcugccuccaguuuggcuguaacacugaugauagcuaucuuuguuguuuauauggucuccagagacaauguuucuugcuccaucugucuauaa

SEQ ID NO: 60341 - RNA, 1758 nt, Artificial Sequence; identical to SEQ ID NO: 60321
  derived and/or modified CDS sequence (wt) from hemagglutinin__InfluenzaB__AIC73887

SEQ ID NO: 60342 - RNA, 1755 nt, Artificial Sequence
  derived and/or modified CDS sequence (wt) from hemagglutinin__InfluenzaB__AIC73888
augaaggcaauaauuguacuacucaugguaguaacauccaaugcagaucgaaucugcacugggauaacaucuucaaacucaccucauguggucaaaacagcuacucaaggggaggucaaugugacuggcgugauaccacugacaacaacaccaacaaaaucuuauuuugcaaaucucaaaggaacaaggaccagagggaaacuaugcccggacugucucaacuguacagaucuggauguggccuugggcaggccaauguguguggggaccacaccuucugcuaaagcuucaauacuccaugaggucagaccuguuacauccgggugcuuuccuauaaugcacgacagaacaaaaaucaggcaacuacccaaucuucucagaggauaugaaaagaucagguuaucaacccaaaacguuaucgaugcagaaaaagcaccaggaggacccuacagacuuggaaccucaggaucuugcccuaacgcuaccaguaaaaucggauuuuuugcaacaauggcuugggcugucccaaaggacaacuacaaaaaugcaacgaacccacuaacaguggaaguaccauacauuuguacagaaggggaagaccaaauuacuguuuggggguuccauucggauaacaaaacccaaaugaagagccucuauggagacucaaauccucaaaaguucaccucaucugcuaauggaguaaccacacauuauguuucucagauuggcgacuucccagaucaaacagaagacggaggacuaccacaaagcggcagaauuguuguugauuacaugaugcaaaaaccugggaaaacaggaacaauugucuaucaaagggguguuuuguugccucaaaagguguggugcgcgaguggcaggagcaaaguaauaaaagggucauugccuuuaauuggugaagcagauugccuucaugaagaauacgguggauuaaacaaaagcaagccuuacuacacaggaaaacaugcaaaagccauaggaaauugcccaauauggguaaaaacaccuuugaagcuugccaauggaaccaaauacagaccuccugcaaaacuauugaaggaaagggguuucuucggagcuauugcugguuuccuagaaggaggaugggaaggaaugauugcaggcuggcacggauacacaucucacggagcacauggaguggcaguggcggcagaccuuaagaguacacaagaagcuauaaauaagauaacaaaaaaucucaauucuuugagugaacuagaaguaaagaaccuucaaagacuaaguggugccauggaugaacuccacaacgaaauacucgagcuggaugaaaaaguggaugaucucagagcugacacuauaagcucacaaauagaacuugcagucuugcuuuccaacgaaggaauaauaaacagugaagacgagcaucuauuggcacuugagagaaaacuaaagaaaaugcugggucccucugcuguagacauaggaaacggaugcuucgaaaccaaacacaaaugcaaccagaccugcuuagacaggauagcugcuggcaccuuuaaugcaggagaauuuucucuccccacuuuugauucauugaacauuacugcugcaucuuuaaaugaugauggauuggauaaccauacuauacugcucuauuacucaacugcugcuucuaguuuggcuguaacauuaaugcuagcuauuuuuauuguuuauauggucuccagagacaacguuucaugcuccaucugucuauaa

SEQ ID NO: 60343 - RNA, 1755 nt, Artificial Sequence
  derived and/or modified CDS sequence (wt) from hemagglutinin__InfluenzaB__AIC73889
augaaggcaauaauuguacuacucaugguaguaacauccaaugcagaucgaaucugcacugggauaacaucuucaaacucaccucauguggucaaaacagcuacucaaggggaggucaaugugacuggcgugauaccacugacaacaacaccaacaaaaucuuauuuugcaaaucucaaaggaacaaggaccagagggaaacuaugcccggacugucucaacuguacagaucuggauguggccuugggcaggccaauguguguggggaccacaccuucugcuaaagcuucaauacuccaugaggucagaccuguuacauccgggugcuuuccuauaaugcacgacagaacaaaaaucaggcaacuacccaaucuucucagaggauaugaaaagaucagguuaucaacccaaaacguuaucgaugcagaaaaagcaccaggaggacccuacagacuuggaaccucaggaucuugcccuaacgcuaccaguaaaaucggauuuuuugcaacaauggcuugggcugucccaaaggacaacuacaaaaaugcaacgaacccacaaacaguggaaguaccauacauuuguacagaaggggaagaccaaauuacuguuuggggguuccauucggauaacaaaacccaaaugaagagccucuauggagacucaaauccucaaaaguucaccucaucugcuaauggaguaaccacacauuauguuucucagauuggcgacuucccagaucaaacagaagacggaggacuaccacaaagcggcagaauuguuguugauuacaugaugcaaaaaccugggaaaacaggaacaauugucuaucaaagggguguuuuguugccucaaaagguguggugcgcgaguggcaggagcaaaguaauaaaagggucauugccuuuaauuggugaagcagauugccuucaugaagaauacgguggauuaaacaaaagcaagccuuacuacacaggaaaacaugcaaaagccauaggaaauugcccaauauggguaaaaacaccuuugaagcuugccaauggaaccaaauauagaccuccugcaaaacuauugaaggaaagggguuucuucggagcuauugcugguuuccuagaaggaggaugggaaggaaugauugcagguuggcacggauacacaucucacggagcacauggaguggcaguggcggcagaccuuaagaguacacaagaagcuauaaauaagauaacaaaaaaucucaauucuuugagugaacuagaaguaaagaaccuucaaagacuaaguggugccauggaugaacuccacaacgaaauacucgagcuggaugaaaaaguggaugaucucagagcugacacuauaagcucacaaauagaacuugcagucuugcuuuccaacgaaggaauaauaaacagugaagacgagcaucuauuggcacuugagagaaaacuaaagaaaaugcugggucccucugcuguagacauaggaaacggaugcuucgaaaccaaacacaaaugcaaccagaccugcuuagacaggauagcugcuggcaccuuuaaugcaggagaauuuucucuccccacuuuugauucauugaacauuacugcugcaucuuuaaaugaugauggauuggauaaccauacuauacugcucuauuacucaacugcugcuucuaguuuggcuguaacauuaaugcuagcuauuuuuauuguuuauauggucuccagagacaacguuucaugcuccaucugucuauaa

SEQ ID NO: 60344 - RNA, 1755 nt, Artificial Sequence
  derived and/or modified CDS sequence (wt) from hemagglutinin__InfluenzaB__AIC73890
augaaggcaauaauuguacuacucaugguaguaacauccaaugcagaucgaaucugcacugggauaacaucuucaaacucaccucauguggucaaaacagcuacucaaggggaggucaaugugacuggcgugauaccacugacaacaacaccaacaaaaucuuauuuugcaaaucucaaaggaacaaggaccagagggaaacuaugcccggacugucucaacuguacagaucuggauguggccuugggcaggccaauguguguggggaccacaccuucugcuaaagcuucaauacuccaugaggucagaccuguuacauccgggugcuuuccuauaaugcacgacagaacaaaaaucaggcaacuacccaaucuucucagaggauaugaaaagaucagguuaucaacccaaaacguuaucgaugcagaaaaagcaccaggaggacccuacagacuuggaaccucaggaucuugcccuaacgcuaccaguaaaaucggauuuuuugcaacaauggcuugggcugucccaaaggacaacuacaaaaaugcaacgaacccacaaacaguggaaguaccauacauuuguacagaaggggaagaccaaauuacuguuuggggguuccauucggauaacaaaacccaaaugaagagccucuauggagacucaaauccucaaaaguucaccucaucugcuaauggaguaaccacacauuauguuucucagauuggcgacuucccagaucaaacagaagacggaggacuaccacaaagcggcagaauuguuguugauuacaugaugcaaaaaccugggaaaacaggaacaauugucuaucaaagggguguuuuguugccucaaaagguguggugcgcgaguggcaggagcaaaguaauaaaagggucauugccuuuaauuggugaagcagauugccuucaugaagaauacgguggauuaaacaaaagcaagccuuacuacacaggaaaacaugcaaaagccauagggaauugcccaauauggguaaaaacaccuuugaagcuugccaauggaaccaaauauagaccuccugcaaaacuauugaaggaaagggguuucuucggagcuauugcugguuuccuagaaggaggaugggaaggaaugauugcagguuggcacggauacacaucucacggagcacauggaguggcaguggcggcagaccuuaagaguacacaagaagcuauaaauaagauaacaaaaaaucucaauucuuugagugaacuagaaguaaagaaccuucaaagacuaaguggugccauggaugaacuccacaacgaaauacucgagcuggaugaaaaaguggaugaucucagagcugacacuauaagcucacaaauagaacuugcagucuugcuuuccaacgaaggaauaauaaacagugaagacgagcaucuauuggcacuugagagaaaacuaaagaaaaugcugggucccucugcuguagacauaggaaacggaugcuucgaaaccaaacacaaaugcaaccagaccugcuuagacaggauagcugcuggcaccuuuaaugcaggagaauuuucucuccccacuuuugauucauugaacauuacugcugcaucuuuaaaugaugauggauuggacaaccauacuauacugcucuauuacucaacugcugcuucuaguuuggcuguaacauuaaugcuagcuauuuuuauuguuuauauggucuccagagacaacguuucgugcuccaucugucuauaa

SEQ ID NO: 60345 - RNA, 1758 nt, Artificial Sequence
  derived and/or modified CDS sequence (wt) from hemagglutinin__InfluenzaB__AIC73892
augaaggcaauaauuguacuacucaugguaguaacauccaaugcagaucgaaucugcacugggauaacaucgucaaacucaccacaugucgucaaaacugcuacucaaggggaggucaaugugaccgguguaauaccacugacaacaacacccaccaaaucucauuuugcaaaucucaaaggaacagaaaccagggggaaacuaugcccaaaaugccucaacugcacagaucuggauguagccuugggcagaccaaaaugcacagggaaaauacccucggcaagaguuucaauacuccaugaagucagaccuguuacaucugggugcuuuccuauaaugcacgauagaacaaaaauuagacagcugccuaaccuucuccgaggauacgaacauaucagguuaucaacucacaacguuaucaaugcagaagaugcaccaggaggacccuacaaaauuggaaccucagggucuugcccuaacguuaccaauggaaacggauucuucgcaacaauggcuugggcugucccaaaaaacgacaaaaacaaaacagcaacaaauccauuaacaauagaaguaccauacauuuguacagaaggagaagaccaaauuaccguuuggggguuccacucugacaacgagacccaaauggcaaagcucuauggggacucaaagccccagaaguucaccucaucugccaacggagugaccacacacuacguuucacagauugguggcuucccaaaucaaacagaagacggaggacuaccacaaagugguagaauuguuguugauuacauggugcaaaaaucuggaaaaacaggaacaauuaccuaucaaagagguauuuuauugccucaaaagguguggugcgcaaguggcaggagcaagguaauaaaaggauccuugccuuuaauuggagaagcagauugccuccacgaaaaauacgguggauuaaacaaaagcaagccuuacuacacaggggaacaugcaaaggccauaggaaauugcccaauaugggugaaaacauccuugaagcuggccaauggaaccaaauauagaccuccugcaaaacuauuaaaggaaagggguuucuucggagcuauugcugguuucuuagagggaggaugggaaggaaugauugcagguuggcacggauacacaucccauggggcacauggaguagcgguggcagcugaccuuaagagcacucaagaggccauaaacaagauaacaaaaaaucucaacucuuugagugagcuggaaguaaagaaucuucaaagacuaagcggugccauggaugaacuccacaacgaaauacuagaacuagaugagaaaguggaugaucucagagcugauacaauaagcucacaaauagaacucgcaguccugcuuuccaaugaaggaauaauaaacagugaagaugaacaucucuuggcgcuugaaagaaagcugaagaaaaugcugggccccucugcuguagagauagggaauggaugcuuugaaaccaaacacaagugcaaccagaccugucucgacagaauagcugcugguaccuuugaugcaggagaauuuucucuccccaccuuugauucacugaauauuacugcugcaucuuuaaaugacgauggauuggauaaucauacuauacugcuuuacuacucaacugcugccuccaguuuggcuguaacacugaugauagcuaucuuuguuguuuauauggucuccagagacaauguuucuugcuccaucugucuauaa

SEQ ID NO: 60346 - RNA, 1755 nt, Artificial Sequence; identical to SEQ ID NO: 60342
  derived and/or modified CDS sequence (wt) from hemagglutinin__InfluenzaB__AIC73893

SEQ ID NO: 60347 - RNA, 1755 nt, Artificial Sequence
  derived and/or modified CDS sequence (wt) from hemagglutinin__InfluenzaB__AIC73894
augaaggcaauaauuguacuacucaugguaguaacauccaaugcagaucgaaucugcacugggauaacaucuucaaacucaccucauguggucaaaacagcuacucaaggggaggucaaugugacuggcgugauaccacugacaacaacaccaacaaaaucuuauuuugcaaaucucaaaggaacaaggaccagagggaaacuaugcccggacugucucaacuguacagaucuggauguggccuugggcaggccaauguguguggggaccacaccuucugcuaaagcuucaauacuccaugaggucagaccuguuacauccgggugcuuuccuauaaugcacgacagaacaaaaaucaggcaacuacccaaucuucucagaggauaugaaaagaucagguuaucaacccaaaacguuaucgaugcagaaaaagcaccaggaggacccuacagacuuggaaccucaggaucuugcccuaacgcuaccaguaaaaucggauuuuuugcaacaauggcuugggcugucccaaaggacaacuacaaaaaugcaacgaacccacaaacaguggaaguaccauacauuuguacagaaggggaagaccaaauuacuguuuggggguuccauucggauaacaaaacccaaaugaagagccucuauggagacucaaauccucaaaaguucaccucaucugcuaauggaguaaccacacauuauguuucucagauuggcgacuucccagaucaaacagaagacggaggacuaccacaaagcggcagaauuguuguugauuacaugaugcaaaaaccugggaaaacaggaacaauugucuaucaaagggguguuuuguugccucaaaagguguggugcgcgaguggcaggagcaaaguaauaaaagggucauugccuuuaauuggugaagcagauugccuucaugaagaauacgguggauuaaacaaaagcaagccuuacuacacaggaaaacaugcaaaagccauaggaaauugcccaauauggguaaaaacaccuuugaagcuugccaauggaaccaaauauagaccuccugcaaaacuauugaaggaaagggguuucuucggagcuauugcugguuuccuagaaggaggaugggaaggaaugauugcagguuggcacggauacacaucucacggagcacauggaguggcaguggcggcagaccuuaagaguacacaagaagcuauaaauaagauaacaaaaaaucucaauucuuugagugaacuagaaguaaagaaccuucaaagacuaaguggugccauggaugaacuccacaacgaaauacucgagcuggaugaaaaaguggaugaucuuagagcugacacuauaagcucacaaauagaacuugcagucuugcuuuccaacgaaggaauaauaaacagugaagacgagcaucuauuggcacuugagagaaaacuaaagaaaaugcugggucccucugcuguagacauaggaaacggaugcuucgaaaccaaacacaaaugcaaccagaccugcuuagacaggauagcugcuggcaccuuuaaugcaggagaauuuucucuccccacuuuugauucauugaacauuacugcugcaucuuuaaaugaugauggauuggauaaccauacuauacugcucuauuacucaacugcugcuucuaguuuggcuguaacauuaaugcuagcuauuuuuauuguuuauauggucuccagagacaacguuucaugcuccaucugucuauaa

SEQ ID NO: 60348 - RNA, 1755 nt, Artificial Sequence; identical to SEQ ID NO: 60347
  derived and/or modified CDS sequence (wt) from hemagglutinin__InfluenzaB__AIC73895

SEQ ID NO: 60349 - RNA, 1755 nt, Artificial Sequence
  derived and/or modified CDS sequence (wt) from hemagglutinin__InfluenzaB__AIC73896
augaaggcaauaauuguacuacucaugguaguaacauccaaugcagaucgaaucugcacugggauaacaucuucaaacucaccucauguggucaaaacagcuacucaaggggaggucaaugugacuggcgugauaccacugacaacaacaccaacaaaaucuuauuuugcaaaucucaaaggaacaaggaccagagggaaacuaugcccggacugucucaacuguacagaucuggauguggccuugggcaggccaauguguguggggaccacaccuucugcuaaagcuucaauacuccaugaggucagaccuguuacauccgggugcuuuccuauaaugcacgacagaacaaaaaucaggcaacuacccaaucuucucagaggauaugaaaagaucagguuaucaacccaaaacguuaucgaugcagaaaaagcaccaggaggacccuacagacuuggaaccucaggaucuugcccuaacgcuacuaguaaaaucggauuuuuugcaacaauggcuugggcugucccaaaggacaacuacaaaaaugcaacgaacccacaaacaguggaaguaccauacauuuguacagaaggggaagaccaaauuacuguuuggggguuccauucggauaauaaaacccaaaugaagagccucuauggagacucaaauccucaaaaguucaccucaucugcuaauggaguaaccacacauuauguuucucagauuggcgacuucccagaucaaacagaagacggaggacuaccacaaagcggcagaauuguuguugauuacaugaugcaaaaaccugggaaaacaggaacaauugucuaucaaagggguguuuuguugccucaaaagguguggugcgcgaguggcaggagcaaaguaauaaaagggucauugccuuuaauuggugaagcagauugccuucaugaagaauacgguggauuaaacaaaagcaagccuuacuacacaggaaaacaugcaaaagccauaggaaauugcccaauauggguaaaaacaccuuugaagcuugccaauggaaccaaauauagaccuccugcaaaacuauugaaggaaagggguuucuucggagcuauugcugguuuccuagaaggaggaugggaaggaaugauugcagguuggcacggauacacaucucacggagcacauggaguggcaguggcggcagaccuuaagaguacacaagaagcuauaaauaagauaacaaaaaaucucaauucuuugagugaacuagaaguaaagaaccuucaaagacuaaguggugccauggaugaacuccacaacgaaauacucgagcuggaugaaaaaguggaugaucucagagcugacacuauaagcucacaaauagaacuugcagucuugcuuuccaacgaaggaauaauaaacagugaagacgagcaucuauuggcacuugagagaaaacuaaagaaaaugcugggucccucugcuguagacauaggaaacggaugcuucgaaaccaaacacaaaugcaaccagaccugcuuagacaggauagcugcuggcaccuuuaaugcaggagaauuuucucuccccacuuuugauucauugaacauuacugcugcaucuuuaaaugaugauggauuggauaaccauacuauacugcucuauuacucaacugcugcuucuaguuuggcuguaacauuaaugcuagcuauuuuuauuguuuauauggucuccagagacaacguuucaugcuccaucugucuauaa

SEQ ID NO: 60350 - RNA, 1755 nt, Artificial Sequence
  derived and/or modified CDS sequence (wt) from hemagglutinin__InfluenzaB__AIC73897
augaaggcaauaauuguacuacucaugguaguaacauccaaugcagaucgaaucugcacugggauaacaucuucaaacucaccucauguggucaaaacagcuacucaaggggaggucaaugugacuggcgugauaccacugacaacaacaccaacaaaaucuuauuuugcaaaucucaaaggaacaaggaccagagggaaacuaugcccggacugucucaacuguacagaucuggauguggccuugggcaggccaauguguguggggaccacaccuucugcuaaagcuucaauacuccaugaggucagaccuguuacauccgggugcuuuccuauaaugcacgacagaacaaaaaucaggcaacuacccaaucuucucagaggauaugaaaagaucagguuaucaacccaaaacguuaucgaugcagaaaaagcaccaggaggacccuacagacuuggaaccucaggaucuugcccuaacgcuacuaguaaaaucggauuuuuugcaacaauggcuugggcugucccaaaggacaacuacaaaaaugcaacgaacccacaaacaguggaaguaccauacauuuguacagaaggggaagaccaaauuacuguuuggggguuccauucggauaacaaaacccaaaugaagagccucuauggagacucaaauccucaaaaguucaccucaucugcuaauggaguaaccacacauuauguuucucagauuggcgacuucccagaucaaacagaagacggaggacuaccacaaagcggcagaauuguuguugauuacaugaugcaaaaaccugggaaaacaggaacaauugucuaucaaagggguguuuuguugccucaaaagguguggugcgcgaguggcaggagcaaaguaauaaaagggucauugccuuuaauuggugaagcagauugccuucaugaagaauacgguggauuaaacaaaagcaagccuuacuacacaggaaaacaugcaaaagccauaggaaauugcccaauauggguaaaaacaccuuugaagcuugccaauggaaccaaauauagaccuccugcaaaacuauugaaggaaagggguuucuucggagcuauugcugguuuccuagaaggaggaugggaaggaaugauugcagguuggcacggauacacaucucacggagcacauggaguggcaguggcggcagaccuuaagaguacacaagaagcuauaaauaagauaacaaaaaaucucaauucuuugagugaacuagaaguaaagaaccuucaaagacuaaguggugccauggaugaacuccacaacgaaauacucgagcuggaugaaaaaguggaugaucucagagcugacacuauaagcucacaaauagaacuugcagucuugcuuuccaacgaaggaauaauaaacagugaagacgagcaucuauuggcacuugagagaaaacuaaagaaaaugcugggucccucugcuguagacauaggaaacggaugcuucgaaaccaaacacaaaugcaaccagaccugcuuagacaggauagcugcuggcaccuuuaaugcaggagaauuuucucuccccacuuuugauucauugaacauuacugcugcaucuuuaaaugaugauggauuggauaaccauacuauacugcucuauuacucaacugcugcuucuaguuuggcuguaacauuaaugcuagcuauuuuuauuguuuauauggucuccagagacaacguuucaugcuccaucugucuauaa

SEQ ID NO: 60351 - RNA, 1755 nt, Artificial Sequence
  derived and/or modified CDS sequence (wt) from hemagglutinin__InfluenzaB__AIC73898
augaaggcaauaauuguacuacucaugguaguaacauccaaugcagaucgaaucugcacugggauaacaucuucaaacucaccucauguggucaaaacagcuacucaaggggaggucaaugugacuggcgugauaccacugacaacaacaccaacaaaaucuuauuuugcaaaucucaaaggaacaaggaccagagggaaacuaugcccggacugucucaacuguacagaucuggauguggccuugggcaggccaauguguguggggaccacaccuucugcuaaagcuucaauacuccaugaggucagaccuguuacauccgggugcuuuccuauaaugcacgacagaacaaaaaucaggcaacuacccaaucuucucagaggauaugaaaagaucagguuaucaacccaaaacguuaucgaugcagaaaaagcaccaggaggacccuacagacuuggaaccucaggaucuugcccuaacgcuaccaguaaaaucggauuuuuugcaacaauggcuugggcugucccaaaggacaacuacaaaaaugcaacgaacccacaaacaguggaaguaccauacauuuguacagaaggggaagaccaaauuacuguuuggggguuccauucggauaacaaaacccaaaugaagagccucuauggagacucaaauccucaaaaguucaccucaucugcuaauggaguaaccacacauuauguuucucagauuggcgacuucccagaucaaacagaagacggaggacuaccacaaagcggcagaauuguuguugauuacaugaugcaaaaaccugggaaaacaggaacaauugucuaucaaagggguguuuuguugccucaaaagguguggugcgcgaguggcaggagcaaaguaauaaaagggucauugccuuuaauuggugaagcagauugccuucaugaagaauacgguggauuaaacaaaagcaagccuuacuacacaggaaaacaugcaaaagccauaggaaauugcccaauauggguaaaaacaccuuugaagcuugccaauggaaccaaauauagaccuccugcaaaacuauugaaggaaagggguuucuucggagcuauugcugguuuccuagaaggaggaugggaaggaaugauugcagguuggcacggauacacaucucacggagcacauggaguggcaguggcggcagaccuuaaaaguacacaagaagcuauaaauaagauaacaaaaaaucucaauucuuugagugaacuagaaguaaagaaccuucaaagacuaaguggugccauggaugaacuccacaacgaaauacucgagcuggaugaaaaaguggaugaucucagagcugacacuauaagcucacaaauagaacuugcagucuugcuuuccaacgaaggaauaauaaacagugaagacgagcaucuauuggcacuugagagaaaacuaaagaaaaugcugggucccucugcuguagacauaggaaacggaugcuucgaaaccaaacacaaaugcaaccagaccugcuuagacaggauagcugcuggcaccuuuaaugcaggagaauuuucucuccccacuuuugauucauugaacauuacugcugcaucuuuaaaugaugauggauuggauaaccauacuauacugcucuauuacucaacugcugcuucuaguuuggcuguaacauuaaugcuagcuauuuuuauuguuuauauggucuccagagacaacguuucaugcuccaucugucuauaa

SEQ ID NO: 60352 - RNA, 1755 nt, Artificial Sequence
  derived and/or modified CDS sequence (wt) from hemagglutinin__InfluenzaB__AIC73899
augaaggcaauaauuguacuacucaugguaguaacauccaaugcagaucgaaucugcacugggauaacaucuucaaacucaccucauguggucaaaacagcuacucaaggggaggucaaugugacuggcgugauaccacugacaacaacaccaacaaaaucuuauuuugcaaaucucaaaggaacaaggaccagagggaaacuaugcccggacugucucaacuguacagaucuggauguggccuugggcaggccaauguguguggggaccacaccuucugcuaaagcuucaauacuccaugaggucagaccuguuacauccgggugcuuuccuauaaugcacgacagaacaaaaaucaggcaacuacccaaucuucucagaggauaugaaaagaucagguuaucaacccaaaacguuaucgaugcagaaaaagcaccaggaggacccuacagacuuggaaccucaggaucuugcccuaacgcuaccaguaaaaucggauuuuuugcaacaauggcuugggcugucccaaaggacaacuacaaaaaugcaacgaacccacaaacaguggaaguaccauacauuuguacagaaggggaagaccaaauuacuguuuggggguuccauucggauaacaaaacccaaaugaagagccucuauggagacucaaauccucaaaaguucaccucaucugcuaauggaguaaccacacauuauguuucucagauuggcgacuucccagaucaaacagaagacggaggacuaccacaaagcggcagaauuguuguugauuacaugaugcaaaaaccugggaaaacaggaacaauugucuaucaaagggguguuuuguugccucaaaagguguggugcgcgaguggcaggagcaaaguaauaaaagggucauugccuuuaauuggugaagcagauugccuucaugaagaauacgguggauuaaacaaaagcaagccuuacuacacaggaaaacaugcaaaagccauaggaaauugcccaauauggguaaaaacaccuuugaagcuugccaauggaaccaaauauagaccuccugcaaaacuauugaaggaaagggguuucuucggagcuauugcugguuuccuagaaggaggaugggaaggaaugauugcagguuggcacggauacacaucucacggagcacauggaguggcaguggcggcagaccuuaagaguacacaagaagcuauaaauaagauaacaaaaaaucucaauucuuugagugaacuagaaguaaagaaccuucaaagacuaaguggugccauggaugaacuccacaacgaaauacucgagcuggaugaaaaaguggaugaucucagagcugacacuauaagcucacaaauagaacuugcagucuugcuuuccaacgaagggauaauaaacagugaagacgagcaucuauuggcacuugagagaaaacuaaagaaaaugcugggucccucugcuguagacauaggaaacggaugcuucgaaaccaaacacaaaugcaaccagaccugcuuagacaggauagcugcuggcaccuuuaaugcaggagaauuuucucuccccacuuuugauucauugaacauuacugcugcaucuuuaaaugaugauggauuggauaaccauacuauacugcucuauuacucaacugcugcuucuaguuuggcuguaacauuaaugcuagcuauuuuuauuguuuauauggucuccagagacaacguuucaugcuccaucugucuauaa

SEQ ID NO: 60353 - RNA, 1755 nt, Artificial Sequence; identical to SEQ ID NO: 60351
  derived and/or modified CDS sequence (wt) from hemagglutinin__InfluenzaB__AIC73900

SEQ ID NO: 60354 - RNA, 1755 nt, Artificial Sequence
  derived and/or modified CDS sequence (wt) from hemagglutinin__InfluenzaB__AIC73902
augaaggcaauaauuguacuacucaugguaguaacauccaaugcagaucgaaucugcacugggauaacaucuucaaacucaccucauguggucaaaacagcuacucaaggggaggucaaugugacuggcgugauaccacugacaacaacaccaacaaaaucuuauuuugcaaaucucaaaggaacaaggaccagagggaaacuaugcccggacugucucaacuguacagaucuggauguggccuugggcaggccaauguguguggggaccacaccuucugcuaaagcuucaauacuccaugaggucagaccuguuacauccgggugcuuuccuauaaugcacgacagaacaaaaaucaggcaacuacccaaucuucucagaggauaugaaaagaucagguuaucaacucaaaacguuaucgaugcagaaaaagcaccaggaggacccuacagacuuggaaccucaggaucuugcccuaacgcuaccaguaaaaucggauuuuuugcaacaauggcuugggcugucccaaaggacaacuacaaaaaugcaacgaacccacaaacaguggaaguaccauacauuuguacagaaggggaagaccaaauuacuguuuggggguuccauucggauaacaaaacccaaaugaagagccucuauggagacucaaauccucaaaaguucaccucaucugcuaauggaguaaccacacauuauguuucucagauuggcgacuucccggaucaaacagaagacggaggacuaccacaaagcggcagaauuguuguugauuacaugaugcaaaaaccugggaaaacaggaacaauugucuaucaaagggguguuuuguugccucaaaagguguggugcgcgaguggcaggagcaaaguaauaaaagggucauugccuuuaauuggugaagcagauugccuucaugaagaauacgguggauuaaacaaaagcaagccuuacuacacaggaaaacaugcaaaagccauaggaaauugcccaauauggguaaaaacaccuuugaagcuugccaauggaaccaaauauagaccuccugcaaaacuauugaaggaaagggguuucuucggagcuauugcugguuuccuagaaggaggaugggaaggaaugauugcagguuggcacggauauacaucucacggagcacauggaguggcaguggcggcagaccuuaagaguacacaagaagcuauaaauaagauaacaaaaaaucucaauucuuugagugaacuagaaguaaagaaccuucaaagacuaaguggugccauggaugaacuccacaacgaaauacucgagcuggaugaaaaaguggaugaucucagagcugacacuauaagcucacaaauagaacuugcagucuugcuuuccaacgaaggaauaauaaacagugaagacgagcaucuauuggcacuugagagaaaacuaaagaaaaugcugggucccucugcuguagacauaggaaacggaugcuucgaaaccaaacacaaaugcaaccagaccugcuuagacaggauagcugcuggcaccuuuaaugcaggagaauuuucucuccccacuuuugauucauugaacauuacugcugcaucuuuaaaugaugauggauuggauaaccauacuauacugcucuauuacucaacugcugcuucuaguuuggcuguaacauuaaugcuagcuauuuuuauuguuuauauggucuccagagacaacguuucaugcuccaucugucuauaa

SEQ ID NO: 60355 - RNA, 1755 nt, Artificial Sequence
  derived and/or modified CDS sequence (wt) from hemagglutinin__InfluenzaB__AIC73903
augaaggcaauaauuguacuacucaugguaguaacauccaaugcagaucgaaucugcacugggauaacaucuucaaacucaccucauguggucaaaacagcuacucaaggggaggucaaugugacuggagugauaccacugacaacaacaccaacaaaaucuuauuuugcaaaucucaaaggaacaaggaccagagggaaacuaugcccggacugucucaacuguacagaucuggauguggccuugggcaggccaauguguguggggaccacaccuucugcuaaagcuucaauacuccaugaggucagaccuguuacauccgggugcuuuccuauaaugcacgacagaacaaaaaucaggcaacuacccaaucuucucagaggauaugaaaagaucagguuaucaacccaaaacguuaucgaugcagaaaaagcaccaggaggacccuacagacuuggaaccucaggaucuugcccuaacgcuaccaguaaaaucggauuuuuugcaacaauggcuugggcugucccaaaggacaacuacaaaaaugcaacgaacccacaaacaguggaaguaccauacauuuguacagaaggggaagaccaaauuacuguuuggggguuccauucggauaacaaaacccaaaugaagagccucuauggagacucaaauccucaaaaguucaccucaucugcuaauggaauaaccacacauuauguuucucagauuggcgacuucccagaucaaacagaagacggaggacuaccacaaagcggcagaauuguuguugauuacaugaugcaaaaaccugggaaaacaggaacaauugucuaucaaagggguguuuuguugccucaaaagguguggugcgcgaguggcaggagcaaaguaauaaaagggucauugccuuuaauuggugaagcagauugccuucaugaagaauacgguggauuaaacaaaagcaagccuuacuacacaggaaaacaugcaaaagccauaggaaauugcccaauauggguaaaaacaccuuugaagcuugccaauggaaccaaauauagaccuccugcaaaacuauugaaggaaagggguuucuucggagcuauugcugguuuccuagaaggaggaugggaaggaaugauugcagguuggcacggauacacaucucacggagcacauggaguggcaguggcggcagaccuuaagaguacacaagaagcuauaaauaagauaacaaaaaaucucaauucuuugagugaacuagaaguaaagaaccuucaaagacuaaguggugccauggaugaacuccacaacgaaauacucgagcuggaugaaaaaguggaugaucucagagcugacacuauaagcucacaaauagaacuugcagucuugcuuuccaacgaaggaauaauaaacagugaagacgagcaucuauuggcacuugagagaaaacuaaagaaaaugcugggucccucugcuguagacauaggaaacggaugcuucgaaaccaaacacaaaugcaaccagaccugcuuagacaggauagcugcuggcaccuuuaaugcaggagaauuuucucuccccacuuuugauucauugaacauuacugcugcaucuuuaaaugaugauggauuggauaaccauacuauacugcucuauuacucaacugcugcuucuaguuuggcuguaacauuaaugcuagcuauuuuuauuguuuauauggucuccagagacaacguuucaugcuccaucugucuauaa

SEQ ID NO: 60356 - RNA, 1755 nt, Artificial Sequence
  derived and/or modified CDS sequence (wt) from hemagglutinin__InfluenzaB__AIC73904
augaaggcaauaauuguacuacucaugguaguaacauccaaugcagaucgaaucugcacugggauaacaucuucaaacucaccucauguggucaaaacagcuacucaaggggaggucaaugugacuggcgugauaccacugacaacaacaccaacaaaaucuuauuuugcaaaucucaaaggaacaaggaccagagggaaacuaugcccggacugucucaacuguacagaucuggauguggccuugggcaggccaauguguguggggaucacaccuucugcuaaagcuucaauacuccaugaggucagaccuguuacauccgggugcuuuccuauaaugcacgacagaacaaaaaucaggcaacuacccaaucuucucagaggauaugaaaagaucagguuaucaacccaaaacguuaucgaugcagaaaaagcaccaggaggacccuacagacuuggaaccucaggaucuugcccuaacgcuaccaguaaaaucggauuuuuugcaacaauggcuugggcugucccaaaggacaacuacaaaaaugcaacgaacccacaaacaguggaaguaccauacauuuguacagaaggggaagaccaaauuacuguuuggggguuccauucggauaacaaaacccaaaugaagagccucuauggagacucaaauccucaaaaguucacuucaucugcuaauggaguaaccacacauuauguuucucagauuggcgacuucccagaucaaacagaagacggaggacuaccacaaagcggcagaauuguuguugauuacaugaugcaaaaaccugggaaaacaggaacaauugucuaucaaagggguguuuuguugccucaaaagguguggugcgcgaguggcaggagcaaaguaauaaaagggucauugccuuuaauuggugaagcagauugccuucaugaagaauacgguggauuaaacaaaagcaagccuuacuacacaggaaaacaugcaaaagccauaggaaauugcccaauauggguaaaaacaccuuugaagcuugccaauggaaccaaauauagaccuccugcaaaacuauugaaggaaagggguuucuucggagcuauugcugguuuccuagaaggaggaugggaaggaaugauugcagguuggcacggauacacaucucacggagcacauggaguggcaguggcggcagaccuuaaaaguacacaagaagcuauaaauaagauaacaaaaaaucucaauucuuugagugaacuagaaguaaagaaccuucaaagacuaaguggugccauggaugaacuccacaacgaaauacucgagcuggaugaaaaaguggaugaucucagagcugacacuauaagcucacaaauagaacuugcagucuugcuuuccaacgaaggaauaauaaacagugaagacgagcaucuauuggcacuugagagaaaacuaaagaaaaugcugggucccucugcuguagacauaggaaacggaugcuucgaaaccaaacacaaaugcaaccagaccugcuuagacaggauagcugcuggcaccuuuaaugcaggagaauuuucucuccccacuuuugauucauugaacauuacugcugcaucuuuaaaugaugauggauuggauaaccauacuauacugcucuauuacucaacugcugcuucuaguuuggcuguaacauuaaugcuagcuauuuuuauuguuuauauggucuccagagacaacguuucaugcuccaucugucuauaa

SEQ ID NO: 60357 - RNA, 1755 nt, Artificial Sequence; identical to SEQ ID NO: 60350
  derived and/or modified CDS sequence (wt) from hemagglutinin__InfluenzaB__AIC73905

SEQ ID NO: 60358 - RNA, 1755 nt, Artificial Sequence
  derived and/or modified CDS sequence (wt) from hemagglutinin__InfluenzaB__AIC73906
augaaggcaauaauuguacuacucaugguaguaacauccaaugcagaucgaaucugcacugggauaacaucuucaaacucaccucauguggucaaaacagcuacucaaggggaggucaaugugacuggcgugauaccacugacaacaacaccaacaaaaucuuauuuugcaaaucucaaaggaacaaggaccagagggaaacuaugcccggacugucucaacuguacagaucuggauguggccuugggcaggccaauguguguggggaccacaccuucugcuaaagcuucaauacuccaugaggucagaccuguuacauccgggugcuuuccuauaaugcacgacagaacaaaaaucaggcaacuacccaaucuucucagaggauaugaaaagaucagguuaucaacccaaaacguuaucgaugcagaaaaagcaccaggaggacccuacagacuuggaaccucaggaucuugcccuaacgcuaccaguaaaaucggauuuuuugcaacaauggcuugggcugucccaaaggacaacuacaaaaaugcaacgaacccacaaacaguggaaguaccauacauuuguacagaaggggaagaccaaauuacuguuuggggguuccauucggauaacaaaacccaaaugaagagccucuauggagacucaaauccucaaaaguucaccucaucugcuaauggaguaaccacacauuauguuucucagauuggcgacuucccagaucaaacagaagacggaggacuaccacaaagcggcagaauuguuguugauuacaugaugcaaaaaccugggaaaacaggaacaauugucuaucaaagggguguuuuguugccucaaaagguguggugcgcgaguggcaggagcaaaguaauaaaagggucauugccuuuaauuggugaagcagauugccuucaugaagaauacgguggauuaaacaaaagcaagccuuacuacacaggaaaacaugcaaaagccauaggaaauugcccaauauggguaaaaacaccuuugaagcuugccaauggaaccaaauauagaccuccugcaaaacuauugaaggaaagggguuucuucggagcuauugcugguuuccuagaaggaggaugggaaggaaugauugcagguuggcacggauacacaucucacggagcacauggaguggcaguggcggcagaccuuaagaguacacaagaagcuauaaauaagauaacaaaaaaucucaauucuuugagugaacuagaaguaaagaaccuucaaagacuaaguggugccauggaugaacuccacaacgaaauacucgagcuagaugaaaaaguggaugaucucagagcugacacuauaagcucacaaauagaacuugcagucuugcuuuccaacgaaggaauaauaaacagugaagacgagcaucuauuggcacuugagagaaaacuaaagaaaaugcugggucccucugcuguagacauaggaaacggaugcuucgaaaccaaacacaaaugcaaccagaccugcuuagacaggauagcugcuggcaccuuuaaugcaggagaauuuucucuccccacuuuugauucauugaacauuacugcugcaucuuuaaaugaugauggauuggauaaccauacuauacugcucuauuacucaacugcugcuucuaguuuggcuguaacauuaaugcuagcuauuuuuauuguuuauauggucuccagagacaacguuucaugcuccaucugucuauaa

SEQ ID NO: 60359 - RNA, 1755 nt, Artificial Sequence; identical to SEQ ID NO: 60358
  derived and/or modified CDS sequence (wt) from hemagglutinin__InfluenzaB__AIC73907

SEQ ID NO: 60360 - RNA, 1755 nt, Artificial Sequence; identical to SEQ ID NO: 60358
  derived and/or modified CDS sequence (wt) from hemagglutinin__InfluenzaB__AIC73908

SEQ ID NO: 60361 - RNA, 1755 nt, Artificial Sequence; identical to SEQ ID NO: 60343
  derived and/or modified CDS sequence (wt) from hemagglutinin__InfluenzaB__AIC73909

SEQ ID NO: 60362 - RNA, 1755 nt, Artificial Sequence
  derived and/or modified CDS sequence (wt) from hemagglutinin__InfluenzaB__AIC73910
augaaggcaauaauuguacuacucaugguaguaacauccaaugcagaucgaaucugcacugggauaacaucuucaaacucaccucauguggucaaaacagcuacucaaggggaggucaaugugacuggcgugauaccacugacaacaacaccaacaaaaucuuauuuugcaaaucucaaaggaacaaggaccagagggaaacuaugcccggacugucucaacuguacagaucuggauguggccuugggcaggccaauguguguggggaccacaccuucugcuaaagcuucaauacuccaugaggucagaccuguuacauccgggugcuuuccuauaaugcacgacagaacaaaaaucaggcaacuacccaaucuucucagaggauaugaaaagaucagguuaucaacccaaaacguuaucgaugcagaaaaagcaccaggaggacccuacagacuuggaaccucaggaucuugcccuaacgcuaccaguaaaaucggauuuuuugcaacaauggcuugggcugucccaaaggacaacuacaaaaaugcaacgaacccacaaacaguggaaguaccauacauuuguacagaaggggaagaccaaauuacuguuuggggguuccauucggauaacaaaacccaaaugaagagccucuauggagacucaaauccucaaaaguucaccucaucugcuaauggaguaaccacacauuauguuucucagauuggcgacuucccagaucaaacagaagacggaggacuaccacaaagcggcagaauuguuguugauuacaugaugcaaaaaccugggaaaacaggaacaauugucuaucaaagggguguuuuguugccucaaaagguguggugcgcgaguggcaggagcaaaguaauaaaagggucauugccuuuaauuggugaagcagauugccuucaugaagaauacgguggauuaaacaaaagcaagccuuacuacacagggaaacaugcaaaagccauaggaaauugcccaauauggguaaaaacaccuuugaagcuugccaauggaaccaaauauagaccuccugcaaaacuauugaaggaaagggguuucuucggagcuauugcugguuuccuagaaggaggaugggaaggaaugauugcagguuggcacggauacacaucucacggagcacauggaguggcaguggcggcagaccuuaagaguacacaagaagcuauaaauaagauaacaaaaaaucucaauucuuugagugaacuagaaguaaagaaccuucaaagacuaaguggugccauggaugaacuccacaacgaaauacucgagcuggaugaaaaaguggaugaucucagagcugacacuauaagcucacaaauagaacuugcagucuugcuuuccaacgaagggauaauaaacagugaagacgagcaucuauuggcacuugagagaaaacuaaagaaaaugcugggucccucugcuguagacauaggaaacggaugcuucgaaaccaaacacaaaugcaaccagaccugcuuagacaggauagcugcuggcaccuuuaaugcaggagaauuuucucuccccacuuuugauucauugaacauuacugcugcaucuuuaaaugaugauggauuggauaaccauacuauacugcucuauuacucaacugcugcuucuaguuuggcuguaacauuaaugcuagcuauuuuuauuguuuauauggucuccagagacaacguuucaugcuccaucugucuauaa

SEQ ID NO: 60363 - RNA, 1755 nt, Artificial Sequence
  derived and/or modified CDS sequence (wt) from hemagglutinin__InfluenzaB__AIC73911
augaaggcaauaauuguacuacucaugguaguaacauccaaugcagaucgaaucugcacugggauaacaucuucaaacucaccucauguggucaaaacagcuacucaaggggaggucaaugugacuggcgugauaccacugacaacaacaccaacaaaaucuuauuuugcaaaucucaaaggaacaaggaccagagggaaacuaugcccggacugucucaacuguacagaucuggauguggccuugggcaggccaauguguguggggaccacaccuucugcuaaagcuucaauacuccaugaggucagaccuguuacauccgggugcuuuccuauaaugcacgacagaacaaaaaucaggcaacuacccaaucuucucagaggauaugaaaagaucagguuaucaacccaaaacguuaucgaugcagaaaaagcaccaggaggacccuacagacuuggaaccucaggaucuugcccuaacgcuaccaguaaaaucggauuuuuugcaacaauggcuugggcugucccaaaggacaacuacaaaaaugcaacgaacccacaaacaguggaaguaccauacauuuguacagaaggggaagaccaaauuacuguuuggggguuccauucggauaacaaaacccaaaugaagagccucuauggagacucaaauccucaaaaguucaccucaucugcuaauggaguaaccacacauuauguuucucagauuggcgacuucccagaucaaacagaagacggaggacuaccacaaagcggcagaauuguuguugauuacaugaugcaaaaaccugggaaaacaggaacaauugucuaucaaagggguguuuuguugccucaaaagguguggugcgcgaguggcagaagcaaaguaauaaaagggucauugccuuuaauuggugaagcagauugccuucaugaagaauacgguggauuaaacaaaagcaagccuuacuacacaggaaaacaugcaaaagccauaggaaauugcccaauauggguaaaaacaccuuugaagcuugccaauggaaccaaauauagaccuccugcaaaacuauugaaggaaagggguuucuucggagcuauugcugguuuccuagaaggaggaugggaaggaaugauugcagguuggcacggauacacaucucacggagcacauggaguggcaguggcggcagaccuuaagaguacacaagaagcuauaaauaagauaacaaaaaaucucaauucuuugagugaacuagaaguaaagaaccuucaaagacuaaguggugccauggaugaacuccacaacgaaauacucgagcuggaugaaaaaguggaugaucucagagcugacacuauaagcucacaaauagaacuugcagucuugcuuuccaacgaaggaauaauaaacagugaagacgagcaucuauuggcacuugagagaaaacuaaagaaaaugcugggucccucugcuguagacauaggaaacggaugcuucgaaaccaaacacaaaugcaaccagaccugcuuagacaggauagcugcuggcaccuuuaaugcaggagaauuuucucuccccacuuuugauucauugaacauuacugcugcaucuuuaaaugaugauggauuggauaaccauacuauacugcucuauuacucaacugcugcuucuaguuuggcuguaacauuaaugcuagcuauuuuuauuguuuauauggucuccagagacaacguuucaugcuccaucugucuauaa

SEQ ID NO: 60364 - RNA, 1755 nt, Artificial Sequence
  derived and/or modified CDS sequence (wt) from hemagglutinin__InfluenzaB__AIC73912
augaaggcaauaauuguacuacucaugguaguaacauccaaugcagaucgaaucugcacugggauaacaucuucaaacucaccucauguggucaaaacagcuacucaaggggaggucaaugugacuggcgugauaccacugacaacaacaccaacaaaaucuuauuuugcaaaucucaaaggaacaaggaccagagggaaacuaugcccggacugucucaacugcacagaucuggauguggccuugggcaggccaauguguguggggaccacaccuucugcuaaagcuucaauacuccaugaggucagaccuguuacauccgggugcuuuccuauaaugcacgacagaacaaaaaucaggcaacuacccaaucuucucagaggauaugaaaagaucagguuaucaacccaaaacguuaucgaugcagaaaaagcaccaggaggacccuacagacuuggaaccucaggaucuugcccuaacgcuaccaguaaaaucggauuuuuugcaacaauggcuugggcugucccaaaggacaacuacaaaaaugcaacgaacccacaaacaguggaaguaccauacauuuguacagaaggggaagaccaaauuacuguuuggggguuccauucggauaacaaaacccaaaugaagagccucuauggagacucaaauccucaaaaguucaccucaucugcuaauggaguaaccacacauuauguuucucagauuggcgacuucccagaucaaacagaagacggaggacuaccacaaagcggcagaauuguuguugauuacaugaugcaaaaaccugggaaaacaggaacaauugucuaucaaagggguguuuuguugccucaaaagguguggugcgcgaguggcaggagcaaaguaauaaaagggucauugccuuuaauuggugaagcagauugccuucaugaagaauacgguggauuaaacaaaagcaagccuuacuacacaggaaaacaugcaaaagccauaggaaauugcccaauauggguaaaaacaccuuugaagcuugccaauggaaccaaauauagaccuccugcaaaacuauugaaggaaagggguuucuucggagcuauugcugguuuccuagaaggaggaugggaaggaaugauugcagguuggcacggauacacaucccacggagcacauggaguggcaguggcggcagaccuuaagaguacacaagaagcuauaaauaagauaacaaaaaaucucaauucuuugagugaacuagaaguaaagaaccuucaaagacuaaguggugccauggaugaacuccacaacgaaauacucgagcuggaugaaaaaguggaugaucucagagcugacacuauaagcucacaaauagaacuugcagucuugcuuuccaacgaaggaauaauaaacagugaagacgagcaucuauuggcacuugagagaaaacuaaagaaaaugcugggucccucugcuguagacauaggaaacggaugcuucgaaaccaaacacaaaugcaaccagaccugcuuagacaggauagcugcuggcaccuuuaaugcaggagaauuuucucuccccacuuuugauucauugaacauuacugcugcaucuuuaaaugaugauggauuggauaaccauacuauacugcucuauuacucaacugcugcuucuaguuuggcuguaacauuaaugcuagcuauuuuuauuguuuauauggucuccagagacaacguuucaugcuccaucugucuauaa

SEQ ID NO: 60365 - RNA, 1755 nt, Artificial Sequence; identical to SEQ ID NO: 60364
  derived and/or modified CDS sequence (wt) from hemagglutinin__InfluenzaB__AIC73913

SEQ ID NO: 60366 - RNA, 1755 nt, Artificial Sequence; identical to SEQ ID NO: 60364
  derived and/or modified CDS sequence (wt) from hemagglutinin__InfluenzaB__AIC73914

SEQ ID NO: 60367 - RNA, 1755 nt, Artificial Sequence; identical to SEQ ID NO: 60364
  derived and/or modified CDS sequence (wt) from hemagglutinin__InfluenzaB__AIC73915

SEQ ID NO: 60368 - RNA, 1755 nt, Artificial Sequence; identical to SEQ ID NO: 60364
  derived and/or modified CDS sequence (wt) from hemagglutinin__InfluenzaB__AIC73916

SEQ ID NO: 60369 - RNA, 1755 nt, Artificial Sequence
  derived and/or modified CDS sequence (wt) from hemagglutinin__InfluenzaB__AIC73917
augaaggcaauaauuguacuacucaugguaguaacauccaaugcagaucgaaucugcacugggauaacaucuucaaacucaccucauguggucaaaacagcuacucaaggggaggucaaugugacuggcgugauaccacugacaacaacaccaacaaaaucuuauuuugcaaaucucaaaggaacaaggaccagagggaaacuaugcccggacugucucaacuguacagaucuggauguggccuugggcaggccaauguguguggggaccacaccuucugcuaaagcuucaauacuccaugaggucagaccuguuacauccgggugcuuuccuauaaugcacgacagaacaaaaaucaggcaacuacccaaucuucucagaggauacgaaaagaucagguuaucaacccaaaacguuaucgaugcagaaaaagcaccaggaggacccuacagacuuggaaccucaggaucuugcccuaacgcuaccaguaaaaucggauuuuuugcaacaauggcuugggcugucccaaaggacaacuacaaaaaugcaacgaacccacaaacaguggaaguaccauacauuuguacagaaggggaagaccaaauuacuguuuggggguuccauucggauaacaaaacccaaaugaagagccucuauggagacucaaauccucaaaaguucaccucaucugcuaauggaguaaccacacauuauguuucucagauuggcgacuucccagaucaaacagaagacggaggacuaccacaaagcggcagaauuguuguugauuacaugaugcaaaaaccugggaaaacaggaacaauugucuaucaaagggguguuuuguugccucaaaagguguggugcgcgaguggcaggagcaaaguaauaaaagggucauugccuuuaauuggugaagcagauugccuucaugaagaauacgguggauuaaacaaaagcaagccuuacuacacaggaaaacaugcaaaagccauaggaaauugcccaauauggguaaaaacaccuuugaagcuugccaauggaaccaaauauagaccuccugcaaaacuauugaaggaaagggguuucuucggagcuauugcugguuuccuagaaggaggaugggaaggaaugauugcagguuggcacggauacacaucucacggagcacauggaguggcaguggcggcagaccuuaagaguacacaagaagcuauaaauaagauaacaaaaaaucucaauucuuugagugaacuagaaguaaagaaccuucaaagacuaaguggugccauggaugaacuccacaacgaaauacucgagcuggaugaaaaaguggaugaucucagagcugacacuauaagcucacaaauagaacuugcagucuugcuuuccaacgaaggaauaauaaacagugaagacgagcaucuauuggcacuugagagaaaacuaaagaaaaugcugggucccucugcuguagacauaggaaacggaugcuucgaaaccaaacacaaaugcaaccagaccugcuuagacaggauagcugcuggcaccuuuaaugcaggagaauuuucucuccccacuuuugauucauugaacauuacugcugcaucuuuaaaugaugauggauuggauaaccauacuauacugcucuauuacucaacugcugcuucuaguuuggcuguaacauuaaugcuagcuauuuuuauuguuuauauggucuccagagacaacguuucaugcuccaucugucuauaa

SEQ ID NO: 60370 - RNA, 1755 nt, Artificial Sequence
  derived and/or modified CDS sequence (wt) from hemagglutinin__InfluenzaB__AIC73918
augaaggcaauaauuguacuacucaugguaguaacauccaaugcagaucgaaucugcacugggauaacaucuucaaacucaccucauguggucaaaacagcuacucaaggggaggucaaugugacuggcgugauaccacugacaacaacaccaacaaaaucuuauuuugcaaaucucaaaggaacaaggaccagagggaaacuaugcccggauugucucaacuguacagaucuggauguggccuugggcaggccaauguguguggggaccacaccuucugcuaaagcuucaauacuccaugaggucagaccuguuacauccgggugcuuuccuauaaugcacgacagaacaaaaaucaggcaacuacccaaucuucucagaggauaugaaaagaucagguuaucaacccaaaacguuaucgaugcagaaaaagcaccaggaggacccuacagacuuggaaccucaggaucuugcccuaacgcuaccaguaaaaucggauuuuuugcaacaauggcuugggcugucccaaaggacaacuacaaaaaugcaacgaacccacaaacaguggaaguaccauacauuuguacagaaggggaagaccaaauuacuguuuggggguuccauucggauaacaaaacccaaaugaagagccucuauggagacucaaauccucaaaaguucaccucaucugcuaauggaguaaccacacauuauguuucucagauuggcgacuucccagaucaaacagaagacggaggacuaccacaaagcggcagaauuguuguugauuacaugaugcaaaaaccugggaaaacaggaacaauugucuaucaaagggguguuuuguugccucaaaagguguggugcgcgaguggcaggagcaaaguaauaaaagggucauugccuuuaauuggugaagcagauugccuucaugaagaauacgguggauuaaacaaaagcaagccuuacuacacaggaaaacaugcaaaagccauaggaaauugcccaauauggguaaaaacaccuuugaagcuugccaauggaaccaaauauagaccuccugcaaaacuauugaaggaaagggguuucuucggagcuauugcugguuuccuagaaggaggaugggaaggaaugauugcagguuggcacggauacacaucucacggagcacauggaguggcaguggcggcagaccuuaagaguacacaagaagcuauaaauaagauaacaaaaaaucucaauucuuugagugaacuagaaguaaagaaccuucaaagacuaaguggugccauggaugaacuccacaacgaaauacucgagcuggaugaaaaaguggaugaucucagagcugacacuauaagcucacaaauagaacuugcagucuugcuuuccaacgaaggaauaauaaacagugaagacgagcaucuauuggcacuugagagaaaacuaaagaaaaugcugggucccucugcuguagacauaggaaacggaugcuucgaaaccaaacacaaaugcaaccagaccugcuuagacaggauagcugcuggcaccuuuaaugcaggagaauuuucucuccccacuuuugauucauugaacauuacugcugcaucuuuaaaugaugauggauuggauaaccauacuauacugcucuauuacucaacugcugcuucuaguuuggcuguaacauuaaugcuagcuauuuuuauuguuuauauggucuccagagacaacguuucaugcuccaucugucuauaa

SEQ ID NO: 60371 - RNA, 1755 nt, Artificial Sequence
  derived and/or modified CDS sequence (wt) from hemagglutinin__InfluenzaB__AIC73919
augaaggcaauaauuguacuacucaugguaguaacauccaaugcagaucgaaucugcacugggauaacaucuucaaacucaccucauguggucaaaacagcuacucaaggggaggucaaugugacuggcgugauaccacugacaacaacaccaacaaaaucuuauuuugcaaaucucaaaggaacaaggaccagagggaaacuaugcccggacugucucaacuguacagaucuggauguggccuugggcaggccaauguguguggggaccacaccuucugcuaaagcuucaauacuccaugaggucagaccuguuacauccgggugcuuuccuauaaugcacgacagaacaaaaaucaggcaacuacccaaucuucucagaggauaugaaaagaucagguuaucaacccaaaacguuaucgaugcagaaaaagcaccaggaggacccuacagacuuggaaccucaggaucuugcccuaacgcuaccaguaaaaucggauuuuuugcaacaauggcuugggcugucccaaaggacaacuacaaaaaugcaacgaacccacuaacaguggaaguaccauacauuuguacagaaggggaagaccaaauuacuguuuggggguuccauucggauaacaaaacccaaaugaagagccucuauggagauucaaauccucaaaaguucaccucaucugcuaauggaguaaccacgcauuauguuucucagauuggcgacuucccagaucaaacagaagacggaggacuaccacaaagcggcagaauuguuguugauuacaugaugcaaaaaccugggaaaacaggaacaauugucuaucaaagggguguuuuguugccucaaaagguguggugcgcgaguggcaggagcaaaguaauaaaagggucauugccuuuaauuggugaagcagauugccuucaugaagaauacgguggauuaaacaaaagcaagccuuacuacacaggaaaacaugcaaaagccauaggaaauugcccaauauggguaaaaacaccuuugaagcuugccaauggaaccaaauauagaccuccugcaaaacuauugaaggaaagggguuucuucggagcuauugcugguuuccuagaaggaggaugggaaggaaugauugcagguuggcacggauacacaucucacggagcacauggaguggcaguggcggcagaccuuaagaguacacaagaagcuauaaauaagauaacaaaaaaucucaauucuuugagugaacuagaaguaaagaaccuucaaagacuaaguggugccauggaugaacuccacaacgaaauacucgagcuggaugaaaaaguggaugaucucagagcugacacuauaagcucacaaauagaacuugcagucuugcuuuccaacgaaggaauaauaaacagugaagacgagcaucuauuggcacuugagagaaaacuaaagaaaaugcugggucccucugcuguagacauaggaaacggaugcuucgaaaccaaacacaaaugcaaccagaccugcuuagacaggauagcugcuggcaccuuuaaugcaggagaauuuucucuccccacuuuugauucauugaacauuacugcugcaucuuuaaaugaugauggauuggauaaccauacuauacugcucuauuacucaacugcugcuucuaguuuggcuguaacauuaaugcuagcuauuuuuauuguuuauauggucuccagagacaacguuucaugcuccaucugucuauaa

SEQ ID NO: 60372 - RNA, 1755 nt, Artificial Sequence
  derived and/or modified CDS sequence (wt) from hemagglutinin__InfluenzaB__AIC73920
augaaggcaauaauuguacuacucaugguaguaacauccaaugcagaucgaaucugcacugggauaacaucuucaaacucaccucauguggucaaaacagcuacucaaggggaggucaaugugacuggcgugauaccacugacaacaacaccaacaaaaucuuauuuugcaaaucucaaaggaacaaggaccagagggaaacuaugcccggacugucucaacugcacagaucuggauguggccuugggcaggccaauguguguggggaccacaccuucugcuaaagcuucaauacuccaugaggucagaccuguuacauccgggugcuuuccuauaaugcacgacagaacaaaaaucaggcaacuacccaaucuucucagaggauaugaaaagaucagguuaucaacccaaaacguuaucgaugcagaaaaagcaccaggaggacccuacagacuuggaaccucaggaucuugcccuaacgcuaccaguaaaaucggauuuuuugcaacaauggcuugggcugucccaaaggacaacuacaaaaaugcaacgaacccacaaacaguggaaguaccauacauuuguacagaaggggaagaccaaauuacuguuuggggguuccauucggauaacaaaacccaaaugaagagccucuauggagacucaaauccucaaaaguucaccucaucugcuaauggaguaaccacacauuauguuucucagauuggcgacuucccagaucaaacagaagacggaggacuaccacaaagcggcagaauuguuguugauuacaugaugcaaaaaccugggaaaacaggaacaauugucuaucaaagggguguuuuguugccucaaaagguguggugcgcgaguggcaggagcaaaguaauaaaagggucauugccuuuaauuggugaagcagauugccuucaugaagaauacgguggauuaaacaaaagcaagccuuacuacacaggaaaacaugcaaaagccauaggaaauugcccaauauggguaaaaacaccuuugaagcuugccaauggaaccaaauauagaccuccugcaaaacuauugaaggaaagggguuucuucggagcuauugcugguuuccuagaaggaggaugggaaggaaugauugcagguuggcacggauacacaucccacggagcacauggaguggcaguggcggcagaccuuaagaguacacaagaagcuauaaauaagauaacaaaaaaucucaauucuuugagugaacuagaaguaaagaaccuucaaagacuaaguggugccauggaugaacuccacaacgaaauacucgagcuggaugaaaaaguggaugaucucagagcugacacuauaagcucacaaauagaacuugcagucuugcuuuccaacgaaggaauaauaaacagugaagacgagcaucuauuggcacuugagagaaaacuaaagaaaaugcugggucccucugcuguagacauaggaaacggaugcuucgaaaccaaacacaaaugcaaccagaccugcuuagacaggauagcugcuggcaccuuuaaugcaggagaguuuucucuccccacuuuugauucauugaacauuacugcugcaucuuuaaaugaugauggauuggauaaccacacuauacugcucuauuacucaacugcugcuucuaguuuggcuguaacauuaaugcuagcuauuuuuauuguuuauauggucuccagagacaacguuucaugcuccaucugucuauaa

SEQ ID NO: 60373 - RNA, 1758 nt, Artificial Sequence
  derived and/or modified CDS sequence (wt) from hemagglutinin__InfluenzaB__AIC73921
augaaggcaauaauuguacuacucaugguaguaacauccaaugcagaucgaaucugcacugggauaacaucgucaaacucaccacaugucgucaaaacugcuacucaaggggaggucaaugugaccgguguaauaccacugacaacaacacccaccaaaucucauuuugcaaaucucaaaggaacagaaaccagggggaaacuaugcccaaaaugccucaacugcacagaucuggacguagccuugggcagaccaaaaugcacggggaaaauacccucggcaagaguuucaauacuccaugaagucagaccuguuacaucugggugcuuuccuauaaugcacgauagaacaaaaauuagacagcugccuaaccuucuccgaggauacgaacauaucagguuaucaacucacaacguuaucaaugcagaaaaugcaccaggaggacccuacaagauuggaaccucagggucuugcccuaacguuaccaauggaaacggauucuucgcaacaauggcuugggccgucccaaaaaacgacaaaaacaaaacagcaacaaauccauuaacaauagaaguaccauacauuuguacagaaggagaagaccaaauuaccguuuggggguuccacucugacaacgagacccaaauggcaaagcucuauggggacucaaauccccagaaguucaccucaucugccaacggagugaccacacauuacguuucacagauugguggcuucccaaaucaaacagaagacggaggacuaccacaaagugguagaauuguuguugauuacauggugcaaaaaucugggaaaacaggaacaauuaccuaucaaagagguauuuuauugccucaaaagguguggugcgcaaguggcaggagcaagguaauaaaaggauccuugccuuuaauuggagaagcagauugccuccacgaaaaauacgguggguuaaacaaaagcaagccuuacuacacaggggaacaugcaaaggccauaggaaauugcccaauaugggugaaaacacccuugaagcuggccaauggaaccaaauauagaccuccugcaaaacuauuaaaggaaagggguuucuucggagcuauugcugguuucuuagaaggaggaugggaaggaaugauugcagguuggcacggauacacaucccauggggcacauggaguagcgguggcagcugaccuuaagagcacucaagaggccauaaacaagauaacaaaaaaucucaacucuuugagugagcuggaaguaaagaaucuucaaagacuaagcggugccauggaugaacuccacaacgaaauacuagaacuagaugagaaaguggaugaucucagagcugauacaauaagcucacaaauagaacucgcaguccugcuuuccaaugaaggaauaauaaacagugaagaugaacaucucuuggcgcuugaaagaaagcugaagaaaaugcugggccccucugcuguagagauagggaauggaugcuuugaaaccaaacacaagugcaaccagaccugucucgacagaauagcugcugguaccuuugaugcaggagaauuuucucuccccacuuuugauucacugaauauuacugcugcaucuuuaaaugacgauggauuggauaaucauacuauacugcuuuacuacucaacugcugccuccaguuuggcuguaacacugaugauagcuaucuuuguuguuuauauggucuccagagacaauguuucuugcuccaucugucuauaa

SEQ ID NO: 60374 - RNA, 1755 nt, Artificial Sequence; identical to SEQ ID NO: 60343
  derived and/or modified CDS sequence (wt) from hemagglutinin__InfluenzaB__AIC73922

SEQ ID NO: 60375 - RNA, 1758 nt, Artificial Sequence
  derived and/or modified CDS sequence (wt) from hemagglutinin__InfluenzaB__AIC73924
augaaggcaauaauuguacuacucaugguaguaacauccaaugcagaucgaaucugcacugggauaacaucgucaaacucaccacaugucgucaaaacugcuacucaaggggaggucaaugugaccgguguaauaccacugacaacaacacccaccaaaucucauuuugcaaaucucaaaggaacagaaaccagggggaaacuaugcccaaaaugccucaacugcacagaucuggauguagccuugggcagaccaaaaugcacagggaaaauacccucggcaagaguuucaauacuccaugaagucagaccuguuacaucugggugcuuuccuauaaugcacgauagaacaaaaauuagacagcugccuaaccuucuccgaggauacgaacauaucagguuaucaacucacaacguuaucaaugcagaagaugcaccaggaggacccuacaaaauuggaaccucagggucuugcccuaacguuaccaauggaaacggauucuucgcaacaauggcuugggccgucccaaaaaacgacaaaaacaaaacagcaacaaauccauuaacaauagaaguaccauacauuuguacagaaggagaagaccaaauuaccguuuggggguuccacucugacaacgagacccaaauggcaaagcucuauggggacucaaagccccagaaguucaccucaucugccaacggagugaccacacauuacguuucacagauugguggcuucccaaaucaaacagaagacggaggacuaccacaaagugguagaauuguuguugauuacauggugcaaaaaucuggaaaaacaggaacaauuaccuaucaaagagguauuuuacugccucaaaagguguggugcgcaaguggcaggagcaagguaauaaaaggauccuugccuuuaauuggagaagcagauugccuccacgaaaaauacgguggauuaaacaaaagcaagccuuacuacacaggggaacaugcaaaggccauaggaaauugcccaauaugggugaaaacacccuugaagcuggccaauggaaccaaauauagaccuccugcaaaacuauuaaaggaaagggguuucuucggagcuauugcugguuucuuagagggaggaugggaaggaaugauugcagguuggcacggauacacaucccauggggcacauggaguagcgguggcagcugaccuuaagagcacucaagaggccauaaacaagauaacaaaaaaucucaacucuuugagugagcuggaaguaaagaaucuucaaagacuaagcggugccauggaugaacuccacaacgaaauacuagaacuagaugagaaaguggaugaccucagagcugauacaauaagcucacaaauagaacucgcaguccugcuuuccaaugaaggaauaauaaacagugaagaugaacaucucuuggcgcuugaaagaaagcugaagaaaaugcugggccccucugcuguagagauagggaauggaugcuuugaaaccaaacacaagugcaaccagaccugucucgacagaauagcugcugguaccuuugaugcaggagaauuuucucuccccaccuuugauucacugaauauuacugcugcaucuuuaaaugacgauggauuggauaaucauacuauacugcuuuacuacucaacugcugccuccaguuuggcuguaacacugaugauagcuaucuuuguuguuuauauggucuccagagacaauguuucuugcuccaucugucuauaa

SEQ ID NO: 60376 - RNA, 1758 nt, Artificial Sequence
  derived and/or modified CDS sequence (wt) from hemagglutinin__InfluenzaB__AIC73925
augaaggcaacaauuguacuacucaugguaguaacauccaaugcagaucgaaucugcacugggauaacaucgucaaacucaccacaugucgucaaaacugcuacucaaggggaggucaaugugaccgguguaauaccacugacaacaacacccaccaaaucucauuuugcaaaucucaaaggaacagaaaccagggggaaacuaugcccaaaaugccucaacugcacagaucuggauguagccuugggcagaccaaaaugcacagggaaaauacccucggcaagaguuucaauacuccaugaagucagaccuguuacaucugggugcuuuccuauaaugcacgauagaacaaaaauuagacagcugccuaaccuucuccgaggauacgaacauaucagguuaucaacucacaacguuaucaaugcagaagaugcaccaggaggacccuacaaaauuggaaccucagggucuugcccuaacguuaccaauggaaacggauucuucgcaacaauggcuugggccgucccaaaaaacgacaaaaacaaaacagcaacaaauccauuaacaauagaaguaccauacauuuguacagaaggagaagaccaaauuaccguuuggggguuccacucugacaacgagacccaaauggcaaagcucuauggggacucaaagccccagaaguucaccucaucugccaacggagugaccacacauuacguuucacagauugguggcuucccaaaucaaacagaagacggaggacuaccacaaagugguagaauuguuguugauuacauggugcaaaaaucuggaaaaacaggaacaauuaccuaucaaagagguauuuuacugccucaaaagguguggugcgcaaguggcaggagcaagguaauaaaaggauccuugccuuuaauuggagaagcagauugccuccacgaaaaauacgguggauuaaacaaaagcaagccuuacuacacaggggaacaugcaaaggccauaggaaauugcccaauaugggugaaaacacccuugaagcuggccaauggaaccaaauauagaccuccugcaaaacuauuaaaggaaagggguuucuucggagcuauugcugguuucuuagagggaggaugggaaggaaugauugcagguuggcacggauacacaucccauggggcacauggaguagcgguggcagcugaccuuaagagcacucaagaggccauaaacaagauaacaaaaaaucucaacucuuugagugagcuggaaguaaagaaucuucaaagacuaagcggugccauggaugaacuccacaacgaaauacuagaacuagaugagaaaguggaugaccucagagcugauacaauaagcucacaaauagaacucgcaguccugcuuuccaaugaaggaauaauaaacagugaagaugaacaucucuuggcgcuugaaagaaagcugaagaaaaugcugggccccucugcuguagagauagggaauggaugcuuugaaaccaaacacaagugcaaccagaccugucucgacagaauagcugcugguaccuuugaugcaggagaauuuucucuccccaccuuugauucacugaauauuacugcugcaucuuuaaaugacgauggauuggauaaucauacuauacugcuuuacuacucaacugcugccuccaguuuggcuguaacacugaugauagcuaucuuuguuguuuauauggucuccagagacaauguuucuugcuccaucugucuauaa

SEQ ID NO: 60377 - RNA, 1755 nt, Artificial Sequence
  derived and/or modified CDS sequence (wt) from hemagglutinin__InfluenzaB__AIC73926
augaaggcaauaauuguacuacucaugguaguaacauccaaugcagaucgaaucugcacugggauaacaucuucaaacucaccucauguggucaaaacagcuacucaaggggaggucaaugugacuggcgugauaccacugacaacaacaccaacaaaaucuuauuuugcaaaucucaaaggaacaaggaccagagggaaacuaugcccggacugucucaacuguacagaucuggauguggccuugggcaggccaauguguguggggaccacacccucugcuaaagcuucaauacuccaugaggucagaccuguuacauccgggugcuuuccuauaaugcacgacagaacaaaaaucaggcaacuacccaaucuucucagaggauaugaaaagaucagguuaucaacccaaaacguuaucgaugcagaaaaagcaccaggaggacccuacagacuuggaaccucaggaucuugcccuaacgcuaccaguaaaaucggauuuuuugcaacaauggcuugggcugucccaaaggacaacuacaaaaaugcaacgaacccacaaacaguggaaguaccauacauuuguacagaaggggaagaccaaauuacuguuuggggguuccauucggauaacaaaacccaaaugaagagccucuauggagacucaaauccucaaaaguucaccucaucugcuaauggaguaaccacacauuauguuucucagauuggcgacuucccagaucaaacagaagacggaggacuaccacaaagcggcagaauuguuguugauuacaugaugcaaaaaccugggaaaacaggaacaauugucuaucaaagggguguuuuguugccucaaaagguguggugcgcgaguggcaggagcaaaguaauaaaagggucauugccuuuaauuggugaagcagauugccuucaugaagaauacgguggauuaaacaaaagcaagccuuacuacacaggaaaacaugcaaaagccauaggaaauugcccaauauggguaaaaacaccuuugaagcuugccaauggaaccaaauauagaccuccugcaaaacuauugaaggaaagggguuucuucggagcuauugcugguuuccuagaaggaggaugggaaggaaugauugcagguuggcacggauacacaucucacggagcacauggaguggcaguggcggcagaccuuaagaguacacaagaagcuauaaauaagauaacaaaaaaucucaauucuuugagugaacuagaaguaaagaaccuucaaagacuaaguggugccauggaugaacuccacaacgaaauacucgagcuggaugaaaaaguggaugaucucagagcugacacuauaagcucacaaauagaacuugcagucuugcuuuccaacgaaggaauaauaaacagugaagacgagcaucuauuggcacuugagagaaaacuaaagaaaaugcugggucccucugcuguagacauaggaaacggaugcuucgaaaccaaacacaaaugcaaccagaccugcuuagacaggauagcugcuggcaccuuuaaugcaggagaauuuucucuccccacuuuugauucauugaacauuacugcugcaucuuuaaaugaugauggauuggauaaccauacuauacugcucuauuacucaacugcugcuucuaguuuggcuguaacauuaaugcuagcuauuuuuauuguuuauauggucuccagagacaacguuucaugcuccaucugucuauaa

SEQ ID NO: 60378 - RNA, 1755 nt, Artificial Sequence; identical to SEQ ID NO: 58583
  derived and/or modified CDS sequence (wt) from hemagglutinin__InfluenzaB__AIL94977

SEQ ID NO: 60379 - RNA, 1755 nt, Artificial Sequence; identical to SEQ ID NO: 58582
  derived and/or modified CDS sequence (wt) from hemagglutinin__InfluenzaB__AIL94988

SEQ ID NO: 60380 - RNA, 1755 nt, Artificial Sequence
  derived and/or modified CDS sequence (wt) from hemagglutinin__InfluenzaB__AIL94999
augaaggcaauaauuguacuacucaugguaguaacauccaaugcagaucgaaucugcacugggauaacaucuucaaacucaccucauguggucaaaacagcuacucaaggggaggucaaugugacuggcgugauaccacugacaacaacaccaacaaaaucuuauuuugcaaaccucaaaggaacaaggaccagagggaaacuaugcccggacugucucaacuguacagaucuggauguggccuugggcaggccaauguguguggggaccacaccuucugcuaaagcuucaauacuccacgaagucagaccuguuacauccgggugcuuuccuauaaugcacgacagaacaaaaaucaggcaacuacccaaucuucucagaggauaugaaaauaucagguuaucaacccagaacguuaucgaugcagaaaaagcaccaggaggacccuacagacuuggaaccucaggaucuugcccuaaugcuaccaguaaaaccggauuuuucgcaacaauggcuugggcugucccaaaggacaacuacaaaaaugcaacgaacccacuaacaguagaaguaccauacauuuguacagaaggggaagaccaaauuacuguuuggggguuccauucagauaacaaaacccaaaugaagaaccucuauggagacucaaauccucaaaaguucaccucaucugcuaauggaguaaccacacauuauguuucucagauuggcgacuucccagaucaaacagaagacggaggacuaccacaaagcggcagaauuguuguugauuacaugaugcaaaaaccugggaaaacaggaacaauugucuaucaaagagguguuuuguugccucaaaagguguggugcgcgaguggcaggagcaaaguaauaaaagggucauugccuuuaauuggugaagcagauugccuucaugaaaaauacgguggauuaaacaaaagcaagccuuacuacacaggagaacaugcaaaagccauaggaaauugcccaauauggguaaaaacaccuuugaagcuugccaauggaaccaaauauagaccuccugcaaaacuauuaaaggaaagggguuucuucggagcuauugcugguuuccuagaaggaggaugggaaggaaugauugcagguuggcacggauacacaucucacggagcacauggaguggcaguggcggcagaccuuaagaguacacaagaagcuauaaauaagauaacaaaaaaucucaauucuuugagugagcuagaaguaaagaaccuucaaagacuaaguggugccauggaugaacuccacaacgaaauacucgagcuggaugagaaaguggaugaucucagagcugacacuauaagcucacaaauagaacuugcagucuugcuuuccaacgaaggaauaauaaacagugaagacgagcaucuauuggcacuugagagaaaacuaaagaaaaugcugggccccucugcuguagacauaggaaauggaugcuucgaaaccaaacacaaaugcaaccagaccugcuuagacaggauagcugcuggcaccuuuaaugcaggagaauuuucucuccccacuuuugauucauugaacauuacugcugcaucuuuaaaugaugauggauuggauaaccauacuauacugcucuauuacucaacugcugcuucuaguuuggcuguaacauuaaugcuagcuauuuuuauuguuuauauggucuccagagacaacguuucaugcuccaucugucuauaa

SEQ ID NO: 60381 - RNA, 1755 nt, Artificial Sequence; identical to SEQ ID NO: 58853
  derived and/or modified CDS sequence (wt) from hemagglutinin__InfluenzaB__AIL95010

SEQ ID NO: 60382 - RNA, 1755 nt, Artificial Sequence; identical to SEQ ID NO: 58838
  derived and/or modified CDS sequence (wt) from hemagglutinin__InfluenzaB__AIL95021

SEQ ID NO: 60383 - RNA, 1758 nt, Artificial Sequence
  derived and/or modified CDS sequence (wt) from hemagglutinin__InfluenzaB__AIL95032
augaaggcaauaauuguacuacucaugguaguaacauccaaugcagaucgaaucugcacugggauaacaucaucaaacucaccacaugucgucaaaacugcuacucaaggggaggucaaugugacugguguaauaccacugacaacaacacccaccaaaucucauuuugcaaaucucaaaggaacagaaaccagagggaaacuaugcccaaaaugccucaacugcacagaucuggacguagccuugggcagaccaaaaugcacggggaaaauaccaucggcaagaguuucaauacuccaugaaguaagaccuguuacaucugggugcuuuccuauaaugcacgacagaacaaaaauuagacagcugccuaaccuucuccgaggauacgaacauaucagguuaucaacucauaacguuaucaaugcagaaaaugcaccaggaggacccuacaaaauuggaaccucagggucuugcccuaacguuaccaauggaaacggauuuuucgcaacaauggcuugggccgucccaaaaaacgacaaaaacaaaacagcaacaaauccauuaacaauagaaguaccauacauuuguacagaaggagaagaccaaauuaccguuuggggguuccacucugauaacgagacccaaauggcaaagcucuauggggacucaaagccccagaaguucaccucaucugccaacggagugaccacacauuacguuucacagauugguggcuucccaaaucaaacagaagacggaggacuaccacaaagugguagaauuguuguugacuacauggugcaaaaaucugggaaaacaggaacaauuaccuaucaaagagguauuuuauugccucaaaagguguggugcgcaaguggcaggagcaagguaauaaaaggauccuugccuuuaauuggagaagcagauugccuccacgaaaaauacgguggauuaaacaaaagcaagccuuacuacacaggggaacaugcaaaggccauaggaaauugcccaauaugggugaagacacccuugaagcuggccaauggaaccaaauauagaccuccugcaaaacuauuaaaggaaagggguuucuucggagcuauugcugguuucuuagaaggaggaugggaaggaaugauugcagguuggcacggauacacgucccauggggcacauggaguagcgguggcagcagaccuuaagagcacucaagaggccauaaacaagauaacaaaaaaucucaacucuuugagugagcuggaaguaaagaaucuucaaagacuaagcggugccauggaugaacuccacaaugaaauauuagaacuagacgagaaaguggaugaucucagagcugauacaauaagcucacaaauagaacucgcaguccuucuuuccaaugaaggaauaauaaacagugaagaugaacaucucuuggcgcuugaaagaaagcugaagaaaaugcugggccccucugcuguagagauagggaauggaugcuuugaaaccaaacacaagugcaaccagaccugucucgacagaauagcugcugguaccuuugacgcaggagaauuuucucuccccaccuuugauucacuaaauauuacugcugcaucuuuaaauggcgauggauuggauaaucauacuauacugcuuuacuacucaacugcugccuccaguuuggcuguaacacugaugauagcuaucuuuguuguuuauauggucuccagagacaauguuucuugcuccaucugucuauaa

SEQ ID NO: 60384 - RNA, 1755 nt, Artificial Sequence; identical to SEQ ID NO: 58838
  derived and/or modified CDS sequence (wt) from hemagglutinin__InfluenzaB__AIL95043

SEQ ID NO: 60385 - RNA, 1758 nt, Artificial Sequence; identical to SEQ ID NO: 58706
  derived and/or modified CDS sequence (wt) from hemagglutinin__InfluenzaB__AIL95054

SEQ ID NO: 60386 - RNA, 1758 nt, Artificial Sequence; identical to SEQ ID NO: 58699
  derived and/or modified CDS sequence (wt) from hemagglutinin__InfluenzaB__AIL95065

SEQ ID NO: 60387 - RNA, 1758 nt, Artificial Sequence; identical to SEQ ID NO: 58720
  derived and/or modified CDS sequence (wt) from hemagglutinin__InfluenzaB__AIL95076

SEQ ID NO: 60388 - RNA, 1758 nt, Artificial Sequence; identical to SEQ ID NO: 58699
  derived and/or modified CDS sequence (wt) from hemagglutinin__InfluenzaB__AIL95087

SEQ ID NO: 60389 - RNA, 1755 nt, Artificial Sequence
  derived and/or modified CDS sequence (wt) from hemagglutinin__InfluenzaB__AIL95098
augaaggcaauaauuguacuacucaugguaguaacauccaaugcagaucgaaucugcacugggauaacaucuucaaacucaccucauguggucaaaacagcuacucaaggggaggucaaugugacuggcgugauaccacugacaacaacaccaacaaaaucuuauuuugcaaaccucaaaggaacaaggaccagagggaaacuaugcccggacugucucaacuguacagaucuggauguggccuugggcaggccaauguguguggggaccacaccuucugcuaaagcuucaauacuccacgaagucagaccuguuacauccgggugcuuuccuauaaugcacgacagaacaaaaaucaggcaacuacccaaucuucucagaggauaugaaaauaucagguuaucaacccagaacguuaucgaugcagaaaaagcaccaggaggacccuacagacuuggaaccucaggaucuugcccuaaugcuaccaguaaaaucggauuuuucgcaacaauggcuugggcugucccaaaggacaacuacaaaaaugcaacgaacccacuaacaguagaaguaccauacauuuguacagaaggggaagaccaaauuacuguuuggggguuccauucagauaacaaaacccaaaugaagaaccucuauggagacucaaauccucaaaaguucaccucaucugcuaauggaguaaccacacauuauguuucucagauuggcgacuucccagaucaaacagaagacggaggacuaccacaaagcggcagaauuguuguugauuacaugaugcaaaaaccugggaaaacaggaacaauugucuaucaaagagguguuuuguugccucaaaagguguggugcgcgaguggcaggagcaaaguaauaaaagggucauugccuuuaauuggugaagcagauugccuucaugaaaaauacgguggauuaaacaaaagcaagccuuacuacacaggagaacaugcaaaagccauaggaaauugcccaauauggguaaaaacaccuuugaagcuugccaauggaaccaaauauagaccuccugcaaaacuauuaaaggaaagggguuucuucggagcuauugcugguuuccuagaaggaggaugggaaggaaugauugcagguuggcacggauacacaucucacggagcacauggaguggcaguggcggcagaccuuaagaguacacaagaagcuauaaauaagauaacaaaaaaucucaauucuuugagugagcuagaaguaaagaaccuucaaagacuaaguggugccauggaugaacuccacaacgaaauacuagagcuggaugagaaaguggaugaucucagagcugacacuauaagcucacaaauagaacuugcagucuugcuuuccaacgaaggaauaauaaacagugaagacgagcaucuauuggcacuugagagaaaacuaaagaaaaugcugggccccucugcuguagacauaggaaauggaugcuucgaaaccaaacacaaaugcaaccagaccugcuuagacaggauagcugcuggcaccuuuaaugcaggagaauuuucucuccccacuuuugauucauugaacauuacugcugcaucuuuaaaugaugauggauuggauaaccauacuauacugcucuauuacucaacugcugcuucuaguuuggcuguaacauuaaugcuagcuauuuuuauuguuuauauggucuccagagacaacguuucaugcuccaucugucuauaa

SEQ ID NO: 60390 - RNA, 1758 nt, Artificial Sequence
  derived and/or modified CDS sequence (wt) from hemagglutinin__InfluenzaB__AIL95109
augaaggcaauaauuguacuacucaugguaguaacauccaaugcagaucgaaucugcacugggauaacaucgucaaacucaccacaugucgucaaaacugcuacucaaggggaggucaaugugaccgguguaauaccacugacaacaacacccaccaaaucucauuuugcaaaucucaaaggaacagaaaccagggggaaacuaugcccaaaaugccucaacugcacagaucuggacguagccuugggcagaccaaaaugcacggggaaaauacccucggcaagaguuucaauacuccaugaagucagaccuguuacaucugggugcuuuccuauaaugcacgauagaacaaaaauuagacagcugccuaaccuucuccgaggauacgaacauaucagguuaucaacucauaacguuaucaaugcagaaaaugcaccaggaggacccuacaaaauuggaaccucagggucuugccuuaacguuaccaauggaaacggauucuucgcaacaauggcuugggccgucccaaaaaacgacaaaaacaaaacagcaacaaauccauuaacaauagaaguaccauacauuuguacagaaggagaagaccaaauuaccguuuggggguuccacucugacaacgagacccaaauggcaaagcucuauggggacucaaagccccagaaguucaccucaucugccaacggagugaccacacauuacguuucacagauugguggcuucccaaaucaaacagaagacggaggacuaccacaaagugguagaauuguuguugauuacauggugcaaaaaucugggaaaacaggaacaauuaccuaucaaagagguauuuuauugccucaaaagguguggugcgcaaguggcaggagcaagguaauaaaaggauccuugccuuuaauuggagaagcagauugccuccacgaaaaauacgguggauuaaacaaaagcaagccuuacuacacaggggaacaugcaaaggccauaggaaauugcccaauaugggugaaaacacccuugaagcuggccaauggaaccaaauauagaccuccugcaaaacuauuaaaggaaagggguuucuucggagcuauugcugguuucuuagaaggaggaugggaaggaaugauugcagguuggcacggauacacaucccauggggcacauggaguagcgguggcagcugaccuuaagagcacucaagaggccauaaacaagauaacaaaaaaucucaacucuuugagugagcuggaaguaaagaaucuucaaagacuaagcggugccauggaugaacuccacaacgaaauacuagaacuagaugagaaaguggaugaucucagagcugauacaauaagcucacaaauagaacucgcaguccugcuuuccaaugaaggaauaauaaacagugaagaugaacaucucuuggcgcuugaaagaaagcugaagaaaaugcugggccccucugcuguagagauagggaauggaugcuuugaaaccaaacacaagugcaaccagaccugucucgacagaauagcugcugguaccuuugaugcaggagaauuuucucuccccaccuuugauucacugaauauuacugcugcaucuuuaaaugacgauggauuggauaaucauacuauacugcuuuacuacucaacugcugccuccaguuuggcuguaacacugaugauagcuaucuuuguuguuuauauggucuccagagacaauguuucuugcuccaucugucuauaa

SEQ ID NO: 60391 - RNA, 1758 nt, Artificial Sequence
  derived and/or modified CDS sequence (wt) from hemagglutinin__InfluenzaB__AIL95120
augaaggcaauaauuguacuacucaugguaguaacauccaaugcagaucgaaucugcacugggauaacaucgucaaacucaccacaugucgucaaaacugcuacucaaggggaggucaaugugaccgguguaauaccacugacaacaacacccaccaaaucucauuuugcaaaucucaaaggaacagaaaccagggggaaacuaugcccaaaaugccucaacugcacagaucuggacguagccuugggcagaccaaaaugcacggggaaaauacccucagcaagaguuucaauacuccaugaagucagaccuguuacaucugggugcuuuccuauaaugcacgauagaacaaaaauuagacagcugccuaaucuucuccgaggauacgaacauaucagguuaucaacucacaacguuaucaaugcagaaaaugcaccaggaggacccuacaaaauuggaaccucagggucuugcccuaacguuaccaauggaaacggauucuucgcaacaauggcuugggccgucccaaaaaacgacaaaaacaaaacagcaacaaauccauuaacaauagaaguaccauacauuuguacagaaggagaagaccaaauuaccguuuggggguuccauucugacaacgagacccaaauggcaaagcucuauggggacucaaagccccagaaguucaccucaucugccaacggagugaccacacauuacguuucacagauugguggcuucccaaaucaaacagaagacggaggacuaccacaaagugguagaauuguuguugauuacaugguucaaaaaucugggaaaacaggaacaauuaccuaucaaagagguauuuuauugccucaaaagguguggugcgcaaguggcaggagcaagguaauaaaaggauccuugccuuuaauuggagaagcagauugccuccacgaaaaauacgguggauuaaacaaaagcaagccuuacuacacaggggaacaugcaaaggccauaggaaauugcccaauaugggugaaaacacccuugaagcuggccaauggaaccaaauauagaccuccugcaaaacuauuaaaggaaagggguuucuucggagcuauugcugguuucuuagaaggaggaugggaaggaaugauugcagguuggcacggauacacaucccauggggcacauggaguagcgguggcagcugaccuuaaaagcacucaagaggcuauaaacaagauaacaaaaaaucucaacucuuugagugagcuggaaguaaagaaucuucaaagacuaagcggugccauggaugaacuccacaacgaaauacuagaacuagaugagaaaguggaugaucucagagcugauacaauaagcucacaaauagaacucgcaguccugcuuuccaaugaaggaauaauaaacagugaagaugaacaucucuuggcgcuugaaagaaagcugaagaaaaugcugggccccucugcuguagagauagggaauggaugcuuugaaaccaaacacaagugcaaccagaccugucucgacaaaauagcugcugguaccuuugaugcaggagaauuuucucuccccaccuuugauucacugaauauuacugcugcaucuuuaaaugacgauggauuggauaaucauacuauacugcuuuacuacucaacugcugccuccaguuuggcuguaacacugaugauagcuaucuuuguuguuuauaugguuuccagagacaauguuucuugcuccaucugucuauaa

SEQ ID NO: 60392 - RNA, 1755 nt, Artificial Sequence
  derived and/or modified CDS sequence (wt) from hemagglutinin__InfluenzaB__AKA54644
augaaggcaauaauuguacuacucaugguaguaacauccaaugcagaucgaaucugcacugggauaacaucuucaaacucaccucauguggucaaaacagcuacucaaggggaggucaaugugacuggcgugauaccacugacaacaacaccaacaaaaucuuauuuugcaaaucucaaaggaacaaggaccagagggaaacuaugcccggacugucucaacuguacagaucuggauguggccuugggcaggccaauguguguggggaccacaccuucugcuaaagcuucaauacuccaugaggucagaccuguuacauccgggugcuuuccuauaaugcacgacagaacaaaaaucaggcaacuacccaaucuucucagaggauacgaaaagaucagguuaucaacccaaaacguuaucgaugcagaaaaagcaccaggaggacccuacagacuuggaaccucaggaucuugcccuaacgcuaccaguaaaaucggauuuuuugcaacaauggcuugggcugucccaaaggacaacuacaaaaaugcaacgaacccacaaacaguggaaguaccauacauuuguacagaaggggaagaccaaauuacuguuuggggguuccauucggauaacaaaacccaaaugaagagccucuauggagacucaaacccucaaaaguucaccucaucugcuaauggaguaaccacacauuauguuucucagauuggcgacuucccagaucaaacagaagacggaggacuaccacaaagcggcagaauuguuguugauuacaugaugcaaaaaccugggaaaacaggaacaauugucuaucaaagggguguuuuguugccucaaaagguguggugcgcgaguggcaggagcaaaguaauaaaagggucauugccuuuaauuggugaagcagauugccuucaugaagaauacgguggauuaaacaaaagcaagccuuacuacacaggaaaacaugcaaaagccauaggaaauugcccaauauggguaaaaacaccuuugaagcuugccaauggaaccaaauauagaccuccugcaaaacuauugaaggaaagggguuucuucggagcuauugcugguuuccuagaaggaggaugggaaggaaugauugcagguuggcacggauacacaucucacggagcacauggaguggcaguggcggcagaccuuaagaguacacaagaagcuauaaauaagauaacaaaaaaucucaauucuuugagugaacuagaaguaaagaaccuucaaagacuaaguggugccauggaugaacuccacaacgaaauacucgagcuggaugaaaaaguggaugaucucagagcugacacuauaagcucacaaauagaacuugcagucuugcuuuccaacgaaggaauaauaaacagugaagacgagcaucuauuggcacuugagagaaaacuaaagaaaaugcugggucccucugcuguagacauaggaaacggaugcuucgaaaccaaacacaaaugcaaccagaccugcuuagacaggauagcugcuggcaccuuuaaugcaggagaauuuucucuccccaccuuugauucauugaacauuacugcugcaucuuuaaaugaugauggauuggauaaccauacuauacugcucuauuacucaacugcugcuucuaguuuggcuguaacauuaaugcuagcuauuuuuauuguuuauauggucuccagagacaacguuucaugcuccaucugucuauaa

SEQ ID NO: 60393 - RNA, 1755 nt, Artificial Sequence
  derived and/or modified CDS sequence (wt) from hemagglutinin__InfluenzaB__AKA54645
augaaagcaauaacuguacuacucaugguaguaacauccaaugcagaucgaaucugcacugggauaacaucuucaaacucaccucauguggucaaaacagcuacucaaggggaggucaaugugacuggcgugauaccacugacaacaacaccaacaaaaucuuauuuugcaaaucucaaaggaacaaggaccagagggaaacuaugcccggacugucucaacuguacagaucuggauguggccuugggcaggccaauguguguggggaccacaccuucugcuaaagcuucaauacuccaugaggucagaccuguuacauccgggugcuuuccuauaaugcacgacagaacaaaaaucaggcaacuacccaaucuucucagaggauaugaaaagaucagguuaucaacccaaaacguuaucgaugcagaaaaagcaccaggaggacccuacagacuuggaaccucaggaucuugcccuaacgcuaccaguaaaaucggauuuuuugcaacaauggcuugggcugucccaaaggacaacuacaaaaaugcaacgaacccacuaacaguggaaguaccauacauuuguacagaaggggaagaccaaauuacuguuuggggguuccauucagauaacaaaacccaaaugaagagccucuauggagacucaaauccucaaaaguucaccucaucugcugauggaguaaccacgcauuauguuucucagauuggcgacuucccagaucaaacagaagacggaggacuaccacaaagcggcagaauuguuguugauuacaugaugcaaaaaccugggaaaacaggaacaauugucuaucaaagggguguuuuguugccucaaaagguguggugcgcgaguggcaggagcaaaguaauaaaagggucauugccuuuaauuggugaagcagauugccuucaugaagaauacgguggauuaaacaaaagcaagccuuacuacacaggaaaacaugcaaaagccauaggaaauugcccaauauggguaaaaacaccuuugaagcuugccaauggaaccaaauauagaccuccugcaaaacuauugaaggaaagggguuucuucggagcuauugcugguuuccuagaaggaggaugggaaggaaugauugcagguuggcacggauacacaucucacggagcacauggaguggcaguggcggcagaccuuaagaguacacaagaagcuauaaauaagauaacaaaaaaucucaauucuuugagugaacuagaaguaaagaaccuucaaagacuaaguggugccauggaugaacuccacaacgaaauacucgagcuggaugaaaaaguggaugaucucagagcugacacuauaagcucacaaauagaacuugcagucuugcuuuccaacgaaggaauaauaaacagugaagacgagcaucuauuggcacuugagagaaaacuaaagaaaaugcugggucccucugcuguagacauaggaaacggaugcuucgaaaccaaacacaaaugcaaccagaccugcuuagacaggauagcugcuggcaccuuuaaugcaggagaauuuucucuccccacuuuugauucauugaacauuacugcugcaucuuuaaaugaugauggauuggauaaccauacuauacugcucuauuacucaacugcugcuucuaguuuggcuguaacauuaaugcuagcuauuuuuauuguuuauauggucuccagagacaacguuucaugcuccaucugucuauaa

SEQ ID NO: 60394 - RNA, 1755 nt, Artificial Sequence; identical to SEQ ID NO: 60358
  derived and/or modified CDS sequence (wt) from hemagglutinin__InfluenzaB__AKA54646

SEQ ID NO: 60395 - RNA, 1755 nt, Artificial Sequence; identical to SEQ ID NO: 60343
  derived and/or modified CDS sequence (wt) from hemagglutinin__InfluenzaB__AKA54647

SEQ ID NO: 60396 - RNA, 1758 nt, Artificial Sequence
  derived and/or modified CDS sequence (wt) from hemagglutinin__InfluenzaB__AKA54648
augaaggcaauaauuguacuacucaugguaguaacauccaaugcagaucgaaucugcacugggauaacaucgucaaacucaccacaugucgucaaaacugcuacucaaggggaggucaaugugaccgguguaauaccacugacaacaacacccaccaaaucucauuuugcaaaucucaagggaacagaaaccagggggaaacuaugcccaaaaugccucaacugcacagaucuggauguagccuugggcagaccaaaaugcacagggaaaauacccucggcaagaguuucaauacuccaugaagucagaccuguuacaucugggugcuuuccuauaaugcacgauagaacaaaaauuagacagcugccuaaccuucuccgaggauacgaacauaucagguuaucaacucacaacguuaucaaugcagaagaugcaccaggaggacccuacaaaauuggaaccucagggucuugcccuaacguuaccaauggaaacggauucuucgcaacaauggcuugggccgucccaaaaaacgacaaaaacaaaacagcaacaaauccauuaacaauagaaguaccauacauuuguacagaaggagaagaccaaauuaccguuuggggguuccacucugacaacgagacccaaauggcaaagcucuauggggacucaaagccccagaaguucaccucaucugccaacggagugaccacacauuacguuucacagauugguggcuucccaaaucaaacagaagacggaggacuaccacaaagugguagaauuguuguugauuacauggugcaaaaaucuggaaaaacaggaacaauuaccuaucaaagagguauuuuauugccucaaaagguguggugcgcaaguggcaggagcaagguaauaaaaggauccuugccuuuaauuggagaagcagauugccuccacgaaaaauacgguggauuaaacaaaagcaagccuuacuacacaggggaacaugcaaaggccauaggaaauugcccaauaugggugaaaacacccuugaagcuggccaauggaaccaaauauagaccuccugcaaaacuauuaaaggaaagggguuucuucggagcuauugcugguuucuuagagggaggaugggaaggaaugauugcagguuggcacggauacacaucccauggggcacauggaguagcgguggcagcugaccuuaagagcacucaagaggccauaaacaagauaacaaaaaaucucaacucuuugagugagcuggaaguaaagaaucuucaaagacuaagcggugccauggaugaacuccacaacgaaauacuagaacuagaugagaaaguggaugaucucagagcugauacaauaagcucacaaauagaacucgcaguccugcuuuccaaugaaggaauaauaaacagugaagaugaacaucucuuggcgcuugaaagaaagcugaagaaaaugcugggccccucugcuguagagauagggaauggaugcuuugaaaccaaacacaagugcaaccagaccugucucgacagaauagcugcugguaccuuugaugcaggagaauuuucucuccccaccuuugauucacugaauauuacugcugcaucuuuaaaugacgauggauuggauaaucauacuauacugcuuuacuacucaacugcugccuccaguuuggcuguaacacugaugauagcuaucuuuguuguuuauauggucuccagagacaauguuucuugcuccaucugucuauaa

SEQ ID NO: 60397 - RNA, 1755 nt, Artificial Sequence
  derived and/or modified CDS sequence (wt) from hemagglutinin__InfluenzaB__AKA54649
augaaggcaauaauuguacuacucaugguaguaacauccaaugcagaucgaaucugcacugggauaacaucuucaaacucaccucauguggucaaaacagcuacucaaggggaggucaaugugacuggcgugauaccacugacaacaacaccaacaaaaucuuauuuugcaaaucucaaaggaacaaggaccagagggaaacuaugcccggacugucucaacuguacagaucuggauguggccuugggcaggccaauguguguggggaccacaccuucugcuaaagcuucaauacuccaugaggucagaccuguuacauccgggugcuuuccuauaaugcacgacagaacaaaaaucaggcaacuacccaaucuucucagaggauaugaaaagaucagguuaucaacccaaaacguuaucgaugcagaaaaagcaccaggaggacccuacagacuuggaaccucaggaucuugcccuaacacuaccaguaaaaucggauuuuuugcaacaauggcuugggcugucccaaaggacaacuacaaaaaugcaacgaacccacuaacaguggaaguaccauacauuuguacagaaggggaagaccaaauuacuguuuggggguuccauucggauaacaaaacccaaaugaagagccucuauggagacucaaauccucaaaaguucaccucaucugcuaauggaguaaccacacauuauguuucucagauuggcgacuucccagaucaaacagaagacggaggacuaccacaaagcggcagaauuguuguugauuacaugaugcaaaaaccugggaaaacaggaacaauugucuaucaaagggguguuuuguugccucaaaagguguggugcgcgaguggcaggagcaaaguaauaaaagggucauugccuuuaauuggugaagcagauugccuucaugaagaauacgguggauuaaacaaaagcaagccuuacuacacaggaaaacaugcaaaagccauaggaaauugcccaauauggguaaaaacaccuuugaagcuugccaauggaaccaaauacagaccuccugcaaaacuauugaaggaaagggguuucuucggagcuauugcugguuuccuagaaggaggaugggaaggaaugauugcaggcuggcacggauacacaucucacggagcacauggaguggcaguggcggcagaccuuaagaguacacaagaagcuauaaauaagauaacaaaaaaucucaauucuuugagugaacuagaaguaaagaaccuucaaagacuaaguggugccauggaugaacuccacaacgaaauacucgagcuggaugaaaaaguggaugaucucagagcugacacuauaagcucacaaauagaacuugcagucuugcuuuccaacgaaggaauaauaaacagugaagacgagcaucuauuggcacuugagagaaaacuaaagaaaaugcugggucccucugcuguagacauaggaaacggaugcuucgaaaccaaacacaaaugcaaccagaccugcuuagacaggauagcugcuggcaccuuuaaugcaggagaauuuucucuccccacuuuugauucauugaacauuacugcugcaucuuuaaaugaugauggauuggauaaccauacuauacugcucuauuacucaacugcugcuucuaguuuggcuguaacauuaaugcuagcuauuuuuauuguuuauauggucuccagagacaacguuucaugcuccaucugucuauaa

SEQ ID NO: 60398 - RNA, 1755 nt, Artificial Sequence; identical to SEQ ID NO: 60343
  derived and/or modified CDS sequence (wt) from hemagglutinin__InfluenzaB__AKU40581

SEQ ID NO: 60399 - RNA, 1755 nt, Artificial Sequence; identical to SEQ ID NO: 60343
  derived and/or modified CDS sequence (wt) from hemagglutinin__InfluenzaB__AKU40592

SEQ ID NO: 60400 - RNA, 1755 nt, Artificial Sequence
  derived and/or modified CDS sequence (wt) from hemagglutinin__InfluenzaB__AKU40603
augaaggcaauaauuguacuacucaugguaguaacauccaaugcagaucgaaucugcacugggauaacaucuucaaacucaccucauguggucaaaacagcuacucaaggggaggucaaugugacuggcgugauaccacugacaacaacaccaacaaaaucuuauuuugcaaaucucaaaggaacaaggaccagagggaaacuaugcccggacugucucaacuguacagaucuggauguggccuugggcaggccaaugugugugggaaccacaccuucugcuaaagcuucaauacuccaugaggucagaccuguuacauccggaugcuuuccuauaaugcacgacagaacaaaaaucaggcaacuacccaaccuucucagaggauaugaaaagaucagguuaucaacccaaaacguuaucgaugcagaaaaagcaccaggaggacccuacagacuuggaaccucaggaucuugcccuaacgcuaccaguaaaaucggauuuuuugcaacaauggcuugggcugucccaaaggacaacuacaaaaaugcaacgaacccacuaacaguggaaguaccauacauuuguacagaaggggaagaccaaauuacuguuuggggguuccauucggauaacaaaacccaaaugaagagccucuauggagacucaaauccucaaaaguucaccucaucugcuaauggaguaaccacacauuauguuucucagauuggcgacuucccagaucaaacagaagacggaggacuaccacaaagcggcagaauuguuguugauuacaugaugcaaaaaccugggaaaacaggaacaauugucuaucaaagggguguuuuguugccucaaaagguguggugcgcuaguggcaggagcaaaguaauaaaagggucauugccuuuaauuggugaagcagauugccuucaugaagaauacgguggauuaaacaaaagcaagccuuacuacacaggaaaacaugcaaaagccauaggaaauugcccaauauggguaaaaacaccuuugaagcuugccaauggaaccaaauauagaccuccugcaaaacuauugaaggaaagggguuucuucggagcuauugcugguuuccuagaaggaggaugggaaggaaugauugcagguuggcacggauacacaucucacggagcacauggaguggcaguggcggcagaccuuaagaguacacaagaagcuauaaauaagauaacaaaaaaucucaauucuuugagugaacuagaaguaaagaaccuucaaagacuaaguggugccauggaugaacuccacaacgaaauacucgagcuggaugaaaaaguggaugaucucagagcugacacuauaagcucacaaauagaacuugcagucuugcuuuccaacgaaggaauaauaaacagugaagacgagcaucuauuggcacuugagagaaaacuaaagaaaaugcugggucccucugcuguagacauaggaaacggaugcuucgaaaccaaacacaaaugcaaccagaccugcuuagacaggauagcugcuggcaccuuuaaugcaggagaauuuucucuccccacuuuugauucauugaacauuacugcugcaucuuuaaaugaugauggauuggauaaccauacuauacugcucuauuacucaacugcugcuucuaguuuggcuguaacauuaaugcuagcuauuuuuauuguuuauauggucuccagagacaacguuucaugcuccauuugucuauaa

SEQ ID NO: 60401 - RNA, 1755 nt, Artificial Sequence; identical to SEQ ID NO: 60343
  derived and/or modified CDS sequence (wt) from hemagglutinin__InfluenzaB__AKU40614

SEQ ID NO: 60402 - RNA, 1755 nt, Artificial Sequence
  derived and/or modified CDS sequence (wt) from hemagglutinin__InfluenzaB__AKU40625
augaaggcaauaauuguacuacucaugguaguaacauccaaugcagaucgaaucugcacugggauaacaucuucaaacucaccucauguggucaaaacagcuacucaaggggaggucaaugugacuggcgugauaccacugacaacaacaccaacaaaaucuuauuuugcaaaucucaaaggaacaaggaccagagggaaacuaugcccggacugucucaacuguacagaucuggauguggccuugggcaggccaauguguguggggaccacaccuucugcuaaagcuucaauacuccaugaggucagaccuguuacauccgggugcuuuccuauaaugcacgacagaacaaaaaucaggcaacuacccaaucuucucagaggauaugaaaagaucagguuaucaacccaaaacguuaucgaugcagaaaaagcaccaggaggacccuacagacuuggaaccucaggaucuugcccuaacgcuaccaguaaaaucggauuuuuugcaacaauggcuugggcugucccaaaggacaacuacaaaaaugcaacgaacccacuaacaguggaaguaccauacauuuguacagaaggggaagaccaaauuacuguuuggggguuccauucggauaacaaaacccaaaugaagagccucuauggagacucaaauccucaaaaguucaccucaucugcuaauggaguaaccacacauuauguuucucagauuggcgacuucccagaucaaacagaagacggaggacuaccacaaagcggcagaauuguuguugauuacaugaugcaaaaaccugggaaaacaggaacaauugucuaucaaagggguguuuuguugccucaaaagguguggugcgcgaguggcaggagcaaaguaauaaaagggucauugccuuuaauuggugaagcagauugccuucaugaagaauacgguggauuaaacaaaagcaagccuuacuacacaggaaaacaugcaaaagccauaggaaauugcccaauauggguaaaaacaccuuugaagcuugccaauggaaccaaauauagaccuccugcaaaacuauugaaggaaagggguuucuucggagcuauugcugguuuccuagaaggaggaugggaaggaaugauugcagguuggcacggauacacaucucacggagcacauggaguggcaguggcggcagaccuuaagaguacacaagaagcuauaaauaagauaacaaaaaaucucaauucuuugagugaacuagaaguaaagaaccuucaaagacuaaguggugccauggaugaacuccacaacgaaauacucgagcuggaugaaaaaguggaugaucucagagcugacacuauaagcucacaaauagaacuugcagucuugcuuuccaacgaaggaauaauaaacagugaagacgagcaucuauuggcacuugagagaaaacuaaagaaaaugcugggucccucugcuguagacauaggaaacggaugcuucgaaaccaaacacaaaugcaaccagaccugcuuagacaggauagcugcuggcaccuuuaaugcaggagaauuuucucuccccacuuuugauucauugaacauuacugcugcaucuuuaaaugaugauggauuggauaaccauacuauacugcucuauuacucaacugcugcuucuaguuuggcuguaacauuaaugcuagcuauuuuuauuguuuauauggucuccagagacaacguuucaugcuccaucugucuauaa

SEQ ID NO: 60403 - RNA, 1755 nt, Artificial Sequence
  derived and/or modified CDS sequence (wt) from hemagglutinin__InfluenzaB__AKU40636
augaaggcaauaauuguacuacucaugguaguaacauccaaugcagaucgaaucugcacugggauaacaucuucaaacucaccucauguggucaaaacagccacucaaggggaggucaaugugacuggcgugauaccacugacaacaacaccagcaaaaucuuauuuugcaaaccucaaaggaacaaggaccagagggaaacuaugcccggacugucucaacuguacagaucuggauguggccuugggcaggccaauguguguggggaccacaccuucugcuaaagcuucaauacuccacgaagucagaccuguuacauccgggugcuuuccuauaaugcacgacagaacaaaaaucaggcaacuacccaaucuucucagaggauaugaaaauaucagguuaucaaccaagaacguuaucgaugcagaaaaagcaccaggaggacccuacagacuuggaaccucaggaucuugcccuaaugcuaccaguaaaaucggauuuuuugcaacaauggcuugggcugucccaaaggacaacuacaaaaaugcaacgaacccacuaacaguagaaguaccauacauuuguaaagaaggggaagaccaaauuacuguuuggggguuccauucagauaacaaaacccaaaugaagaaccucuauggagauucaaauccucaaaaguucaccucaucugcuaauggaguaaccacacauuauguuucucagauuggcgacuucccagaucaaacagaagacggaggacuaccacaaagcggcagaauuguuguugauuacaugaugcaaaaaccugggaaaacaggaacaauugucuaucaaagagguguuuuguugccucaaaagguguggugcgcgaguggcaggagcaaaguaauaaaagggucauugccuuuaauuggugaagcagauugccuucaugaggaauacgguggauuaaacaaaagcaagccuuacuacacaggaaaacaugcaaaagccauaggaaacugcccaauauggguaaaaacaccuuugaagcuugccaaugggaccaaauauagaccuccugcaaaacuauuaaaggaaagggguuucuucggggcuauugcugguuuccuagaaggaggaugggaaggaaugauugcagguuggcacggauacacaucucacggagcacauggaguggcaguggcggcagaccuuaagaguacacaagaagcuauaaauaaaauaacaaaaaaucucaauucuuugagugagcuagaaguaaagaaccuucaaagacuaaguggugccauggaugaacuccacaacgaaauacucgagcuggaugagaaaguggaugaucucagagcugacacuauaagcucacaaauagaacuugcagucuugcuuuccaacgaaggaauaauaaacagugaagacgagcaucuauuggcacuugagagaaaacugaagaaaaugcugggccccucugcuguagacauaggaaauggaugcuucgaaaccaaacacaaaugcaaccagaccugcuuagacaggauagcugcuggcaccuuuaaugcaggagaauuuucucuccccacuuuugauucauugaacauuacugcugcaucuuuaaaugaugauggauuggauaaccauacuauacugcucuauuacucaacugcugcuucuaguuuggcuguaacauuaaugcuagcuauuuuuauuguuuauauggucuccagagacaacguuucaugcuccaucugucuauaa

SEQ ID NO: 60404 - RNA, 1755 nt, Artificial Sequence
  derived and/or modified CDS sequence (wt) from hemagglutinin__InfluenzaB__AKU40647
augaaggcaauaauuguacuacucaugguaguaacauccaaugcagaucgaaucugcacugggauaacaucuucaaacucaccucauguggucaaaacagcuacucaaggggaggucaaugugacuggcgugauaccacugacaacaacaccaacaaaaucuuauuuugcaaaucucaaaggaacaaggaccagagggaaacuaugcccggacugucucaacuguacagaucuggauguggccuugggcaggccaauguguguggggaccacaccuucugcuaaagcuucaauacuccaugaggucagaccuguuacauccgggugcuuuccuauaaugcacgacagaacaaaaaucaggcaacuacccaaucuucucagaggauaugaaaagaucagguuaucaacccaaaacguuaucgaugcagaaaaagcaccaggaggacccuacagacuuggaaccucaggaucuugcccuaacgcuaccaguaaaaucggauuuuuugcaacaauggcuugggcugucccaaaggacaacuacaaaaaugcaacgaacccacaaacaguggaaauaccauacauuuguacagaaggggaagaccaaauuacuguuuggggguuccauucggauaacaaaacccaaaugaagagccucuauggagacucaaauccucaaaaguucaccucaucugcuaauggaguaaccacacauuauguuucucagauuggcgacuucccagaucaaacagaagacggaggacuaccacaaagcggcagaauuguuguugauuacaugaugcaaaaaccugggaaaacaggaacaauugucuaucaaagggguguuuuguugccucaaaagguguggugcgcgaguggcaggagcaaaguaauaaaagggucauugccuuuaauuggugaagcagauugccuucaugaagaauacgguggauuaaacaaaagcaagccuuacuacacaggaaaacaugcaaaagccauaggaaauugcccaauauggguaaaaacaccuuugaagcuugccaauggaaccaaauauagaccuccugcaaaacuauugaaggaaagggguuucuucggagcuauugcugguuuccuagaaggaggaugggaaggaaugauugcagguuggcacggauauacaucucacggagcacauggaguggcaguggcggcagaccuuaagaguacacaagaagcuauaaauaagauaacaaaaaaucucaauucuuugagugaacuagaaguaaagaaccuucaaagacuaaguggugccauggaugaacuccacaacgaaauacucgagcuggaugaaaaaguggaugaucucagagcugacacuauaagcucacaaauagaacuugcagucuugcuuuccaacgaaggaauaauaaacagugaagacgagcaucuauuggcacuugagagaaaacuaaagaaaaugcugggucccucugcuguagacauaggaaacggaugcuucgaaaccaaacacaaaugcaaccagaccugcuuagacaggauagcugcuggcaccuuuaaugcaggagaauuuucucuccccacuuuugauucauugaacauuacugcugcaucuuuaaaugaugauggauuggauaaccauacuauacugcucuauuacucaacugcugcuucuaguuuggcuguaacauuaaugcuagcuauuuuuauuguuuauauggucuccagagacaacguuucaugcuccaucugucuauaa

SEQ ID NO: 60405 - RNA, 1755 nt, Artificial Sequence
  derived and/or modified CDS sequence (wt) from hemagglutinin__InfluenzaB__AKU40658
augaaggcaauaauuguacuacucaugguaguaacguccaaugcagaucgaaucugcacugggauaacaucuucaaacucaccucauguggucaaaacagcuacucaaggggaggucaaugugacuggcgugauaccacugacaacaacaccaacaaaaucuuauuuugcaaaucucaaaggaacaaggaccagagggaaacuaugcccggacugucucaacuguacagaucuggauguggccuugggcaggccaauguguguggggaccacaccuucugcuaaagcuucaauacuccaugaggucagaccuguuacauccgggugcuuuccuauaaugcacgacagaacaaaaaucaggcaacuacccaaucuucucagaggauaugaaaagaucagguuaucaacccaaaacguuaucgaugcagaaaaagcaccaggaggacccuacagacuuggaaccucaggaucuugcccuaacgcuaccaguaaaaucggauuuuuugcaacaauggcuugggcugucccaaaggacaacuacaaaaaugcaacgaacccacaaacaguggaaguaccauacauuuguacagaaggggaagaccaaauuacuguuuggggguuccauucggauaacaaaacccaaaugaagagccucuauggagacucaaauccucaaaaguucaccucaucugcuaauggaguaaccacacauuauguuucucagauuggcgacuucccagaucaaacagaagacggaggacuaccacaaagcggcagaauuguuguugauuacaugaugcaaaaaccugggaaaacaggaacaauugucuaucaaagggguguuuuguugccucaaaagguguggugcgcgaguggcaggagcaaaguaauaaaagggucauugccuuuaauuggugaagcagauugccuucaugaagaauacgguggauuaaacaaaagcaagccuuacuacacaggaaaacaugcaaaagccauaggaaauugcccaauauggguaaaaacaccuuugaagcuugccaauggaaccaaauauagaccuccugcaaaacuauugaaggaaagggguuucuucggagcuauugcugguuuccuagaaggaggaugggaaggaaugauugcagguuggcacggauacacaucucacggagcacauggaguggcaguggcggcagaccuuaagaguacacaagaagcuauaaauaagauaacaaaaaaucucaauucuuugagugaacuagaaguaaagaaccuucaaagacuaaguggugccauggaugaacuccacaacgaaauacucgagcuggaugaaaaaguggaugaucucagagcugacacuauaagcucacaaauagaacuugcagucuugcuuuccaacgaaggaauaauaaacagugaagacgagcaucuauuggcacuugagagaaaacuaaagaaaaugcugggucccucugcuguagacauaggaaacggaugcuucgaaaccaaacacaaaugcaaccagaccugcuuagacaggauagcugcuggcaccuuuaaugcaggagaauuuucucuccccacuuuugauucauugaacauuacugcugcaucuuuaaaugaugauggauuggauaaccauacuauacugcucuauuacucaacugcugcuucuaguuuggcuguaacauuaaugcuagcuauuuuuauuguuuauauggucuccagagacaacguuucaugcuccaucugucuauaa

SEQ ID NO: 60406 - RNA, 1755 nt, Artificial Sequence; identical to SEQ ID NO: 60405
  derived and/or modified CDS sequence (wt) from hemagglutinin__InfluenzaB__AKU40669

SEQ ID NO: 60407 - RNA, 1755 nt, Artificial Sequence
  derived and/or modified CDS sequence (wt) from hemagglutinin__InfluenzaB__AKU40680
augaaggcaauaauuguacuacucaugguaguaacguccaaugcagaucgaaucugcacugggauaacaucuucaaacucaccucauguggucaaaacagcuacucaaggggaggucaaugugacuggcgugauaccacugacaacaacaccaacaaaaucuuauuuugcaaaucucaaaggaacaaggaccagagggaaacuaugcccggacugucucaacuguacagaucuggauguggccuugggcaggccaauguguguggggaccacaccuucugcuaaagcuucaauacuccaugaggucagaccuguuacauccgggugcuuuccuauaaugcacgacagaacaaaaaucaggcaacuacccaaucuucucagaggauaugaaaagaucagguuaucaacccaaaacguuaucgaugcagaaaaagcaccaggaggacccuacagacuuggaacuucaggaucuugcccuaacgcuaccaguaaaaucggauuuuuugcaacaauggcuugggcugucccaaaggacaacuacaaaaaugcaacgaacccacaaacaguggaaguaccauacauuuguacagaaggggaagaccaaauuacuguuuggggguuccauucggauaacaaaacccaaaugaagagccucuauggagacucaaauccucaaaaguucaccucaucugcuaauggaguaaccacacauuauguuucucagauuggcgacuucccagaucaaacagaagacggaggacuaccacaaagcggcagaauuguuguugauuacaugaugcaaaaaccugggaaaacaggaacaauugucuaucaaagggguguuuuguugccucaaaagguguggugcgcgaguggcaggagcaaaguaauaaaagggucauugccuuuaauuggugaagcagauugccuucaugaagaauacgguggauuaaacaaaagcaagccuuacuacacaggaaaacaugcaaaagccauaggaaauugcccaauauggguaaaaacaccuuugaagcuugccaauggaaccaaauauagaccuccugcaaaacuauugaaggaaagggguuucuucggagcuauugcugguuuccuagaaggaggaugggaaggaaugauugcagguuggcacggauacacaucucacggagcacauggaguggcaguggcggcagaccuuaagaguacacaagaagcuauaaauaagauaacaaaaaaucucaauucuuugagugaacuagaaguaaagaaccuucaaagacuaaguggugccauggaugaacuccacaacgaaauacucgagcuggaugaaaaaguggaugaucucagagcugacacuauaagcucacaaauagaacuugcagucuugcuuuccaacgaaggaauaauaaacagugaagacgagcaucuauuggcacuugagagaaaacuaaagaaaaugcugggucccucugcuguagacauaggaaacggaugcuucgaaaccaaacacaaaugcaaccagaccugcuuagacaggauagcugcuggcaccuuuaaugcaggagaauuuucucuccccacuuuugauucauugaacauuacugcugcaucuuuaaaugaugauggauuggauaaccauacuauacugcucuauuacucaacugcugcuucuaguuuggcuguaacauuaaugcuagcuauuuuuauuguuuauauggucuccagagacaacguuucaugcuccaucugucuauaa

SEQ ID NO: 60408 - RNA, 1755 nt, Artificial Sequence
  derived and/or modified CDS sequence (wt) from hemagglutinin__InfluenzaB__AKU40691
augaaggcaauaauuguacuacucaugguaguaacauccaaugcagaucgaaucugcacugggauaacaucuucaaacucaccucauguggucaaaacagcuacucaaggggaggucaaugugacuggcgugauaccacugacaacaacaccaacaaaaucuuauuuugcaaaucucaaaggaacaaggaccagagggaaacuaugcccggacugucucaacuguacagaucuggauguggccuugggcaggccaauguguguggggaccacaccuucugcuaaagcuucaauacuccaugaggucagaccuguuacauccgggugcuuuccuauaaugcacgacagaacaaaaaucaggcaacuacccaaucuucucagaggauaugaaaagaucagguuaucaacccaaaacguuaucgaugcagaaaaagcaccaggaggacccuacagacuuggaaccucaggaucuugcccuaacgcuacuaguaaaaucggauuuuuugcaacaauggcuugggcugucccaaaggacaacuacaaaaaugcaacgaacccacaaacaguggaaguaccauacauuuguacagaaggggaagaccaaauuacuguuuggggguuccauucggauaacaaaacccaaaugaagagccucuauggagacucaaauccucaaaaguucaccucaucugcuaauggaguaaccacacauuauguuucucagauuggcgacuucccagaucaaacagaagacggaggacuaccacaaagcggcagaauuguuguugauuacaugaugcaaaaaccugggaaaacaggaacaauugucuaucaaagggguguuuuguugccucaaaagguguggugcgcgaguggcaggagcaaaguaauaaaagggucauugccuuuaauuggugaagcagauugccuucaugaagaauacgguggauuaaacaaaagcaagccuuacuacacaggaaaacaugcaaaagccauaggaaauugcccaauauggguaaaaacaccuuugaagcuugccaauggaaccaaauauagaccuccugcaaaacuauugaaggaaagggguuucuucggagcuauugcugguuuccuagaaggaggaugggaaggaaugauugcagguuggcacggauacacaucucacggagcacauggaguggcaguggcggcagaccuuaagaguacacaagaagcuauaaauaagauaacaaaaaaucucaauucuuugagugaacuagaaguaaagaaccuucaaagacuaaguggugccauggaugaauuccacaacgaaauacucgagcuggaugaaaaaguggaugaucucagagcugacacuauaagcucacaaauagaacuugcagucuugcuuuccaacgaaggaauaauaaacagugaagacgagcaucuauuggcacuugagagaaaacuaaagaaaaugcugggucccucugcuguagacauaggaaacggaugcuucgaaaccaaacacaaaugcaaccagaccugcuuagacaggauagcugcuggcaccuuuaaugcaggagaauuuucucuccccacuuuugauucauugaacauuacugcugcaucuuuaaaugaugauggauuggauaaccauacuauacugcucuauuacucaacugcugcuucuaguuuggcuguaacauuaaugcuagcuauuuuuauuguuuauauggucuccagagacaacguuucaugcuccaucugucuauaa

SEQ ID NO: 60409 - RNA, 1755 nt, Artificial Sequence; identical to SEQ ID NO: 60369
  derived and/or modified CDS sequence (wt) from hemagglutinin__InfluenzaB__AKU40702

SEQ ID NO: 60410 - RNA, 1755 nt, Artificial Sequence; identical to SEQ ID NO: 60343
  derived and/or modified CDS sequence (wt) from hemagglutinin__InfluenzaB__AKU40713

SEQ ID NO: 60411 - RNA, 1755 nt, Artificial Sequence
  derived and/or modified CDS sequence (wt) from hemagglutinin__InfluenzaB__AKU40724
augaaggcaauaauuguacuacucaugguaguaacauccaaugcagaucgaaucugcacugggauaacaucuucaaacucaccucauguggucaaaacagcuacucaaggggaggucaaugugacuggcgugauaccacugacaacaacaccaacaaaaucuuauuuugcaaaucucaaaggaacaaggaccagagggaaacuaugcccggacugucucaacuguacagaucuggauguggccuugggcaggccaauguguguggggaccacaccuucugcuaaagcuucaauacuccaugaggucagaccuguuacauccgggugcuuuccuauaaugcacgacagaacaaaaaucaggcaacuacccaaucuucucagaggauaugaaaagaucagguuaucaacccaaaacguuaucgaugcagaaaaagcaccaggaggacccuacagacuuggaaccucaggaucuugcccuaacgcuaccaguaaaaucggauuuuuugcaacaauggcuugggcugucccaaaggacaacuacaaaaaugcaacgaacccacuaacaguggaaguaccauacauuuguacagaaggggaagaccaaauuacuguuuggggguuccauucggauaacaaaacccaaaugaagagccucuauggagacucaaauccucaaaaguucaccucaucugcuaauggaguaaccacacauuauguuucucagauuggcgacuucccagaucaaacagaagacggaggacuaccacaaagcggcagaauuguuguugauuacaugaugcaaaaaccugggaaaacaggaacaauugucuaccaaagggguguuuuguugccucaaaagguguggugcgcgaguggcaggagcaaaguaauaaaagggucauugccuuuaauuggugaagcagauugccuucaugaagaauacgguggauuaaacaaaagcaagccuuacuacacaggaaaacaugcaaaagccauaggaaauugcccaauauggguaaaaacaccuuugaagcuugccaauggaaccaaauauagaccuccugcaaaacuauugaaggaaagggguuucuucggagcuauugcugguuuccuagaaggaggaugggaaggaaugauugcagguuggcacggauacacaucucacggagcacauggaguggcaguggcggcagaccuuaagaguacacaagaagcuauaaauaagauaacaaaaaaucucaauucuuugagugaacuagaaguaaagaaccuucaaagacuaaguggugccauggaugaacuccacaacgaaauacucgagcuggaugaaaaaguggaugaucucagagcugacacuauaagcucacaaauagaacuugcagucuugcuuuccaacgaaggaauaauaaacagugaagaugagcaucuauuggcacuugagagaaaacuaaagaaaaugcugggucccucugcuguagacauaggaaacggaugcuucgaaaccaaacacaaaugcaaccagaccugcuuagacaggauagcugcuggcaccuuuaaugcaggagaauuuucucuccccacuuuugauucauugaacauuacugcugcaucuuuaaaugaugauggauuggauaaccauacuauacugcucuauuacucaacugcugcuucuaguuuggcuguaacauuaaugcuagcuauuuuuauuguuuauauggucuccagagacaacguuucaugcuccaucugucuauaa

SEQ ID NO: 60412 - RNA, 1755 nt, Artificial Sequence
  derived and/or modified CDS sequence (wt) from hemagglutinin__InfluenzaB__AKU40735
augaaggcaauaauuguacuacucaugguaguaacauccaaugcagaucgaaucugcacugggauaacaucuucaaacucaccucauguggucaaaacagcuacucaaggggaggucaaugugacuggcgugauaccacugacaacaacaccaacaaaaucuuauuuugcaaaucucaaaggaacaaggaccagagggaaacuaugcccggacugucucaacuguacagaucuggauguggccuugggcaggccaauguguguggggaccacaccuucugcuaaagcuucaauacuccaugaggucagaccuguuacauccgggugcuuuccuauaaugcacgacagaacaaaaaucaggcaacuacccaaucuucucagaggauaugaaaagaucagguuaucaacccaaaacguuaucgaugcagaaaaagcaccaggaggacccuacagacuuggaaccucaggaucuugcccuaacgcuaccaguaaaaucggauuuuuugcaacaauggcuugggcugucccaaaggacaacuacaaaaaugcaacgaacccacaaacaguggaaauaccauacauuuguacagaaggggaagaccaaauuacuguuuggggguuccauucggauaacaaaacccaaaugaagagccucuauggagacucaaauccucaaaaguucaccucaucugcuaauggaguaaccacacauuauguuucucagauuggcgacuucccagaucaaacagaagacggaggacuaccacaaagcggcagaauuguuguugauuacaugaugcaaaaaccugggaaaacaggaacaauugucuaucaaagggguguuuuguugccucaaaagguguggugcgcgaguggcaggagcaaaguaauaaaagggucauugccuuuaauuggugaagcagauugccuucaugaagaauacgguggauuaaacaaaagcaagccuuacuacacaggaaaacaugcaaaagccauaggaaauugcccaauauggguaaaaacaccuuugaagcuugccaauggaaccaaauauagaccuccugcaaaacuauugaaggaaagggguuucuuuggagcuauugcugguuuccuagaaggaggaugggaaggaaugauugcagguuggcacggauauacaucucacggagcacauggaguggcaguggcggcagaccuuaagaguacacaagaagcuauaaauaagauaacaaaaaaucucaauucuuugagugaacuagaaguaaagaaccuucaaagacuaaguggugccauggaugaacuccacaacgaaauacucgagcuggaugaaaaaguggaugaucucagagcugacacuauaagcucacaaauagaacuugcagucuugcuuuccaacgaaggaauaauaaacagugaagacgagcaucuauuggcacuugagagaaaacuaaagaaaaugcugggucccucugcuguagacauaggaaacggaugcuucgaaaccaaacacaaaugcaaccagaccugcuuagacaggauagcugcuggcaccuuuaaugcaggagaauuuucucuccccacuuuugauucauugaacauuacugcugcaucuuuaaaugaugauggauuggauaaccauacuauacugcucuauuacucaacugcugcuucuaguuuggcuguaacauuaaugcuagcuauuuuuauuguuuauauggucuccagagacaacguuucaugcuccaucugucuauaa

SEQ ID NO: 60413 - RNA, 1755 nt, Artificial Sequence; identical to SEQ ID NO: 60377
  derived and/or modified CDS sequence (wt) from hemagglutinin__InfluenzaB__AKU40746

SEQ ID NO: 60414 - RNA, 1755 nt, Artificial Sequence; identical to SEQ ID NO: 60343
  derived and/or modified CDS sequence (wt) from hemagglutinin__InfluenzaB__AKU40757

SEQ ID NO: 60415 - RNA, 1755 nt, Artificial Sequence; identical to SEQ ID NO: 60405
  derived and/or modified CDS sequence (wt) from hemagglutinin__InfluenzaB__AKU40768

SEQ ID NO: 60416 - RNA, 1755 nt, Artificial Sequence; identical to SEQ ID NO: 60343
  derived and/or modified CDS sequence (wt) from hemagglutinin__InfluenzaB__AKU40779

SEQ ID NO: 60417 - RNA, 1755 nt, Artificial Sequence
  derived and/or modified CDS sequence (wt) from hemagglutinin__InfluenzaB__AKU40790
augaaggcaauaauuguacuacucaugguaguaacauccaaugcagaucgaaucugcacugggauaacaucuucaaacucaccucauguggucaaaacagcuacucaaggggaggucaaugugacuggcgugauaccacugacaacaacaccaacaaaaucuuauuuugcaaaucucaaaggaacaaggaccagagggaaacuaugcccggacugucucaacuguacagaucuggauguggccuugggcaggccaauguguguggggaccacaccuucugcuaaagcuucaauacuccaugaggucagaccuguuacauccgggugcuuuccuauaaugcacgacagaacaaaaaucaggcaacuacccaaucuucucagaggauaugaaaagaucagguuaucaacccaaaacguuaucgaugcagaaaaagcaccaggaggacccuacagacuuggaaccucaggaucuugcccuaacgcuaccaguaaaaucggauuuuuugcaacaauggcuugggcugucccaaaggacaacuacaaaaaugcaacgaacccacuaacaguggaaguaccauacauuuguacagaaggggaagaccaaauuacuguuuggggguuccauucggauaacaaaacccaaaugaagagccucuauggagacucaaauccucaaaaguucaccucaucugcuaauggaguaaccacgcauuauguuucucagauuggcgacuucccagaucaaacagaagacggaggacuaccacaaagcggcagaauuguuguugauuacaugaugcaaaaaccugggaaaacaggaacaauugucuaucaaagggguguuuuguugccucaaaagguguggugcgcgaguggcaggagcaaaguaauaaaagggucauugccuuuaauuggugaagcagauugccuucaugaagaauacgguggauuaaacaaaagcaagccuuacuacacaggaaaacaugcaaaagccauaggaaauugcccaauauggguaaaaacaccuuugaagcuugccaauggaaccaaauauagaccuccugcaaaacuauugaaggaaagggguuucuucggagcuauugcugguuuccuagaaggaggaugggaaggaaugauugcagguuggcacggauacacaucucacggagcacauggaguggcaguggcggcagaccuuaagaguacacaagaagcuauaaauaagauaacaaaaaaucucaauucuuugagugaacuagaaguaaagaaccuucaaagacuaaguggugccauggaugaacuccacaacgaaauacucgagcuggaugaaaaaguggaugaucucagagcugacacuauaagcucacaaauagaacuugcagucuugcuuuccaacgaaggaauaauaaacagugaagacgagcaucuauuggcacuugagagaaaacuaaagaaaaugcugggucccucugcuguagacauaggaaacggaugcuucgaaaccaaacacaaaugcaaccagaccugcuuagacaggauagcugcuggcaccuuuaaugcaggagaauuuucucuccccacuuuugauucauugaacauuacugcugcaucuuuaaaugaugauggauuggauaaccauacuauacugcucuauuacucaacugcugcuucuaguuuggcuguaacauuaaugcuagcuauuuuuauuguuuauauggucuccagagacaacguuucaugcuccaucugucuauaa

SEQ ID NO: 60418 - RNA, 1755 nt, Artificial Sequence; identical to SEQ ID NO: 60343
  derived and/or modified CDS sequence (wt) from hemagglutinin__InfluenzaB__AKU40801

SEQ ID NO: 60419 - RNA, 1755 nt, Artificial Sequence
  derived and/or modified CDS sequence (wt) from hemagglutinin__InfluenzaB__AKU40812
augaaggcaauaauuguacuacucaugguaguaacguccaaugcagaucgaaucugcacugggauaacaucuucaaacucaccucauguggucaaaacagcuacucaaggggaggucaaugugacuggcgugauaccacugacaacaacaccaacaaaaucuuauuuugcaaaucucaaaggaacaaggaccagagggaaacuaugcccggacugucucaacuguacagaucuggauguggccuugggcaggccaauguguguggggaccacaccuucugcuaaagcuucaauacuccaugaggucagaccuguuacauccgggugcuuuccuauaaugcacgacagaacaaaaaucaggcaacuacccaaucuucucagaggauaugaaaagaucagguuaucaacccaaaacguuaucgaugcagaaaaagcaccaggaggacccuacagacuuggaaccucaggaucuugcccuaacgcuaccaguaaaaucggauuuuuugcaacaauggcuugggcugucccaaaggacaacuacaaaaaugcaacgaacccacaaacaguggaaguaccauacauuuguacagaaggggaagaccaaauuacuguuuggggguuccauucggauaacaaaacccaaaugaagagccucuauggagacucaaauccucaaaaguucaccucaucugcuaauggaguaaccacacauuauguuucucagauuggcgacuucccagaucaaacagaagacggaggacuaccacaaagcggcagaauuguuguugauuacaugaugcaaaaaccugggaaaacaggaacaauugucuaucaaagggguguuuuguugccucaaaagguguggugcgcgaguggcaggagcaaaguaauaaaagggucauugccuuuaauuggugaagcagauugccuucaugaagaauacgguggauuaaacaaaagcaagccuuacuacacaggaaaacaugcaaaagccauaggaaauugcccaauauggguaaaaacaccuuugaagcuugccaauggaaccaaauauagaccuccugcaaaacuauugaaggaaagggguuucuucggagcuauugcugguuuccuagaaggaggaugggaaggaaugauugcagguuggcacggauacacaucucacggagcacauggaguggcaguggcggcagaccuuaagaguacacaagaagcuauaaauaagauaacaaaaaaucucaauucuuugagugaacuagaaguaaagaaccuucaaagacuaaguggugccauggaugaacuccacaacgaaauacucgagcuggaugaaaaaguggaugaucucagagcugacacuauaagcucacaaauagaacuugcagucuugcuuuccaacgaaggaauaauaaacagugaagacgagcaucuauuggcacuugagagaaaacuaaagaaaaugcugggucccucugcuguagacauaggaaacggaugcuucgaaaccaaacacaaaugcaaccagaccugcuuagacaggauagcugcuggcaccuuuaaugcaggagaauuuucucuccccacuuuugauucauugaacauuacugcugcaucuuuaaaugaugauggauuggauagccauacuauacugcucuauuacucaacugcugcuucuaguuuggcuguaacauuaaugcuagcuauuuuuauuguuuauauggucuccagagacaacguuucaugcuccaucugucuauaa

SEQ ID NO: 60420 - RNA, 1755 nt, Artificial Sequence; identical to SEQ ID NO: 60343
  derived and/or modified CDS sequence (wt) from hemagglutinin__InfluenzaB__AKU40823

SEQ ID NO: 60421 - RNA, 1755 nt, Artificial Sequence; identical to SEQ ID NO: 60358
  derived and/or modified CDS sequence (wt) from hemagglutinin__InfluenzaB__AKU40834

SEQ ID NO: 60422 - RNA, 1755 nt, Artificial Sequence
  derived and/or modified CDS sequence (wt) from hemagglutinin__InfluenzaB__AKU40845
augaaggcaauaauuguacuacucaugguaguaacauccaaugcagaucgaaucugcacugggauaacaucuucaaacucaccucauguggucaaaacagcuacucaaggggaggucaaugugacuggcgugauaccacugacaacaacaccaacaaaaucuuauuuugcaaaucucaaaggaacaaggaccagagggaaacuaugcccggacugucucaacuguacagaucuggauguggccuugggcaggccaauguguguggggaccacaccuucugcuaaagcuucaauacuccaugaggucagaccuguuacauccgggugcuuuccuauaaugcacgacagaacaaaaaucaggcaacuacccaaucuucucagaggauaugaaaagaucagguuaucaacccaaaacguuaucgaugcagaaaaagcaccaggaggacccuacagacuuggaaccucaggaucuugcccuaacgcuaccaguaaaaucggauuuuuugcaacaauggcuugggcugucccaaaggacaacuacaaaaaugcaacgaacccacaaacaguggaaguaccauacauuuguacagaaggggaagaccaaauuacuguuuggggguuccauucggauaacaaaacccaaaugaagagccucuauggagacucaaauccucaaaaguucaccucaucugcuaauggaguaaccacacauuauguuucucagauuggcgacuucccagaucaaacagaagacggaggacuaccacaaagcggcagaauuguuguugauuacaugaugcaaaaaccugggaaaacaggaacaauugucuaucaaagggguguuuuguugccucaaaagguguggugcgcgaguggcaggagcaaaguaauaaaagggucauugccuuuaauuggugaagcagauugccuucaugaagaauacgguggauuaaacaaaagcaagccuuacuacacaggaaaacaugcaaaagccauaggaaauugcccaauauggguaaaaacaccuuugaagcuugccaauggaaccaaauauagaccuccugcaaaacuauugaaggaaagggguuucuucggagcuauugcugguuuccuagaagggggaugggaaggaaugauugcagguuggcacggauauacaucucacggagcacauggaguggcaguggcggcagaccuuaagaguacacaagaagcuauaaauaagauaacaaaaaaucucaauucuuugagugaacuagaaguaaagaaccuucaaagacuaaguggugccauggaugaacuccacaacgaaauacucgagcuggaugaaaaaguggaugaucucagagcugacacuauaagcucacaaauagaacuugcagucuugcuuuccaacgaaggaauaauaaacagugaagacgagcaucuauuggcacuugagagaaaacuaaagaaaaugcugggucccucugcuguagacauaggaaacggaugcuucgaaaccaaacacaaaugcaaccagaccugcuuagacaggauagcugcuggcaccuuuaaugcaggagaauuuucucuccccacuuuugauucauugaacauuacugcugcaucuuuaaaugaugauggauuggauaaccauacuauacugcucuauuacucaacugcugcuucuaguuuggcuguaacauuaaugcuagcuauuuuuauuguuuauauggucuccagagacaacguuucaugcuccaucugucuauaa

SEQ ID NO: 60423 - RNA, 1755 nt, Artificial Sequence
  derived and/or modified CDS sequence (wt) from hemagglutinin__InfluenzaB__AKU40856
augaaggcaauaauuguacuacucaugguaguaacauccaaugcagaucgaaucugcacugggauaacaucuucaaauucaccucauguggucaaaacagcuacucaaggggaggucaaugugacuggcgugauaccacugacaacaacaccaacaaaaucuuauuuugcaaaucucaaaggaacaaggaccagagggaaacuaugcccggacugucucaacuguacagaucuggauguggccuugggcaggccaauguguguggggaccacaccuucugcuaaagcuucaauacuccaugaggucagaccuguuacauccgggugcuuuccuauaaugcacgacagaacaaaaaucaggcaacuacccaaucuucucagaggauaugaaaagaucagguuaucaacccaaaacguuaucgaugcagaaaaagcaccaggaggacccuacagacuugggaccucaggaucuugcccuaacgcuaccaguaaaaucggauuuuuugcaacaauggcuugggcugucccaaaggacaacuacaaaaaugcaacgaacccacaaacaguggaaguaccauacauuuguacagaaggggaagaccaaauuacuguuuggggguuccauucggauaacaaaacccaaaugaagagccucuauggagacucaaauccucaaaaguucaccucaucugcuaauggaguaaccacacauuauguuucucagauuggcgacuucccagaucaaacagaagacggaggacuaccacaaagcggcagaauuguuguugauuacaugaugcaaaaaccugggaaaacaggaacaauugucuaucaaagggguguuuuguugccucaaaagguguggugcgcgaguggcaggagcaaaguaauaaaagggucauugccuuuaauuggugaagcagauugccuucaugaagaauacgguggauuaaacaaaagcaagccuuacuacacaggaaaacaugcaaaagccauaggaaauugcccaauauggguaaaaacaccuuugaagcuugccaauggaaccaaauauagaccuccugcaaaacuauugaaggaaagggguuucuucggagcuauugcugguuuccuagaaggaggaugggaaggaaugauugcagguuggcacggauacacaucucacggagcacauggaguggcaguggcggcagaccuuaagaguacacaagaagcuauaaauaagauaacaaaaaaucucaauucuuugagugaacuagaaguaaagaaccuucaaagacuaaguggugccauggaugaacuccacaacgaaauacucgagcuggaugaaaaaguggaugaucucagagcugacacuauaagcucacaaauagaacuugcagucuugcuuuccaacgaaggaauaauaaacagugaagacgagcaucuauuggcacuugagagaaaacuaaagaaaaugcugggucccucugcuguagacauaggaaacggaugcuucgaaaccaaacacaaaugcaaccagaccugcuuagacaggauagcugcuggcaccuuuaaugcaggagaauuuucucuccccacuuuugauucauugaacauuacugcugcaucuuuaaaugaugauggauuggauaaccauacuauacugcucuauuacucaacugcugcuucuaguuuggcuguaacauuaaugcuagcuauuuuuauuguuuauauggucuccagagacaacguuucaugcuccaucugucuauaa

SEQ ID NO: 60424 - RNA, 1755 nt, Artificial Sequence
  derived and/or modified CDS sequence (wt) from hemagglutinin__InfluenzaB__AKU40867
augaaggcaauaauuguacuacucaugguaguaacauccaaugcagaucgaaucugcacugggauaacaucuucaaacucaccucauguggucaaaacagcuacucaaggggaggucaaugugacuggcgugauaccacugacaacaacaccaacaaaaucuuauuuugcaaaucucaaaggaacaaggaccagaggaaaacuaugcccggacugucucaacuguacagaucuggauguggccuugggcaggccaauguguguggggaccacaccuucugcuaaagcuucaauacuccaugaggucagaccuguuacauccgggugcuuuccuauaaugcacgacagaacaaaaaucaggcaacuacccaaucuucucagaggauaugaaaagaucagguuaucaacccaaaacguuaucgaugcagaaaaagcaccaggaggacccuacagacuuggaaccucaggaucuugcccuaacgcuaccaguaaaaucggauuuuuugcaacaauggcuugggcugucccaaaggacaacuacaaaaaugcaacgaacccacaaacaguggaaguaccauacauuuguacagaaggggaagaccaaauuacuguuuggggguuccauucggauaacaaaacccaaaugaagagccuauauggagacucaaauccucaaaaguucaccucaucugcuaauggaguaaccacacauuauguuucucagauuggcgacuucccagaucaaacagaagacggaggacuaccacaaagcggcagaauuguuguugauuacaugaugcaaaaaccugggaaaacaggaacaauugucuaucaaaggggcguuuuguugccucaaaagguguggugcgcgaguggcaggagcaaaguaauaaaagggucauugccuuuaauuggugaagcagauugccuucaugaagaauacgguggauuaaacaaaagcaagccuuacuacacaggaaaacaugcaaaagccauaggaaauugcccaauauggguaaaaacaccuuugaagcuugccaauggaaccaaauauagaccuccugcaaaacuauugaaggaaagggguuucuucggagcuauugcugguuuccuagaaggaggaugggaaggaaugauugcagguuggcacggauacacaucccacggagcacauggaguggcaguggcggcagaccuuaagaguacacaagaagcuauaaauaagauaacaaaaaaucucaauucuuugagugaacuagaaguaaagaaccuucaaagacuaaguggugccauggaugaacuccacaacgaaauacucgagcuggaugaaaaaguggaugaucucagagcugacacuauaagcucacaaauagaacuugcagucuugcuuuccaacgaaggaauaauaaacagugaagacgagcaucuauuggcacuugagagaaaacuaaagaaaaugcugggucccucugcuguagacauaggaaacggaugcuucgaaaccaaacacaaaugcaaccagaccugcuuagacaggauagcugcuggcaccuuuaaugcaggagaauuuucucuccccacuuuugauucauugaacauuacugcugcaucuuuaaaugaugauggauuggauaaccauacuauacugcucuauuacucaacugcugcuucuaguuuggcuguaacauuaaugcuagcuauuuuuauuguuuauauggucuccagagacaacguuucaugcuccaucugucuauaa

SEQ ID NO: 60425 - RNA, 1755 nt, Artificial Sequence
  derived and/or modified CDS sequence (wt) from hemagglutinin__InfluenzaB__AKU40878
augaaggcaauaauuguacuacucaugguaguaacauccaaugcagaucgaaucugcacugggauaacaucuucaaacucaccucauguggucaaaacagcuacucaaggggaggucaaugugacuggcgugauaccacugacaacaacaccaacaaaaucuuauuuugcaaaucucaaaggaacaaggaccagagggaaacuaugcccggacugucucaacuguacagaucuggauguggccuugggcaggccaauguguguggggaccacaccuucugcuaaagcuucaauacuccaugaggucagaccuguuacauccgggugcuuuccuauaaugcacgacagaacaaaaaucaggcagcuacccaaucuucucagaggauaugaaaagaucagguuaucaacccaaaacguuaucgaugcagaaaaagcaccaggaggacccuacagacuuggaaccucaggaucuugcccuaacgcuaccaguaaaaucggauuuuuugcaacaauggcuugggcugucccaaaggacaacuacaaaaaugcaacgaacccacaaacaguggaaguaccauacauuuguacagaaggggaagaccaaauuacuguuuggggguuccauucggauaacaaaacccaaaugaagagccucuauggagacucaaauccucaaaaguucaccucaucugcuaauggaguaaccacacauuauguuucucagauuggcgacuucccagaucaaacagaagacggaggacuaccacaaagcggcagaauuguuguugauuacaugaugcaaaaaccugggaaaacaggaacaauugucuaucaaagggguguuuuguugccucaaaagguguggugcgcgaguggcaggagcaaaguaauaaaagggucauugccuuuaauuggugaagcagauugccuucaugaagaauacgguggauuaaacaaaagcaagccuuacuacacaggaaaacaugcaaaagccauaggaaauugcccaauauggguaaaaacaccuuugaagcuugccaauggaaccaaauauagaccuccugcaaaacuauugaaggaaagggguuucuucggagcuauugcugguuuccuagaaggaggaugggaaggaaugauugcagguuggcacggauauacaucucacggagcacauggaguggcaguggcggcagaccuuaagaguacacaagaagcuauaaauaagauaacaaaaaaucucaauucuuugagugaacuagaaguaaagaaccuucaaagacuaaguggugccauggaugaacuccacaacgaaauacucgagcuggaugaaaaaguggaugaucucagagcugacacuauaagcucacaaauagaacuugcagucuugcuuuccaacgaaggaauaauaaacagugaagacgagcaucuauuggcacuugagagaaaacuaaagaaaaugcugggucccucugcuguagacauaggaaacggaugcuucgaaaccaaacacaaaugcaaccagaccugcuuagacaggauagcugcuggcaccuuuaaugcaggagaauuuucucuccccacuuuugauucauugaacauuacugcugcaucuuuaaaugaugauggauuggauaaccauacuauacugcucuauuacucaacugcugcuucuaguuuggcuguaacauuaaugcuagcuauuuuuauuguuuauauggucuccagagacaacguuucaugcuccaucugucuauaa

SEQ ID NO: 60426 - RNA, 1758 nt, Artificial Sequence
  derived and/or modified CDS sequence (wt) from hemagglutinin__InfluenzaB__AKU40889
augaaggcaauaauuguacuacucaugguaguaacauccaaugcagaucgaaucugcacugggauaacaucgucaaacucaccacaugucgucaaaacugcuacucaaggggaggucaaugugaccgguguaauaccacugacaacaacacccaccaaaucucauuuugcaaaucucaaaggaacagaaaccagggggaaacuaugcccaaaaugccucaacugcacagaucuggauguagccuugggcagaccaaaaugcacagggaaaauacccucggcaagaguuucaauacuccaugaagucagaccuguuacaucugggugcuuuccuauaaugcacgauagaacaaaaauuagacagcugccuaaccuucuccgaggauacgaacauaucagguuaucaacucacaacguuaucaaugcagaagaugcaccaggaggacccuacaaaauuggaaccucagggucuugcccuaacguuaccaauggaaacggauucuucgcaacaauggcuugggcugucccaaaaaacgacaaaaacaaaacagcaacaaauccauuaacaacagaaguaccauacauuuguacagaaggagaagaccaaauuaccguuuggggguuccacucugacaacgagacccaaauggcaaagcucuauggggacucaaagccccagaaguucaccucaucugccaacggagugaccacacacuacguuucacagauugguggcuucccaaaucaaacagaagacggaggacuaccacaaagugguagaauuguuguugauuacauggugcaaaaaucuggaaaaacaggaacaauuaccuaucaaagagguauuuuauugccucaaaagguguggugcgcaaguggcaggagcaagguaauaaaaggauccuugccuuuaauuggagaagcagauugccuccacgaaaaauacgguggauuaaacaaaagcaagccuuacuacacaggggaacaugcaaaggccauaggaaauugcccaauaugggugaaaacacccuugaagcuggccaauggaaccaaauauagaccuccugcaaaacuauuaaaggaaagggguuucuucggagcuauugcugguuucuuagagggaggaugggaaggaaugauugcagguuggcacggauacacaucccauggggcacauggaguagcgguggcagcugaccuuaagagcacucaagaggccauaaacaagauaacaaaaaaucucaacucuuugagugagcuggaaguaaagaaucuucaaagacuaagcggugccauggaugaacuccacaacgaaauacuagaacuagaugagaaaguggaugaucucagagcugauacaauaagcucacaaauagaacucgcaguccugcuuuccaaugaaggaauaauaaacagugaagaugaacaucucuuggcgcuugaaagaaagcugaagaaaaugcugggccccucugcuguagagauagggaauggaugcuuugaaaccaaacacaagugcaaccagaccugucucgacagaauagcugcugguaccuuugaugcaggagaauuuucucuccccaccuuugauucacugaauauuacugcugcaucuuuaaaugacgauggauuggauaaucauacuauacugcuuuacuacucaacugcugccuccaguuuggcuguaacacugaugauagcuaucuuuguuguuuauauggucuccagagacaauguuucuugcuccaucugucuauaa

SEQ ID NO: 60427 - RNA, 1755 nt, Artificial Sequence
  derived and/or modified CDS sequence (wt) from hemagglutinin__InfluenzaB__AKU40900
augaaggcaauaauuguacuacucaugguaguaacauccaaugcagaucgaaucugcacugggauaacaucuucaaacucaccucauguggucaaaacagcuacucaaggggaggucaaugugacuggcgugauaccacugacaacaacaccaacaaaaucuuauuuugcaaaucucaaaggaacaaggaccagagggaaacuaugcccggacugucucaacuguacagaucuggauguggccuugggcaggccaauguguguggggaccacaccuucugcuaaagcuucaauacuccaugaggucagaccuguuacauccgggugcuuuccuauaaugcacgacagaacaaaaaucaggcaacuacccaaucuucucagaggauaugaaaagaucagguuaucaacccaaaacguuaucgaugcagaaaaagcaccaggaggacccuacagacuuggaaccucaggaucuugcccuaacgcuaccaguaaaaucggauuuuuugcaacaauggcuugggcugucccaaaggacaacuacaaaaaugcaacgaacccacaaacaguggaaguaccauacauuuguacagaaggggaagaccaaauuacuguuuggggguuccauucggauaacaaaacccaaaugaagagccucuauggagacucaaauccucaaaaguucaccucaucugcuaauggaguaaccacacauuauguuucucagauuggcgacuucccagaucaaacagaagacggaggacuaccacaaagcggcagaauuguuguugauuacaugaugcaaaaaccugggaaaacaggaacaauugucuaucaaagggguguuuuguugccucaaaagguguggugcgcgaguggcaggagcaaaguaauaaaagggucauugccuuuaauuggugaagcagauugccuucaugaagaauacgguggauuaaacaaaagcaagccuuacuacacaggaaaacaugcaaaagccauaggaaauugcccaauauggguaaaaacaccuuugaagcuugccaauggaaccaaauauagaccuccugcaaaacuauugaaggaaagggguuucuucggagcuauugcugguuuccuagaaggaggaugggaaggaaugauugcagguuggcacggauacacaucucacggagcacauggaguggcaguggcggcagaccuuaagaguacacaagaagcuauaaauaagauaacaaaaaaucucaauucuuugagugaacuagaaguaaagaaccuucaaagacuaaguggugccauggaugaacuccacaacgaaauacucgagcuggaugaaaaaguggaugaucucagagcugacacuauaagcucacaaauagaacuugcaguuuugcuuuccaacgaaggaauaauaaacagugaagacgagcaucuauuggcacuugagagaaaacuaaagaaaaugcugggucccucugcuguagacauaggaaauggaugcuucgaaaccaaacacaaaugcaaccagaccugcuuagacaggauagcugcuggcaccuuuaaugcaggagaauuuucucuccccacuuuugauucauugaacauuacugcugcaucuuuaaaugaugauggauuggauaaccauacuauacugcucuauuacucaacugcugcuucuaguuuggcuguaacauuaaugcuagcuauuuuuauuguuuauauggucuccagagacaacguuucaugcuccaucugucuauaa

SEQ ID NO: 60428 - RNA, 1755 nt, Artificial Sequence
  derived and/or modified CDS sequence (wt) from hemagglutinin__InfluenzaB__AKU40911
augaaggcaauaauuguacuacucaugguaguaacauccaaugcagaucgaaucugcacugggauaacaucuucaaacucaccucauguggucaaaacagcuacucaaggggaggucaaugugacuggcgugauaccacugacaacaacaccaacaaaaucuuauuuugcaaaucucaaaggaacaaggaccagagggaaacuaugcccggacugucucaacuguacagaucuggauguggccuugggcaggccaauguguguggggaccacaccuucugcuaaagcuucaauacuccaugaggucagaccuguuacauccgggugcuuuccuauaaugcacgacagaacaaaaaucaggcaacuacccaaucuucucagaggauaugaaaagaucagguuaucaacccaaaacguuaucgaugcagaaaaagcaccaggaggacccuacagacuuggaaccucaggaucuugcccuaacgcuaccaguaaaaucggauuuuuugcaacaauggcuugggcugucccaaaggacaacuacaaaaaugcaacgaacccacuaacaguggaaguaccauacauuuguacagaaggggaagaccaaauuacuguuuggggguuccauucggauaacaaaacccaaaugaagagccucuauggagacucaaauccucaaaaguucaccucaucugcuaauggaguaacuacacauuauguuucucagauuggcgacuucccagaucaaacagaagacggaggacuaccacaaagcgguagaauuguuguugauuacaugaugcaaaaaccugggaaaacaggaacaauugucuaucaaagggguguuuuguugccucaaaagguguggugcgcgaguggcaggagcaaaguaauaaaagggucauugccuuuaauuggugaagcagauugccuucaugaagaauacgguggauuaaacaaaagcaagccuuacuacacaggaaaacaugcaaaagccauaggaaauugcccaauauggguaaaaacaccuuugaagcuugccaauggaaccaaauauagaccuccugcaaaacuauugaaggaaagggguuucuucggagcuauugcugguuuccuagaaggaggaugggaaggaaugauugcagguuggcacggauacacaucucacggagcacauggaguggcaguggcggcagaccuuaagaguacacaagaagcuauaaauaagauaacaaaaaaucucaauucuuugagugaacuagaaguaaagaaccuucaaagacuaaguggugccauggaugaacuccacaacgaaauacucgagcuggaugaaaaaguggaugaucucagagcugacacuauaagcucacaaauagaacuugcagucuugcuuuccaacgaaggaauaauaaacagugaagacgagcaucuauuggcacuugagagaaaacuaaagaaaaugcugggucccucugcuguagacauaggaaacggaugcuuugaaaccaaacacaaaugcaaccagaccugcuuagacaggauagcugcuggcaccuuuaaugcaggagaauuuucucuccccacuuuugauucauugaacauuacugcugcaucuuuaaaugaugauggauuggauaaccauacuauacugcucuauuacucaacugcugcuucuaguuuggcuguaacauuaaugcuagcuauuuuuauuguuuauauggucuccagagacaacguuucaugcuccaucugucuauaa

SEQ ID NO: 60429 - RNA, 1755 nt, Artificial Sequence
  derived and/or modified CDS sequence (wt) from hemagglutinin__InfluenzaB__AKU40922
augaaggcaauaauuguacuacucaugguaguaacauccaaugcagaucgaaucugcacugggauaacaucuucaaacucaccucauguggucaaaacaguuacucaaggggaggucaaugugacuggcgugauaccacugacaacaacaccaacaaaaucuuauuuugcaaaucucaaaggaacaaggaccagagggaaacuaugcccggacugucucaacuguacagaucuggauguggccuugggcaggccaauguguguggggaccacaccuucugcuaaagcuucaauacuccaugaggucagaccuguuacauccgggugcuuuccuauaaugcacgacagaacaaaaaucaggcaacuacccaaucuucucagaggauaugaaaagaucagguuaucaacccaaaacguuaucgaugcagaaaaagcaccaggaggacccuacagacuuggaaccucaggaucuugcccuaacgcuaccaguaaaaucggauuuuuugcaacaauggcuugggcugucccaaaggacaacuacaaaaaugcaacgaacccacaaacaguggaaguaccauacauuuguacagaaggggaagaccaaauuacuguuuggggguuccauucggauaacaaaacccaaaugaagagccucuauggagacucaaauccucaaaaguucaccucaucugcuaauggaguaaccacacauuauguuucucagauuggcgacuucccagaucaaacagaagacggaggacuaccacaaagcggcagaauuguuguugauuacaugaugcaaaaaccugggaaaacaggaacaauugucuaucaaagggguguuuuguugccucaaaagguguggugcgcgaguggcaggagcaaaguaauaaaagggucauugccuuuaauuggugaagcagauugccuucaugaagaauacgguggauuaaacaaaagcaagccuuacuacacaggaaaacaugcaaaagccauaggaaauugcccaauauggguaaaaacaccuuugaagcuugccaauggaaccaaauauagaccuccugcaaaacuauugaaggaaagggguuucuucggagcuauugcugguuuccuagaaggaggaugggaaggaaugauugcagguuggcacggauacacaucucacggagcacauggaguggcaguggcggcagaccuuaagaguacacaagaagcuauaaauaagauaacaaaaaaucucaauucuuugagugaacuagaaguaaagaaccuucaaagacuaaguggugccauggaugaacuccacaacgaaauacucgagcuggaugaaaaaguggaugaucucagagcugacacuauaagcucacaaauagaacuugcagucuugcuuuccaacgaaggaauaauaaacagugaagacgagcaucuauuggcacuugagagaaaacuaaagaaaaugcugggucccucugcuguagacauaggaaacggaugcuucgaaaccaaacacaaaugcaaccagaccugcuuagacaggauagcugcuggcaccuuuaaugcaggagaauuuucucuccccacuuuugauucauugaacauuacugcugcaucuuuaaaugaugauggauuggauaaccauacuauacugcucuauuacucaacugcugcuucuaguuuggcuguaacauuaaugcuagcuauuuuuauuguuuauauggucuccagagacaacguuucaugcuccaucugucuauaa

SEQ ID NO: 60430 - RNA, 1755 nt, Artificial Sequence; identical to SEQ ID NO: 60412
  derived and/or modified CDS sequence (wt) from hemagglutinin__InfluenzaB__AKU40933

SEQ ID NO: 60431 - RNA, 1755 nt, Artificial Sequence; identical to SEQ ID NO: 60343
  derived and/or modified CDS sequence (wt) from hemagglutinin__InfluenzaB__AKU40944

SEQ ID NO: 60432 - RNA, 1755 nt, Artificial Sequence; identical to SEQ ID NO: 60427
  derived and/or modified CDS sequence (wt) from hemagglutinin__InfluenzaB__AKU40955

SEQ ID NO: 60433 - RNA, 1755 nt, Artificial Sequence; identical to SEQ ID NO: 60343
  derived and/or modified CDS sequence (wt) from hemagglutinin__InfluenzaB__AKU40966

SEQ ID NO: 60434 - RNA, 1755 nt, Artificial Sequence
  derived and/or modified CDS sequence (wt) from hemagglutinin__InfluenzaB__AKU40977
augaaggcaauaauuguacuacucaugguaguaacguccaaugcagaucgaaucugcacugggauaacaucuucaaacucaccucauguggucaaaacagcuacucaaggggaggucaaugugacuggcgugauaccacugacaacaacaccaacaaaaucuuauuuugcaaaucucaaaggaacaaggaccagagggaaacuaugcccggacugucucaacuguacagaucuggauguggccuugggcaggccaauguguguggggaccacaccuucugcuaaagcuucaauacuccaugaggucagaccuguuacauccgggugcuuuccuauaaugcacgacagaacaaaaaucaggcaacuacccaaucuucucagaggauaugaaaagaucagguuaucaacccaaaacguuaucgaugcagaaaaagcaccaggaggacccuacagacuuggaaccucaggaucuugcccuaacgcuaccaguaaaaucggauuuuuugcaacaauggcuugggcugucccaaaggacaacuacaaaaaugcaacgaacccacaaacaguggaaguaccauacauuuguacagaaggggaagaccaaauuacuguuuggggguuccauucggauaacaaaacccaaaugaagagccucuauggagacucaaauccucaaaaguucaccucaucugcuaauggaguaaccacacauuauguuucucagauuggcgacuucccagaucaaacagaagacggaggacuaccacaaagcggcagaauuguuguugauuacaugaugcaaaaaccugggaaaacaggaacaauugucuaucaaagggguguuuuguugccucaaaagguguggugcgcgaguggcaggagcaaaguaauaaaagggucauugccuuuaauuggugaagcagauugccuucaugaagaauacgguggauuaaacaaaagcaagccuuacuacacaggaaaacaugcaaaagccauaggaaauugcccaauauggguaaaaacaccuuugaagcuugccaauggaaccaaauauagaccuccugcaaaacuauugaaggaaagggguuucuucggagcuauugcugguuuccuagaaggaggaugggaaggaaugauugcagguuggcacggauacacaucucacggagcacauggaguggcaguggcggcagaccuuaagaguacacaagaagcuauaaauaagauaacaaaaaaucucaacucuuugagugaacuagaaguaaagaaccuucaaagacuaaguggugccauggaugaacuccacaacgaaauacucgagcuggaugaaaaaguggaugaucucagagcugacacuauaagcucacaaauagaacuugcagucuugcuuuccaacgaaggaauaauaaacagugaagacgagcaucuauuggcacuugagagaaaacuaaagaaaaugcugggucccucugcuguagacauaggaaacggaugcuucgaaaccaaacacaaaugcaaccagaccugcuuagacaggauagcugcuggcaccuuuaaugcaggagaauuuucucuccccacuuuugauucauugaacauuacugcugcaucuuuaaaugaugauggauuggauaaccauacuauacugcucuauuacucaacugcugcuucuaguuuggcuguaacauuaaugcuagcuauuuuuauuguuuauauggucuccagagacaacguuucaugcuccaucugucuauaa

SEQ ID NO: 60435 - RNA, 1755 nt, Artificial Sequence
  derived and/or modified CDS sequence (wt) from hemagglutinin__InfluenzaB__AKU40987
augaaggcaauaauuguacuacucaugguaguaacauccaaugcagaucgaaucugcacugggauaacaucuucaaacucaccucauguggucaaaacagcuacucaaggggaggucaaugugacuggcgugauaccacugacaacaacaccaacaaaaucuuauuuugcaaaucucaaaggaacaaggaccagagggaaacuaugcccggacugucucaacuguacagaucuggauguggccuugggcaggccaauguguguggggaccacaccuucugcuaaagcuucaauacuccaugaggucagaccuguuacauccgggugcuuuccuauaaugcacgacagaacaaaaaucaggcaacuacccaaucuucucagaggauaugaaaagaucagguuaucaacccaaaacguuaucgaugcagaaaaagcaccaggaggacccuacagacuuggaaccucaggaucuugcccuaacgcuaccaguaaaaucggauuuuuugcaacaauggcuugggcugucccaaaggacaacuacaaaaaugcaacgaacccacaaacaguggaaguaccauacauuuguacagaaggggaagaccaaauuacuguuuggggguuccauucggauaacaaaacccaaaugaagagccucuauggagacucaaauccucaaaaguucaccucaucugcuaauggaguaaccacacauuauguuucucagauuggcgacuucccagaucaaacagaagacggaggacuaccacaaagcggcagaauuguuguugauuacaugaugcaaaaaccugggaaaacaggaacaauugucuaucaaagggguguuuuguugccucaaaagguguggugcgcgaguggcaggagcaaaguaauaaaagggucauugccuuuaauuggugaagcagauugccuucaugaagaauacgguggauuaaacaaaagcaagccuuacuacacaggaaaacaugcaaaagccauaggaaauugcccaauauggguaaaaacaccuuugaagcuugccaauggaaccaaauauagaccuccugcaaaacuauugaaggaaagggguuucuucggagcuauugcugguuuccuagaaggaggaugggaaggaaugauugcagguuggcacggauacacaucucacggcgcacauggaguggcaguggcggcagaccuuaagaguacacaagaagcuauaaauaagauaacaaaaaaucucaauucuuugagugaacuagaaguaaagaaccuucaaagacuaaguggugccauggaugaacuccacaacgaaauacucgagcuggaugaaaaaguggaugaucucagagcugacacuauaagcucacaaauagaacuugcagucuugcuuuccaacgaaggaauaauaaacagugaagacgagcaucuauuggcacuugagagaaaacuaaagaaaaugcugggucccucugcuguagacauaggaaacggaugcuucgaaaccaaacacaaaugcaaccagaccugcuuagacaggauagcugcuggcaccuuuaaugcaggagaauuuucucuccccacuuuugauucauugaacauuacugcugcaucuuuaaaugaugauggauuggauaaccauacuauacugcucuauuacucaacugcugcuucuaguuuggcuguaacauuaaugcuagcuauuuuuauuguuuauauggucuccagagacaacgucucaugcuccaucugucuauaa

SEQ ID NO: 60436 - RNA, 1755 nt, Artificial Sequence
  derived and/or modified CDS sequence (wt) from hemagglutinin__InfluenzaB__AKU40998
augaaggcaauaauuguacuacucaugguaguaacauccaaugcagaucgaaucugcacugggauaacaucuucaaacucaccucauguggucaaaacagcuacucaaggggaggucaaugugacuggcgugauaccacugacaacaacaccaacaaaaucuuauuuugcaaaucucaaaggaacaaggaccagagggaaacuaugcccggacugucucaacuguacagaucuggauguggccuugggcaggccaauguguguggggaccacaccuucugcuaaagcuucaauacuccaugaggucagaccuguuacauccgggugcuuuccuauaaugcacgacagaacaaaaaucaggcaacuacccaaucuucucagaggauaugaaaagaucagguuaucaacccaaaacguuaucgaugcagaaaaagcaccaggaggacccuacagacuuggaaccucaggauccugcccuaacgcuaccaguaaaaucggauuuuuugcaacaauggcuugggcugucccaaaggacaacuacaaaaaugcaacgaacccacaaacaguggaaguaccauacauuuguacagaaggggaagaccaaauuacuguuuggggguuccauucggauaacaaaacccaaaugaagagccucuauggagacucaaauccucaaaaguucaccucaucugcuaauggaguaaccacacauuauguuucucagauuggcgacuucccagaucaaacagaagacggaggacuaccacaaagcggcagaauuguuguugauuacaugaugcaaaaaccugggaaaacaggaacaauugucuaucaaagggguguuuuguugccucaaaagguguggugcgcgaguggcaggagcaaaguaauaaaagggucauugccuuuaauuggugaagcagauugccuucaugaagaauacgguggauuaaacaaaagcaagccuuacuacacaggaaaacaugcaaaagccauaggaaauugcccaauauggguaaaaacaccuuugaagcuugccaauggaaccaaauauagaccuccugcaaaacuauugaaggaaagggguuucuucggagcuauugcugguuuccuagaaggaggaugggaaggaaugauugcagguuggcacggauacacaucucacggagcacauggaguggcaguggcggcagaccuuaagaguacacaagaagcuauaaauaagauaacaaaaaaucucaauucuuugagugaacuagaaguaaagaaccuucaaagacuaaguggugccauggaugaacuccacaacgaaauacucgagcuggaugaaaaaguggaugaucucagagcugacacuauaagcucacaaauagaacuugcagucuugcuuuccaacgaaggaauaauaaacagugaagacgagcaucuguuggcacuugagagaaaacuaaagaaaaugcugggucccucugcuguagacauaggaaacggaugcuucgaaaccaaacacaaaugcaaccagaccugcuuagacaggauagcugcuggcaccuuuaaugcaggagaauuuucucuccccacuuuugauucauugaacauuacugcugcaucuuuaaaugaugauggauuggauaaccauacuauacugcucuauuacucaacugcugcuucuaguuuggcuguaacauuaaugcuagcuauuuuuauuguuuauauggucuccagagacaacguuucaugcuccaucugucuauaa

SEQ ID NO: 60437 - RNA, 1755 nt, Artificial Sequence; identical to SEQ ID NO: 60358
  derived and/or modified CDS sequence (wt) from hemagglutinin__InfluenzaB__AKU41009

SEQ ID NO: 60438 - RNA, 1755 nt, Artificial Sequence
  derived and/or modified CDS sequence (wt) from hemagglutinin__InfluenzaB__AKU41020
augaaggcaauaauuguacuacucaugguaguaacauccaaugcagaucgaaucugcacugggauaacaucuucaaacucaccucauguggucaaaacagcuacucaaggggaggucaaugugacuggcgugauaccacugacaacaacaccaacaaaaucuuauuuugcaaaucucaaaggaacaaggaccagagggaaacuaugcccggacugucucaacuguacagaucuggauguggccuugggcaggccaauguguguggggaccacaccuucugcuaaagcuucaauacuccaugaggucagaccuguuacauccgggugcuuuccuauaaugcacgacagaacaaaaaucaggcaacuacccaaucuucucagaggauaugaaaagaucagguuaucaacccaaaacguuaucgaugcagaaaaagcaccaggaggacccuacagacuuggaaccucaggaucuugcccuaaugcuaccaguaaaaucggauuuuuugcaacaauggcuugggcugucccaaaggacaacuacaaaaaugcaacgaacccacaaacaguggaaguaccauacauuuguacagaaggggaagaccaaauuacuguuuggggguuccauucggauaacaaaacccaaaugaagagccucuauggagacucaaauccucaaaaguucaccucaucugcuaauggaguaaccacacauuauguuucucagauuggcgacuucccagaucaaacagaagacggaggacuaccacaaagcggcagaauuguuguugauuacaugaugcaaaaaccugggaaaacaggaacaauugucuaucaaagggguguuuuguugccucaaaagguguggugcgcgaguggcaggagcaaaguaauaaaagggucauugccuuuaauuggugaagcagauugccuucaugaagaauacgguggauuaaacaaaagcaagccuuacuacacaggaaaacaugcaaaagccauaggaaauugcccaauauggguaaaaacaccuuugaagcuugccaauggaaccaaauauagaccuccugcaaaacuauugaaggaaagggguuucuucggagcuauugcugguuuccuagaaggaggaugggaaggaaugauugcagguuggcacggauacacaucucacggagcacauggaguggcaguggcggcagaccuuaagaguacacaagaagcuauaaauaagauaacaaaaaaucucaauucuuugagugaacuagaaguaaagaaccuucaaagacuaaguggugccauggaugaacuccacaacgaaauacucgagcuagaugaaaaaguggaugaucucagagcugacacuauaagcucacaaauagaacuugcagucuugcuuuccaacgaaggaauaauaaacagugaagacgagcaucuauuggcacuugagagaaaacuaaagaaaaugcugggucccucugcuguagacauaggaaacggaugcuucgaaaccaaacacaaaugcaaccagaccugcuuagacaggauagcugcuggcaccuuuaaugcaggagaauuuucucuccccacuuuugauucauugaacauuacugcugcaucuuuaaaugaugauggauuggauaaccauacuauacugcucuauuacucaacugcugcuucuaguuuggcuguaacauuaaugcuagcuauuuuuauuguuuauauggucuccagagacaacguuucaugcuccaucugucuauaa

SEQ ID NO: 60439 - RNA, 1755 nt, Artificial Sequence
  derived and/or modified CDS sequence (wt) from hemagglutinin__InfluenzaB__ALA08485
augaaggcaauaauuguacuacucaugguaguaacauccaaugcagaucgaaucugcacugggauaacaucuucaaacucaccucauguggucaaaacagcuacucaaggggaggucaaugugacuggcgugauaccacugacaacaacaccaacaaaaucuuauuuugcaaaucucaaaggaacaaggaccagagggaaacuaugcccggacugucucaacuguacagaucuggauguggccuugggcaggccaauguguguggggaccacaccuucugcuaaagcuucaauacuccaugaggucagaccuguuacauccgggugcuuuccuauaaugcacgacagaacaaaaaucaggcaacuacccaaucuucucagaggauaugaaaagaucagguuaucaacccaaaacguuaucgaugcagaaaaagcaccaggaggacccuacagacuuggaaccucaggaucuugcccuaacgcuaccaguaaaaucggauuuuuugcaacaauggcuugggcugucccaaaggacaacuacaaaaaugcaacgaacccacaaacaguggaaguaccauacauuuguacagaaggggaagaccaaauuacuguuuggggguuccauucggauaacaaaacccaaaugaagagccucuauggagacucaaauccucaaaaguucaccucaucugcuaauggaguaaccacacauuauguuucucagauuggcgacuucccagaucaaacagaagacggaggacuaccacaaagcggcagaauuguuguugauuacaugaugcaaaaaccugggaaaacaggaacaauugucuaucaaagggguguuuuguugccucaaaagguguggugcgcgaguggcaggagcaaaguaauaaaagggucauugccuuuaauuggugaagcagauugccuucaugaagaauacgguggauuaaacaaaagcaagccuuacuacacaggaaaacaugcaaaagccauaggaaauugcccaauauggguaaaaacaccuuugaagcuugccaauggaaccaaauauagaccuccugcaaaacuauugaaggaaagggguuucuucggagcuauugcugguuuccuagaaggaggaugggaaggaaugauugcagguuggcacggauacacaucucacggagcacauggaguggcaguggcggcagaccuuaagaguacacaagaagcuauaaauaagauaacaaaaaaucucaauucuuugagugaacuagaaguaaagaaccuucaaagacuaaguggugccauggaugaacuccacaacgaaauacucgagcuggaugaaaaaguggaugaucucagagcugacacuauaagcucacaaauagaacuugcagucuugcuuuccaacgaaggaauaauaaacagugaagacgagcaucuauuggcacuugagagaaaacuaaagaaaaugcugggucccucugcuguagacauaggaaacggaugcuucgaaaccaaacacaaaugcaaccagaccugcuuagacaggauagcugcuggcaccuuuaaugcaggagaauuuucucuccccacuuuugauucauugaacauuacugcugcaucuuuaaaugaugauggauuggauaaccauacuauacugcucuauuacucaacugcugcuucuaguuuggcuguaacauuaaugcuagccauuuuuauuguuuauauggucuccagagacaacguuucaugcuccaucugucuauaa

SEQ ID NO: 60440 - RNA, 1755 nt, Artificial Sequence
  derived and/or modified CDS sequence (wt) from hemagglutinin__InfluenzaB__ALA08486
augaaggcaauaauuguacuacucaugguaguaacauccaaugcagaucgaaucugcacugggauaacaucuucaaacucaccucauguggucaaaacagccacucaaggggaggucaaugugacuggcgugauaccacugacaacaacaccaacaaaaucuuauuuugcaaaucucaaaggaacaaggaccagagggaaacuaugcccggacugucucaacuguacagaucuggauguagccuugggcaggccaauguguguggggaccacaccuucugcuaaagcuucaauacuccaugaggucagaccuguuacauccgggugcuuuccuauaaugcacgacagaacaaaaaucaggcaacuacccaaucuucucagaggauaugaaaagaucagguuaucaacccaaaacguuaucgaugcagaaaaagcaccaggaggacccuacagacuuggaaccucaggaucuugcccuaacgcuaccaguaaaaucggauuuuuugcaacaauggcuugggcugucccaaaggacaacuacaaaaaugcaacgaacccacaaacaguggaaguaccauacauuuguacagaaggggaagaccaaauuacuguuuggggguuccauucggauaacaaaacccaaaugaagagccucuauggagacucaaauccucaaaaguucaccucaucugcuaauggaguaaccacacauuauguuucucagauuggagacuucccagaucaaacagaagacggaggacuaccacaaagcggcagaauuguuguugauuacaugaugcaaaaaccugggaaaacaggaacaauugucuaucaaagggguguuuuguugccucaaaagguguggugcgcgaguggcaggagcaaaguaauaaaagggucauugccuuuaauuggugaagcagauugccuucaugaagaauacgguggauuaaacaaaaguaagccuuacuacacaggaaaacaugcaaaagccauaggaaauugcccaauauggguaaaaacaccuuugaagcuugccaauggaaccaaauauagaccuccugcaaaacuauugaaggaaagggguuucuucggagcuauugcugguuuccuagaaggaggaugggaaggaaugauugcagguuggcacggauacacaucucacggagcacauggaguggcaguggcggcagaccuuaagaguacacaagaagcuauaaauaagauaacaaaaaaucucaauucuuugagugaacuagaaguaaagaaccuucaaagacuaaguggugccauggaugaacuccacaacgaaauacucgagcuggaugaaaaaguggaugaucucagagcugacacuauaagcucacaaauagaacuugcagucuugcuuuccaacgaaggaauaauaaacagugaagacgagcaucuauuggcacuugagagaaaacuaaagaaaaugcugggucccucugcuguagacauaggaaacggaugcuucgaaaccaaacacaaaugcaaccagaccugcuuagacaggauagcugcuggcaccuuuaaugcaggagaauuuucucuccccacuuuugauucauugaacauuacugcugcaucuuuaaaugaugauggauuggauaaccauacuauacugcucuauuacucaacugcugcuucuaguuuggcuguaacauuaaugcuagcuauuuuuauuguuuauauggucuccagagacaacguuucaugcuccaucugucuauaa

SEQ ID NO: 60441 - RNA, 1755 nt, Artificial Sequence; identical to SEQ ID NO: 60343
  derived and/or modified CDS sequence (wt) from hemagglutinin__InfluenzaB__ALA08487

SEQ ID NO: 60442 - RNA, 1755 nt, Artificial Sequence
  derived and/or modified CDS sequence (wt) from hemagglutinin__InfluenzaB__ALA08564
augaaagcaauaauuguacuacucaugguaguaacauccaaugcagaucgaaucugcacugggauaacaucuucaaacucaccucauguggucaaaacagcuacucaaggggaggucaaugugacuggcgugauaccacugacaacaacaccaacaaaaucuuauuuugcaaaucucaaaggaacaaggaccagagggaaacuaugcccggacugucucaacuguacagaucuggauguggccuugggcaggccaauguguguggggaccacaccuucugcuaaagcuucaauacuccaugaggucagaccuguuacauccgggugcuuuccuauaaugcacgacagaacaaaaaucaggcaacuacccaaucuucucagaggauaugaaaagaucagguuaucaacccaaaacguuaucgaugcagaaaaagcaccaggaggacccuacagacuuggaaccucaggaucuugcccuaacgcuaccaguaaaaucggauuuuuugcaacaauggcuugggcugucccaaaggacaacuacaaaaaugcaacgaacccacaaacaguggaaguaccauacauuuguacagaaggggaagaccaaauuacuguuuggggguuccauucggauaacaaaacccaaaugaagagccucuauggagacucaaauccucaaaaguucaccucaucugcuaauggaguaaccacacauuauguuucucagauuggcgacuucccagaucaaacagaagacggaggacuaccacaaagcggcagaauuguuguugauuacaugaugcaaaaaccugggaaaacaggaacaauugucuaucaaagggguguuuuguugccucaaaagguguggugcgcgaguggcaggagcaaaguaauaaaagggucauugccuuuaauuggugaagcagauugccuucaugaagaauacgguggauuaaacaaaagcaagccuuacuacacaggaaaacaugcaaaagccauaggaaauugcccaauauggguaaaaacaccuuugaagcuugccaauggaaccaaauauagaccuccugccaaacuauugaaggaaagggguuucuucggagcuauugcugguuuccuagaaggaggaugggaaggaaugauugcagguuggcacggauacacaucucacggagcacauggaguggcaguggcggcagaccuuaagaguacacaagaagcuauaaauaagauaacaaaaaaucucaauucuuugagugaacuagaaguaaagaaccuucaaagacuaaguggugccauggaugaacuccacaacgaaauacucgagcuggaugaaaaaguggaugaucucagagcugacacuauaagcucacaaauagaacuugcagucuugcuuuccaacgaaggaauaauaaacagugaagacgagcaucuauuggcacuugagagaaaacuaaagaaaaugcugggucccucugcuguagacauaggaaacggaugcuucgaaaccaaacacaaaugcaaccagaccugcuuagacaggauagcugcuggcaccuuuaaugcaggagaauuuucucuccccacuuuugauucauugaacauuacugcugcaucuuuaaaugaugauggauuggauaaccauacuauacugcucuauuacucaacugcugcuucuaguuuggcuguaacauuaaugcuagcuauuuuuauuguuuauauggucuccagagacaacguuucaugcuccaucugucuauaa

SEQ ID NO: 60443 - RNA, 1755 nt, Artificial Sequence; identical to SEQ ID NO: 60439
  derived and/or modified CDS sequence (wt) from hemagglutinin__InfluenzaB__ALA08565

SEQ ID NO: 60444 - RNA, 1755 nt, Artificial Sequence
  derived and/or modified CDS sequence (wt) from hemagglutinin__InfluenzaB__ALA08566
augaaggcaauaauuguacuacucaugguaguaacauccaaugcagaucgaaucugcacugggauaacaucuucaaacucaccucauguggucaaaacagcuacucaaggggaggucaaugugacuggcgugauaccacugacaacaacaccaacaaaaucuuauuuugcaaaucucaaaggaacaaggaccagagggaaacuaugcccggacugucucaacuguacagaucuggauguggccuugggcaggccaauguguguggggaccacaccuucugcuaaagcuucaauacuccaugaggucagaccuguuacauccgggugcuuuccuauaaugcacgacagaacaaaaaucaggcaacuacccaaucuucucagaggauaugaaaagauuagguuaucaacccaaaacguuaucgaugcagaaaaagcaccaggaggacccuacagacuugggaccucaggaucuugcccuaacgcuaccaguaaaaucggauuuuuugcaacaauggcuugggcugucccaaaggacaacuacaaaaaugcaacgaacccacaaacaguggaaguaccauacauuuguacagaaggggaagaccaaauuacuguuuggggguuccauucggauaacaaaacccaaaugaagagccucuauggagacucaaauccucaaaaguucaccucaucugcuaauggaguaaccacacauuauguuucucagauuggcgacuucccagaucaaacagaagacggaggacuaccacaaagcggcagaauuguuguugauuacaugaugcaaaaaccugggaaaacaggaacaauugucuaucaaagggguguuuuguugccucaaaagguguggugcgcgaguggcaggagcaaaguaauaaaagggucauugccuuuaauuggugaagcagauugccuucaugaagaauacgguggauuaaacaaaagcaagccuuacuacacaggaaaacaugcaaaagcuauaggaaauugcccaauauggguaaaaacaccuuugaagcuugccaauggaaccaaauauagaccuccugcaaaacuauugaaggaaagggguuucuucggagcuauugcugguuuccuagaaggaggaugggaaggaaugauugcagguuggcacggauacacaucucacggagcacauggaguggcaguggcggcagaccuuaagaguacacaagaagcuauaaauaagauaacaaaaaaucucaauucuuugagugaacuagaaguaaagaaccuucaaagacuaaguggugccauggaugaacuccacaacgaaauacucgagcuggaugaaaaaguggaugaucucagagcugacacuauaagcucacaaauagaacuugcagucuugcuuuccaacgaaggaauaauaaacagugaagacgagcaucuauuggcacuugagagaaaacuaaagaaaaugcugggucccucugcuguagacauaggaaacggaugcuucgaaaccaaacacaaaugcaaccagaccugcuuagacaggauagcugcuggcaccuuuaaugcaggagaauuuucucuccccacuuuugauucauugaacauuacugcugcaucuuuaaaugaugauggauuggauaaccauacuauacugcucuauuacucaacugcugcuucuaguuuggcuguaacauuaaugcuagcuauuuuuauuguuuauauggucuccagagacaacguuucaugcuccaucugucuauaa

SEQ ID NO: 60445 - RNA, 1755 nt, Artificial Sequence
  derived and/or modified CDS sequence (wt) from hemagglutinin__InfluenzaB__ALA08567
augaaggcaauaauuguacuacucaugguaguaacauccaaugcagaucgaaucugcacugggauaacaucuucaaacucaccucauguggucaaaacagcuacucaaggggaggucaaugugacuggcgugauaccacugacaacaacaccaacaaaaucuuauuuugcaaaucucaaaggaacaaggaccagagggaaacuaugcccggacugucucaacuguacagaucuggauguagccuugggcaggccaauguguguggggaccacaccuucugcuaaagcuucaauacuccaugaggucagaccuguuacauccgggugcuuuccuauaaugcacgacagaacaaaaaucaggcaacuacccaaucuucucagaggauaugaaaagaucagguuaucaacccaaaacguuaucgaugcagaaaaagcaccaggaggacccuacagacuuggaaccucaggaucuugcccuaacgcuaccaguaaaaucggauuuuuugcaacaauggcuugggcugucccaaaggacaacuacaaaaaugcaacgaacccacaaacaguggaaguaccauacauuuguacagaaggggaagaccaaauuacuguuuggggguuccauucggauaacaaaacccaaaugaagagccucuauggagacucaaauccucaaaaguucaccucaucugcuaauggaguaaccacacauuauguuucucagauuggagacuucccagaucaaacagaagacggaggacuaccacaaagcggcagaauuguuguugauuacaugaugcaaaaaccugggaaaacaggaacaauugucuaucaaagggguguuuuguugccucaaaagguguggugcgcgaguggcaggagcaaaguaauaaaagggucauugccuuuaauuggugaagcagauugccuucaugaagaauacgguggauuaaacaaaaguaagccuuacuacacaggaaaacaugcaaaagccauaggaaauugcccaauauggguaaaaacaccuuugaagcuugccaauggaaccaaauauagaccuccugcaaaacuauugaaggaaagggguuucuucggagcuauugcugguuuccuagaaggaggaugggaaggaaugauugcagguuggcacggauacacaucucacggagcacauggaguggcaguggcggcagaccuuaagaguacacaagaagcuauaaauaagauaacaaaaaaucucaauucuuugagugaacuagaaguaaagaaccuucaaagacuaaguggugccauggaugaacuccacaacgaaauacucgagcuggaugaaaaaguggaugaucucagagcugacacuauaagcucacaaauagaacuugcagucuugcuuuccaacgaaggaauaauaaacagugaagacgagcaucuauuggcacuugagagaaaacuaaagaaaaugcugggucccucugcuguagacauaggaaacggaugcuucgaaaccaaacacaaaugcaaccagaccugcuuagacaggauagcugcuggcaccuuuaaugcaggagaauuuucucuccccacuuuugauucauugaacauuacugcugcaucuuuaaaugaugauggauuggauaaccauacuauacugcucuauuacucaacugcugcuucuaguuuggcuguaacauuaaugcuagcuauuuuuauuguuuauauggucuccagagacaacguuucaugcuccaucugucuauaa

SEQ ID NO: 60446 - RNA, 1755 nt, Artificial Sequence
  derived and/or modified CDS sequence (wt) from hemagglutinin__InfluenzaB__ALA08568
augaaggcaauaauuguacuacucaugguaguaacauccaaugcagaucgaaucugcacugggauaacaucuucaaacucaccucauguggucaaaacagcuacucaaggggaggucaaugugacuggcgugauaccacugacaacaacaccaacaaaaucuuauuuugcaaaucucaaaggaacaaggaccagagggaaacuaugcccggacugucucaacuguacagaucuggauguggccuugggcaggccaauguguguggggaccacaccuucugcuaaagcuucaauacuccaugaggucagaccuguuacauccgggugcuuuccuauaaugcacgacagaacaaaaaucaggcaacuacccaaucuucucagaggauaugaaaagaucagguuaucaacccaaaacguuaucgaugcagaaaaagcaccaggaggacccuacagacuuggaaccucaggaucuugcccuaacgcuaccaguaaaaucggauuuuuugcaacaauggcuugggcugucccaaaggacaacuacaaaaaugcaacgaacccacaaacaguggaaguaccauacauuuguacagaaggggaagaccaaauuacuguuuggggguuccauucggauaacaaaacccaaaugaagagccucuauggagacucaaauccucaaaaguucaccucaucugcuaauggaguaaccacacauuauguuucucagauuggcgacuucccagaucaaacagaagacggaggacuaccacaaagcggcagaauuguuguugauuacaugaugcaaaaaccugggaaaacaggaacaauugucuaucaaagggguguuuuguugccucaaaagguguggugcgcgaguggcaggagcaaaguaauaaaagggucauugccuuuaauuggugaagcagauugccuucaugaagaauacgguggauuaaacaaaagcaagccuuacuacacaggaaaacaugcaaaagccauaggaaauugcccaauauggguaaaaacaccuuugaagcuugccaauggaaccaaauauagaccuccugcaaaauuauugaaggaaagggguuucuucggagcuauugcugguuuccuagaaggaggaugggaaggaaugauugcagguuggcacggauacacaucucacggagcacauggaguggcaguggcggcagaccuuaagaguacacaagaagcuauaaauaagauaacaaaaaaucucaauucuuugagugaacuagaaguaaagaaccuucaaagacuaaguggugccauggaugaacuccacaacgaaauacucgagcuggaugaaaaaguggaugaucucagagcugacacuauaagcucacaaauagaacuugcagucuugcuuuccaacgaaggaauaauaaacagugaagacgagcaucuauuggcacuugagagaaaacuaaagaaaaugcugggucccucugcuguagacauaggaaacggaugcuucgaaaccaaacacaaaugcaaccagaccugcuuagacaggauagcugcuggcaccuuuaaugcaggagaauuuucucuccccacuuuugauucauugaacauuacugcugcaucuuuaaaugaugauggauuggauaaccauacuauacugcucuauuacucaacugcugcuucuaguuuggcuguaacauuaaugcuagcuauuuuuauuguuuauauggucuccagagacaacguuucaugcuccaucugucuauaa

SEQ ID NO: 60447 - RNA, 1755 nt, Artificial Sequence; identical to SEQ ID NO: 60439
  derived and/or modified CDS sequence (wt) from hemagglutinin__InfluenzaB__ALA08569

SEQ ID NO: 60448 - RNA, 1758 nt, Artificial Sequence
  derived and/or modified CDS sequence (wt) from hemagglutinin__InfluenzaB__ALA08689
augaaggcaauaauuguacuacucaugguaguaacauccaaugcagaucgaaucugcacugggauaacaucgucaaacucaccacaugucgucaaaacugcuacucaaggggaggucaaugugaccgguguaauaccacugacaacaacacccaccaaaucucauuuugcaaaucuaaaaggaacagaaaccagggggaaacuaugcccaaaaugccccaacugcacagaucuggacguagccuugggcagaccaaaauguacggggaaaauacccucggcaagaguuucaauacuccaugaagucagaccuguuacaucugggugcuuuccuauaaugcacgauagaacaaaaauuagacagcugccuaaccuucuccgaggauacgaacauaucagguuaucaacucacaacguuaucaaugcagaaaaugcaccaggaggacccuacaaaauuggaaccucagggucuugcccuaacguuaccaauggaaacggauucuucgcaacaauggcuugggccgucccaaaaaacgacaaaaacaaaacagcaacaaacccauuaacaauagaaguaccauacauuuguacagaaggagaagaccaaauuaccguuuggggguuccacucugacaacgagacccaaauggcaaagcucuauggggacucaaauccccagaaguucaccucaucugccaacggagugaccacacauuacguuucacagauugguggcuucccaaaucaaacagaagacggaggacuaccacaaagugguagaauuguuguugauuacauggugcaaaaaucugggaaaacaggaacaauuaccuaucaaagagguauuuuauugccucaaaagguguggugcgcaaguggcaggagcaagguaauaaaaggauccuugccuuuaauuggagaagcagauugccuccacgaaaaauacgguggguuaaacaaaagcaagccuuacuacacaggggaacaugcaaaggccauaggaaauugcccaauaugggugaaaacacccuugaagcuggccaauggaaccaaauauagaccuccugcaaaacuauuaaaggaaagggguuucuucggagcuauugcugguuucuuagaaggaggaugggaaggaaugauugcagguuggcacggauacacaucccauggggcacauggaguagcgguggcagcugaccuuaagagcacucaagaggccauaaacaagauaacaaaaaaucucaacucuuugagugagcuggaaguaaagaaucuucaaagacuaagcggugccauggaugaacuccacaacgaaauacuggaacuagaugagaaaguggaugaucucagagcugauacaauaagcucacaaauagaacucgcaguccugcuuuccaaugaaggaauaauaaacagugaagaugaacaucucuuggcgcuugaaagaaagcugaagaaaaugcugggccccucugcuguagagauagggaauggaugcuuugaaaccaaacacaagugcaaccagaccugucucgauagaauagcugcugguaccuuugaugcaggagaauuuucucuccccacuuuugauucacugaauaucacugcugcaucuuuaaaugacgauggauuggauaaucauacuauacugcuuuacuacucaacugcugccuccaguuuggcuguaacacugaugauagcuaucuuuguuguuuauauggucuccagagacaauguuucuugcuccaucugucuauaa

SEQ ID NO: 60449 - RNA, 1758 nt, Artificial Sequence
  derived and/or modified CDS sequence (wt) from hemagglutinin__InfluenzaB__ALA08690
augaaggcaauaauuguacuacucaugguaguaacauccaaugcagaucgaaucugcacugggauaacaucgucaaacucaccacaugucgucaaaacugcuacucaaggggaggucaaugugaccgguguaauaccacugacaacaacacccaccaaaucucauuuugcaaaucucaaaggaacagaaaccagggggaaacuaugcccaaaaugccucaacugcacagaucuggauguagccuugggcagaccaaaaugcacagggaaaauacccucggcaaggguuucaauacuccaugaagucagaccuguuacaucugggugcuuuccuauaaugcacgauagaacaaaaauuagacagcugccuaaccuucuccgaggauacgaacauaucagguuaucaacucacaacguuaucaaugcagaagaugcaccaggaggacccuacaaaauuggaaccucagggucuugcccuaacauuaccaauggaaacggauucuucgcaacaauggcuugggccguccaaaaaaacgacaaaaacaaaacagcaacaaauccauuaacaauagaaguaccauacauuuguacagaaggagaagaccaaauuaccguuuggggguuccacucugacaacgagacccaaauggcaaagcucuauggggacucaaagccccagaaguucaccucaucugccaacggagugaccacacauuacguuucacagauugguggcuucccaaaucaaacagaagacggaggacuaccacaaagugguagaauuguuguugauuacauggugcaaaaaucuggaaaaacaggaacaauuaccuaucaaagagguauuuuauugccucaaaagguguggugcgcaaguggcaggagcaagguaauaaaaggauccuugccuuuaauuggagaagcagauugccuccaugaaaaauacgguggauuaaacaaaagcaagccuuacuacacaggggaacaugcaaaggccauaggaaauugcccaauaugggugaaaacacccuugaagcuggccaauggaaccaaauauagaccuccugcaaaacuguuaaaggaaagggguuucuucggagcuauugcugguuucuuagagggaggaugggaaggaaugauugcagguuggcacggauacacaucccauggggcacauggaguagcgguggcagcugaccuuaagagcacucaagaggccauaaacaagauaacaaaaaaucucaacucuuugagugagcuggaaguaaagaaucuucaaagacuaagcggugccauggaugaacuccacaacgaaauacuagaacuagaugagaaaguggaugaucucagagcugauacaauaagcucacaaauagaacucgcaguccugcuuuccaaugaaggaauaauaaacagugaagaugaacaucucuuggcgcuugaaagaaagcugaagaaaaugcugggccccucugcuguagagauagggaauggaugcuuugaaaccaaacacaagugcaaccagaccugucucgacagaauagcugcugguaccuuugaugcaggagaauuuucucuccccaccuuugauucacugaauauuacugcugcaucuuuaaaugacgauggauuggaugaucauacuauacugcuuuacuacucaacugcugccuccaguuuggcuguaacacugaugauagcuaucuuuguuguuuauauggucuccagagacaauguuucuugcuccaucugucuauaa

SEQ ID NO: 60450 - RNA, 1755 nt, Artificial Sequence
  derived and/or modified CDS sequence (wt) from hemagglutinin__InfluenzaB__ALE31766
augaaggcaauaauuguacuacucaugguaguaacauccaaugcagaucgaaucugcacugggauaacaucuucaaacucaccucauguggucaaaacagcuacucaaggggaggucaaugugacuggcgugauaccacugacaacaacaccaacaaaaucuuauuuugcaaaucucaaaggaacaaggaccagagggaaacuaugcccggacugucucaacuguacagaucuggauguggccuugggcaggccaauguguguggggaccacaccuucugcuaaagcuucaauacuccaugaggucagaccuguuacauccgggugcuuuccuauaaugcacgacagaacaaaaaucaggcaacuacccaaucuucucagaggauaugaaaagaucagguuaucaacccaaaacguuaucgaugcagaaaaagcaccaggaggacccuacagacuuggaaccucaggaucuugcccuaacgcuaccaguaaaaucggauuuuuugcaacaauggcuugggcugucccaaaggacaacuacaaaaaugcaacgaacccacaaacaguggaaguaccauacauuuguacagaaggggaagaccaaauuacuguuuggggguuccauucggauaacaaaacccaaaugaagagccucuauggagacucaaauccucaaaaguucaccucaucugcuaauggaguaaccacacauuauguuucucagauuggcgacuucccagaucaaacagaagacggaggacuaccacaaagcggcagaauuguuguugauuacaugaugcaaaaaccugggaaaacaggaacaauugucuaucaaagggguguuuuguugccucaaaagguguggugcgcgaguggcaggagcaaaguaauaaaagggucauugccuuuaauuggugaagcagauugccuucaugaagaauacgguggauuaaacaaaagcaagccuuacuacacaggaaaacaugcaaaagccauaggaaauugcccaauauggguaaaaacaccuuugaagcuugccaauggaaccaaauauagaccuccugcaaaacuauugaaggaaagggguuucuucggagcuauugcugguuuccuagaaggaggaugggaaggaaugauugcagguuggcacggauacacaucucacggagcacauggaguggcaguggcggcagaccuuaagaguacacaagaagcuauaaauaagauaacaaaaaaucucaauucuuugagugaacuagaaguaaagaaccuucaaagacuaaguggugccauggaugaacuccacaacgaaauacucgagcuggaugaaaaaguggaugaucucagagcugacacuauaagcucacaaauagaacuugcagucuugcuuuccaacgaaggaauaauaaacagugaagacgagcaucuauuggcacuugagagaaaacuaaagaaaaugcugggucccucugcuguagacauaggaaacggauguuucgaaaccaaacacaaaugcaaccagaccugcuuagacaggauagcugcuggcaccuuuaaugcaggagaauuuucucuccccacuuuugauucauugaacauuacugcugcaucuuuaaaugaugauggauuggauaaccauacuauacugcucuauuacucaacugcugcuucuaguuuggcuguaacauuaaugcuagccauuuuuauuguuuauauggucuccagagacaacguuucaugcuccaucugucuauaa

SEQ ID NO: 60451 - RNA, 1758 nt, Artificial Sequence
  derived and/or modified CDS sequence (wt) from hemagglutinin__InfluenzaB__ALE31768
augaaggcaauaauuguacuacucaugguaguaacauccaaugcagaucgaaucugcacugggauaacaucgucaaacucaccacaugucgucaaaacugcuacucaaggggaggucaaugugaccgguguaauaccacugacaacaacacccaccaaaucucauuuugcaaaucucaaaggaacagaaaccagggggaaacuaugcccaaaaugccucaacugcacagaucuggauguagccuugggcagaccaaaaugcacagggaaaauacccucggcaaggguuucaauacuccaugaagucagaccuguuacaucugggugcuuuccuauaaugcacgauagaacaaaaauuagacagcugccuaaccuucuccgaggauacgaacauaucagguuaucaacucacaacguuaucaaugcagaagaugcaccaggaggacccuacaaaauuggaaccucagggucuugcccuaacauuaccaauggaaacggauucuucgcaacaauggcuugggccgucccaaaaaacgacaaaaacaaaacagcaacaaauccauuaacaauagaaguaccauacauuuguacagaaggagaagaccaaauuaccguuuggggguuccacucugacaacgaaacccaaauggcaaagcucuauggggacucaaagccccagaaguucaccucaucugccaacggagugaccacacauuacguuucacagauugguggcuucccaaaucaaacagaagacggaggacuaccacaaagugguagaauuguuguugauuacauggugcaaaaaucuggaaaaacaggaacaauuaccuaucaaagagguauuuuauugccucaaaagguguggugcgcaaguggcaggagcaagguaauaaaaggauccuugccuuuaauuggagaagcagauugccuccaugaaaaauacgguggauuaaacaaaagcaagccuuacuacacaggggaacaugcaaaggccauaggaaauugcccaauaugggugaaaacacccuugaagcuggccaauggaaccaaauauagaccuccugcaaaacuguuaaaggaaagggguuucuucggagcuauugcugguuucuuagagggaggaugggaaggaaugauugcagguuggcacggauacacaucccauggggcacauggaguagcgguggcagcugaccuuaagagcacucaagaggccauaaacaagauaacaaaaaaucucaacucuuugagugaguuggaaguaaagaaucuucaaagacuaagcggugccauggaugaacuccacaacgaaauacuagaacuagaugagaaaguggaugaucucagagcugauacaauaagcucacaaauagaacucgcaguccugcuuuccaaugaaggaauaauaaacagugaagaugaacaucucuuggcgcuugaaagaaagcugaagaaaaugcugggccccucugcuguagagauagggaauggaugcuuugaaaccaaacacaagugcaaccagaccugucucgacagaauagcugcugguaccuuugaugcaggagaauuuucucuccccaccuuugauucacugaauauuacugcugcaucuuuaaaugacgauggauuggauaaucauacuauacugcuuuacuacucaacugcugccuccaguuuggcuguaacacugaugauagcuaucuuuguuguuuauauggucuccagagacaauguuucuugcuccaucugucuauaa

SEQ ID NO: 60452 - RNA, 1758 nt, Artificial Sequence
  derived and/or modified CDS sequence (wt) from hemagglutinin__InfluenzaB__ALE31770
augaaggcaauaauuguacuacucaugguaguaacauccaaugcagaucgaaucugcacugggauaacaucgucaaacucaccacaugucgucaaaacugcuacucaaggggaggucaaugugaccgguguaauaccacugacaacaacacccaccaaaucucauuuugcaaaucuuaaaggaacagaaaccagggggaaacuaugcccaaaaugccucaacugcacagaucuggauguagccuugggcagaccaaaaugcacagggaaaauacccucggcaagaguuucaauacuccaugaagucagaccuguuacaucugggugcuuuccuauaaugcacgauagaacaaaaauuagacagcugccuaaccuucuccgaggauacgaacauaucaguuuaucaacucacaacguuaucaaugcagaagaugcaccaggaggacccuacaaaauuggaaccucagggucuugcccuaacguuaccaauggaaacggauucuucgcaacaauggcuugggccgucccaaaaaacgacaaaaacaaaacagcaacaaauccauuaacaauagaaguaccauacauuuguacagaaggagaagaccaaauuaccguuuggggguuccacucugacaacgagacccaaauggcuaagcucuauggggacucaaagccccagaaguucaccucaucugccaacggagugaccacacauuacguuucacagauugguggcuucccaaaucaaacagaagacggaggacuaccacaaagugguagaauuguuguugauuacauggugcaaaaaucuggaaaaacaggaacaauuaccuaucaaagagguauuuuauugccucaaaagguguggugcgcaaguggcaggagcaagguaauaaaaggauccuugccuuuaauuggagaagcagauugccuccacgaaaaauacgguggauuaaacaaaagcaagccuuacuacacaggggaacaugcaaaggccauaggaaauugcccaauaugggugaaaacacccuugaagcuggccaauggaaccaaauauagaccuccugcaaaacuauuaaaggaaaggggcuucuucggagcuauugcugguuucuuagagggaggaugggaaggaaugauugcagguuggcacggauacacaucccauggggcacauggaguagcgguggcagcugaccuuaagagcacucaagaggccauaaacaagauaacaaaaaaucucaacucuuugagugagcuggaaguaaagaaucuucaaagacuaagcggugccauggaugaacuccacaacgaaauacuagaacuagaugagaaaguggaugaucucagagcugauacaauaagcucacaaauagaacucgcaguccugcuuuccaaugaaggaauaauaaacagugaagaugaacaucucuuggcgcuugaaagaaagcugaagaaaaugcugggccccucugcuguagagauagggaauggaugcuuugaaaccaaacacaagugcaaccagaccugucucgacagaauagcugcugguaccuuugaugcaggagaauuuucucuccccaccuuugauucacugaauauuacugcugcaucuuuaaaugacgauggauuggauaaucauacuauacugcuuuacuacucaacugcugccuccaguuuggcuguaacacugaugauagcuaucuuuguuguuuauauggucuccagagacaauguuucuugcuccaucugucuauaa

SEQ ID NO: 60453 - RNA, 1755 nt, Artificial Sequence
  derived and/or modified CDS sequence (wt) from hemagglutinin__InfluenzaB__ALE31772
augaaggcaauaauuguacuacucaugguaguaacauccaaugcagaucgaaucugcacugggauaacaucuucaaacucaccucauguggucaaaacagcuacucaaggggaggucaaugugacuggcgugauaccacugacaacaacaccaacaaaaucuuauuuugcaaaucucaaaggaacaaggaccagagggaaacuaugcccggacugucucaacuguacagaucuggauguggccuugggcaggccaauguguguggggaccacaccuucugcuaaagcuucaauacuccaugaggucagaccuguuacauccgggugcuuuccuauaaugcacgacagaacaaaaaucaggcaacuacccaaucuucucagaggauaugaaaagaucagguuaucaacccaaaacguuaucgaugcagaaaaagcaccaggaggacccuacagacuuggaaccucaggaucuugcccuaacgcuaccaguaaaaucggauuuuuugcaacaauggcuugggcugucccaaaggacaacuacaaaaaugcaacgaacccacaaacaguggaaguaccauacauuuguacagaaggggaagaccaaauuacuguuuggggguuccauucggauaacaaaacccaaaugaagagccucuauggagacucaaauccucaaaaguucaccucaucugcuaauggaguaaccacacauuauguuucucagauuggcgacuucccagaucaaacagaagacggaggacuaccacaaagcggcagaauuguuguugauuacaugaugcaaaaaccugggaaaacaggaacaauugucuaucaaagggguguuuuguugccucaaaagguguggugcgcgaguggcaggagcaaaguaauaaaagggucauugccuuuaauuggugaagcagauugccuucaugaagaauacgguggauuaaacaaaagcaagccuuacuacacaggaaaacaugcaaaagccauaggaaauugcccaauauggguaaaaacaccuuugaagcuugccaauggaaccaaauauagaccuccugcaaaacuauugaaggaaagggguuucuucggagcuauugcugguuuccuagaaggaggaugggaaggaaugauugcagguuggcacggauacacaucucacggagcacauggaguggcaguggcggcagaccuuaagaguacacaagaagcuauaaauaagauaacaaaaaaucucaauucuuugagugaacuagaaguaaagaaccuucaaagacuaaguggugccauggaugaacuccacaaugaaauacucgagcuggaugaaaaaguggaugaucucagagcugacacuauaagcucacaaauagaacuugcagucuugcuuuccaacgaaggaauaauaaacagugaagacgagcaucuauuggcacuugagagaaaacuaaagaaaaugcugggucccucugcuguagacauaggaaacggaugcuucgaaaccaaacacaaaugcaaccagaccugcuuagacaggauagcugcuggcaccuuuaaugcaggagaauuuucucuccccacuuuugauucauugaacauuacugcugcaucuuuaaaugaugauggauuggauaaccauacuauacugcucuauuacucaacugcugcuucuaguuuggcuguaacauuaaugcuagcuauuuuuauuguuuauauggucuccagagacaacguuucaugcuccaucugucuauaa

SEQ ID NO: 60454 - RNA, 1755 nt, Artificial Sequence
  derived and/or modified CDS sequence (wt) from hemagglutinin__InfluenzaB__ALE31773
augaaggcaauaauuguacuacucaugguaguaacauccaaugcagaucgaaucugcacugggauaacaucuucaaacucaccucauguggucaaaacagcuacucaaggggaggucaaugugacuggcgugauaccacugacaacaacaccaacaaaaucuuauuuugcaaaucucaaaggaacaaggaccagagggaaacuaugcccggauugucucaacuguacagaucuggauguggccuugggcaggccaauguguguggggaccacaccuucugcuaaagcuucaauacuccaugaggucagaccuguuacauccgggugcuuuccuauaaugcacgacagaacaaaaaucaggcaacuacccaaucuucucagaggauaugaaaagaucagguuaucaacccaaaacguuaucgaugcagaaaaagcaccaggaggacccuacagacuuggaaccucaggaucuugcccuaacgcuaccaguaaaaucggauuuuuugcaacaauggcuugggcugucccaaaggacaacuacaaaaaugcaacgaacccacaaacaguggaaguaccauacauuuguacagaaggggaagaccaaauuacuguuuggggguuccauucggauaacaaaacccaaaugaagagccucuauggagacucaaauccucaaaaguucaccucaucugcuaauggaguaaccacacauuauguuucucagauuggcgacuucccagaucaaacagaagacggaggacuaccacaaagcggcagaauuguuguugauuacaugaugcaaaaaccugggaaaacaggaacaauugucuaucaaagggguguuuuguugccucaaaagguguggugcgcgaguggcaggagcaaagugauaaaagggucauugccuuuaauuggugaagcagauugccuucaugaagaauacgguggauuaaacaaaagcaagccuuacuacacaggaaaacaugcaaaagccauaggaaauugcccaauauggguaaaaacaccuuugaagcuugccaauggaaccaaauauagaccuccugcaaaacuauugaaggaaagggguuucuucggagcuauugcugguuuccuagaaggaggaugggaaggaaugauugcagguuggcacggauacacaucucacggagcacauggaguggcaguggcggcagaccuuaagaguacacaagaagcuauaaauaagauaacaaaaaaucucaauucuuugagugaacuagaaguaaagaaccuucaaagacuaaguggugccauggaugaacuccacaacgaaauacucgagcuggaugaaaaaguggaugaucucagagcugacacuauaagcucacaaauagaacuugcagucuugcuuuccaacgaaggaauaauaaacagugaagacgagcaucuauuggcacuugagagaaaacuaaagaaaaugcugggucccucugcuguagacauaggaaacggaugcuucgaaaccaaacacaaaugcaaccagaccugcuuagacaggauagcugcuggcaccuuuaaugcaggagaauuuucucuccccacuuuugauucauugaacauuacugcugcaucuuuaaaugaugauggauuggauaaccauacuauacugcucuauuacucaacugcugcuucuaguuuggcuguaacauuaaugcuagcuauuuuuauuguuuacauggucuccagagacaacguuucaugcuccaucugucuauaa

SEQ ID NO: 60455 - RNA, 1755 nt, Artificial Sequence
  derived and/or modified CDS sequence (wt) from hemagglutinin__InfluenzaB__ALE31884
augaaggcaauaauuguacuacucaugguaguaacauccaaugcagaucgaaucugcacugggauaacaucuucaaacucaccucauguggucaaaacagcuacucaaggggaggucaaugugacuggcgugauaccacugacaacaacaccaacaaaaucuuauuuugcaaaucucaaaggaacaaggaccagagggaaacuaugcccggacugucucaacuguacagaucuggauguggccuugggcaggccaauguguguggggaccacaccuucugcuaaagcuucaauacuccaugaggucagaccuguuacauccgggugcuuuccuauaaugcacgacagaacaaaaaucaggcaacuacccaaucuucucagaggauaugaaaagaucagguuaucaacccaaaacguuaucgaugcagaaaaagcaccaggaggacccuacagacuuggaaccucaggaucuugcccuaacgcuaccaguaaaaucggauuuuuugcaacaauggcuugggcugucccaaaggacaacuacaaaaaugcaacgaacccacaaacaguggaaguaccauacauuuguacagaaggggaagaccaaauuacuguuuggggguuccauucggauaacaaaacccaaaugaagagccucuauggagacucaaauccucaaaaguucaccucaucugcuaauggaguaaccacacauuauguuucucagauuggcgacuucccagaucaaacagaagacggaggacuaccacaaagcggcagaauuguuguugauuacaugaugcaaaaaccugggaaaacaggaacaauugucuaucaaagggguguuuuguugccucaaaagguguggugcgcgaguggcaggagcaaaguaauaaaagggucauugccuuuaauuggugaagcagauugccuucaugaagaauacgguggauuaaacaaaagcaagccuuacuacacaggaaaacaugcaaaagccauaggaaauugcccaauauggguaaaaacaccuuugaagcuugccaauggaaccaaauauagaccuccugcaaaacuauugaaggaaagggguuucuucggagcuauugcugguuuccuagaaggaggaugggaaggaaugauugcagguuggcacggauacacaucucacggagcacauggaguggcaguggcggcagaccuuaagaguacacaagaagcuauaaauaagauaacaaaaaaucucaauucuuugagugaacuagaaguaaagaaccuucaaagacuaaguggugccauggaugaacuccacaacgaaauacucgagcuggaugaaaaaguggaugaucucagagcugacacuauaagcucacaaauagaacuugcagucuugcuuuccaacgaaggaauaauaaacagugaagacgagcaucuauuggcacuugagagaaaacuaaagaaaaugcugggucccucugcuguagacauaggaaacggaugcuucgaaaccaaacacaaaugcaaccagaccugcuuagacaggauagcugcuggcaccuuuaaugcaggagaauuuucucuccccacuuuugauucauugaacauuacugcugcaucuuuaaaugaugauggauuggauaaccauacuauacugcucuauuacucaacugcugcuucuaguuuggcuguaacauuaaugcuagccauuuuuauuguuuauauggucuccagagacaacguuucaugcuccgucugucuauaa

SEQ ID NO: 60456 - RNA, 1755 nt, Artificial Sequence
  derived and/or modified CDS sequence (wt) from hemagglutinin__InfluenzaB__ALE31885
augaaggcaauaauuguacuacucaugguaguaacauccaaugcagaucgaaucugcacugggauaacaucuucaaacucaccucauguggucaaaacagcuacucaaggggaggucaaugugacuggcgugauaccacugacaacaacaccaacaaaaucuuauuuugcaaaucucaaaggaacaaggaccagagggaaacuaugcccggacugucucaacuguacagaucuagauguggccuugggcaggccaauguguguggggaccacaccuucugcuaaagcuucaauacuccaugaggucagaccuguuacauccgggugcuuuccuauaaugcacgacagaacaaaaaucaggcaacuacccaaucuucucagaggauaugaaaagaucagguuaucaacccaaaacguuaucgaugcagaaaaagcaccaggaggacccuacagacuuggaaccucaggaucuugcccuaacgcuaccaguaaaaucggauuuuuugcaacaauggcuugggcugucccaaaggacaacuacaaaaaugcaacgaacccacaaacaguggaaguaccauacauuuguacagaaggggaagaccaaauuacuguuuggggguuccauucggauaacaaaacccaaaugaagagccucuauggagacucaaauccucaaaaguucaccucaucugcuaauggagugaccacacauuauguuucucagauuggcgacuucccagaucaaacagaagacggaggacuaccacaaagcggcagaauuguuguugauuacaugaugcaaaaaccugggaaaacaggaacaauugucuaucaaagggguguuuuguugccucaaaagguguggugcgcgaguggcaggagcaaaguaauaaaagggucauugccuuuaauuggugaagcagauugccuucaugaagaauacgguggauuaaacaaaagcaagccuuacuacacaggaaaacaugcaaaagccauaggaaauugcccaauauggguaaaaacaccuuugaagcuugccaauggaaccaaauauagaccuccugcaaaacuauugaaggaaagggguuucuucggagcuauugcugguuuccuagaaggaggaugggaaggaaugauugcagguuggcacggauacacaucccacggagcacauggaguggcaguggcggcagaccuuaagaguacacaagaagcuauaaauaagauaacaaaaaaucucaauucuuugagugaacuagaaguaaagaaccuucaaagacuaaguggugccauggaugaacuccacaacgaaauacucgagcuggaugaaaaaguggaugaucucagagcugacacuauaagcucacaaauagaacuugcagucuugcuuuccaacgaaggaauaauaaacagugaagacgagcaucuauuggcacuugagagaaaacuaaagaaaaugcugggucccucugcuguagacauaggaaacggaugcuucgaaaccaaacacaaaugcaaccagaccugcuuagacaggauagcugcuggcaccuuuaaugcaggagaauuuucucuccccacuuuugauucauugaacauuacugcugcaucuuuaaaugaugauggauuggauaaccauacuauacugcucuauuacucaacugcugcuucuaguuuggcuguaacauuaaugcuagcuauuuuuguuguuuauauggucuccagagacaacguuucaugcuccaucugucuauaa

SEQ ID NO: 60457 - RNA, 1755 nt, Artificial Sequence
  derived and/or modified CDS sequence (wt) from hemagglutinin__InfluenzaB__ALE31886
augaaggcaauaauuguacuacucaugguaguaacauccaaugcagaucgaaucugcacugggauaacaucuucaaacucaccucauguggucaaaacagcuacucaaggggaggucaaugugacuggcgugauaccacugacaacaacaccaacaaaaucuuauuuugcaaaucucaaaggaacaaggaccagagggaaacuaugcccggacugucucaacuguacagaucuggauguggccuugggcaggccaauguguguggggaccacaccuucugcuaaagcuucaauacuccaugaggucagaccuguuacauccgggugcuuuccuauaaugcacgacagaacaaaaaucaggcaacuacccaaucuucucagaggauaugaaaagaucagguuaucaacccaaaacguuaucgaugcagaaaaagcaccaggaggacccuacagacuuggaaccucaggaucuugcccuaacgcuaccaguaaaaucggauuuuuugcaacaauggcuugggcugucccaaaggacaacuacaaaaaugcaacgaacccacaaacaguggaaguaccauacauuuguacagaaggggaagaccaaauuacuguuuggggguuccauucggauaacaaaacccaaaugaagagccucuauggagacucaaauccucaaaaguucaccucaucugcuaauggaguaaccacacauuauguuucucagauuggcgacuucccagaucaaacagaagacggaggacuaccacaaagcggcagaauuguuguugauuacaugaugcaaaaaccugggaaaacaggaacaauugucuaucaaagggguguuuuguugccucaaaagguguggugcgcgaguggcaggagcaaaguaauaaaagggucauugccuuuaauuggugaagcagauugccuucaugaagaauacgguggauuaaacaaaagcaagccuuacuacacaggaaaacaugcaaaagccauaggaaauugcccaauauggguaaaaacaccuuugaagcuugccaauggaaccaaauauagaccuccugcaaaacuauugaaggaaagggguuucuucggagcuauugcugguuuccuagaaggaggaugggaaggaaugauugcagguuggcacggauacacaucucacggagcacauggaguggcaguggcggcagaccuuaagaguacacaagaagcuauaaauaagauaacaaaaaaucucaauucuuugagugaacuagaaguaaagaaccuucaaagacuaaguggugccauggaugaacuccacaacgaaauacucgagcuggaugaaaaaguggaugaucucagagcugacacuauaagcucacaaauagaacuugcagucuugcuuuccaacgaaggaauaauaaacagugaagacgagcaucuauuggcacuugagagaaaacuaaagaaaaugcugggucccucugcuguagacauaggaaacggaugcuucgaaaccaaacacaaaugcaaccagaccugcuuagacaggauagcugcuggcaccuuuaaugcaggagaauuuucucuccccacuuuugauucauugaacauuacugcugcaucuuuaaaugaugauggauuggauaaccauacuauauugcucuauuacucaacugcugcuucuaguuuggcuguaacauuaaugcuagcuauuuuuauuguuuauauggucuccagagacaacguuucaugcuccaucugucuauaa

SEQ ID NO: 60458 - RNA, 1755 nt, Artificial Sequence
  derived and/or modified CDS sequence (wt) from hemagglutinin__InfluenzaB__ALE31887
augaaggcaauaauuguacuacucaugguaguaacauccaaugcagaucgaaucugcacugggauaacaucuucaaacucaccucauguggucaaaacagcuacucaaggggagaucaaugugacuggcgugauaccacugacaacaacaccaacaaaaucuuauuuugcaaaucucaaaggaacaaggaccagagggaaacuaugcccggacugucucaacuguacagaucuggauguggccuugggcaggccgauguguguggggaccacaccuucugcuaaagcuucaauacuccaugaggucagaccuguuacauccgggugcuuuccuauaaugcacgacagaacaaaaaucaggcaacuacccaaucuucucagaggauaugaaaagaucagguuaucaacccaaaacguuaucgaugcagaaaaagcaccaggaggacccuacagacuuggaaccucaggaucuugcccuaacgcuaccaguaaaaucggauuuuuugcaacaauggcuugggcugucccaaaggacaacuacaaaaaugcaacgaacccacaaacaguggaaguaccauacauuuguacagaaggggaagaccaaauuacuguuuggggguuccauucggauaacaaaacccaaaugaagagccucuauggagacucaaauccucaaaaguucaccucaucugcuaauggaguaaccacacauuauguuucucagauuggcgacuucccagaucaaacagaagacggaggacuaccacaaagcggcagaauuguuguugauuacaugaugcaaaaaccugggaaaacaggaacaauugucuaucaaagggguguuuuguugccucaaaagguguggugcgcgaguggcaggagcaaaguaauaaaagggucauugccuuuaauuggugaagcagauugccuucaugaagaauacgguggauuaaacaaaagcaagccuuacuacacaggaaaacaugcaaaagccauaggaaauugcccaauauggguaaaaacaccuuugaagcuugccaauggaaccaaauauagaccuccugcaaaacuauugaaggaaagggguuucuucggagcuauugcugguuuccuagaaggaggaugggaaggaaugauugcagguuggcacggauacacaucucacggagcacauggaguggcaguggcggcagaccuuaagaguacacaagaagcuauaaauaagauaacaaaaaaucucaauucuuugagugaacuagaaguaaagaaccuucaaagacuaaguggugccauggaugaacuccacaacgaaauacucgagcuggaugaaaaaguggaugaucucagagcugacacuauaagcucacaaauagaacuugcagucuugcuuuccaacgaaggaauaauaaacagugaagacgagcaucuauuggcacuugagagaaaacuaaagaaaaugcugggucccucugcuguagacauaggaaacggaugcuucgaaaccaaacacaaaugcaaccagaccugcuuagacaggauagcugcuggcaccuuuaaugcaggagaauuuucucuccccacuuuugauucauugaacauuacugcugcaucuuuaaaugaugauggauuggauaaccauacuauauugcucuauuacucaacugcugcuucuaguuuggcuguaacauuaaugcuagcuauuuuuaucguuuauauggucuccagagacaacguuucaugcuccaucugucuauaa

SEQ ID NO: 60459 - RNA, 1755 nt, Artificial Sequence; identical to SEQ ID NO: 60450
  derived and/or modified CDS sequence (wt) from hemagglutinin__InfluenzaB__ALE31982

SEQ ID NO: 60460 - RNA, 1755 nt, Artificial Sequence
  derived and/or modified CDS sequence (wt) from hemagglutinin__InfluenzaB__ALE31983
augaaggcaauaauuguacuacucaugguaguaacauccaaugcagaucgaaucugcacugggauaacaucuucaaacucaccucauguggucaaaacagcuacucaaggggaggucaaugugacuggcgugauaccacugacaacaacaccaacaaaaucuuauuuugcaaaucucaaaggaacaaggaccagagggaaacuaugcccggacugucucaacuguacagaucuggauguggccuugggcaggccaauguguguggggaccacaccuucugcuaaagcuucaauacuccaugaggucagaccuguuacauccgggugcuuuccuauaaugcacgacagaacaaaaaucaggcaacuacccaaucuucucagaggauaugaaaagaucagguuaucaacccaaaacguuaucgaugcagaaaaagcaccaggaggacccuacagacuuggaaccucaggaucuugcccuaacgcuaccaguaaaaucggauuuuuugcaacaauggcuugggcugucccaaaggacaacuacaaaaaugcaacgaacccacaaacaguggaaguaccauacauuuguacagaaggggaagaccaaauuacuguuuggggguuccauucggauaacaaaacccaaaugaagagccucuauggagacucaaauccucaaaaguucaccucaucugcuaauggaguaaccacacauuauguuucucagauuggcgacuucccagaucaaacagaagacggaggacuaccacaaagcggcagaauuguuguugauuacaugaugcaaaaaccugggaaaacaggaacaauugucuaucaaagggguguuuuguugccucaaaagguguggugcgcgaguggcaggagcaaaguaauaaaagggucauugccuuugauuggugaagcagauugccuucaugaagaauacgguggauuaaacaaaagcaagccuuacuacacaggaaaacaugcaaaagccauaggaaauugcccaauauggguaaaaacaccuuugaagcuugccaauggaaccaaauauagaccuccugcaaaacuauugaaggaaagggguuucuucggagcuauugcugguuuccuagaaggaggaugggaaggaaugauugcagguuggcacggauacacaucucacggagcacauggaguggcaguggcggcagaccuuaagaguacacaagaagcuauaaauaagauaacaaaaaaucucaauucuuugagugaacuagaaguaaagaaccuucaaagacuaaguggugccauggaugaacuccacaacgaaauacucgagcuggaugaaaaaguggaugaucucagagcugacacuauaagcucacaaauagaacuugcagucuugcuuuccaacgaaggaauaauaaacagugaagacgagcaucuauuggcacuugagagaaaacuaaagaaaaugcugggucccucugcuguagacauaggaaacggaugcuucgaaaccaaacacaaaugcaaccagaccugccuagacaggauagcugcuggcaccuuuaaugcaggagaauuuucucuccccacuuuugauucauugaacauuacugcugcaucuuuaaaugaugauggauuggauaaccauacuauacugcucuauuacucaacugcugcuucuaguuuggcuguaacauuaaugcuagcccuuuuuauuguuuauauggucuccagagacaacguuucaugcuccaucugucuauaa

SEQ ID NO: 60461 - RNA, 1755 nt, Artificial Sequence
  derived and/or modified CDS sequence (wt) from hemagglutinin__InfluenzaB__ALE31984
augaaggcaauaauuguacuacucaugguaguaacauccaaugcagaucgaaucugcacugggauaacaucuucaaacucaccucauguggucaaaacagcuacucaaggggaggucaaugugacuggcgugauaccacugacaacaacaccaacaaaaucuuauuuugcaaaucucaaaggaacaaggaccagagggaaacuaugcccggacugucucaacuguacagaucuggauguggccuugggcaggccaauguguguggggaccacaccuucugcuaaagcuucaauacuccaugaggucagaccuguuacauccgggugcuuuccuauaaugcacgacagaacaaagaucaggcaacuacccaaucuucucagaggauaugaaaagaucagguuaucaacccaaaacguuaucgaugcagaaaaagcaccaggaggacccuacagacuuggaaccucaggaucuugcccuaacgcuaccaguaaaaucggauuuuuugcaacaauggcuugggcugucccaaaggacaacuacaaaaaugcaacgaacccacaaacaguggaaguaccauacauuuguacagaagaggaagaccaaauuacuguuuggggguuccauucggauaacaaaacccaaaugaagagccucuauggagacucaaauccucaaaaguucaccucaucugcuaauggaguaaccacacauuauguuucucagauuggcgacuucccagaucaaacagaagacggaggacuaccacaaagcggcagaauuguuguugauuacauggugcaaaaaccugggaaaacaggaacaauugucuaucaaagggguguuuuguugccucaaaagguguggugcgcgaguggcaggagcaaaguaauaaaagggucauugccuuuaauuggugaagcagauugccuucaugaagaauacgguggauuaaacaaaagcaagccuuacuacacaggaaaacaugcaaaagccauaggaaauugcccaauauggguaaaaacaccuuugaagcuugccaauggaaccaaauauagaccuccugcaaaacuauugaaggaaagggguuucuucggagcuauugcugguuuccuagaaggaggaugggaaggaaugauugcagguuggcacggauacacaucucacggagcacauggaguggcaguggcggcagaccuuaagaguacacaagaagcuauaaauaagauaacaaaaaaucucaauucuuugagugaacuagaaguaaagaaccuucaaagacuaaguggugccauggaugaacuccacaacgaaauacucgagcuggaugaaaaaguggaugaucucagagcugacacuauaagcucacaaauagaacuugcagucuugcuuuccaacgaaggaauaauaaacagugaagaugagcaucuauuggcacuugagagaaaacuaaagaaaaugcugggucccucugcuguagacauaggaaacggaugcuucgaaaccaaacacaaaugcaaccagaccugcuuagacaggauagcugcuggcaccuuuaaugcaggagaauuuucucuccccacuuuugauucauugaacauuacugcugcaucuuuaaaugaugauggauuggauaaccauacuauacugcucuauuacucaacugcugcuucuaguuuggcuguaacauuaaugcuagcuauuuuuauuguuuauauggucuccagagacaacguuucaugcuccaucugucuauaa

SEQ ID NO: 60462 - RNA, 1755 nt, Artificial Sequence
  derived and/or modified CDS sequence (wt) from hemagglutinin__InfluenzaB__ALE31985
augaaggcaauaauuguacuacucaugguaguaacauccaaugcagaucgaaucugcacugggauaacaucuucaaacucaccucauguggucaaaacagcuacucaaggggaggucaaugugacuggcguaauaccacugacaacaacaccaacaaaaucuuauuuugcaaaucucaaaggaacaaggaccagagggaaacuaugcccggacugucucaacuguacagaucuggauguggccuugggcaggccaauguguguggggaccacaccuucugcuaaagcuucaauacuccaugaggucagaccuguuacauccggguguuuuccuauaaugcacgacagaacaaaaaucaggcaacuacccaaucuucucagaggauaugaaaagaucagguuaucaacccaaaacguuaucgaugcagaaaaagcaccaggaggacccuacagacuuggaaccucaggaucuugcccuaacgcuaccagcaaaaucggauuuuuugcaacaauggcuugggcugucccaaaggacaacuacaaaaaugcaacgaacccacaaacaguggaaguaccauacauuuguacagaaggggaagaccaaauuacuguuuggggguuccauucggauaacaaaacccaaaugaagagccucuauggagacucaaauccucaaaaguucaccucaucugcuaauggaguaaccacacauuauguuucucaaauuggcgacuucccagaucaaacagaagacggaggacuaccacaaagcggcagaauuguuguugauuacaugaugcaaaaaccugggaaaacaggaacaauugucuaucaaagggguguuuuguugccucaaaagguguggugcgcgaguggcaggagcaaaguaauaaaagggucauugccuuuaauuggugaagcagauugccuucaugaagaauacgguggauuaaauaaaagcaagccuuacuacacaggaaaacaugcaaaagccauagggaauugcccaauauggguaaaaacaccuuugaagcuugccaauggaaccaaauauagaccuccugcaaaacuauugaaggaaagggguuucuucggagcuauugcugguuuccuagaaggaggaugggaaggaaugauugcagguuggcacggauacacaucucacggagcacauggaguggcaguggcggcagaccuuaagaguacacaagaagcuauaaauaagauaacaaaaaaucucaauucuuugagugaacuagaaguaaagaaccuucaaagacuaaguggugccauggaugaacuccacaacgaaauacucgagcuggaugaaaaaguggaugaucucagagcugacacuauaagcucacaaauagaacuugcagucuugcuuuccaacgaaggaauaauaaacagugaagacgagcaucuauuggcacuugagagaaaacuaaagaaaaugcugggucccucugcuguagacauaggaaacggaugcuucgaaaccaaacacaaaugcaaccagaccugcuuagacaggauagcugcuggcaccuuuaaugcaggagaauuuucucuccccacuuuugauucauugaacauuacugcugcaucuuugaaugaugauggauuggauaaccauacuauacugcucuauuacucaacugcugcuucuaguuuggcuguaacauuaaugcuagcuauuuuuauuguuuauauggucuccagagacaacguuucaugcuccaucugucuauaa

SEQ ID NO: 60463 - RNA, 1758 nt, Artificial Sequence
  derived and/or modified CDS sequence (wt) from hemagglutinin__InfluenzaB__ALE31986
augaaggcaauaauuguacuacucaugguaguaacauccaaugcagaucgaaucugcacugggauaacaucgucaaacucaccacaugucgucaaaacugcuacucaaggggaggucaaugugaccgguguaauaccacugacaacaacacccaccaaaucucauuuugcaaaucucaaaggaacagaaaccagggggaaacuaugcccaaaaugccucaacugcacagaucuggauguagccuugggcagaccaaaaugcacagggaaaauacccucggcaaggguuucaauacuccaugaagucagaccuguuacaucugggugcuuuccuauaaugcacgauagaacaaaaauuagacagcugccuaaccuucuccgaggauacgaacauaucagguuaucaacucacaacguuaucaaugcagaagaugcaccaggaggacccuacaaaauuggaaccucagggucuugcccuaacauuaccaauggaaacggauucuucgcaacaauggcuugggccgucccaaaaaacgacaaaaacaaaacagcaacaaauccauuaacaauagaaguaccauacauuuguacagaaggagaagaccaaauuaccguuuggggguuccacucugacaacgagacccaaauggcaaagcucuauggggacucaaagccccagaaguucaccucaucugccaacggagugaccacacauuacguuucacagauugguggcuucccaaaucaaacagaagacggaggacuaccacaaagugguagaauuguuauugauuacauggugcaaaaaucuggaaaaacaggaacaauuaccuaucaaagagguauucuauugccucaaaagguguggugcgcaaguggcaggagcaagguaauaaaaggauccuugccuuuaauuggagaagcagauugccuccaugaaaaauacgguggauuaaacaaaagcaagccguacuacacaggggaacaugcaaaggccguaggaaauugcccaauaugggugaaaacaccuuugaagcuggccaauggaaccaaauauagaccuccugcaaaacuauuaaaggaaagggguuucuucggagcuauugcugguuucuuagagggaggaugggaaggaaugauugcagguuggcacggauacacaucccauggggcacauggaguagcgguggcagcugaccuuaagagcacucaagaggccauaaacaagauaacaaaaaaucucaacucuuugagugagcuggaaguaaagaaucuucaaagacuaagcggugccauggaugaacuccacaacgaaauacuagaacuagaugagaaaguggaugaucucagagcugauacaauaagcucacaaauagaacucgcaguccugcuuuccaaugaaggaauaauaaacagugaagaugaacaucucuuggcgcuugaaagaaagcugaagaaaaugcugggccccucugcuguagagauagggaauggaugcuuugaaaccaaacacaagugcaaccagaccugucucgacagaauagcugcugguaccuuugaugcaggagaauuuucucuccccaccuuugauucacugaauauuacugcugcaucuuuaaaugacgauggauuggauaaucauacuauacugcuuuacuacucaacugcugccuccaguuuggcuguaacacugaugauagcuaucuuuguuguuuauauggucuccagagacaauguuucuugcuccaucugucuauaa

SEQ ID NO: 60464 - RNA, 1755 nt, Artificial Sequence
  derived and/or modified CDS sequence (wt) from hemagglutinin__InfluenzaB__ALE31988
augaaggcaauaauuguacuacucaugguaguaacauccaaugcagaucgaaucugcacugggauaacaucuucaaacucaccucauguggucaaaacagcuacucaaggggaggucaaugugacuggcgugauaccacugacaacaacaccaacgaaaucuuauuuugcaaaucucaaaggaacaaggaccagagggaaacuaugcccggacugucucaacuguacagaucuggauguggccuugggcaggccaauguguguggggaccacaccuucugcuaaagcuucaauacuccaugaggucagaccuguuacauccgggugcuuuccuauaaugcacgacagaacaaaaaucaggcaacuacccaaucuucucagaggauaugaaaagaucagguuaucaacccaaaacguuaucgaugcagaaaaagcaccaggaggacccuacagacuuggaaccucaggaucuugcccuaacgcuaccaguaaaaucggauuuuuugcaacaauggcuugggcugucccaaaggacaacuacaaaaaugcaacgaacccacaaacaguggaaguaccauacauuuguacagaaggggaagaccaaauuacuguuuggggguuccauucggauaacaaaacccaaaugaagagccucuauggagacucaaauccucaaaaguucaccucaucugcuaauggaguaaccacacauuauguuucucagauuggcgacuucccagaucaaacagaagacggaggacuaccacaaagcggcagaauuguuguugauuacauggugcaaaaaccugggaaaacaggaacaauugucuaucaaagggguguuuuguugccucaaaagguguggugcgcgaguggcaggagcaaaguaauaaaagggucauugccuuuaauuggugaagcagauugccuucaugaagaauacgguggauuaaacaaaagcaagccuuacuacacaggaaaacaugcaaaagccauaggaaauugcccaauauggguaaaaacaccuuugaagcuugccaauggaaccaaauauagaccuccugcaaaacuauugaaggaaagggguuucuucggagcuauugcugguuuccuagaaggaggaugggaaggaaugauugcagguuggcacggauacacaucucacggagcacauggaguggcaguggcggcagaccuuaagaguacacaagaagcuauaaauaagauaacaaaaaaucucaauucuuugagugaacuagaaguaaagaaccuucaaagacuaaguggugccauggaugaacuccacaacgaaauacucgagcuggaugaaaaaguggaugaucucagagcugacacuauaagcucacaaauagaacuugcagucuugcuuuccaacgaaggaauaauaaacagugaagacgagcaucuauuggcacuugagagaaaacuaaagaaaaugcugggucccucugcuguagacauaggaaacggaugcuucgaaaccaaacacaaaugcaaccagaccugcuuagacaggauagcugcuggcaccuuuaaugcaggagaauuuucucuccccacuuuugauucauugaacauuacugcugcaucuuuaaaugaugauggauuggauaaccauacuauacugcucuauuacucaacugcugcuucuaguuuggcuguaacauuaaugcuagcuauuuuuauuguuuauauggucuccagagacaacguuucaugcuccaucugucuauaa

SEQ ID NO: 60465 - RNA, 1758 nt, Artificial Sequence; identical to SEQ ID NO: 60463
  derived and/or modified CDS sequence (wt) from hemagglutinin__InfluenzaB__ALE31989

SEQ ID NO: 60466 - RNA, 1758 nt, Artificial Sequence; identical to SEQ ID NO: 60463
  derived and/or modified CDS sequence (wt) from hemagglutinin__InfluenzaB__ALE31990

SEQ ID NO: 60467 - RNA, 1755 nt, Artificial Sequence
  derived and/or modified CDS sequence (wt) from hemagglutinin__InfluenzaB__ALE31991
augaaggcaauaauuguacuacucaugguaguaacauccaaugcagaucgaaucugcacugggauaacaucuucaaacucaccucauguggucaaaacagcuacucaaggggaggucaaugugacuggcgugauaccacugacaacaacaccaacaaaaucuuauuuugcaaaucucaaaggaacaaggaccagagggaaacuaugcccggacugucucaacuguacagaucuggauguggccuugggcaggccaauguguguggggaccacaccuucugcuaaagcuucaauacuccaugaggucagaccuguuacauccgggugcuuuccuauaaugcacgacagaacaaaaaucaggcaacuacccaaucuucucagaggauaugaaaagaucagguuaucaacccaaaacguuaucgaugcagaaaaagcaccaggaggacccuacagacuuggaaccucaggaucuugcccuaacgcuaccaguaaaaucggauuuuuugcaacaauggcuugggcugucccaaaggacaacuacaaaaaugcaacgaacccacaaacaguggaaguaccauacauuuguacagaaggggaagaccaaauuacuguuuggggguuccauucggauaacaaaacccaaaugaagagccucuauggagacucaaauccucaaaaguucaccucaucugcuaauggaguaaccacacauuauguuucucagauuggcgacuucccagaucaaacagaagacggaggacuaccacaaagcggcagaauuguuguugauuacaugaugcaaaaaccugggaaaacaggaacaauugucuaucaaagggguguuuuguugccucaaaagguguggugcgcgaguggcaggagcaaaguaauaaaagggucauugccuuuaauuggugaagcagauugccuucaugaagaauacgguggauuaaacaaaagcaagccuuacuacacaggaaaacaugcaaaagccauaggaaauugcccaauauggguaaaaacaccuuugaagcuugccaauggaaccaaauauagaccuccugcaaaauuauugaaggaaagggguuuuuucggagcuauugcugguuuccuagaaggaggaugggaaggaaugauugcagguuggcacggauacacaucucacggagcacauggaguggcaguggcggcagaccuuaagaguacacaagaagcuauaaauaagauaacaaaaaaucucaauucuuugagugaacuagaaguaaagaaccuucaaagacuaaguggugccauggaugaacuccacaacgaaauacucgagcuggaugaaaaaguggaugaucucagagcugacacuauaagcucacaaauagaacuugcagucuugcuuuccaacgaaggaauaauaaacagcgaagacgagcaucuauuggcacuugagagaaaacuaaagaaaaugcugggucccucugcuguagacauaggaaacggaugcuuugaaaccaaacacaaaugcaaccagaccugcuuagacaggauagcugcuggcaccuuuaaugcaggagaauuuucucuccccacuuuugauucauugaacauuacugcugcaucuuuaaaugaugauggauuggauaaccauacuauacugcucuauuacucaacugcugcuucuaguuuggcuguaacauuaaugcuagcuauuuuuauuguuuauauggucuccagagacaacguuucaugcuccaucugucuauaa

SEQ ID NO: 60468 - RNA, 1758 nt, Artificial Sequence
  derived and/or modified CDS sequence (wt) from hemagglutinin__InfluenzaB__ALE31992
augaaggcaauaauuguacuacucaugguaguaacauccaaugcagaucgaaucugcacugggauaacaucgucaaacucaccacaugucgucaaaacugcuacucaaggggaggucaaugugaccgguguaauaccacugacaacaacacccaccaaaucucauuuugcaaaucucaaaggaacagaaaccagggggaaacuaugcccaaaaugccucaacugcacagaucuggauguagccuugggcagaccaaaaugcacagggaaaauacccucugcaaggguuucaauacuccaugaagucagaccuguuacaucugggugcuuuccuauaaugcacgauagaacaaaaauuagacagcugccuaaccuucuccgaggauacgaacaugucagguuaucaacucacaacguuaucaaugcagaagaugcaccaggaggacccuacaaaauuggaaccucagggucuugcccuaacauuaccaauggaaacggauucuucgcaacaauggcuugggccgucccaaaaaacgacaaaaacaaaacagcaacaaauccauuaacaauagaaguaccauacauuuguacagaaagagaagaccaaauuaccguuuggggguuccacucugacaacgagacccaaauggcaaagcucuauggggacucaaagccccagaaguucaccucaucugccaacggagugaccacacauuacguuucacagauugguggcuucccaaaucaaacagaagacggaggacuaccacaaagugguagaauuguuguugauuacauggugcaaaaaucuggaaaaacaggaacaauuaccuaucaaagagguauuuuauugccucaaaagguguggugcgcaaguggcaggagcaagguaauaaaaggauccuugccuuuaauuggagaagcagauugccuccaugaaaaauacgguggauuaaacaaaagcaagccuuacuacacaggggaacaugcaaaggccauaggaaauugcccaauaugggugaaaacacccuugaagcuggccaauggaaccaaauauagaccuccugcaaaacuauuaaaggaaagggguuucuucggagcuauugcugguuucuuagagggaggaugggaaggaaugauugcagguuggcacggauacacaucccauggggcacauggaguagcgguggcagcugaccuuaagagcacucaagaggccauaaacaagauaacaaaaaaucucaacucuuugagugagcuggaaguaaagaaucuucaaagacuaagcggugccauggaugaacuccacaacgaaauacuagaacuagaugagaaaguggaugaucucagagcugauacaauaagcucacaaauagaacucgcaguccugcuuuccaaugaaggaauaauaaacagugaagaugaacaucucuuggcgcuugaaagaaagcugaagaaaaugcugggccccucugcuguagagauagggaauggaugcuuugaaaccaaacacaagugcaaccagaccugucucgacagaauagcugcugguaccuuugaugcaggagaauuuucucuccccaccuuugauucacugaauauuacugcugcaucuuuaaaugacgauggauuggauaaucauacuauacugcuuuacuacucaacugcugccuccaguuuggcuguaacacugaugauagcuaucuuuguuguuuauauggucuccagagacaauguuucuugcuccauuugucuauaa

SEQ ID NO: 60469 - RNA, 1758 nt, Artificial Sequence
  derived and/or modified CDS sequence (wt) from hemagglutinin__InfluenzaB__ALE31993
augaaggcaauaauuguacuacucaugguaguaacauccaaugcagaucgaaucugcacugggauaacaucgucaaacucaccacaugucgucaaaacugcuacucaaggggaggucaaugugaccgguguaauaccacugacaacaacacccaccaaaucucauuuugcaaaucucaaaggaacagaaaccagggggaaacuaugcccaaaaugccucaacugcacagaucuggacguagccuugggcagaccaaaaugcacggggaaaauacccucggcaagaguuucaauacuccaugaagucagaccuguuacaucugggugcuuuccuauaaugcacgauaggacaaaaauuagacagcugccuaaccuucuccgaggauacgaacauaucagguuaucaacucacaacguuaucaaugcagaaaaugcaccaggaggacccuacaaaauuggaaccucagggucuugcccuaacguuaccaauggaaacggauucuucgcaacaauggcuugggccgucccaaaaaacgacaaaaacaaaacagcaacaaauccauugacaauagaaguaccauacauuuguacagaaggagaagaccaaauuaccguuuggggguuccacucugacaacgagacccaaauggcaaagcucuauggggacucaaauccccagaaguucaccucaucugccaacggagugaccacacauuacguuucacagauugguggcuucccaaaucaaacagaggacggaggacuaccacaaagugguagaauuguuguugauuacauggugcaaaaaucugggaaaacaggaacaauuaccuaucaaagagguauuuuauugccucaaaagguguggugcgcaaguggcaggagcaagguaauaaaaggauccuugccuuuaauuggagaagcagauugccuccacgaaaaauacgguggguuaaacaaaagcaagccuuacuacacaggggaacaugcaaaggccauaggaaauugcccaauaugggugaaaacacccuugaagcuggccaauggaaccaaauauagaccuccugcaaaacuauuaaaggaaagggguuucuucggagcuauugcugguuucuuagaaggaggaugggaaggaaugauugcagguuggcacggauacacaucccauggggcacauggaguagcgguggcagcugaccuuaagagcacucaagaagccauaaacaagauaacaaaaaaucucaacucuuugagugagcuggaaguaaagaaucuucaaagacuaagcggugccauggaugaacuccacaaugaaauacuagaacuagaugagaaaguggaugaucucagagcugauacaauaagcucacaaauagaacucgcaguccugcuuuccaaugaaggaauaauaaacagugaagaugaacaucucuuggcgcuugaaagaaagcugaagaaaaugcugggccccucugcuguagagauagggaauggaugcuuugaaaccaaacacaagugcaaccagaccugucucgacagaauagcugcugguaccuuugaugcaggagaauuuucucuccccacuuuugauucacugaauauuacugcugcaucuuuaaaugacgauggauuggauaaucauacuauacugcuuuacuacucaacugcugccuccaguuuagcuguaacacugaugauagcuaucuuuguuguuuauauggucuccagagacaauguuucuugcuccaucugucuauaa

SEQ ID NO: 60470 - RNA, 1758 nt, Artificial Sequence
  derived and/or modified CDS sequence (wt) from hemagglutinin__InfluenzaB__ALE31994
augaaggcaauaauuguacuacucaugguaguaacauccaaugcagaucgaaucugcacugggauaacaucgucaaacucaccacaugucgucaaaacugcuacucaaggggaggucaaugugaccgguguaauaccacugacaacaacacccaccaaaucucauuuugcaaaucucaaaggaacagaaaccagggggaaacuaugcccaaaaugccucaacugcacagaucuggauguagccuugggcagaccaaaaugcacagggaaaauacccucugcaaggguuucaauacuccaugaagucagaccuguuacaucugggugcuuuccuauaaugcacgauagaacaaaaauuagacagcugccuaaccuucuccgaggauacgaacaugucagguuaucaacucacaacguuaucaaugcagaagaugcaccaggaggacccuacaaaauuggaaccucagggucuugcccuaacauuaccaauggaaacggauucuucgcaacaauggcuugggccgucccaaaaaacgacaaaaacaaaacagcaacaaauccauuaacaauagaaguaccauacauuuguacagaaggagaagaccaaauuaccguuuggggguuccacucugacaacgagacccaaauggcaaagcucuauggggacucaaagccccagaaguucaccucaucugccaacggagugaccacacauuacguuucacagauugguggcuucccaaaucaaacagaagacggaggacuaccacaaagugguagaauuguuguugauuacauggugcaaaaaucuggaaaaacaggaacaauuaccuaucaaagagguauuuuauugccucaaaagguguggugcgcaaguggcaggagcaagguaauaaaaggauccuugccuuuaauuggagaagcagauugccuccaugaaaaauacgguggauuaaacaaaagcaagccuuacuacacaggggaacaugcaaaggccauaggaaauugcccaauaugggugagaacacccuugaagcuggccaauggaaccaaauauagaccuccugcaaaacuauuaaaggaaagggguuucuucggagcuauugcugguuucuuagagggaggaugggaaggaaugauugcagguuggcacggauacacaucccauggggcacauggaguagcgguggcagcugaccuuaagagcacucaagaggccauaaacaagauaacaaaaaaucucaacucuuugagugagcuggaaguaaagaaucuucaaagacuaagcggugccauggaugaacuccacaacgaaauacuagaacuagaugagaaaguggaugaucucagagcugauacaauaagcucacaaauagaacucgcaguccugcuuuccaaugaaggaauaauaaacagugaagaugaacaucucuuggcgcuugaaagaaagcugaagaaaaugcugggccccucugcuguagagauagggaauggaugcuuugaaaccaaacacaagugcaaccagaccugucucgacagaauagcugcugguaccuuugaugcaggagaauuuucucuccccaccuuugauucacugaauauuacugcugcaucuuuaaaugacgauggauuggauaaucauacuauacugcuuuacuacucaacugcugccuccaguuuggcuguaacacugaugauagcuaucuuuguuguuuauauggucuccagagacaauguuucuugcuccauuugucuauaa

SEQ ID NO: 60471 - RNA, 1755 nt, Artificial Sequence
  derived and/or modified CDS sequence (wt) from hemagglutinin__InfluenzaB__ALN39719
augaaggcaauaauuguacuacucaugguaguaacauccaaugcagaucgaaucugcacugggauaacaucuucaaacucaccucauguggucaaaacagcuacucaaggggaggucaaugugacuggcgugauaccacugacaacaacaccaacaaaaucuuauuuugcaaaucucaaaggaacaaggaccagagggaaacuaugcccggacugucucaacuguacagaucuggauguggccuugggcaggccaauguguguggggaccacaccuucugcuaaagcuucaauacuccaugaggucagaccuguuacauccgggugcuuuccuauaaugcacgacagaacaaaaaucaggcaacuacccaaucuucucagaggauaugaaaagaucagguuaucaacccaaaacguuaucgaugcagaaaaagcaccaggaggacccuacagacuuggaaccucaggaucuugcccuaacgcuaccaguaaaaucggauuuuuugcaacaauggcuugggcugucccaaaggacaacuacaaaaaugcaacgaacccacaaacaguggaaguaccauacauuuguacagaaggggaagaccaaauuacuguuuggggguuccauucggauaacaaaacccaaaugaagagccucuauggagacucaaauccucaaaaguucaccucaucugcuaauggaguaaccacacauuauguuucucagauuggcgacuucccagaucaaacagaagacggaggacuaccacaaagcggcagaauuguuguugauuacaugaugcaaaaaccugggaaaacaggaacaauugucuaucaaagggguguuuuguugccucaaaagguguggugcgcgaguggcaggagcaaaguaauaaaagggucauugccuuuaauuggugaagcagauugccuucaugaagaauacgguggauuaaacaaaagcaagccuuacuacacaggaaaacaugcaaaagccauaggaaauugcccaauauggguaaaaacaccuuugaagcuugccaauggaaccaaauauagaccuccugcaaaacuauugaaggaaagggguuucuucggagcuauugcugguuuccuagaaggaggaugggaaggaaugauugcagguuggcacggauacacaucucacggagcacauggaguggcaguggcggcagaccuuaagaguacacaagaagcuauaaauaagauaacaaaaaaucucaauucuuugagugaacuagaaguaaagaaccuucaaagacuaaguggugccauggaugaacuccacaacgaaauacucgagcuggaugaaaaaguggaugaucucagagcugacacuauaagcucacaaauagaacuugcagucuugcuuuccaacgaaggaauaauaaacagugaagacgagcaucuauuggcacuugagagaaaacuaaagaaaaugcugggucccucugcuguagacauaggaaacggaugcuucgaaaccaaacacaaaugcaaccagaccugcuuagacaggauagcugcuggcaccuuuaaugcaggagaauuuucucuccccacuuuugauucauugaacauuacugcugcaucuuuaaaugaugauggauuggauaaccauacuauacugcucuauuacucaacugcugcuucuaguuuggcuguaacauuaaugcuagcccuuuuuauuguuuauauggucuccagagacaacguuucaugcuccaucugucuauaa

SEQ ID NO: 60472 - RNA, 1755 nt, Artificial Sequence
  derived and/or modified CDS sequence (wt) from hemagglutinin__InfluenzaB__ALN39720
augaaggcaauaauuguacuacucaugguaguaacauccaaugcagaucgaaucugcacugggauaacaucuucaaacucaccucauguggucaaaacagcuacucaaggggaggucaaugugacuggugugauaccacugacaacaacaccaacaaaaucuuauuuugcaaaccucaaaggaacaaggaccagagggaaacuaugcccggacugucucaacuguacagaucuggauguggccuugggcaggccaauguguguggggaccacaccuucugcuaaagcuucaauacuccaugaggucagaccuguuacauccgggugcuuuccuauaaugcacgacagaacaaaaaucaggcaacuacccaaucuucucagaggauaugaaaaaaucagguuaucaacccaaaacguuaucgaugcagaaaaagcaccaggaggacccuacagacuuggaaccucaggaucuugcccuaacgcuacuaguaaaaucggauuuuuugcaacaauggcuugggcugucccaaaggacaacuacaaaaaugcaacgaacccacaaacaguggaaguaccauacauuuguacagaaggggaagaccaaauuacuguuuggggguuccauucggauaacaaaacccaaaugaagagccucuauggagacucaaauccucaaaaguucaccucaucugcuaauggaguaaccacacauuauguuucucagauuggcgacuucccagaucaaacagaagacggaggacuaccacaaagcggcagaauuguuguugauuacaugaugcaaaaaccugggaaaacaggaacaauugucuaucaaagggguguuuuguugccucaaaagguuuggugcgcgaguggcaggagcaaaguaauaaaagggucauugccuuuaauuggugaagcagauugccuucaugaagaauacgguggauuaaacaaaagcaagccuuacuacacaggaaaacaugcaaaagccauaggaaauugcccaauauggguaaaaacaccuuugaagcuugccaauggaaccaaauauagaccuccugcaaaacuauugaaggaaagggguuucuucggagcuauugcugguuuccuagaaggaggaugggaaggaaugauugcagguuggcacggauacacaucucacggagcacauggaguggcaguggcggcagaccuuaagaguacacaagaagcuauaaauaagauaacaaaaaaucucaauucuuugagugaacuagaaguaaagaaccuucaaagacuaaguggugccauggaugaacuccacaacgaaauacucgagcuggaugaaaaaguggaugaucucagagcugacacuauaagcucacaaauagaacuugcagucuugcuuuccaacgaaggaauaauaaacagugaagacgagcaucuauuggcacuugagagaaaacuaaagaaaaugcugggucccucugcuguagacauaggaaacggaugcuucgaaaccaaacacaaaugcaaccagaccugcuuagacaggauagcugcuggcaccuuuaaugcaggagaauuuucucuccccacuuuugauucauugaacauuacugcugcaucuuuaaaugaugauggauuggauaaccauacuauacugcucuauuacucaacugcugcuucuaguuuggcuguaacauuaaugcuagcuauuuuuauuguuuauauggucuccagagacaacguuucaugcuccaucugucuauaa

SEQ ID NO: 60473 - RNA, 1755 nt, Artificial Sequence
  derived and/or modified CDS sequence (wt) from hemagglutinin__InfluenzaB__ALN39721
augaaggcaauaauuguacuacucaugguaguaacauccaaugcagaucgaaucugcacugggauaacaucuucaaacucaccucauguggucaaaacagcuacucaaggggaggucaaugugacuggcgugauaccacugacaacaacaccaacaaaaucuuauuuugcaaaucucaaaggaacaaggaccagagggaaacuaugcccggacugucucaacuguacagaucuggauguggccuugggcaggccaauguguguggggaccacaccuucugcuaaagcuucaauacuccaugaggucagaccuguuacauccgggugcuuuccuauaaugcacgacagaacaaaaaucaggcaacuacccaaucuucucagaggauaugaaaagaucagguuaucaacccaaaacguuaucgaugcagaaaaagcaccaggaggacccuacagacuuggaaccucaggaucuugcccuaacgcuaccaguaaaaucggauuuuuugcaacaauggcuugggcugucccaaaggacaacuacaaaaaugcaacgaacccacaaacaguggaaguaccauacauuuguacagaaggggaagaccaaauuacuguuuggggguuccauucggauaacaaaacccaaaugaagagccucuauggagacucaaauccucaaaaguucaccucaucugcuaauggaguaaccacacauuauguuucucagauuggcgacuucccagaucaaacagaagacggaggacuaccacaaagcggcagaauuguuguugauuacaugaugcaaaaaccugggaaaacaggaacaauugucuaucaaagggguguuuuguugccucaaaagguguggugcgcgaguggcaggagcaaaguaauaaaagggucauugccuuuaauuggugaagcagauugccuucaugaagaauacgguggauuaaacaaaagcaagccuuacuacacaggaaaacaugcaaaagccauaggaaauugcccaauauggguaaaaaccccuuugaagcuugccaauggaaccaaauauagaccuccugcaaaacuauugaaggaaagggguuucuucggagcuauugcugguuuccuagaaggaggaugggaaggaaugauugcagguuggcacggauacacaucucacggagcacauggaguggcaguggcggcagaccuuaagaguacacaagaagcuauaaauaagauaacaaaaaaucucaauucuuugagugaacuagaaguaaagaaccuucaaagacuaaguggugccauggaugaacuccacaacgaaauacucgagcuggaugaaaaaguggaugaucucagagcugacacuauaagcucacaaauagaacuugcagucuugcuuuccaacgaaggaauaauaaacagugaagacgagcaucuauuggcacuugagagaaaacuaaagaaaaugcugggucccucugcuguagacauaggaaacggaugcuucgaaaccaaacacaaaugcaaccagaccugcuuagacaggauagcugcuggcaccuuuaaugcaggagaauuuucucuccccacuuuugauucauugaacauuacugcugcaucuuuaaaugaugauggauuggauaaccauacuauacugcucuauuacucaacugcugcuucuaguuuggcuguaacauuaaugcuagccauuuuuauuguuuauauggucuccagagacaacguuucaugcuccaucugucuauaa

SEQ ID NO: 60474 - RNA, 1755 nt, Artificial Sequence
  derived and/or modified CDS sequence (wt) from hemagglutinin__InfluenzaB__ALN39723
augaaggcaauaauuguacuacucaugguaguaacauccaaugcagaucgaaucugcacugggauaacaucuucaaacucaccucauguggucaaaacagcuacucaaggggaggucaaugugacuggcgugauaccacugacaacaacaccaacaaaaucuuauuuugcaaaucucaaaggaacaaggaccagagggaaacuaugcccggacugucucaacuguacagaucuggauguggccuugggcaggccaauguguguggggaccacaccuucugcuaaagcuucaauacuccaugaggucagaccuguuacauccgggugcuuuccuauaaugcacgacagaacaaaaaucaggcaacuacccaaucuucucagaggauaugaaaagaucagguuaucaacccaaaauguuaucgaugcagaaaaagcaccaggaggacccuacagacuuggaaccucaggaucuugcccuaacgcuaccaguaaaaucggauuuuuugcaacaauggcuugggcugucccaaaggacaacuacaaaaaugcaacgaacccacaaacaguggaaguaccauacauuuguacagaaggggaagaccaaauuacuguuuggggguuccauucggauaacaaaacccaaaugaagagccucuauggagacucaaauccucaaaaguucaccucaucugcuaauggaguaaccacacauuauguuucucagauuggcgacuucccagaucaaacagaagacggaggacuaccacaaagcggcagaauuguuguugauuacaugaugcaaaaaccugggaaaacaggaacaauugucuaucaaagggguguuuuguugccucaaaagguguggugcgcgaguggcaggagcaaaguaauaaaagggucauugccuuuaauuggugaagcagauugccuucaugaagaauacgguggauuaaacaaaagcaagccuuacuacacaggaaaacaugcaaaagccauaggaaauugcccaauauggguaaaaacaccuuugaagcuugccaauggaaccaaauauagaccuccugcaaaacuauugaaggaaagggguuucuucggagcuauugcugguuuccuagaaggaggaugggaaggaaugauugcagguuggcacggauacacaucucacggagcacauggaguggcaguggcggcagaccuuaagaguacacaagaagcuauaaauaagauaacaaaaaaucucaauucuuugagugaacuagaaguaaagaaccuucaaagacuaaguggugccauggaugaacuccacaacgaaauacucgagcuggaugaaaaaguggaugaucucagagcugacacuauaagcucacaaauagaacuugcagucuugcuuuccaacgaaggaauaauaaacagugaagacgagcaucuauuggcacuugagagaaaacuaaagaaaaugcugggucccucugcuguagacauaggaaacggaugcuucgaaaccaaacacaaaugcaaccagaccugcuuagacaggauagcugcuggcaccuuuaaugcaggagaauuuucucuccccacuuuugauucauugaacauuacugcugcaucuuuaaaugaugauggauuggauaaccauacuauacugcucuauuacucaacugcugcuucuaguuuggcuguaacauuaaugcuagccauuuuuauuguuuauauggucuccagagacaacguuucaugcuccaucugucuauaa

SEQ ID NO: 60475 - RNA, 1755 nt, Artificial Sequence; identical to SEQ ID NO: 60439
  derived and/or modified CDS sequence (wt) from hemagglutinin__InfluenzaB__ALN39724

SEQ ID NO: 60476 - RNA, 1755 nt, Artificial Sequence
  derived and/or modified CDS sequence (wt) from hemagglutinin__InfluenzaB__ALN39725
augaaggcaauaauuguacuacucaugguaguaacauccaaugcagaucgaaucugcacugggauaacaucuucaaacucaccucauguggucaaaacagcuacucaaggggaggucaaugugacuggcgugauaccacugacaacaacaccaacaaaaucuuauuuugcaaaucucaaaggaacaaggaccagagggaaacuaugcccggacugucucaacuguacagaucuggauguggccuugggcaggccaauguguguggggaccacaccuucugcuaaagcuucaauacuccaugaggucagaccugucacauccgggugcuuuccuauaaugcacgacagaacaaaaaucaggcaacuacccaaucuucucagaggauaugaaaagaucagguuaucaacccaaaacguuaucgaugcagaaaaagcaccaggaggacccuacagacuuggaaccucaggaucuugcccuaacgcuaccaguaaaaucggauuuuuugcaacaauggcuugggcugucccaaaggacaacuacaaaaaugcaacgaacccacaaacaguggaaguaccauacauuuguacagaaggggaagaccaaauuacuguuuggggguuccauucggauaacaaaacccaaaugaagagccucuauggagacucaaauccucaaaaguucaccucaucugcuaauggaguaaccacacauuauguuucucagauuggcgacuucccagaucaaacagaagacggaggacuaccacaaagcggcagaauuguuguugauuacauggugcaaaaaccugggaaaacaggaacaauugucuaucaaagggguguuuuguugccucaaaagguguggugcgcgaguggcaggagcaaaguaauaaaagggucauugccuuuaauuggugaagcagauugccuucaugaagaauacgguggauuaaacaaaagcaagccuuacuacacaggaaaacaugcaaaagccauaggaaauugcccaauauggguaaaaacaccuuugaagcuugccaauggaaccaaauauagaccuccugcaaaacuauugaaggaaagggguuucuucggagcuauugcugguuuccuagaaggaggaugggaaggaaugauugcagguuggcacggauacacaucucacggagcacauggaguggcaguggcggcagaccuuaagaguacacaagaagcuauaaauaagauaacaaaaaaucucaauucuuugagugaacuagaaguaaagaaccuucaaagacuaaguggugccauggaugaacuccacaacgaaauacucgagcuggaugaaaaaguggaugaucucagagcugacaccauaagcucacaaauagaacuugcagucuugcuuuccaacgaaggaauaauaaacagugaagacgagcaucuauuggcacuugagagaaaacuaaagaaaaugcugggucccucugcuguagacauaggaaacggaugcuucgaaaccaaacacaaaugcaaccagaccugcuuagacaggauagcugcuggcaccuucaaugcaggagaauuuucucuccccacuuuugauucauugaacauuacugcugcaucuuuaaaugaugauggauuggauaaccauacuauacugcucuauuacucaacugcugcuucuaguuuggcuguaacauuaaugcuagcuauuuuuauuguuuauauggucuccagagacaacguuucaugcuccaucugucuauaa

SEQ ID NO: 60477 - RNA, 1755 nt, Artificial Sequence
  derived and/or modified CDS sequence (wt) from hemagglutinin__InfluenzaB__ALN39726
augaaggcaauaauuguacuacucaugguaguaacauccaaugcagaucgaaucugcacugggauaacaucuucaaacucaccucauguggucaaaacagcuacucaaggggaggucaauguaacuggcgugauaccacugacaacaacaccaacaaaaucuuauuuugcaaaucucaaaggaacaaggaccagagggaaacuaugcccggacugucucaacuguacagaucuggauguggccuugggcaggccaauguguguggggaccacaccuucugcuaaagcuucaauacuccaugaggucagaccuguuacauccgggugcuuuccuauaaugcacgacagaacaaaaaucaggcaacuacccaaucuucucagaggauaugagaagaucagguuaucaacccaaaacguuaucgaugcagaaaaagcaccaggaggacccuacagacuuggaaccucaggaucuugcccuaacgcuaccaguaaaaucggauuuuuugcaacaauggcuugggcugucccaaaggacaacuacaaaaaugcaacgaacccacaaacaguggaaguaccauacauuuguacagaaggggaagaccaaauuacuguuuggggguuccauucggauaacaaaacccaaaugaagagccucuauggagacucaaauccucaaaaguucaccucaucugcugauggaguaaccacacauuauguuucucagauuggcgacuucccagaucaaacagaagacggaggacuaccacaaagcggcagaauuguuguugauuacaugaugcaaaaaccugggaaaacaggaacaauugucuaucaaagggguguuuuguugccucaaaagguuuggugcgcgaguggcaggagcaaaguaauaaaagggucauugccuuuaauuggugaagcagauugccuucaugaagaauacgguggauuaaacaaaagcaagccuuacuacacaggaaaacaugcaaaagccauaggaaauugcccaauauggguaaaaacaccuuugaagcuugccaauggaaccaaauauagaccuccugcaaaacuauugaaggaaagggguuucuucggagcuauugcugguuuccuagaaggaggaugggaaggaaugauugcagguuggcacggauauacaucucacggagcacauggaguggcaguggcggcagaccuuaagaguacacaagaagcuauaaauaagauaacaaaaaaucucaauucuuugagugaacuagaaguaaagaaccuucaaagacuaaguggugccauggaugaacuccacaacgaaauacucgagcuggaugaaaaaguggaugaucucagagcugacacuauaagcucacaaauagaacuugcagucuugcuuuccaacgaaggaauaauaaacagugaagacgagcaucuauuggcacuugagagaaaacuaaagaaaaugcugggucccucugcuguagacauaggaaacggaugcuucgaaaccaaacacaaaugcaaccagaccugcuuagacaggauagcugcuggcaccuuuaaugcaggagaauuuucucuccccacuuuugauucauugaacauuacugcugcaucuuuaaaugaugauggauuggauaaccauacuauacugcucuauuacucaacugcugcuucuaguuuggcuguaacauuaaugcuagcuauuuuuauuguuuauauggucuccagagacaacguuucaugcuccaucugucuauaa

SEQ ID NO: 60478 - RNA, 1755 nt, Artificial Sequence
  derived and/or modified CDS sequence (wt) from hemagglutinin__InfluenzaB__ALN39727
augaaggcaauaauuguacuacucaugguaguaacauccaaugcagaucgaaucugcacugggauaacaucuucaaacucaccucauguggucaaaacagcuacucaaggggaggucaaugugacuggcgugauaccacugacaacaacaccaacaaaaucuuauuuugcaaaucucaaaggaacaaggaccagagggaaacuaugcccggacugucucaacuguacagaucuggauguggccuugggcaggccaauguguguggggaccacaccuucugcuaaagcuucaauacuccaugaggucagaccuguuacauccgggugcuuuccuauaaugcacgacagaacaaaaaucaggcaacuacccaaucuucucagaggauaugaaaagaucagguuaucaacccaaaacguuaucgaugcagaaaaagcaccaggaggacccuacagacuuggaaccucaggaucuugcccuaacgcuaccaguaaaaucggauuuuuugcaacaauggcuugggcugucccaaaggacaacuacaaaaaugcaacuaacccacaaacaguggaaguaccauacauuuguacagaaggggaagaccaaauuacuguuuggggguuccauucggauaacaaaacccaaaugaagagccucuauggagacucaaauccucaaaaguucaccucaucugcuaauggaguaaccacacauuauguuucucagauuggcgacuucccagaucaaacagaagacggaggacuaccacaaagcggcagaauuguuguugauuacauggugcaaaaaccugggaaaacaggaacaauugucuaucaaagggguguucuguugccucaaaagguguggugcgcgaguggcaggagcaaaguaauaaaagggucauugccuuuaauuggugaagcagauugccuucaugaagaauacgguggauuaaacaaaagcaagccuuacuacacaggaaaacaugcaaaagccauaggaaauugcccaauauggguaaaaacaccuuugaagcuugccaauggaaccaaauauagaccuccugcaaaacuauugaaggaaagggguuucuucggagcuauugcugguuuccuagaaggaggaugggaaggaaugauugcagguuggcacggauacacaucucacggagcacauggaguggcaguggcggcagaccuuaagaguacacaagaagcuauaaauaagauaacaaaaaaucucaauucuuugagugaacuagaaguaaagaaccuucaaagacuaaguggugccauggaugaacuccacaacgaaauacucgagcuggaugaaaaaguggaugaucucagagcugacacuauaagcucacaaauagaacuugcagucuugcuuuccaacgaaggaauaauaaacagugaagacgagcaucuauuggcacuugagagaaaacuaaagaaaaugcugggucccucugcuguagacauaggaaacggaugcuucgaaaccaaacacaaaugcaaccagaccugcuuagacaggauagcugcuggcaccuuuaaugcaggagaauuuucucuccccacuuuugauucauugaacauuacugcugcaucuuuaaaugaugauggauuggauaaccauacuauacugcucuauuacucaacugcugcuucuaguuuggcuguaacauuaaugcuagcuauuuuuauuguuuauauggucuccagagacaacguuucaugcuccaucugucuauaa

SEQ ID NO: 60479 - RNA, 1755 nt, Artificial Sequence
  derived and/or modified CDS sequence (wt) from hemagglutinin__InfluenzaB__ALN39728
augaaggcaauaauuguacuacucaugguaguaacauccaaugcagaucgaaucugcacugggauaacaucuucaaacucaccucauguggucaaaacagcuacucaaggggaggucaaugugacuggcgugauaccacugacaacaacaccaacaaaaucuuauuuugcaaaucucaaaggaacaaggaccagagggaaacuaugcccggacugucucaacuguacagaucuggauguggccuugggcaggccaauguguguggggaccacaccuucugcuaaagcuucaauacuccaugaggucagaccuguuacauccgggugcuuuccuauaaugcacgacagaacaaaaaucaggcaacuacccaaucuucucagaggauaugaaaagaucagguuaucaacccaaaacguuaucgaugcagaaaaagcaccaggaggacccuacagacuuggaaccucaggaucuugcccuaacgcuacuaguaaaaucggauuuuuugcaacaauggcuugggcugucccaaaggacaacuacaaaaaugcaacgaacccacaaacaguggaaguaccauacauuuguacagaaggggaagaccaaauuacuguuuggggguuccauucggauaacaaaacccaaaugaagagccucuauggagacucaaauccucaaaaguucaccucaucugcuaauggaguaaccacacauuauguuucucagauuggcgacuucccagaucaaacagaagacggaggacuaccacaaagcggcagaauuguuguugauuacaugaugcaaaaaccugggaaaacaggaacaauugucuaucaaagggguguuuuguugccucaaaagguguggugcgcgaguggcaggagcaaaguaauaaaagggucauugccuuuaauuggugaagcagauugccuucaugaagaauacgguggauuaaacaaaagcaagccuuacuacacaggaaaacaugcaaaagccauaggaaauugcccaauauggguaaaaacaccuuugaagcuugccaauggaaccaaauauagaccuccugcaaaacuauugaaggaaagggguuucuucggagcuauugcugguuuccuagaaggaggaugggaaggaaugauugcagguuggcacggauacacaucucacggagcacauggaguggcaguggcggcagaccuuaagaguacacaagaagcuauaaauaagauaacaaaaaaucucaauucuuugagugaacuagaaguaaagaaccuucaaagacuaaguggugccauggaugaacuccacaacgaaauacucgagcuggaugaaaaaguggaugaucucagagcugacacuauaagcucacaaauagaacuugcagucuugcuuuccaacgaaggaauaauaaacagugaagacgagcaucuauuggcacuugagagaaaacuaaagaaaaugcugggucccucugcuguagacauaggaaacggaugcuucgaaaccaaacacaaaugcaaccagaccugcuuagacaggauagcugcuggcaccuuuaaugcaggagaauuuucucuccccacuuuugauucauugaacauuacugcugcaucuuuaaaugaugauggauuggacaaccauacuauacugcucuauuacucaacugcugcuucuaguuuggcuguaacauuaaugcuagcuauuuuuauuguuuauauggucuccagagacaacguuucgugcuccaucugucuauaa

SEQ ID NO: 60480 - RNA, 1755 nt, Artificial Sequence
  derived and/or modified CDS sequence (wt) from hemagglutinin__InfluenzaB__ALN39729
augaaggcaauaauuguacuacucaugguaguaacguccaaugcagaucgaaucugcacugggauaacaucuucaaacucaccucauguggucaaaacagcuacucaaggggaggucaaugugacuggcgugauaccacugacaacaacaccaacaaaaucuuauuuugcaaaucucaaaggaacaaggaccagagggaaacuaugcccggacugucucaacuguacagaucuggauguggccuugggcaggccaauguguguggggaccacaccuucugcuaaagcuucaauacuccaugaggucagaccuguuacauccgggugcuuuccuauaaugcacgacagaacaaaaaucaggcaacuacccaaucuucucagaggauaugaaaagaucagguuaucaacccaaaacguuaucgaugcagaaaaagcaccaggaggacccuacagacuuggaaccucaggaucuugcccuaacgcuaccaguaaaaucggauuuuuugcaacaauggcuugggcugucccaaaggacaacuacaaaaaugcaacgaacccacaaacaguggaaguaccauacauuuguacagaaggggaagaccaaauuacuguuuggggguuccauucggauaacaaaacccaaaugaagagccucuauggagacucaaauccucaaaaguucaccucaucugcuaauggaguaaccacacauuauguuucucagauuggcgacuucccagaucaaacagaagacggaggacuaccacaaagcggcagaauuguuguugauuacaugaugcaaaaaccugggaaaacaggaacaauugucuaucaaagggguguuuuguugccucaaaagguguggugcgcgaguggcaggagcaaaguaauaaaagggucauugccuuuaauuggugaagcagauugccuucaugaagaauacgguggauuaaacaaaagcaagccuuacuacacaggaaaacaugcaaaagccauaggaaauugcccaauauggguaaaaacaccuuugaagcuugccaauggaaccaaauauagaccuccugcaaaacuacugaaggaaagggguuucuucggagcuauugcugguuuccuagaaggaggaugggaaggaaugauugcagguuggcacggauacacaucucacggagcacauggaguggcaguggcggcagaccuuaagaguacacaagaagcuauaaauaagauaacaaaaaaucucaauucuuugagugaacuagaaguaaagaaccuucaaagacuaaguggugccauggaugaacuccacaacgaaauacucgagcuggaugaaaagguggaugaucucagagcugacacuauaagcucacaaauagaacuugcagucuugcuuuccaacgaaggaauaauaaacagugaagacgagcaucuauuggcacuugagagaaaacuaaagaaaaugcugggucccucugcuguagacauaggaaacggaugcuucgaaaccaaacacaaaugcaaccagaccugcuuagacaggauagcugcuggcaccuuuaaugcaggagaauuuucucuccccacuuuugauucauugaacauuacugcugcaucuuuaaaugaugauggauuggauaaccauacuauacugcucuauuacucaacugcugcuucuaguuuggcuguaacauuaaugcuagcuauuuuuauuguuuacauggucuccagagacaacguuucaugcuccaucugucuauaa

SEQ ID NO: 60481 - RNA, 1758 nt, Artificial Sequence
  derived and/or modified CDS sequence (wt) from hemagglutinin__InfluenzaB__ALN39730
augaaggcaauaauuguacuacucaugguaguaacauccaaugcagaucgaaucugcacugggauaacaucgucaaacucaccacaugucgucaaaacugcuacucaaggggaggucaaugugaccgguguaauaccacugacaacaacacccaccaaaucucauuuugcaaaucucaaaggaacagaaaccagggggaaacuaugcccaaaaugccucaacugcacagaucuagauguagccuugggcagaccaaaaugcacagggaaaauacccucugcaaggguuucaauacuccaugaagucagaccuguuacaucugggugcuuuccuauaaugcacgauagaacaaaaauuagacagcugccuaaccuucuccgaggauacgaacaugucagguuaucaacucacaacguuaucaaugcagaagaugcaccaggaggacccuacaaaauuggaaccucagggucuugcccuaacauuaccaauggaaacggauucuucgcaacaauggcuugggccgucccaaaaaacgacaaaaacaaaacagcaacaaauccauuaacaauagaaguaccauacauuuguacagaaggagaagaccaaauuaccguuuggggguuccacucugacaacgagacccaaauggcaaagcucuauggggacucaaagccccagaaguucaccucaucugccaacggagugaccacacauuacguuucacagauugguggcuucccaaaucaaacagaagacggaggacuaccacaaagugguagaauuguuguugauuacauggugcaaaaaucuggaaaaacaggaacaauuaccuaucaaagagguauuuuauugccucaaaagguguggugcgcaaguggcaggagcaagguaauaaaaggauccuugccuuuaauuggagaagcagauugccuccaugaaaaauacgguggauuaaacaaaagcaagccuuacuacacaggggaacaugcaaaggccauaggaaauugcccaauaugggugaaaacacccuugaagcuggccaauggaaccaaauauagaccuccugcaaaacuauuaaaggaaagggguuucuucggagcuauugcugguuucuuagagggaggaugggaaggaaugauugcagguuggcacggauacacaucccauggggcacauggaguagcgguggcagcugaccuuaagagcacucaagaggccauaaacaagauaacaaaaaaucucaacucuuugagugagcuggaaguaaagaaucuucaaagacuaagcggugccauggaugaacuccacaacgaaauacuagaacuagaugagaaaguggaugaucucagagcugauacaauaagcucacaaauagaacucgcaguccugcuuuccaaugaaggaauaauaaacagugaagaugaacaucucuuggcgcuugaaagaaagcugaagaaaaugcugggccccucugcuguagagauagggaauggaugcuuugaaaccaaacacaagugcaaccagaccugucucgacagaauagcugcugguaccuuugaugcaggagaauuuuuucuccccaccuuugauucacugaauauuacugcugcaucuuuaaaugacgauggauuggauaaucauacuauacugcuuuacuacucaacugcugccuccaguuuggcuguaacacugaugauagcuaucuuuguuguuuauauggucuccagagacaauguuucuugcuccauuugucuauaa

SEQ ID NO: 60482 - RNA, 1755 nt, Artificial Sequence; identical to SEQ ID NO: 60467
  derived and/or modified CDS sequence (wt) from hemagglutinin__InfluenzaB__ALN39732

SEQ ID NO: 60483 - RNA, 1755 nt, Artificial Sequence
  derived and/or modified CDS sequence (wt) from hemagglutinin__InfluenzaB__ALN39733
augaaggcaauaauuguacuacucaugguaguaacauccaaugcagaucgaaucugcacugggauaacaucuucaaacucaccucauguggucaaaacagcuacccaaggggaggucaaugugacuggcgugauaccacugacaacaacaccaacaaaaucuuauuuugcaaaucucaaaggaacaaggaccagagggaaacuaugcccggacugucucaacuguacagaucuggauguggccuugggcaggccaauguguguggggaccacaccuucugcuaaagcuucaauacuccaugaggucagaccuguuacauccgggugcuuuccuauaaugcacgacagaacaaaaaucaggcaacuacccaaucuucucagaggauaugaaaagaucagguuaucaacccaaaacguuaucgaugcagaaaaagcaccaggaggacccuacagacuuggaaccucaggaucuugcccuaacgcuaccaguaaaaucggauuuuuugcaacaauggcuugggcugucccaaaggacaacuacaaaaaugcaacgaacccacaaacaguggaaguaccauacauuuguacagaaggggaagaccaaauuacuguuuggggguuccauucggauaacaaaacccaaaugaagagccucuauggagacucaaauccucaaaaguucaccucaucugcuaauggaguaaccacacauuauguuucucagauuggcgacuucccagaucaaacagaagacggaggacuaccacaaagcggcagaauuguuguugauuacaugaugcaaaaaccugggaaaacaggaacaauugucuaucaaagagguguuuuguugccucaaaagguguggugcgcgaguggcaggagcaaaguaauaaaagggucauugccuuuaauuggugaagcagauugccuucaugaagaauacgguggauuaaacaaaagcaagccuuacuacacaggaaaacaugcaaaagccauaggaaauugcccaauauggguaaaaacaccuuugaagcuugccaauggaaccaaauauagaccuccugcaaaacuauugaaggaaagggguuucuucggagcuauugcugguuuccuagaaggaggaugggaaggaaugauugcagguuggcacggauacacaucccacggagcacauggaguggcaguggcggcagaccuuaagaguacacaagaagcuauaaauaagauaacaaagaaucucaauucuuugagugaacuagaaguaaagaaccuucaaagacuaaguggugccauggaugaacuccacaacgaaauacucgagcuggaugaaaaaguggaugaucucagagcugacacuauaagcucacaaauagaacuugcagucuugcuuuccaacgaaggaauaauaaacagugaagacgagcaucuauuggcacuugagagaaaacuaaagaaaaugcugggucccucugcuguagacauaggaaacggaugcuucgaaaccaaacacagaugcaaccagaccugcuuagacaggauagcugcuggcaccuuuaaugcaggagaauuuucucuccccacuuuugauucauugaacauuacugcugcaucuuuaaaugaugauggauuggauaaccauacuauacugcucuauuacucaacugcugcuucuaguuuggcuguaacauuaaugcuagcuauuuuuauuguuuauauggucuccagagacaacguuucaugcuccaucugucuauaa

SEQ ID NO: 60484 - RNA, 1755 nt, Artificial Sequence
  derived and/or modified CDS sequence (wt) from hemagglutinin__InfluenzaB__ALN39751
augaaggcaauaauuguacuacucaugguaguaacauccaaugcagaucgaaucugcacugggauaacaucuucaaacucaccucauguggucaaaacagcuacucaaggggaggucaaugugacuggcgugauaccacugacaacaacaccaacaaaaucuuauuuugcaaaucucaaaggaacaaggaccagagggaaacuaugcccggacugucucaacuguacagaucuggauguggccuugggcaggccaauguguguggggaccacaccuucugcuaaagcuucaauacuccaugaggucagaccuguuacauccgggugcuuuccuauaaugcacgacagaacaaaaaucaggcaacuacccaaucuucucagaggauaugaaaagaucagguuaucaacccaaaacguuaucgaugcagaaaaagcaccaggaggacccuacagacuuggaaccucaggaucuugcccuaacgcuaccaguaaaaucggauuuuuugcaacaauggcuugggcugucccaaaggacaacuacaaaaaugcaacgaacccacaaacaguggaaguaccauacauuuguacagaaggggaagaccaaauuacuguuuggggguuccauucggauaacaaaacccaaaugaagagccucuauggagacucaaauccucaaaaguucaccucaucugcuaauggaguaaccacacauuauguuucucagauuggcgacuucccagaucaaacagaagacggaggacuaccacaaagcggcagaauuguuguugauuacaugaugcaaaaaccugggaaaacaggaacaauugucuaucaaagggguguuuuguugccucaaaagguguggugcgcgaguggcaggagcaaaguaauaaaagggucauugccuuuaauuggugaagcagauugccuucaugaagaauacgguggauuaaacaaaagcaagccuuacuacacaggaaaacaugcaaaagccauaggaaauugcccaauauggguaaaaacaccuuugaagcuugccaauggaaccaaauauagaccuccugcaaaacuauugaaggaaagggguuucuucggagcuauugcugguuuccuagaaggaggaugggaaggaaugguugcagguuggcacggauacacaucucacggagcacauggaguggcaguggcggcagaccuuaagaguacacaagaagcuauaaauaagauaacaaaaaaucucaauucuuugagugaacuagaaguaaagaaccuucaaagacuaaguggugccauggaugaacuccacaacgaaauacucgagcuggaugaaaaaguggaugaucucagagcugacacuauaagcucacaaauagaacuugcagucuugcuuuccaacgaaggaauaauaaacagugaagacgagcaucuauuggcacuugagagaaaacuaaagaaaaugcugggucccucugcuguagacauaggaaacggaugcuucgaaaccaaacacaaaugcaaccagaccugcuuagacaggauagcugcuggcaccuuuaaugcaggagaauuuucucuccccacuuuugauucauugaacauuacugcugcaucuuuaaaugaugauggauuggauaaccauacuauacugcucuauuacucaacugcugcuucuaguuuggcuguaacauuaaugcuagcccuuuuuauuguuuauauggucuccagagacaacguuucaugcuccaucugucuauaa

SEQ ID NO: 60485 - RNA, 1755 nt, Artificial Sequence
  derived and/or modified CDS sequence (wt) from hemagglutinin__InfluenzaB__ALN39752
augaaggcaauaauuguacuacucaugguaguaacauccaaugcagaucgaaucugcacugggauaacaucuucaaacucaccucauguggucaaaacagcuacucaaggggaggucaaugugacuggcgugauaccacugacaacaacaccaacaaaaucuuauuuugcaaaucucaaaggaacaaggaccagagggaaacuaugcccggacugucucaacuguacagaucuggauguggccuugggcaggccaauguguguggggaccacaccuucugcuaaagcuucaauacuccaugaggucagaccuguuacauccgggugcuuuccuauaaugcacgacagaacaaaaaucaggcaacuacccaaucuucucagaggauaugaaaagaucagguuaucaacccaaaacguuaucgaugcagaaaaagcaccaggaggacccuacagacuuggaaccucaggaucuugcccuaacgcuaccaguaaaaucggauuuuuugcaacaauggcuugggcugucccaaaggacaacuacaaaaaugcaacgaacccacaaacaguggaaguaccauacauuuguacagaaggggaagaccaaauuacuguuuggggguuccauucggauaacaaaacccaaaugaagagccucuauggagacucaaauccucaaaaguucaccucaucugcuaauggaguaaccacacauuauguuucucagauuggcgacuucccagaucaaacagaagacggaggacuaccacaaagcggcagaauuguuguugauuacaugaugcaaaaacccgggaaaacaggaacaauugucuaucaaagggguguuuuguugccucaaaagguguggugcgcgaguggcaggagcaaaguaauaaaagggucauugccuuuaauuggugaagcagauugccuucaugaagaauacgguggauuaaacaaaagcaagccuuacuacacaggaaaacaugcaaaagccauaggaaauugcccaauauggguaaaaacaccuuugaagcuugccaauggaaccaaauauagaccuccugcaaaacuauugaaggaaagggguuucuucggagcuauugcugguuuccuagaaggaggaugggaaggaaugauugcagguuggcacggauacacaucucacggagcacauggaguggcaguggcggcagaccuuaagaguacacaagaagcuauaaauaagauaacaaaaaaucucaauucuuugagugaacuagaaguaaagaaccuucaaagacuaaguggugccauggaugaacuccacaacgaaauacucgagcuggaugaaaaaguggaugaucucagagcugacacuauaagcucacaaauagaacuugcagucuugcuuuccaacgaaggaauaauaaacagugaagacgagcaucuauuagcacuugagagaaaacuaaagaaaaugcugggucccucugcuguagacauaggaaacggaugcuucgaaaccaaacacaaaugcaaccagaccugcuuagacaggauagcugcuggcaccuuuaaugcaggagaauuuucucuccccacuuuugauucauugaacauuacugcugcaucuuuaaaugaugauggauuggauaaccauacuauacugcucuauuacucaacugcugcuucuaguuuggcuguaacauuaaugcuagcccuuuuuauuguuuauauggucuccagagacaacguuucaugcuccaucugucuauaa

SEQ ID NO: 60486 - RNA, 1755 nt, Artificial Sequence
  derived and/or modified CDS sequence (wt) from hemagglutinin__InfluenzaB__ALN39753
augaaggcaauaauuguacuacucaugguaguaacauccaaugcagaucgaaucugcacugggauaacaucuucaaacucaccucauguggucaaaacagcuacucaaggggaggucaaugugacuggugugauaccacugacaacaacaccaacaaaaucuuauuuugcaaaucucaaaggaacaaggaccagagggaaacuaugcccggacugucucaacuguacagaucuggauguggccuugggcaggccaauguguguggggaccacaccuucugcuaaagcuucaauacuccaugaggucagaccuguuacauccgggugcuuuccuauaaugcacgacagaacaaaaaucaggcaacuacccaaucuucucagaggauaugaaaaaaucagguuaucaacccaaaacguuaucgaugcagaaaaagcaccaggaggacccuacagacuuggaaccucaggaucuugcccuaacgcuacuaguaaaaucggauuuuuugcaacaauggcuugggcugucccaaaggacaacuacaaaaaugcaacgaacccacaaacaguggaaguaccauacauuuguacagaaggggaagaccaaauuacuguuuggggguuccauucggauaacaaaacccaaaugaagagccucuauggagacucaaauccucaaaaguucaccucaucugcuaauggaguaaccacacauuauguuucucagauuggcgacuucccagaucaaacagaagacggaggacuaccacaaagcggcagaauuguuguugauuacaugaugcaaaaaccugggaaaacaggaacaauugucuaucaaagggguguuuuguugccucaaaagguuuggugcgcgaguggcaggagcaaaguaauaaaagggucauugccuuuaauuggugaagcagauugccuucaugaagaauacgguggauuaaacaaaagcaagccuuacuacacaggaaaacaugcaaaagccauaggaaauugcccaauauggguaaaaacaccuuugaagcuugccaauggaaccaaauauagaccuccugcaaaacuauugaaggaaagggguuucuucggagcuauugcugguuuccuagaaggaggaugggaaggaaugauugcagguuggcacggauacacaucucacggagcacauggaguggcaguggcggcagaccuuaagaguacacaagaagcuauaaauaagauaacaaaaaaucucaauucuuugagugaacuagaaguaaagaaccuucaaagacuaaguggugccauggaugaacuccacaacgaaauacucgagcuggaugaaaaaguggaugaucucagagcugacacuauaagcucacaaauagaacuugcagucuugcuuuccaacgaaggaauaauaaacagugaagacgagcaucuauuggcacuugagagaaaacuaaagaaaaugcugggucccucugcuguagacauaggaaacggaugcuucgaaaccaaacacaaaugcaaccagaccugcuuagacaggauagcugcuggcaccuuuaaugcaggagaauuuucucuccccacuuuugauucauugaacauuacugcugcaucuuuaaaugaugauggauuggauaaccauacuauacugcucuauuacucaacugcugcuucuaguuuggcuguaacauuaaugcuagcuauuuuuauuguuuauauggucuccagagacaacguuucaugcuccaucugucuauaa

SEQ ID NO: 60487 - RNA, 1758 nt, Artificial Sequence
  derived and/or modified CDS sequence (wt) from hemagglutinin__InfluenzaB__ALN39754
augaaggcaauaauuguacuacucaugguaguaacauccaaugcagaucgaaucugcacugggauaacaucgucaaacucaccacaugucgucaaaacugcuacucaaggggaggucaaugugaccgguguaauaccacugacaacaacacccaccaaaucucauuuugcaaaucucaaaggaacagaaaccagggggaaacuaugcccaaaaugccucaacugcacagaucuggauguagccuugggcagaccaaaaugcacagggaaaauacccucugcaaggguuucaauacuccaugaagucagaccuguuacaucugggugcuuuccuauaaugcacgauagaacaaaaauuagacagcugccuaaccuucuccgaggauacgaacaugucagguuaucaacucacaacguuaucaaugcagaagaugcaccaggaggacccuacaaaauuggaaccucagggucuugcccuaacauuaccaauggaaacggauucuucgcaacaauggcuugggccgucccaaaaaacgacaaaaacaaaacagcaacaaauccauuaacaauagaaguaccauacauuuguacagaaggagaagaccaaauuaccguuuggggguuccacucugacaacgagacccaaauggcaaagcucuauggggacucaaagccccagaaguucaccucaucugccaacggagugaccacacauuacguuucacagauugguggcuucccaaaucaaacagaagacggaggacuaccacaaagugguagaauuguuguugauuacauggugcaaaaaucuggaaaaacaggaacaauuaccuaucaaagagguauuuuauugccucaaaagguguggugcgcaaguggcaggagcaagguaauaaaaggauccuugccuuuaauuggagaagcagauugccuccaugaaaaauacgguggauuaaacaaaagcaagccuuacuacacaggggaacaugcaaaggccauaggaaauugcccaauaugggugaaaacacccuugaagcuggccaauggaaccaaauauagaccuccugcaaaacuauuaaaggaaagggguuucuucggagcuauugcugguuucuuagagggaggaugggaaggaaugauugcagguuggcacggauacacaucccauggggcacauggaguagcgguggcagcugaccuuaagagcacucaagaggccauaaacaagauaacaaaaaaucucaacucuuugagugagcuggaaguaaagaaucuucaaagacuaagcggugccauggaugaacuccacaacgaaauacuagaacuagaugagaaaguggaugaucucagagcugauacaauaagcucacaaauagaacucgcaguccugcuuuccaaugaaggaauaauaaacagugaagaugaacaucucuuggcgcuugaaagaaagcugaagaaaaugcugggccccucugcuguagagauagggaauggaugcuuugaaaccaaacacaagugcaaccagaccugucucgacagaauagcugcugguaccuuugaugcaggagaauuuucucuccccaccuuugauucacugaauauuacugcugcaucuuuaaaugacgauggauuggauaaucauacuauacugcuuuacuacucaacugcugccuccaguuuggcuguaacacugaugauagcuaucuuuguuguuuauauggucuccagagacaauguuucuugcuccauuugucuauaa

SEQ ID NO: 60488 - RNA, 1758 nt, Artificial Sequence
  derived and/or modified CDS sequence (wt) from hemagglutinin__InfluenzaB__ALN39755
augaaggcaauaauuguacuacucuugguaguaacauccaaugcagaucgaaucugcacugggauaacaucgucaaacucaccacaugucgucaaaacugcuacucaaggggaggucaaugugaccgguguaauaccacugacaacaacacccaccaaaucucauuuugcaaaucucaaaggaacagaaaccagggggaaacuaugcccaaaaugccucaacugcacagaucuggauguagccuugggcagaccaaaaugcacagggaaaauacccucugcaaggguuucaauacuccaugaagucagaccuguuacaucugggugcuuuccuauaaugcacgauagaacaaaaauuagacagcugccuaaccuucuccgaggauacgaacaugucagguuaucaacucacaacguuaucaaugcagaagaugcaccaggaggacccuacaaaauuggaaccucagggucuugcccuaacauuaccaauggaaacggauucuucgcaacaauggcuugggccgucccaaaaaacgacaaaaacaaaacagcaacaaauccauuaacaauagaaguaccauacauuuguacagaaggagaagaccaaauuaccguuuggggguuccacucugacaacgagacccaaauggcaaagcucuauggggacucaaagccccagaaguucaccucaucugccaacggagugaccacacauuacguuucacagauugguggcuucccaaaucaaacagaagacggaggacuaccacaaagugguagaauuguuguugauuacauggugcaaaaaucuggaaaaacaggaacaauuaccuaucaaagagguauuuuauugccucaaaagguguggugcgcaaguggcaggagcaagguaauaaaaggauccuugccuuuaauuggagaagcagauugccuccaugaaaaauacgguggauuaaacaaaagcaagccuuacuacacaggggaacaugcaaaggccauaggaaauugcccaauaugggugaaaacacccuugaagcuggccaauggaaccaaauauagaccuccugcaaaacuauuaaaggaaagggguuucuucggagcuauugcugguuucuuagagggaggaugggaaggaaugauugcagguuggcacggauacacaucccauggggcacauggaguagcgguggcagcugaccuuaagagcacucaagaggccauaaacaagauaacaaaaaaucucaacucuuugagugagcuggaaguaaagaaucuucaaagacuaagcggugccauggaugaacuccacaacgaaauacuagaacuagaugagaaaguggaugaucucagagcugauacaauaagcucacaaauagaacucgcaguccugcuuuccaaugaaggaauaauaaacagugaagaugaacaucucuuggcgcuugaaagaaagcugaagaaaaugcugggccccucugcuguagagauagggaauggaugcuuugaaaccaaacacaagugcaaccagaccugucucgacagaauagcugcugguaccuuugaugcaggagaauuuucucuccccaccuuugauucacugaauauuacugcugcaucuuuaaaugacgauggauuggauaaucauacuauacugcuuuacuacucaacugcugccuccaguuuggcuguaacacugaugauagcuaucuuuguuguuuauauggucuccagagacaauguuucuugcuccauuugucuauaa

SEQ ID NO: 60489 - RNA, 1755 nt, Artificial Sequence
  derived and/or modified CDS sequence (wt) from hemagglutinin__InfluenzaB__ALN39756
augaaggcaauaauuguacuacucaugguaguaacauccaaugcagaucgaaucugcacugggauaacaucuucaaacucaccucauguggucaaaacagcuacucaaggggaggucaaugugacuggcgugauaccacugacaacaacaccaacaaaaucuuauuuugcaaaucucaaaggaacaaggaccagagggaaacuaugcccggacugucucaacuguacagaucuggauguggccuugggcaggccaauguguguggggaccacaccuucugcuaaagcuucaauacuccaugaggucagaccuguuacauccgggugcuuuccuauaaugcacgacagaacaaaaaucaggcaacuacccaaucuucucagaggauaugaaaagaucagguuaucaacccaaaacguuaucgaugcagaaaaagcaccaggaggacccuacagacuuggaaccucaggaucuugcccuaacgcuaccaguaaaaucggauuuuuugcaacaauggcuugggcugucccaaaggacaacuacaaaaaugcaacgaacccacaaacaguggaaguaccauacauuuguacagaaggggaagaccaaauuacuguuuggggguuccauucggauaacaaaacccaaaugaagagccucuauggagacucaaauccucaaaaguucaccucaucugcuaauggaguaaccacacauuauguuucucagauuggcgacuucccagaucaaacagaagacggaggacuaccacaaagcggcagaauuguuguugauuacaugaugcaaaaaccugggaaaacaggaacaauugucuaucaaagggguguuuuguugccucaaaagguguggugcgcgaguggcaggagcaaaguaauaaaagggucauugccuuuaauuggugaagcagauugccuucaugaagaauacgguggauuaaacaaaagcaagccuuacuacacaggaaaacaugcaaaagccauaggaaauugcccaauauggguaaaaaccccuuugaagcuugccaauggaaccaaauauagaccuccugcaaaacuauugaaggaaagggguuucuucggagcuauugcugguuuccuagaaggaggaugggaaggaaugauugcagguuggcacggauacacaucucacggagcacauggaguggcaguggcggcagaccuuaagaguacacaagaagcuauaaauaagauaacaaaaaaucucaauucuuugagugaacuagaaguaaagaaccuucaaagacuaaguggugccauggaugaacuccacaacgaaauacucgagcuggaugaaaaaguggaugaucucagagcugacacuauaagcucacaaauagaacuugcagucuugcuuuccaacgaaggaauaauaaacagugaagacgagcaucuauuggcacuugagagaaaacuaaagaaaaugcugggucccucugcuguagacauaggaaacggaugcuucgaaaccaaacacaaaugcaaccagaccugcuuagacaggauagcugcuggcaccuuuaauguaggagaauuuucucuccccacuuuugauucauugaacauuacugcugcaucuuuaaaugaugauggauuggauaaccauacuauacugcucuauuacucaacugcugcuucuaguuuggcuguaacauuaaugcuagccauuuuuauuguuuauauggucuccagagacaacguuucaugcuccaucugucuauaa

SEQ ID NO: 60490 - RNA, 1758 nt, Artificial Sequence; identical to SEQ ID NO: 60487
  derived and/or modified CDS sequence (wt) from hemagglutinin__InfluenzaB__ALN39757

SEQ ID NO: 60491 - RNA, 1755 nt, Artificial Sequence
  derived and/or modified CDS sequence (wt) from hemagglutinin__InfluenzaB__ALN39758
augaaggcaauaauuguacuacucaugguaguaacauccaaugcagaucgaaucugcacugggauaacaucuucaaacucaccucauguggucaaaacagcuacucaaggggaggucaaugugacuggcgugauaccacugacaacaacaccaacaaaaucuuauuuugcaaaucucaaaggaacaaggaccagagggaaacuaugcccggacugucucaacuguacagaucuggauguggccuugggcaggccaauguguguggggaccacaccuucugcuaaagcuucaauacuccaugaggucagaccuguuacauccgggugcuuuccuauaaugcacgacagaacaaaaaucaggcaacuacccaaucuucucagaggauaugaaaagaucagguuaucaacccaaaacguuaucgaugcagaaaaagcaccaggaggacccuacagacuuggaaccucaggaucuugcccuaacgcuaccaguaaaaucggauuuuuugcaacaauggcuugggcugucccaaaggacaacuacaaaaaugcaacgaacccacaaacaguggaaguaccauacauuuguacagaaggggaagaccaaauuacuguuuggggguuccauucggauaacaaaacccaaaugaagagccucuauggagacucaaauccucaaaaguucaccucaucugcuaauggaguaaccacacauuauguuucucagauuggcgacuucccagaucaaacagaagacggaggacuaccacaaagcggcagaauuguuguugauuacaugaugcaaaaaccugggaaaacaggaacaauugucuaucaaagggguguuuuguugccucaaaagguguggugcgcgaguggcaggagcaaaguaauaaaagggucauugccuuuaauuggugaagcagauugccuucaugaagaauacgguggauuaaacaaaaguaagccuuacuacacaggaaaacaugcaaaagccauaggaaauugcccaauauggguaaaaacaccuuugaagcuugccaaugggaccaaauauagaccuccugcaaaacuauugaaggaaagggguuucuucggagcuauugcugguuuccuagaaggaggaugggaaggaaugauugcagguuggcacggauacacaucucauggagcacacggaguggcaguggcggcagaccuuaagaguacacaagaagcuauaaauaagauaacaaaaaaucucaauucuuugagugaacuagaaguaaagaaccuucaaagacuaaguggugccauggaugaacuccacaacgaaauacucgagcuggaugaaaagguggaugaucucagagcugacacuauaagcucacaaauagaacuugcagucuugcuuuccaacgaaggaauaauaaacagugaagacgagcaucuauuggcacuugagagaaaacuaaagaaaaugcugggucccucugcuguagacauaggaaacggaugcuucgaaaccaaacacaaaugcaaccagaccugcuuagacaggauagcugcuggcaccuuuaaugcaggagaauuuucucuccccacuuuugauucauugaacauuacugcugcaucuuuaaaugaugauggauuggauaaccauacuauacugcucuauuacucaacugcugcuucuaguuuggcuguaacauuaaugcuagcuauuuuuauuguuuauauggucuccagagacaacguuucaugcuccaucugucuauaa

SEQ ID NO: 60492 - RNA, 1755 nt, Artificial Sequence
  derived and/or modified CDS sequence (wt) from hemagglutinin__InfluenzaB__ALN39759
augaagacaauaauuguacuacucaugguaguaacauccaaugcagaucgaaucugcacugggauaacaucuucaaacucaccucauguggucaaaacagcuacucaaggggaggucaaugugacuggcgugauaccacugacaacaacaccaacaaaaucuuauuuugcaaaucucaaaggaacaaggaccagagggaaacuaugcccggacugucucaacuguacagaucuggauguggccuugggcaggccaauguguguggggaccacaccuucugcuaaagcuucaauacuccaugaggucagaccuguuacauccgggugcuuuccuauaaugcacgacagaacaaaaaucaggcaacuacccaaucuucucagaggauaugaaaagaucagguuaucaacccaaaacguuaucgaugcagaaaaagcaccaggaggacccuacagacuuggaaccucaggaucuugcccuaacgcuaccaguaaaaucggauuuuuugcaacaauggcuugggcugucccaaaggacaacuacaaaaaugcaacgaacccacaaacaguggaaguaccauacauuuguacagaaggggaagaccaaauuacuguuuggggguuccauucggauaacaaaacccaaaugaagagccucuauggagacucaaauccucaaaaguucaccucaucugcuaauggaguaaccacacauuauguuucucagauuggcgacuucccagaucaaacagaagacggaggacuaccacaaagcggcagaauuguuguugauuacaugaugcaaaaaccugggaaaacaggaacaauugucuaucaaagggguguuuuguugccucaaaagguguggugcgcgaguggcaggagcaaaguaauaaaagggucauugccuuuaauuggugaagcagauugccuucaugaagaauacgguggauuaaacaaaagcaagccuuacuacacaggaaaacaugcaaaagccauaggaaauugcccaauauggguaaaaacaccuuugaagcuugccaauggaaccaaauauagaccuccugcaaaacuauugaaggaaagggguuucuucggagcuauugcugguuuccuagaaggaggaugggaaggaaugauugcagguuggcacggauacacaucucacggagcacauggaguggcaguggcggcagaccuuaagaguacacaagaagcuauaaauaagauaacaaaaaaucucaauucuuugagugaacuagaaguaaagaaccuucaaagacuaaguggugcuauggaugaacuccacaacgaaauacucgagcuggaugaaaaaguggaugaucucagagcugacacuauaagcucacaaauagaacuugcagucuugcuuuccaacgaaggaauaauaaacagugaagacgagcaucuauuggcacuugagagaaaacuaaagaaaaugcugggucccucugcuguagacauaggaaacggaugcuucgaaaccaaacacaaaugcaaccagaccugcuuagacaggauagcugcuggcaccuuuaaugcaggagaauuuucucuccccacuuuugauucauugaacauuacugcugcaucuuuaaaugaugauggauuggauaaccauacuauacugcucuauuacucaacugcugcuucuaguuuggcuguaacauuaaugcuagccauuuuuauuguuuauauggucuccagagacaacguuucaugcuccaucugucuauaa

SEQ ID NO: 60493 - RNA, 1758 nt, Artificial Sequence
  derived and/or modified CDS sequence (wt) from hemagglutinin__InfluenzaB__ALN39760
augaaggcaauaauuguacuacucaugguaguaacauccaaugcagaucgaaucugcacugggauaacaucgucaaacucaccacaugucgucaaaacugcuacucaaggggaggucaaugugaccgguguaauaccacugacaacaacacccaccaaaucucauuuugcaaaucucaaaggaacagaaaccagggggaaacuaugcccaaaaugccucaacugcacagaucuggauguagccuugggcagaccaaaaugcacagggaaaauacccucggcaaggguuucaauacuccaugaagucagaccuguuacaucugggugcuuuccuauaaugcacgauagaacaaaaauuagacagcugccuaaccuucuccgaggauacgaacauaucagguuaucaacucacaacguuaucaaugcagaagaugcaccaggaggacccuacaaaauuggaaccucagggucuugcccuaacauuaccaauggaaacggauucuucgcaacaauggcuugggccgucccaaaaaacgacaaaaacaaaacagcaacaaauccauuaacaauagaaguaccauacauuuguacagaaggagaagaccaaauuaccguuuggggguuccacucugacaacgagacccaaauggcaaagcucuauggggacucaaagccccagaaguucaccucaucugccaacggagugaccacacauuacguuucacagauugguggcuucccaaaucaaacagaagacggaggacuaccacaaagugguagaauuguuguugauuacauggugcaaaaaucuggaaaaacaggaacaauuaccuaucaaagagguauuuuauugccucaaaagguguggugcgcaaguggcaggagcaagguaauaaaaggauccuugccuuuaauuggagaagcagauugccuccaugaaaaauacgguggauuaaacaaaagcaagccuuacuacacaggggaacaugcaaaggccauaggaaauugcccaauaugggugaaaacacccuugaagcuggccaauggaaccaaauauagaccuccugcaaaacuguuaaaggaaagggguuucuucggagcuauugcugguuucuuagagggaggaugggaaggaaugauugcagguuggcacggauacacaucccauggagcacauggaguagcgguggcagcugaccuuaagagcacucaagaggccauaaacaagauaacaaaaaaucucaacucuuugagugaguuggaaguaaagaaucuucaaagacuaagcggugccauggaugaacuccacaacgaaauacuagaacuagaugagaaaguggaugaucucagagcugauacaauaagcucacaaauagaacucgcaguccugcuuuccaaugaaggaauaauaaacagugaagaugaacaucucuuggcgcuugaaagaaagcugaagaaaaugcugggccccucugcuguagagauagggaauggaugcuuugaaaccaaacacaagugcaaccagaccugucucgacagaauagcugcugguaccuuugaugcaggagaauuuucucuccccaccuuugauucacugaauauuacugcugcaucuuuaaaugacgauggauuggauaaucauacuauacugcuuuacuacucaacugcugccuccaguuuggcuguaacacugaugauagcuaucuuuguuguuuauauggucuccagagacaauguuucuugcuccaucugucuauaa

SEQ ID NO: 60494 - RNA, 1755 nt, Artificial Sequence; identical to SEQ ID NO: 60439
  derived and/or modified CDS sequence (wt) from hemagglutinin__InfluenzaB__ALN39761

SEQ ID NO: 60495 - RNA, 1755 nt, Artificial Sequence
  derived and/or modified CDS sequence (wt) from hemagglutinin__InfluenzaB__ALN39762
augaaggcaauaauuguacuacucaugguaguaacauccaaugcagaucgaaucugcacugggauaacaucuucaaacucaccccauguggucaaaacagcuacucaaggggaggucaaugugacuggcgugauaccacugacaacaacaccaacaaaaucuuauuuugcaaaucucaaaggaacaaggaccagagggaaacuaugcccggacugucucaacuguacagaucuggauguggccuugggcaggccaauguguguggggaccacaccuucugcuaaagcuucaauacuccaugaggucagaccuguuacauccgggugcuuuccuauaaugcacgacagaacaaaaaucaggcaacuacccaaucuucucagaggauaugaaaagaucagguuaucaacccaaaacguuaucgaugcagaaaaagcaccaggaggacccuacagacuuggaaccucaggaucuugcccuaacgcuaccaguaaaaucggauuuuuugcaacaauggcuugggcugucccaaaggacaacuacaaaaaugcaacgaacccacaaacaguggaaguaccauacauuuguacagaaggggaagaccaaauuacuguuuggggguuccauucggauaacaaaacccaaaugaagagccucuauggagacucaaauccucaaaaguucaccucaucugcuaauggaguaaccacacauuauguuucucagauuggcgacuucccagaucaaacagaagacggaggacuaccacaaagcggcagaauuguuguugauuacaugaugcaaaaaccugggaaaacaggaacaauugucuaucaaagggguguuuuguugccucaaaagguguggugcgcgaguggcaggagcaaaguaauaaaagggucauugccuuuaauuggugaagcagauugccuucaugaagaauacgguggauuaaacaaaagcaagccuuacuacacaggaaaacaugcaaaagccauaggaaauugcccaauauggguaaaaacaccuuugaagcuugccaauggaaccaaauauagaccuccugcaaaacuauugaaggaaagggguuucuucggagcuauugcugguuuccuagaaggaggaugggaaggaaugauugcagguuggcacggauacacaucucacggagcacauggaguggcaguggcggcagaccuuaagaguacacaagaagcuauaaauaagauaacaaaaaaucucaauucuuugagugaacuagaaguaaagaaccuucaaagacuaaguggugccauggaugaacuccacaacgaaauacucgagcuagaugaaaaaguggaugaucucagagcugacacuauaagcucacaaauagaacuugcagucuugcuuuccaacgaaggaauaauaaacagugaagacgagcaucuauuggcacuugagagaaaacuaaagaaaaugcugggucccucugcuguagacauaggaaacggaugcuucgaaaccaaacacaaaugcaaccagaccugcuuagacaggauagcugcuggcaccuuuaaugcaggagaauuuucucuccccacuuuugauucauugaacauuacugcugcaucuuuaaaugaugauggauuggauaaccauacuauacugcucuauuacucaacugcugcuucuaguuuggcuguaacauuaaugcuagcuauuuuuauuguuuauauggucuccagagacaacguuucaugcuccaucugucuauaa

SEQ ID NO: 60496 - RNA, 1755 nt, Artificial Sequence; identical to SEQ ID NO: 60495
  derived and/or modified CDS sequence (wt) from hemagglutinin__InfluenzaB__ALN39763

SEQ ID NO: 60497 - RNA, 1758 nt, Artificial Sequence
  derived and/or modified CDS sequence (wt) from hemagglutinin__InfluenzaB__ALN39764
augaaggcaauaauuguacuacucaugguaguaacauccaaugcagaucgaaucugcacugggauaacaucgucaaacucaccacaugucgucaaaacugcuacucaaggggaggucaaugugaccgguguaauaccacugacaacaacacccaccaaaucucauuuugcaaaucucaaaggaacagaaaccagggggaaacuaugcccaaaaugccucaacugcacagaucuggauguagccuugggcagaccaaaaugcacagggaaaauacccucugcaaggguuucaauacuccaugaagucagaccuguuacaucugggugcuuuccuauaaugcacgauagaacaaaaauuagacagcugccuaaccuucuccgaggauacgaacaugucagguuaucaacucacaacguuaucaaugcagaagaugcaccaggaggacccuacaaaauuggaaccucagggucuugcccuaacauuaccaauggaaacggguucuucgcaacaauggcuugggccgucccaaaaaacgacaaaaacaaaacagcaacaaauccauuaacaauagaaguaccauacauuuguacagaaggagaagaccaaauuaccguuuggggguuccacucugacaacgagacccaaauggcaaagcucuauggggacucaaagccccagaaguucaccucaucugccaacggagugaccacacauuacguuucacagauugguggcuucccaaaucaaacagaagacggaggacuaccacaaagugguagaauuguuguugauuacauggugcaaaaaucuggaaaaacaggaacaauuaccuaucaaagagguauuuuauugccucaaaagguguggugcgcaaguggcaggagcaagguaauaaaaggauccuugccuuuaauuggagaagcagauugccuccaugaaaaauacgguggauuaaacaaaagcaagccuuacuacacaggggaacaugcaaaggccauaggaaauugcccaauaugggugaaaacacccuugaagcuggccaauggaaccaaauauagaccuccugcaaaacuauuaaaggaaagggguuucuucggagcuauugcugguuucuuagagggaggaugggaaggaaugauugcagguuggcacggauacacaucccauggggcacauggaguagcgguggcagcugaccuuaagagcacucaagaggccauaaacaagauaacaaaaaaucucaacucuuugagugagcuggaaguaaagaaucuucaaagacuaagcggugccauggaugaacuccacaacgaaauacuagaacuagaugagaaaguggaugaucucagagcugauacaauaagcucacaaauagaacucgcaguccugcuuuccaaugaaggaauaauaaacagugaagaugaacaucucuuggcgcuugaaagaaagcugaagaaaaugcugggccccucugcuguagagauagggaauggaugcuuugaaaccaaacacaagugcaaccagaccugucucgacagaauagcugcugguaccuuugaugcaggagaauuuucucuccccaccuuugauucacugaauauuacugcugcaucuuuaaaugacgauggauuggauaaucauacuauacugcuuuacuacucaacugcugccuccaguuuggcuguaacacugaugauagcuaucuuuguuguuuauauggucuccagagacaauguuucuugcuccauuugucuauaa

SEQ ID NO: 60498 - RNA, 1755 nt, Artificial Sequence
  derived and/or modified CDS sequence (wt) from hemagglutinin__InfluenzaB__ALN39765
augaaggcaauaauuguacuacucaugguaguaacauccaaugcagaucgaaucugcacugggauaacaucuucgaacucaccucauguggucaaaacagcuacucaaggggaggucaaugugacuggcgugauaccacugacaacaacaccaacaaaaucuuauuuugcaaaucucaaaggaacaaggaccagagggaaacuaugcccggacugucucaacuguacagaucuggauguggccuugggcaggccaauguguguggggaccacaccuucugcuaaagcuucaauacuccaugaggucagaccuguuacauccgggugcuuuccuauaaugcacgacagaacaaaaaucaggcaacuacccaaucuucucagaggauaugaaaagaucagguuaucaacccaaaacguuaucgaugcagaaaaagcaccaggaggacccuacagacuuggaaccucaggaucuugcccuaacgcuaccaguaaaaucggauuuuuugcaacaauggcuugggcugucccaaaggacaacuacaaaaaugcaacgaacccacaaacaguggaaguaccauacauuuguacagaaggggaagaccaaauuacuguuuggggguuccauucggauaacaaaacccaaaugaagagccucuauggagacucaaauccucaaaaguucaccucaucugcuaauggaguaaccacacauuauguuucucagauuggcgacuucccagaucaaacagaagacggaggacuaccacaaagcggcagaauuguuguugauuacaugaugcaaaaaccugggaaaacaggaacaauugucuaucaaagggguguuuuguugccucaaaagguguggugcgcgaguggcaggagcaaaguaauaaaagggucauugccuuuaauuggugaagcagauugccuucaugaagaauacgguggauuaaacaaaagcaagccuuacuacacaggaaaacaugcaaaagccauaggaaauugcccaauauggguaaaaacaccuuugaagcuugccaauggaaccaaauauagaccuccugcaaaacuauugaaggaaagggguuucuucggagcuauugcugguuuccuagaaggaggaugggaaggaaugauugcagguuggcacggauacacaucucacggagcacauggaguggcaguggcggcagaccuuaagaguacacaagaagcuauaaauaagauaacaaaaaaucucaauucuuugagugaacuagaaguaaauaaccuucaaagacuaaguggugccauggaugaacuccacaacgaaauacucgagcuggaugaaaaaguggaugaucucagagcugacacuauaagcucacaaauagaacuugcagucuugcuuuccaacgaaggaauaauaaacagugaagacgagcaucuauuggcacuugagagaaaacuaaagaaaaugcugggucccucugcuguagacauaggaaacggaugcuucgaaaccaaacacaaaugcaaccagaccugcuuagacaggauagcugcuggcaccuuuaaugcaggagaauuuucucuccccacuuuugauucauugaacauuacugcugcaucuuuaaaugaugauggauuggauaaccauacuauacugcucuauuacucaacugcugcuucuaguuuggcuguaacauuaaugcuagcccuuuuuauuguuuauauggucuccagagacaacguuucaugcuccauuugucuauaa

SEQ ID NO: 60499 - RNA, 1755 nt, Artificial Sequence
  derived and/or modified CDS sequence (wt) from hemagglutinin__InfluenzaB__ALN39766
augaaggcaauaauuguacuacucaugguaguaacauccaaugcagaucgaaucugcacugggauaacaucuucaaacucaccucauguggucaaaacagcuacucaaggggaggucaaugugacuggcgugauaccacugacaacaacaccaacaaaaucuuauuuugcaaaucucaaaggaacaaggaccagagggaaacuaugcccggacugucucaacuguacagaucuggauguggccuugggcaggccaauguguguggggaccacaccuucugcuaaagcuucaauacuccaugaggucagaccuguuacauccgggugcuuuccuauaaugcacgacagaacaaaaaucaggcaacuacccaaucuucucagaggauaugaaaagaucagguuaucaacccaaaacguuaucgaugcagaaaaagcaccaggaggacccuacagacuuggaaccucaggaucuugcccuaacgcuaccaguaaaaucggauuuuuugcaacaauggcuugggcugucccaaaggacaacuacaaaaaugcaacgaacccacaaacaguggaaguaccauacauuuguacagaaggggaagaccaaauuacuguuuggggguuccauucggauaacaaaacccaaaugaagagccucuauggagacucaaauccucaaaaguucaccucaucugcuaauggaguaaccacacauuauguuucucagauuggcgacuucccagaucaaacagaagacggaggacuaccacaaagcggcagaauuguuguugauuacauggugcaaaaaccugggaaaacaggaacaauugucuaucaaagggguguuuuguugccucaaaagguguggugcgcgaguggcaggagcaaaguaauaaaagggucauugccuuuaauuggugaagcagauugccuucaugaagaauacgguggauuaaacaaaagcaagccuuacuacacaggaaaacaugcaaaagccauaggaaauugcccaauauggguaaaaacaccuuugaagcuugccaauggaaccaaauauagaccuccugcaaaacuauugaaggaaagggguuucuucggagcuauugcugguuuccuagaaggaggaugggaaggaaugauugcagguuggcacggauacacaucucacggagcacauggaguggcaguggcggcagaccuuaagaguacacaagaagcuauaaauaagauaacaaaaaaucucaauucuuugagugaacuagaaguaaagaaccuucaaagacuaaguggugccauggaugaacuccacaacgaaauacucgagcuggaugaaaaaguggaugaucucagagcugacacuauaagcucacaaauagaacuugcagucuugcuuuccaacgaaggaauaauaaacagugaagaugagcaucuauuggcacuugagagaaaacuaaagaaaaugcugggucccucugcuguagacauaggaaacggaugcuucgaaaccaaacacaaaugcaaccagaccugcuuagacaggauagcugcuggcaccuuuaaugcaggagaauuuucucuccccacuuuugauucauugaacauuacugcugcaucuuuaaaugaugauggauuggauaaccauacuauacugcucuauuacucaacugcugcuucuaguuuggcuguaacauuaaugcuagcuauuuuuauuguuuauauggucuccagagacaacguuucaugcuccaucugucuauaa

SEQ ID NO: 60500 - RNA, 1755 nt, Artificial Sequence
  derived and/or modified CDS sequence (wt) from hemagglutinin__InfluenzaB__ALN39767
augaaggcaauaauuguacuacucaugguaguaacauccaaugcagaucgaaucugcacugggauaacaucuucaaacucaccucauguggucaaaacagcuacucaaggggaggucaaugugacuggcgugauaccacugacaacaacaccaacaaaaucuuauuuugcaaaucucaaaggaacaaggaccagagggaaacuaugcccggacugucucaacuguacagaucuggauguggccuugggcaggccaauguguguggggaccacaccuucugcuaaagcuucaauacuccaugaggucagaccuguuacauccgggugcuuuccuauaaugcacgacagaacaaaaaucaggcaacuacccaaucuucucagaggauaugaaaagaucagguuaucaacccaaaacguuaucgaugcagaaaaagcaccaggaggacccuacagacuuggaaccucaggaucuugcccuaacgcuacuaguaaaaucggauuuuuugcaacaauggcuugggcugucccaaaggacaacuacaaaaaugcaacgaacccacaaacaguggaaguaccauacauuuguacagaaggggaagaccaaauuacuguuuggggguuccauucggauaacaaaacccaaaugaagagccucuauggagacucaaauccucaaaaguucaccucaucugcuaauggaguaaccacacauuauguuucucagauuggcgacuucccagaucaaacagaagacggaggacuaccacaaagcggcagaauuguuguugauuacaugaugcaaaaaccugggaaaacaggaacaauugucuaucaaagggguguuuuguugccucaaaagguguggugcgcgaguggcaggagcaaaguaauaaaagggucauugccuuuaauuggugaagcagauugccuucaugaagaauacgguggauuaaacaaaagcaagccuuacuacacaggaaaacaugcaaaagccauaggaaauugcccaauauggguaaaaacaccuuugaagcuugccaauggaaccaaauauagaccuccugcaaaacuauugaaggaaagggguuucuucggagcuauugcugguuuccuagaaggaggaugggaaggaaugauugcagguuggcacggauacacaucucacggagcacauggaguggcaguggcggcagaccuuaagaguacacaagaagcuauaaauaagauaacaaaaaaucucaauucuuugagugaacuagaaguaaagaaccuucaaagacuaaguggugccauggaugaacuccacaacgaaauacucgagcuggaugaaaaaguggaugaucucagagcugacacuauaagcucacaaauagaacuugcagucuugcuuuccaacgaaggaauaauaaacagugaagacgagcaucuauuggcacuugagagaaaacuaaagaaaaugcugggucccucugcuguagacauaggaaacggaugcuucgaaaccaaacacaaaugcaaccagaccugcuuagacaggauagcugcuggcaccuuuaaugcaggagaauuuucucuccccacuuuugauucauugaacauuacugcugcaucuuuaaaugaugauggauuggacaaccauacuauacugcucuauuacucaacugcugcuucuaguuuggcugugacauuaaugcuagcuauuuuuauuguuuauauggucuccagagacaacguuucgugcuccaucugucuauaa

SEQ ID NO: 60501 - RNA, 1755 nt, Artificial Sequence
  derived and/or modified CDS sequence (wt) from hemagglutinin__InfluenzaB__ALN39768
augaaggcaauaauuguacuacucaugguaguaacauccaaugcagaucgaaucugcacugggauaacaucuucaaacucaccucauguggucaaaacagcuacucaaggggaggucaaugugacuggcgugauaccacugacaacaacaccaacaaaaucuuauuuugcaaaucucaaaggaacaaggaccagagggaaacuaugcccggacugucucaacuguacagaucuggauguggccuugggcaggccaauguguguggggaccacaccuucugcuaaagcuucaauacuccaugaggucagaccuguuacauccgggugcuuuccuauaaugcacgacagaacaaaaaucaggcaacuacccaaucuucucagaggauaugaaaagaucagguuaucaacccaaaacguuaucgaugcagaaaaagcaccaggaggacccuacagacuuggaaccucaggaucuugcccuaacgcuaccaguaaaaucggauuuuuugcaacaauggcuugggcugucccaaaggacaacuacaaaaaugcaacgaacccacaaacaguggaaguaccauacauuuguacagaaggggaagaccaaauuacuguuuggggguuccauucggauaacaaaacccaaaugaagagccucuauggagacucaaauccucaaaaguucaccucaucugcuaauggaguaaccacacauuauguuucucagauuggcgacuucccagaucaaacagaagacggaggacuaccacaaagcggcagaauuguuguugauuacauggugcaaaaaccugggaaaacaggaacaauugucuaucaaagggguguuuuguugccucaaaagguguggugcgcgaguggcaggagcaaaguaauaaaagggucauugccuuuaauuggugaagcagauugccuucaugaagaauacgguggauuaaacaaaagcaagccuuacuacacaggaaaacaugcaaaagccauaggaaauugcccaauauggguaaaaacaccuuugaagcuugccaauggaaccaaauauagaccuccugcaaaacuauugaaggaaagggguuucuucggagcuauugcugguuuccuagaaggaggaugggaaggaaugauugcagguuggcacggauacacaucucacggagcacauggaguggcaguggcggcagaccuuaagaguacacaagaagcuauaaauaagauaacaaaaaaucucaauucuuugagugaacuagaaguaaagaaccuucaaagacuaaguggugccauggaugaacuccacaacgaaauacucgagcuggaugaaaaaguggaugaucucagagcugacacuauaagcucacaaauagaacuugcagucuugcuuuccaacgaaggaauaauaaacagugaagaugagcaucuauuggcacuugagagaaaacuaaagaaaaugcugggucccucugcuguagacauaggaaacggaugcuucgaaaccaaacacaaaugcaaccagaccugcuuagacaggauagcugcuggcaccuuuaaugcaggagaauuuucucuccccacuuuugauucauugaacauuacugcugcaucuuuaaaugaugauggauuggauaaccauacuauacugcucuauuacucaacugcugcuucuaguuuggcuguaacauuaaugcuagccauuuuuauuguuuauauggucuccagagacaacguuucaugcuccaucugucuauaa

SEQ ID NO: 60502 - RNA, 1755 nt, Artificial Sequence
  derived and/or modified CDS sequence (wt) from hemagglutinin__InfluenzaB__ALN39769
augaaggcaauaauuguacuacucaugguaguaacauccaaugcagaucgaaucugcacugggauaacaucuucaaacucaccucauguggucaaaacagcuacucaaggggaggucaaugugacuggcgugauaccacugacaacaacaccaacaaaaucuuauuuugcaaaucucaaaggaacaaggaccagagggaaacuaugcccggacugucucaacuguacagaucuggauguggccuugggcaggccaauguguguggggaccacaccuucugcuaaagcuucaauacuccaugaggucagaccuguuacauccgggugcuuuccuauaaugcacggcagaacaaaaaucaggcaacuacccaaucuucucagaggauaugaaaagaucagguuaucaacccaaaacguuaucgaugcagaaaaagcaccaggaggacccuacagacuuggaaccucaggaucuugcccuaacgcuaccaguaaaaucggauuuuuugcaacaauggcuugggcugucccaaaggacaacuacaaaaaugcaacgaacccacaaacaguggaaguaccauacauuuguacagaaggggaagaccaaauuacuguuuggggguuccauucggauaacaaaacccaaaugaagagccucuauggagacucaaauccucaaaaguucaccucaucugcuaauggaguaaccacacauuauguuucucagauuggcgacuucccagaucaaacagaagacggaggacuaccacaaagcggcagaauuguuguugauuacaugaugcaaaaaccugggaaaacaggaacaauugucuaucaaagggguguuuuguugccucaaaagguguggugcgcgaguggcaggagcaaaguaauaaaagggucauugccuuuaauuggugaagcagauugccuucaugaagaauacgguggauuaaacaaaagcaagccuuacuacacaggaaaacaugcaaaagccauaggaaauugcccaauauggguaaaaaccccuuugaagcuugccaauggaaccaaauauagaccuccugcaaaacuauugaaggaaagggguuucuucggagcuauugcugguuuccuagaaggaggaugggaaggaaugauugcagguuggcacggauacacaucucacggagcacauggaguggcaguggcggcagaccuuaagaguacacaagaagcuauaaauaagauaacaaaaaaucucaauucuuugagugaacuagaaguaaagaaccuucaaagacuaaguggugccauggaugaacuccacaacgaaauacucgagcuggaugaaaaaguggaugaucucagagcugacacuauaagcucacaaauagaacuugcagucuugcuuuccaacgaaggaauaauaaacagugaagacgagcaucuauuggcacuugagagaaaacuaaagaaaaugcuggguccaucugcuguagacauaggaaacggaugcuucgaaaccaaacacaaaugcaaccagaccugcuuagacaggauagcugcuggcaccuuuaaugcaggagaauuuucucuccccacuuuugauucauugaacauuacugcugcaucuuuaaaugaugauggauuggauaaccauacuauacugcucuauuacucaacugcugcuucuaguuuggcuguaacauuaaugcuagccauuuuuauuguuuauauggucuccagagacaacguuucaugcuccaucugucuauaa

SEQ ID NO: 60503 - RNA, 1755 nt, Artificial Sequence; identical to SEQ ID NO: 60471
  derived and/or modified CDS sequence (wt) from hemagglutinin__InfluenzaB__ALN39770

SEQ ID NO: 60504 - RNA, 1755 nt, Artificial Sequence
  derived and/or modified CDS sequence (wt) from hemagglutinin__InfluenzaB__ALN39771
augaaggcaauaauuguacuacucaugguaguaacauccaaugcagaucgaaucugcacugggauaacaucuucaaacucaccucauguggucaaaacagccacucaaggggaggucaaugugacuggcgugauaccacugacaacaacaccaacaaaaucuuauuuugcaaaucucaaaggaacaaggaccagagggaaacuaugcccggacugucucaacuguacagaucuggauguggccuugggcaggccaauguguguggggaccacaccuucugcuaaagcuucaauacuccaugaggucagaccuguuacauccgggugcuuuccuauaaugcacgacagaacaaaaaucaggcaacuacccaaucuucucagaggauaugaaaagaucagguuaucaacccaaaacguuaucgaugcagaaaaagcaccaggaggacccuacagacuuggaaccucaggaucuugcccuaacgcuaccaguaaaaucggauuuuuugcaacaauggcuugggcugucccaaaggacaacuacaaaaaugcaacgaacccacaaacaguggaaguaccauacauuuguacagaaggggaagaccaaauuacuguuuggggguuccauucggauaacaaaacccaaaugaagagccucuauggagacucaaauccucaaaaguucaccucaucugcuaauggaguaaccacacauuauguuucucagauuggcgacuucccagaucaaacagaagacggaggacuaccacaaagcggcagaauuguuguugauuacaugaugcaaaaaccugggaaaacaggaacaauugucuaucaaagggguguuuuguugccucaaaagguguggugcgcgaguggcaggagcaaaguaauaaaagggucauugccuuuaauuggugaagcagauugccuucaugaagaauacgguggauuaaacaaaagcaagccuuacuacacaggaaaacaugcaaaagccauaggaaauugcccaauauggguaaaaacaccuuugaagcuugccaauggaaccaaauauagaccuccugcaaaacuauugaaggaaagggguuucuucggagcuauugcugguuuccuagaaggaggaugggaaggaaugauugcagguuggcacggauacacaucucacggagcacauggaguggcaguggcggcagaccuuaagaguacacaagaagcuauaaauaagauaacaaaaaaucucaauucuuugagugaacuagaaguaaagaaccuucaaagacuaaguggugccauggaugaacuccacaacgaaauacucgagcuggaugaaaaaguggaugaucucagagcugacacuauaagcucacaaauagaacuugcagucuugcuuuccaacgaaggaauaauaaacagugaagacgagcaucuauuagcacuugagagaaaacuaaagaaaaugcugggucccucugcuguagacauaggaaacggaugcuucgaaaccaaacacaaaugcaaccagaccugcuuagacaggauagcugcuggcaccuuuaaugcaggagaauuuucucuccccacuuuugauucauugaacauuacugcugcaucuuuaaaugaugauggauuggauaaccauacuauacugcucuauuacucaacugcugcuucuaguuuggcuguaacauuaaugcuagcccuuuuuauuguuuauauggucuccagagacaacguuucaugcuccaucugucuauaa

SEQ ID NO: 60505 - RNA, 1755 nt, Artificial Sequence
  derived and/or modified CDS sequence (wt) from hemagglutinin__InfluenzaB__ALN39773
augaaggcaauaauuguacuacucaugguaguaacauccaaugcagaucgaaucugcacugggauaacaucuucaaacucaccucauguggucaaaacagcuacucaaggggaggucaaugugacuggcgugauaccacugacaacaacaccaacaaaaucuuauuuugcaaaucucaaaggaacaaggaccagagggaaacuaugcccggacugucucaacuguacagaucuggauguggccuugggcaggccaauguguguggggaccacaccuucugcuaaagcuucaauacuccaugaggucagaccuguuacauccgggugcuuuccuauaaugcacgacagaacaaaaaucaggcaacuacccaaucuucucagaggauaugaaaagaucagguuaucaacccaaaacguuaucgaugcagaaaaagcaccaggaggacccuacagacuuggaaccucaggaucuugcccuaacgcuaccaguaaaaucggauuuuuugcaacaauggcuugggcugucccaaaggacaacuacaaaaaugcaacgaacccacaaacaguggaaguaccauacauuuguacagaaggggaagaccaaauuacuguuuggggguuccauucggauaacaaaacccaaaugaagagccucuauggagacucaaauccucaaaaguucaccucaucugcuaauggaguaaccacacauuauguuucucagauuggcgacuucccagaucaaacagaagacggaggacuaccacaaagcggcagaauuguuguugauuacaugaugcaaaaaccugggaaaacaggaacaauugucuaucaaagggguguuuuguugccucaaaagguguggugcgcgaguggcaggagcaaaguaauaaaagggucauugccuuuaauuggugaagcagauugccuucaugaagaauacgguggauuaaacaaaaguaagccuuacuacacaggaaaacaugcaaaagccauaggaaauugcccaauauggguaaaaacaccuuugaagcuugccaaugggaccaaauauagaccuccugcaaaacuauugaaggaaagggguuucuucggagcuauugcugguuuccuagaaggaggaugggaaggaaugauugcagguuggcacggauacacaucucacggagcacauggaguggcaguggcggcagaccuuaagaguacacaagaagcuauaaauaagauaacaaaaaaucucaauucuuugagugaacuagaaguaaagaaccuucaaagacuaaguggugccauggaugaacuccacaacgaaauacucgagcuggaugaaaagguggaugaucucagagcugacacuauaagcucacaaauagaacuugcagucuugcuuuccaacgaaggaauaauaaacagugaagacgagcaucuauuggcacuugagagaaaacuaaagaaaaugcugggucccucugcuguagacauaggaaacggaugcuucgaaaccaaacacaaaugcaaccagaccugcuuagacaggauagcugcuggcaccuuuaaugcaggagaauuuucucuccccacuuuugauucauugaacauuacugcugcaucuuuaaaugaugauggauuggauaaccauacuauacugcucuauuacucaacugcugcuucuaguuuggcuguaacauuaaugcuagcuauuuuuauuguuuauauggucuccagagacaacguuucaugcuccaucugucuauaa

SEQ ID NO: 60506 - RNA, 1755 nt, Artificial Sequence; identical to SEQ ID NO: 60505
  derived and/or modified CDS sequence (wt) from hemagglutinin__InfluenzaB__ALN39774

SEQ ID NO: 60507 - RNA, 1758 nt, Artificial Sequence
  derived and/or modified CDS sequence (wt) from hemagglutinin__InfluenzaB__ALN39775
augcaggcaauaauuguacuacucaugguaguaacauccaaugcagaucgaaucugcacugggauaacaucgucaaacucaccacaugucgucaaaacugcuacucaaggggaggucaaugugaccgguguaauaccacugacaacaacacccaccaaaucucauuuugcaaaucucaaaggaacagaaaccagggggaaacuaugcccaaaaugccucaacugcacagaucuggauguagccuugggcagaccaaaaugcacagggaaaauacccucggcaaggguuucaauacuccaugaagucagaccuguuacaucugggugcuuuccuauaaugcacgauagaacaaaaauuagacagcugccuaaccuucuccgaggauacgaacauaucagguuaucaacucacaacguuaucaaugcagaagaugcaccaggaggacccuacaaaauuggaaccucagggucuugcccuaacauuaccaauggaaacggauucuucgcaacaauggcuugggccgucccaaaaaacgacaaaaacaaaacagcaacaaauccauuaacaauagaaguaccauacauuuguacagaaggagaagaccaaauuaccguuuggggguuccacucugacaacgagacccaaauggcaaagcucuauggggacucaaagccccagaaguucaccucaucugccaacggagugaccacacauuacguuucacagauugguggcuucccaaaucaaacagaagacggaggacuaccacaaagugguagaauuguuauugauuacauggugcaaaaaucuggaaaaacaggaacaauuaccuaucaaagagguauucuauugccucaaaagguguggugcguaaguggcaggagcaagguaauaaaaggauccuugccuuuaauuggagaagcagauugccuccaugaaaaauacgguggauuaaacaaaagcaagccguacuacacaggggaacaugcaaaggccguaggaaauugcccaauaugggugaaaacaccuuugaagcuggccaauggaaccaaauauagaccuccugcaaaacuauuaaaggaaagggguuucuucggagcuauugcugguuucuuagagggaggaugggaaggaaugauugcagguuggcacggauacacaucccauggggcacauggaguagcgguggcagcugaccuuaagagcacucaagaggccauaaacaagauaacaaaaaaucucaacucuuugagugagcuggaaguaaagaaucuucaaagacuaagcggugccauggaugaacuccacaacgaaauacuagaacuagaugagaaaguggaugaucucagagcugauacaauaagcucacaaauagaacucgcaguccugcuuuccaaugaaggaauaauaaacagugaagaugaacaucucuuggcgcuugaaagaaagcugaagaaaaugcugggccccucugcuguagagauagggaauggaugcuuugaaaccaaacacaagugcaaccagaccugucucgacagaauagcugcugguaccuuugaugcaggagaauuuucucuccccaccuuugauucacugaauauuacugcugcaucuuuaaaugacgauggauuggauaaucauacuauacugcuuuacuacucaacugcugccuccaguuuggcuguaacacugaugauagcuaucuuuguuguuuauauggucuccagagacaauguuucuugcuccaucugucuauaa

SEQ ID NO: 60508 - RNA, 1755 nt, Artificial Sequence
  derived and/or modified CDS sequence (wt) from hemagglutinin__InfluenzaB__ALN39776
augaaggcaauaauuauacuacucaugguaguaacguccaaugcagaucgaaucugcacugggauaacaucuucaaacucaccucauguggucaaaacagcuacucaaggggaggucaaugugacuggcgugauaccacugacaacaacaccaacaaaaucuuauuuugcaaaucucaaaggaacaaggaccagagggaaacuaugcccggacugucucaacuguacagaucuggauguggccuugggcaggccaauguguguggggaccacaccuucugcuaaagcuucaauacuccaugaggucagaccuguuacauccgggugcuuuccuauaaugcacgacagaacaaaaaucaggcaacuacccaaucuucucagaggauaugaaaagaucagguuaucaacccaaaacguuaucgaugcagaaaaagcaccaggaggacccuacagacuuggaaccucaggaucuugcccuaacgcuaccaguaaaaucggauuuuuugcaacaauggcuugggcugucccaaaggacaacuacaaaaaugcaacgaacccacaaacaguggaaguaccauacauuuguacagaaggggaagaccaaauuacuguuuggggguuccauucggauaacaaaacccaaaugaagagccucuauggagacucaaauccucaaaaguucaccucaucugcuaauggaguaaccacacauuauguuucucagauuggcgacuucccagaucaaacagaagacggaggacuaccacaaagcggcagaauuguuguugauuacaugaugcaaaaaccugggaaaacaggaacaauugucuaucaaagggguguuuuguugccucaaaagguguggugcgcgaguggcaggagcaaaguaauaaaagggucauugccuuuaauuggugaagcagauugccuucaugaagaauacgguggauuaaacaaaagcaagccuuacuacacaggaaaacaugcaaaagccauaggaaauugcccaauauggguaaaaacaccuuugaagcuugccaauggaaccaaauauagaccuccugcaaaacuauugaaggaaagggguuucuucggagcuauugcugguuuccuagaaggaggaugggaaggaaugauugcagguuggcacggauacacaucucacggagcacacggaguggcaguggcggcagaccuuaagaguacacaagaagcuauaaauaagauaacaaaaaaucucaacucuuugagugaacuagaaguaaagaaccuucaaagacuaaguggugccauggaugaacuccacaacgaaauacucgagcuggaugaaaaaguggaugaucucagagcugacacuauaagcucacaaauagaacuugcagucuugcuuuccaacgaaggaauaauaaacagugaagacgagcaucuauuggcacucgagagaaaacuaaagaaaaugcugggucccucugcuguagacauaggaaacggaugcuucgaaaccaaacacaaaugcaaccagaccugcuuagacaggauagcugcuggcaccuuuaaugcaggagaauuuucucuccccacuuuugauucauugaacauuacugcugcaucuuuaaaugaugauggauuggauaaccauacuauacugcucuauuacucaacugcugcuucuaguuuggcuguaacauuaaugcuagcuauuuuuauuguuuauauggucuccagagacaacguuucaugcuccaucugucuauaa

SEQ ID NO: 60509 - RNA, 1755 nt, Artificial Sequence
  derived and/or modified CDS sequence (wt) from hemagglutinin__InfluenzaB__ALN39778
augaaggcaauaauuguacuacucaugguaguaacauccaaugcagaucgaaucugcacugggauaacaucuucaaacucaccucauguggucaaaacagcuacucaaggggaggucaaugugacuggcgugauaccacugacaacaacaccaacaaaaucuuauuuugcaaaucucaaaggaacaaggaccagagggaaacuaugcccggacugucucaacuguacagaucuggauguggccuugggcaggccaauguguguggggaccacaccuucugcuaaagcuucaauacuccaugaggucagaccugucacauccgggugcuuuccuauaaugcacgacagaacaaaaaucaggcaacuacccaaucuucucagaggauaugaaaagaucagguuaucaacucaaaacguuaucgaugcagaaaaagcaccaggaggacccuacagacuuggaaccucaggaucuugcccuaacgcuaccaguaaaaucggauuuuuugcaacaauggcuugggcugucccaaaggacaacuacaaaaaugcaacgaacccacaaacaguggaaguaccauacauuuguacagaaggggaagaccaaauuacuguuuggggguuccauucggauaacaaaacccaaaugaagagccucuauggagacucaaauccucaaaaguucaccucaucugcuaauggaguaaccacacauuauguuucucagauuggcgacuucccagaucaaacagaagacggaggacuaccacaaagcggcagaauuguuguugauuacauggugcaaaaaccugggaaaacaggaacaauugucuaucaaagggguguuuuguugccucaaaagguguggugcgcgaguggcaggagcaaaguaauaaaagggucauugccuuuaauuggugaagcagauugccuucaugaagaauacgguggauuaaacaaaagcaagccuuacuacacaggaaaacaugcaaaagccauaggaaauugcccaauauggguaaaaacaccuuugaagcuugccaauggaaccaaauauagaccuccugcaaaacuauugaaggaaagggguuucuucggagcuauugcugguuuccuagaaggaggaugggaaggaaugauugcagguuggcacggauacacaucucacggagcacauggaguggcaguggcggcagaccuuaagaguacacaagaagcuauaaauaagauaacaaaaaaucucaauucuuugagugaacuagaaguaaagaaccuucaaagacuaaguggugccauggaugaacuccacaacgaaauacucgagcuggaugaaaaaguggaugaucucagagcugacaccauaagcucacaaauagaacuugcagucuugcuuuccaacgaaggaauaauaaacagugaagacgagcaucuauuggcacuugagagaaaacuaaagaaaaugcugggucccucugcuguagacauaggaaacggaugcuucgaaaccaaacacaaaugcaaccagaccugcuuagacaggauagcugcuggcaccuucaaugcaggagaauuuucucuccccacuuuugauucauugaacauuacugcugcaucuuuaaaugaugauggauuggauaaccauacuauacugcucuauuacucaacugcugcuucuaguuuggcuguaacauuaaugcuagcuauuuuuauuguuuauauggucuccagagacaacguuucaugcuccaucugucuauaa

SEQ ID NO: 60510 - RNA, 1758 nt, Artificial Sequence
  derived and/or modified CDS sequence (wt) from hemagglutinin__InfluenzaB__ALN39779
augaaggcaauaauuguacuacucaugguaguaacauccaaugcagaucgaaucugcacugggauaacaucgucaaacucaccacaugucgucaaaacugcuacucaaggggaggucaaugugaccgguguaauaccacugacaacaacacccaccaaaucucauuuugcaaaucucaaaggaacagaaaccagggggaaacuaugcccaaaaugccucaacugcacagaucuggauguagccuugggcagaccaaaaugcacagggaaaauacccucugcaaggguuucaauacuccaugaagucagaccuguuacaucugggugcuuuccuauaaugcacgauagaacaaaaauuagacagcugccuaaccuucuccgaggauacgaacaugucagguuaucaacucacaacguuaucaaugcagaagaugcaccaggaggacccuacaaaauuggaaccucagggucuugcccuaacauuaccaauggaaacggauucuucgcaacaauggcuugggccgucccaaaaaacgacaaaaacaaaacagcaacaaauccauuaacaauagaaguaccauacauuuguacagaaggagaagaccaaauuaccguuuggggguuccacucugacaacgagacccaaauggcaaagcucuauggggacucaaagccccagaaguucaccucaucugccaacggagugaccacacauuacguuucacagauugguggcuucccaaaucaaacagaagacggaggacuaccacaaagugguagaauuguuguugauuacauggugcaaaaaucuggaaaaacaggaacaauuaccuaucaaagagguauuuuauugccucaaaagguguggugcgcaaguggcaggagcaaaguaauaaaaggauccuugccuuuaauuggagaagcagauugccuccaugaaaaauacgguggauuaaacaaaagcaagccuuacuacacaggggaacaugcaaaggccauaggaaauugcccaauaugggugaaaacacccuugaagcuggccaauggaaccaaauauagaccuccugcaaaacuauuaaaggaaagggguuucuucggagcuauugcugguuucuuagagggaggaugggaaggaaugauugcagguuggcacggauacacaucccauggggcacauggaguagcgguggcagcugaccuuaagagcacucaagaggccauaaacaagauaacaaaaaaucucaacucuuugagugagcuggaaguaaagaaucuucaaagacuaagcggugccauggaugaacuccacaacgaaauacuagaacuagaugagaaaguggaugaucucagagcugauacaauaagcucacaaauagaacucgcaguccugcuuuccaaugaaggaauaauaaacagugaagaugaacaucucuuggcgcuugaaagaaagcugaagaaaaugcugggccccucugcuguagagauagggaauggaugcuuugaaaccaaacacaagugcaaccagaccugucucgacagaauagcugcugguaccuuugaugcaggagaauuuucucuccccaccuuugauucacugaauauuacugcugcaucuuuaaaugacgauggauuggauaaucauacuauacugcuuuacuacucaacugcugccuccaguuuggcuguaacacugaugauagcuaucuuuguuguuuauauggucuccagagacaauguuucuugcuccauuugucuauaa

SEQ ID NO: 60511 - RNA, 1755 nt, Artificial Sequence
  derived and/or modified CDS sequence (wt) from hemagglutinin__InfluenzaB__ALN39780
augaaggcaauaauuguacuacucaugguaguaacauccaaugcagaucgaaucugcacugggauaacaucuucaaacucaccucauguggucaaaacagcuacucaaggggaggucaaugugacuggcgugauaccacugacaacaacaccaacaaaaucuuauuuugcaaaucucaaaggaacaaggaccagagggaaacuaugcccggacugucucaacuguacagaucuggauguggccuugggcaggccaauguguguggggaccacaccuucugcuaaagcuucaauacuccaugaggucagaccuguuacauccgggugcuuuccuauaaugcacgacagaacaaaaaucaggcaacuacccaaucuucucagaggauaugaaaagaucagguuaucaacccaaaacguuaucgaugcagaaaaagcaccaggaggacccuacagacuuggaaccucaggaucuugcccuaacgcuaccaguaaaaucggauuuuuugcaacaauggcuugggcugucccaaaggacaacuacaaaaaugcaacgaacccacaaacaguggaaguaccauacauuuguacagaaggggaagaccaaauuacuguuuggggguuccauucagauaacaaaacccaaaugaagagccucuauggagacucaaauccucaaaaguucaccucaucugcuaauggaguaaccacacauuauguuucucagauuggcgacuucccagaucaaacagaagacggaggacuaccacaaagcggcagaauuguuguugauuacaugaugcaaaaaccugggaaaacaggaacaauugucuaucaaagggguguuuuguugccucaaaagguguggugcgcgaguggcaggagcaaaguaauaaaagggucauugccuuuaauuggugaagcagauugccuucaugaagaauacgguggauuaaacaaaagcaagccuuacuacacaggaaaacaugcaaaagccauaggaaauugcccaauauggguaaaaacaccuuugaagcuugccaauggaaccaaauauagaccuccugcaaaacuauugaaggaaagggguuucuucggagcuauugcugguuuccuagaaggaggaugggaaggaaugauugcagguuggcacggauacacaucucacggagcacauggaguggcaguggcggcagaccuuaagaguacacaagaagcuauaaauaagauaacaaaaaaucucaauucuuugagugaacuagaaguaaagaaccuucaaagacuaaguggugccauggaugaacuccacaacgaaauacucgagcuggaugaaaaaguggaugaucucagagcugacacuauaagcucacaaauagaacuugcagucuugcuuuccaacgaaggaauaauaaacagugaagacgagcaucuauuggcacuugagagaaaacuaaagaaaaugcugggucccucugcuguagacauaggaaacggaugcuucgaaaccaaacacaaaugcaaccagaccugcuuagacaggauagcugcuggcaccuuuaaugcaggagaauuuucucuccccacuuuugauucauugaacauuacugcugcaucuuuaaaugaugauggauuggauaaccauacuauacugcucuauuacucaacugcugcuucuaguuuggcuguaacauuaaugcuagcuauuuuuauuguuuauauggucuccagagacaacguuucaugcuccaucugucuauaa

SEQ ID NO: 60512 - RNA, 1758 nt, Artificial Sequence; identical to SEQ ID NO: 60487
  derived and/or modified CDS sequence (wt) from hemagglutinin__InfluenzaB__ALN39781

SEQ ID NO: 60513 - RNA, 1758 nt, Artificial Sequence
  derived and/or modified CDS sequence (wt) from hemagglutinin__InfluenzaB__ALN39782
augaaggcaauaauuguacuacucaugguaguaacauccaaugcagaucggaucugcacugggauaacaucgucaaacucaccacaugucgucaaaacugcuacucaaggggaggucaaugugaccgguguaauaccacugacaacaacacccaccaaaucucauuuugcaaaucucaaaggaacagaaaccagggggaaacuaugcccaaaaugccucaacugcacagaucuggauguagccuugggcagaccaaaaugcacagggaaaauacccucggcaaggguuucaauacuccaugaagucagaccuguuacaucugggugcuuuccuauaaugcacgauagaacaaaaauuagacagcugccuaaccuucuccgaggauacgaacauaucagguuaucaacucacaacguuaucaaugcagaagaugcaccaggaggacccuacaaaauuggaaccucagggucuugcccuaacauuaccaauggaaacggauucuucgcaacaauggcuugggccgucccaaaaaacgacaaaaacaaaacagcaacaaauccauuaacaauagaaguaccauacauuuguacagaaggagaagaccaaauuaccguuuggggguuccacucugacaacgagacccaaauggcaaagcucuauggggacucaaagccccagaaguucaccucaucugccaacggagugaccacacauuacguuucacagauugguggcuucccaaaucaaacagaagacggaggacuaccacaaagugguagaauuguuguugauuacauggugcaaaaaucuggaaaaacaggaacaauuaccuaucaaagagguauuuuauugccucaaaagguguggugcgcaaguggcaggagcaagguaauaaaaggauccuugccuuuaauuggagaagcagauugccuccaugaaaaauacgguggauuaaacaaaagcaagccuuacuacacaggggaacaugcaaaggccauaggaaauugcccaauaugggugaaaacacccuugaagcuggccaauggaaccaaauauagaccuccugcaaagcuguuaaaggaaagggguuucuucggagcuauugcugguuucuuagagggaggaugggaaggaaugauugcagguuggcacggauacacaucccauggggcacauggaguagcgguggcagcugaccuuaagagcacucaagaggccauaaacaagauaacaaaaaaucucaacucuuugagugagcuggaaguaaagaaucuucaaagacuaagcggugccauggaugaacuccacaacgaaauacuagaacuagaugagaaaguggaugaucucagagcugauacaauaagcucacaaauagaacucgcaguccugcuuuccaaugaaggaauaauaaacagugaagaugaacaucucuuggcgcuugaaagaaagcugaagaaaaugcugggccccucugcuguagagauagggaauggaugcuuugaaaccaaacacaagugcaaccagaccugucucgacagaauagcugcugguaccuuugaugcaggagaauuuucucuccccaccuuugauucacugaauauuacugcugcaucuuuaaaugacgauggauuggauaaucauacuauacugcuuuacuacucaacugcugccuccaguuuggcuguaacacugaugauagcuaucuuuguuguuuauauggucuccagagacaauguuucuugcuccaucugucuauaa

SEQ ID NO: 60514 - RNA, 1755 nt, Artificial Sequence
  derived and/or modified CDS sequence (wt) from hemagglutinin__InfluenzaB__ALN39783
augaaggcaauaauuguacuacucaugguaguaacauccaaugcagaucgaaucugcacugguauaacaucuucaaacucaccucauguggucaaaacagcuacucaaggggaggucaaugugacuggcgugauaccacugacaacaacaccaacaaaaucuuauuuugcaaaucucaaaggaacaaggaccagagggaaacuaugcccggacugucucaacuguacagaucuggauguggccuugggcaggccaauguguguggggaccacaccuucugcuaaagcuucaauacuccaugaggucagaccuguuacauccgggugcuuuccuauaaugcacgacagaacaaaaaucaggcaacuacccaaucuucucagaggauaugaaaagaucagguuaucaacccaaaacguuaucgaugcagaaaaagcaccaggaggacccuacagacuuggaaccucaggaucuugcccuaacgcuaccaguaaaaucggauuuuuugcaacaauggcuugggcugucccaaaggacaacuacaaaaaugcaacgaaccuacaaacaguggaaguaccauacauuuguacagaaggggaagaccaaauuacuguuuggggguuccauucggauaacaaaacccaaaugaagagccucuauggagacucaaauccucaaaaguucaccucaucugcuaauggaguaaccacacauuauguuucucagauuggcgacuucccagaucaaacagaagacggaggacuaccacaaagcggcagaauuguuguugauuacauggugcaaaaaccugggaaaacaggaacaauugucuaucaaagggguguuuuguugccucaaaagguguggugcgcgaguggcaggagcaaaguaauaaaagggucauugccuuuaauuggugaagcagauugccuucaugaagaauacgguggauuaaacaaaagcaagccuuacuacacaggaaaacaugcaaaagccauaggaaauugcccaauauggguaaaaacaccuuugaagcuugccaauggaaccaaauauagaccuccugcaaaacuauugaaggaaagggguuucuucggagcuauugcugguuuccuagaaggaggaugggaaggaaugauugcagguuggcacggauacacaucucacggagcacauggaguggcaguggcggcagaccuuaagaguacacaagaagcuauaaauaagauaacaaaaaaucucaauucuuugagugaacuagaaguaaagaaccuucaaagacuaaguggugccauggaugaacuccacaacgaaauacucgagcuggaugaaaaaguggaugaucucagagcugacacuauaagcucacaaauagaacuugcagucuugcuuuccaacgaaggaauaauaaacagugaagacgagcaucuauuggcacuugagagaaaacuaaagaaaaugcugggucccucugcuguagacauaggaaacggaugcuucgaaaccaaacacaaaugcaaccagaccugcuuagacaggauagcugcuggcaccuuuaaugcaggagaauuuucucuccccacuuuugauucauugaacauuacugcugcaucuuuaaaugaugauggauuggauaaccauacuauacugcucuauuacucaacugcugcuucuaguuuggcuguaacauuaaugcuagcuauuuuuauuguuuauauggucuccagagacaacguuucaugcuccaucugucuauaa

SEQ ID NO: 60515 - RNA, 1758 nt, Artificial Sequence
  derived and/or modified CDS sequence (wt) from hemagglutinin__InfluenzaB__ALN39784
augaaggcaauaauuguacuacucaugguaguaacauccaaugcagaucgaaucugcacugggauaacaucgucaaacucaccacauguugucaaaacugcuacucaaggggaggucaaugugaccgguguaauaccacugacaacaacacccaccaaaucucauuuugcaaaucucaaaggaacagaaaccagggggaaacuaugcccaaaaugccucaacugcacagaucuggauguagccuugggcagaccaaaaugcacagggaaaauacccucggcaaggguuucaauacuccaugaagucagaccuguuacaucugggugcuuuccuauaaugcacgauagaacaaaaauuagacagcugccuaaccuucuccgaggauacgaacauaucagguuaucaacucacaacguuaucaaugcagaagaugcaccaggaggacccuacaaaauuggaaccucagggucuugcccuaacauuaccaauggaaacggauucuucgcaacaauggcuugggccgucccaaaaaacgacaaaaacaaaacagcaacaaauccauuaacaauagaaguaccauacauuuguacagaaggagaagaccaaauuaccguuuggggguuccacucugacaacgagacccaaauggcaaagcucuauggggacucaaagccccagaaguucaccucaucugccaacggagugaccacacauuacguuucacagauugguggcuucccaaaucaaacagaagacggaggacuaccacaaagugguagaauuguuauugauuacauggugcaaaaaucuggaaaaacaggaacaauuaccuaucaaagagguauuuuauugccucaaaagguguggugcgcaaguggcaggagcaagguaauaaaaggauccuugccuuuaauuggagaagcagauugccuccaugaaaaauacgguggauuaaacaaaagcaagccuuacuacacaggggaacaugcaaaggccguaggaaauugcccaauaugggugaaaacaccuuugaagcuggccaauggaaccaaauauagaccuccugcaaaacuauuaaaggaaagggguuucuucggagcuauugcugguuucuuagagggaggaugggaaggaaugauugcagguuggcacggauacacaucccauggggcacauggaguagcgguggcagcugaccuuaagagcacucaagaggccauaaacaagauaacaaaaaaucucaacucuuugagugagcuggaaguaaagaaucuucaaagacuaagcggugccauggaugaacuccacaacgaaauacuagaacuagaugagaaaguggaugaucucagagcugauacaauaagcucacaaauagaacucgcaguccugcuuuccaaugaaggaauaauaaacagugaagaugaacaucucuuggcgcuugaaagaaagcugaagaaaaugcugggccccucugcuguagagauagggaauggaugcuuugaaaccaaacacaagugcaaccagaccugucucgacagaauagcugcugguaccuuugaugcaggagaauuuucucuccccaccuuugauucacugaauauuacugcugcaucuuuaaaugacgauggauuggauaaucauacuauacugcuuuacuacucaacugcugccuccaguuuggcuguaacacugaugauagcuaucuuuguuguuuauauggucuccagagacaauguuucuugcuccaucugucuauaa

SEQ ID NO: 60516 - RNA, 1758 nt, Artificial Sequence; identical to SEQ ID NO: 60487
  derived and/or modified CDS sequence (wt) from hemagglutinin__InfluenzaB__ALN39785

SEQ ID NO: 60517 - RNA, 1755 nt, Artificial Sequence
  derived and/or modified CDS sequence (wt) from hemagglutinin__InfluenzaB__ALN39786
augaaggcaauaauuguacuacucaugguaguaacauccaaugcagaucgaaucugcacugggauaacaucuucaaacucaccccauguggucaaaacagcuacucaaggggaggucaaugugacuggcgugauaccacugacaacaacaccaacaaaaucuuauuuugcaaaucucaaaggaacaaggaccagagggaaacuaugcccggacugucucaacuguacagaucuggauguggccuugggcaggccaauguguguggggaccacaccuucugcuaaagcuucaauacuccaugaggucagaccuguuacauccgggugcuuuccuauaaugcacgacagaacaaaaaucaggcaacuacccaaucuucucagaggauaugaaaagaucagguuaucaacccaaaacguuaucgaugcagaaaaagcaccaggaggacccuacagacuuggaaccucaggaucuugcccuaacgcuaccaguaaaaucggauuuuuugcaacaauggcuugggcugucccaaaggacaacuacaaaaaugcaacaaauccacaaacaguggaaguaccauacauuuguacagaaggggaagaccaaauuacuguuuggggguuccauucggauaacaaaacccaaaugaagagccucuauggagacucaaauccucaaaaguucaccucaucugcuaauggaguaaccacacauuauguuucucagauuggcgacuucccagaucaaacagaagacggaggacuaccacaaagcggcagaauuguuguugauuacaugaugcaaaaaccugggaaaacaggaacaauugucuaucaaagggguguuuuguugccucaaaagguguggugcgcgaguggcaggagcaaaguaauaaaagggucauugccuuuaauuggugaagcagauugccuucaugaagaauacgguggauuaaacaaaagcaagccuuacuacacagggaaacaugcaaaagccauaggaaauugcccaauauggguaaaaacaccuuugaagcuugccaauggaaccaaauauagaccuccugcaaaacuauugaaggaaagggguuucuucggagcuauugcugguuuccuagaaggaggaugggaaggaaugauugcagguuggcacggauacacaucucacggagcacauggaguggcaguggcggcagaccuuaagaguacacaagaagcuauaaauaagauaacaaaaaaucucaauucuuugagugaacuagaaguaaagaaccuucaaagacuaaguggugccauggaugaacuccacaacgaaauacucgagcuagaugaaaaaguggaugaucucagagcugacacuauaagcucacaaauagaacuugcagucuugcuuuccaacgaaggaauaauaaacagugaagacgagcaucuauuggcacuugagagaaaacuaaagaaaaugcugggucccucugcuguagacauaggaaacggaugcuucgaaaccaaacacaaaugcaaccagaccugcuuagacaggauagcugcuggcaccuuuaaugcaggagaauuuucucuccccacuuuugauucauugaacauuacugcugcaucuuuaaaugaugauggauuggauaaccauacuauacugcucuauuacucaacugcugcuucuaguuuggcuguaacauuaaugcuagcuauuuuuauuguuuauauggucuccagagacaacguuucaugcuccaucugucuauaa

SEQ ID NO: 60518 - RNA, 1758 nt, Artificial Sequence
  derived and/or modified CDS sequence (wt) from hemagglutinin__InfluenzaB__ALN39787
augaaggcaauaauuguacuacucaugguaguaacauccaaugcagaucgaaucugcacugggauaacaucgucaaacucaccacaugucgucaaaacugcuacucaaggggaggucaaugugaccgguguaauaccacugacaacaacacccaccaaaucucauuuugcaaaucucaaaggaacagaaaccagggggaaacuaugcccaaaaugccucaacugcacagaucuggauguagccuugggcagaccaaaaugcacagggaaaauacccucugcaaggguuucaauacuccaugaagucagaccuguuacaucugggugcuuuccuauaaugcacgauagaacaaaaauuagacagcugccuaaccuucuccgaggauacgaacaugucagguuaucaacucacaacguuaucaaugcagaagaugcaccaggaggacccuacaaaauuggaaccucagggucuugcccuaacauuaccaauggaaacggauucuucgcaacaauggcuugggccgucccaaaaaacgacaaaaacaaaacagcaacaaauccauuaacaauagaaguaccauacauuuguacagaaggagaagaucaaauuaccguuuggggguuccacucugacaacgagacccaaauggcaaagcucuauggggacucaaagccccagaaguucaccucaucugccaacggagugaccacacauuacguuucacagauugguggcuucccaaaucaaacagaagacggaggacuaccacaaagugguagaauuguuguugauuacauggugcaaaaaucuggaaaaacaggaacaauuaccuaucaaagagguauuuuauugccucaaaagguguggugcgcaaguggcaggagcaagguaauaaaaggauccuugccuuuaauuggagaagcagauugccuccaugaaaaauacgguggauuaaacaaaagcaagccuuacuacacaggggaacaugcaaaggccauaggaaauugcccaauaugggugaaaacacccuugaagcuggccaauggaaccaaauauagaccuccugcaaaacuauuaaaggaaagggguuucuucggagcuauugcugguuucuuagagggaggaugggaaggaaugauugcagguuggcacggauacacaucccauggggcacauggaguagcgguggcagcugaccuuaagagcacucaagaggccauaaacaagauaacaaaaaaucucaacucuuugagugagcuggaaguaaagaaucuucaaagacuaagcggugccauggaugaacuccacaacgaaauacuagaacuagaugagaaaguggaugaucucagagcugauacaauaagcucacaaauagaacucgcaguccugcuuuccaaugaaggaauaauaaacagugaagaugaacaucucuuggcgcuugaaagaaagcugaagaaaaugcugggccccucugcuguagagauagggaauggaugcuuugaaaccaaacacaagugcaaccagaccugucucgacagaauagcugcugguaccuuugaugcaggagaauuuucucuccccaccuuugauucacugaauauuacugcugcaucuuuaaaugacgauggauuggauaaucauacuauacugcuuuacuacucaacugcugccuccaguuuggcuguaacacugaugauagcuaucuuuguuguuuauauggucuccagagacaauguuucuugcuccauuugucuauaa

SEQ ID NO: 60519 - RNA, 1758 nt, Artificial Sequence; identical to SEQ ID NO: 60487
  derived and/or modified CDS sequence (wt) from hemagglutinin__InfluenzaB__ALN39788

SEQ ID NO: 60520 - RNA, 1755 nt, Artificial Sequence
  derived and/or modified CDS sequence (wt) from hemagglutinin__InfluenzaB__ALN39790
augaaggcaauaauuguacuacucaugguaguaacauccgaugcagaucgaaucugcacugggauaacaucuucaaacucaccucauguggucaaaacagcuacucaaggggaggucaaugugacuggcgugauaccacugacaacaacaccaacaaaaucuuauuuugcaaaucucaaaggaacaaggaccagagggaaacuaugcccggacugucucaacuguacagaucuggauguggccuugggcaggccaauguguguggggaccacaccuucugcuaaagcuucaauacuccaugaggucagaccuguuacauccgggugcuuuccuauaaugcacgacagaacaaaaaucaggcaacuacccaaucuucucagaggauaugaaaagaucagguuaucaacccaaaacguuaucgaugcagaaaaagcaccaggaggacccuacagacuuggaaccucaggaucuugcccuaacgcuaccaguaaaaucggauuuuuugcaacaauggcuugggcugucccaaaggacaacuacaaaaaugcaacgaacccacaaacaguggaaguaccauacauuuguacagaaggggaagaccaaauuacuguuuggggguuccauucggauaacaaaacccaaaugaagagccucuauggggacucaaauccucaaagguucaccucaucugcuaauggaguaaccacacauuauguuucucagauuggcgacuucccagaucaaacagaagacggaggacuaccacaaagcggcagaauuguuguugauuacauggugcaaaaaccugggaaaacaggaacaauugucuaucaaagagguguuuuguugccucaaaagguguggugcgcgaguggcaggagcaaaguaauaaaagggucauugccuuuaauuggugaagcagauugccuucaugaagaauacgguggauuaaacaaaagcaagccuuacuacacaggaaaacaugcaaaagccauaggaaauugcccaauauggguaaaaacaccuuugaagcuugccaauggaaccaaauauagaccuccugcaaaacuauugaaggaaagggguuucuucggagcuauugcugguuuccuagaaggaggaugggaaggaaugauugcagguuggcacggauacacaucucacggagcacauggaguggcaguggcggcagaccuuaagaguacacaagaagccauaaauaagauaacaaaaaaucucaauucuuugagugaacuagaaguaaagaaccuucaaagacuaaguggugccauggaugaacuccacaacgaaauacucgagcuggaugaaaaaguggaugaucucagagcugacaccauaagcucacaaauagaacuugcagucuugcuuuccaacgaaggaauaauaaacagugaagacgagcaucuauuggcacuugagagaaaacuaaagaaaaugcugggucccucugcuguagacauaggaaacggaugcuucgaaaccaaacacaaaugcaaccagaccugcuuagacaggauagcugcuggcaccuuuaaugcaggagaauuuucucucccuacuuuugauucauugaacauuacugcugcaucuuuaaaugaugauggauuggauaaccauacuauacugcucuauuacucaacugcugcuucuaguuuggcuguaacauuaaugcuagcuauuuuuauuguuuauauggucuccagagacaauguuucaugcuccaucugucuauaa

SEQ ID NO: 60521 - RNA, 1755 nt, Artificial Sequence
  derived and/or modified CDS sequence (wt) from hemagglutinin__InfluenzaB__ALN39791
augaaggcaauaauuguacuacucaugguaguaauguccaaugcagaucgaaucugcacugguauaacaucuucaaacucaccucauguggucaaaacagcuacucaaggggaggucaaugugacuggcgugauaccacugacaacaacaccaacaaaaucuuauuuugcaaaucucaaaggaacaaggaccagagggaaacuaugcccggacugucucaacuguacagaucuggauguggccuugggcaggccaauguguguggggaccacaccuucugcuaaagcuucaauacuccaugaggucagaccuguuacauccgggugcuuuccuauaaugcacgacagaacaaaaaucaggcaacuacccaaucuucucagaggauaugaaaagaucagguuaucaacccaaaacguuaucgaugcagaaaaagcaccaggaggacccuacagacuuggaaccucaggaucuugcccuaacgcuaccaguaaaaucggauuuuuugcaacaauggcuugggcugucccaaaggacaacuacaaaaaugcaacgaacccacaaacaguggaaguaccauacauuuguacagaaggggaagaccaaauuacuguuuggggguuccauucggauaacaaaacccaaaugaagagccucuauggagacucaaauccucaaaaguucaccucaucugcuaauggaguaaccacacauuauguuucucagauuggcgacuucccagaucaaacagaagacggaggacuaccacaaagcggcagaauuguuguugauuacauggugcaaaaaccugggaaaacaggaacaauugucuaucaaagggguguuuuguugccucaaaagguguggugcgcgaguggcaggagcaaaguaauaaaagggucauugccuuuaauuggugaagcagauugccuucaugaagaauacgguggauuaaacaaaagcaagccuuacuacacaggaaaacaugcaaaagccauaggaaauugcccaauauggguaaaaacaccuuugaagcuugccaauggaaccaaauauagaccuccugcaaaacuauugaaggaaagggguuucuucggagcuauugcugguuuccuagaaggaggaugggaaggaaugauugcagguuggcacggauacacaucucacggagcacauggaguggcaguggcggcagaccuuaagaguacacaagaagcuauaaauaagauaacaaaaaaucucaauucuuugagugaacuagaaguaaagaaccuucaaagacuaaguggugccauggaugaacuccacaacgaaauacucgagcuggaugaaaaaguggaugaucucagagcugacacuauaagcucacaaauagaacuugcagucuugcuuuccaacgaaggaauaauaaacagugaagacgagcaucuauuggcacuugagagaaaacuaaagaaaaugcugggucccucugcuguagacauaggaaacggaugcuucgaaaccaaacacaaaugcaaccagaccugcuuagacaggauagcugcuggcaccuuuaaugcaggagaauuuucucuccccacuuuugauucauugaacauuacugcugcaucuuuaaaugaugauggauuggauaaccauacuauacugcucuauuacucaacugcugcuucuaguuuggcuguaacauuaaugcuagcuauuuuuauuguuuauauggucuccagagacaacguuucaugcuccaucugucuauaa

SEQ ID NO: 60522 - RNA, 1758 nt, Artificial Sequence
  derived and/or modified CDS sequence (wt) from hemagglutinin__InfluenzaB__ALN39792
augaaggcaauaauuguacuacucaugguaguaacauccaaugcagaucgaaucugcacugggauaacaucgucaaacucaccacaugucgucaaaacugcuacucaaggggaggucaaugugaccgguguaauaccacugacaacaacacccaccaaaucucauuuugcaaaucucaaaggaacagaaaccagggggaaacuaugcccaaaaugccucaacugcacagaucuggauguagccuugggcagaccaaaaugcacagggaaaauacccucugcaaggguuucaauacuccaugaagucagaccuguuacaucugggugcuuuccuauaaugcacgauagaacaaaaauuagacagcugccuaaccuucuccgaggauacgaacaugucagguuaucaacucacaacguuaucaaugcagaagaugcaccaggaggacccuacaaaauuggaaccucagggucuugcccuaacauuaccaauggaaacggauucuucgcaacaauggcuugggccgucccaaaaaacgacaaaaacaaaacagcaacaaauccauuaacaauagaaguaccauacauuuguacagaaggagaagaccaaauuaccguuuggggguuccacucugacaacgagacccaaauggcaaagcucuauggggacucaaagccccagaaguucaccucaucugccaacggagugaccacacauuacguuucacagauugguggcuucccaaaucaaacagaagacggaggacuaccacaaaguggcagaauuguuguugauuacauggugcaaaaaucuggaaaaacaggaacaauuaccuaucaaagagguauuuuauugccucaaaagguguggugcgcaaguggcaggagcaagguaauaaaaggauccuugccuuuaauuggagaagcagauugccuccaugaaaaauacgguggauuaaacaaaagcaagccuuacuacacaggggaacaugcaaaggccauaggaaauugcccaauaugggugaaaacacccuugaagcuggccaauggaaccaaauauagaccuccugcaaaacuauuaaaggaaagggguuucuucggagcuauugcugguuucuuagagggaggaugggaaggaaugauugcagguuggcacggauacacaucccauggggcacauggaguagcgguggcagcugaccuuaagagcacucaagaggccauaaacaagauaacaaaaaaucucaacucuuugagugagcuggaaguaaagaaucuucaaagacuaagcggugccauggaugaacuccacaacgaaauacuagaacuagaugagaaaguggaugaucucagagcugauacaauaagcucacaaauagaacucgcaguccugcuuuccaaugaaggaauaauaaacagugaagaugaacaucucuuggcgcuugaaagaaagcugaagaaaaugcugggccccucugcuguagagauagggaauggaugcuuugaaaccaaacacaagugcaaccagaccugucucgacagaauagcugcugguaccuuugaugcaggagaauuuucucuccccaccuuugauucacugaauauuacugcugcaucuuuaaaugacgauggauuggauaaucauacuauacugcuuuacuacucaacugcugccuccaguuuggcuguaacacugaugauagcuaucuuuguuguuuauauggucuccagagacaauguuucuugcuccauuugucuauaa

SEQ ID NO: 60523 - RNA, 1758 nt, Artificial Sequence; identical to SEQ ID NO: 60487
  derived and/or modified CDS sequence (wt) from hemagglutinin__InfluenzaB__ALN39793

SEQ ID NO: 60524 - RNA, 1755 nt, Artificial Sequence
  derived and/or modified CDS sequence (wt) from hemagglutinin__InfluenzaB__ALN39794
augaaggcaauaauuauacuacucaugguaguaacguccaaugcagaucgaaucugcacugggauaacaucuucaaacucaccucauguggucaaaacagcuacucaaggggaggucaaugugacuggcgugauaccacugacaacaacaccaacaaaaucuuauuuugcaaaucucaaaggaacaaggaccagagggaaacuaugcccggacugucucaacuguacagaucuagauguggccuugggcaggccaauguguguggggaccacaccuucugcuaaagcuucaauacuccaugaggucagaccuguuacauccgggugcuuuccuauaaugcacgacagaacaaaaaucaggcaacuacccaaucuucucagaggauaugaaaagaucagguuaucaacccaaaacguuaucgaugcagaaaaagcaccaggaggacccuacagacuuggaaccucaggaucuugcccuaacgcuaccaguaaaaucggauuuuuugcaacaauggcuugggcugucccaaaggacaacuacaaaaaugcaacgaacccacaaacaguggaaguaccauacauuuguacagaaggggaagaccaaauuacuguuuggggguuccauucggauaacaaaacccaaaugaagagccucuauggagacucaaauccucaaaaguucaccucaucugcugauggaguaaccacacauuauguuucucagauuggcgacuucccagaucaaacagaagacggaggacuaccacaaagcggcagaauuguuguugauuacaugaugcaaaaaccugggaaaacaggaacaauugucuaucaaagggguguuuuguugccucaaaagguguggugcgcgaguggcaggagcaaaguaauaaaagggucauugccuuuaauuggugaagcagauugccuucaugaagaauacgguggauuaaacaaaagcaagccuuacuacacaggaaaacaugcaaaagccauaggaaauugcccaauauggguaaaaacaccuuugaagcuugccaauggaaccaaauauagaccuccugcaaaacuauugaaggaaagggguuucuucggagcuauugcugguuuccuagaaggaggaugggaaggaaugauugcagguuggcacggauacacaucucacggagcacacggaguggcaguggcggcagaccuuaagaguacacaagaagcuauaaauaagauaacaaaaaaucucaacucuuugagugaacuagaaguaaagaaccuucaaagacuaaguggugccauggaugaacuccacaacgaaauacucgagcuggaugaaaaaguggaugaucucagagcugacacuauaagcucacaaauagaacuugcagucuugcuuuccaacgaaggaauaauaaacagugaagacgagcaucuauuggcacucgagagaaaacuaaagaaaaugcugggucccucugcuguagacauaggaaacggaugcuucgaaaccaaacacaaaugcaaccagaccugcuuagacaggauagcugcuggcaccuuuaaugcaggagaauuuucucuccccacuuuugauucauugaacauuacugcugcaucuuuaaaugaugauggauuggauaaccauacuauacugcucuauuacucaacugcugcuucuaguuuggcuguaacauuaaugcuagcuauuuuuauuguuuauauggucuccagagacaacguuucaugcuccaucugucuauaa

SEQ ID NO: 60525 - RNA, 1755 nt, Artificial Sequence; identical to SEQ ID NO: 60499
  derived and/or modified CDS sequence (wt) from hemagglutinin__InfluenzaB__ALN39795

SEQ ID NO: 60526 - RNA, 1758 nt, Artificial Sequence
  derived and/or modified CDS sequence (wt) from hemagglutinin__InfluenzaB__ALN39796
augaaggcaauaauuguacuacucaugguaguaacauccaaugcagaucgaaucugcacugggauaacaucgucaaacucaccacaugucgucaaaacugcuacucaaggggaggucaaugugaccgguguaauaccacugacaacaacacccaccaaaucucauuuugcaaaucucaaaggaacagaaaccagggggaaacuaugcccaaaaugccucaacugcacagaucuggauguagccuugggcagaccaaaaugcacagggaaaauacccucggcaagaguuucaauacuccaugaagucagaccuguuacaucugggugcuuuccuauaaugcacgauagaacaaaaauuagacagcugccuaaccuucuccgaggauacgaacauaucagguuaucaacucacaacguuaucaaugcagaagaugcaccaggaggacccuacaaaauuggaaccucagggucuugcccuaacgcuaccaauggaaacggauucuucgcaacaauggcuugggccgucccaaaaaacgacaaaaacaaaacagcaacaaauccauuaacaauagaaguaccauacauuuguacagaaggagaagaccaaauuaccguuuggggguuccacucugacaacgagacccaaauggcaaagcucuauggggacucaaagccccagaaguucaccucaucugccaacggagugaccacacauuacguuucacagauugguggcuucccaaaucaaacagaagacggaggacuaccacaaagugguagaauuguuguugauuacauggugcaaaaaucuggaaaaacaggaacaauuaccuaucaaagagguauuuuauugccucaaaagguguggugcgcgaguggcaggagcaagguaauaaaaggauccuugccuuuaauuggagaagcagauugccuccacgaaaaauacgguggauuaaacaaaagcaagccuuacuacacaggggaacaugcaaaggccauaggaaauugcccaauaugggugaaaacacccuugaagcuggccaauggaaccaaauauagaccuccugcaaaacuauuaaaggaaagggguuucuucggagcuauugcugguuucuuagagggaggaugggaaggaaugauugcagguuggcacggauacacaucccauggggcacauggaguagcgguggcagcugaccuuaagagcacucaagaggccauaaacaagauaacaaaaaaucucaacucuuugagugagcuggaaguaaagaaucuucaaagacuaagcggugccauggaugaacuccauaacgaaauacuagaacuagaugagaaaguggaugaucucagagcugauacaauaagcucacaaauagaacucgcaguccugcuuuccaaugaaggaauaauaaacagugaagaugaacaucucuuggcgcuugaaagaaagcugaagaaaaugcugggccccucugcuguagagauagggaauggaugcuuugaaaccaaacacaagugcaaccagaccugucucgacagaauagcugcugguaccuuugaugcaggagaauuuucucuccccaccuuugauucacugaauauuacugcugcaucuuuaaaugacgauggauuggauaaucauacuauacugcuuuacuacucaacugcugccuccaguuuggcuguaacacugaugauagcuaucuuuguuguuuauauggucuccagagacaauguuucuugcuccaucugucuauaa

SEQ ID NO: 60527 - RNA, 1755 nt, Artificial Sequence
  derived and/or modified CDS sequence (wt) from hemagglutinin__InfluenzaB__ALN39797
augaaggcaauaauuguacuacucaugguaguaacauccaaugcagaucgaaucugcacugggauaacaucuucaaacucaccucauguggucaaaacagcuacucaaggggaggucaaugugacuggcgugauaccauugacaacaacaccaacaaaaucuuauuuugcaaaucucaaaggaacaaggaccagagggaaacuaugcccggacugucucaacuguacagaucuggauguggccuugggcaggccaauguguguggggaccacaccuucugcuaaagcuucaauacuccaugaggucagaccugucacauccgggugcuuuccuauaaugcacgacagaacaaaaaucaggcaacuacccaaucuucucagaggauaugaaaagaucagguuaucaacccaaaacguuaucgaugcagaaaaagcaccaggaggacccuacagacuuggaaccucaggaucuugcccuaacgcuaccaguaaaaucggauuuuuugcaacaauggcuugggcugucccaaaggacaacuacaaaaaugcaacgaacccacaaacaguggaaguaccauacauuuguacagaaggggaagaccaaauuacuguuuggggguuccauucggauaacaaaacccaaaugaagagccucuauggagacucaaauccucaaaaguucacuucaucugcuaauggaguaaccacacauuauguuucucagauuggcgacuucccagaucaaacagaagacggaggacuaccacaaagcggcagaauuguuguugauuacauggugcaaaaaccugggaaaacaggaacaauugucuaucaaagggguguuuuguugccucaaaagguguggugcgcgaguggcaggagcaaaguaauaaaagggucauugccuuuaauuggugaagcagauugccuucaugaagaauacgguggauuaaacaaaagcaagccuuacuacacaggaaaacaugcaaaagccauaggaaauugcccaauauggguaaaaacaccuuugaagcuugccaauggaaccaaauauagaccuccugcaaaacuauugaaggaaagggguuucuucggagcuauugcugguuuccuagaaggaggaugggaaggaaugauugcagguuggcacggauacacaucucacggagcacauggaguggcaguggcggcagaccuuaagaguacacaagaagcuauaaauaagauaacaaaaaaccucaauucuuugagugaacuagaaguaaagaaccuucaaagacuaaguggugccauggaugaacuccacaacgaaauacucgagcuggaugaaaaaguggaugaucucagagcugacaccauaagcucacaaauagaacuugcagucuugcuuuccaacgaaggaauaauaaacagugaagacgagcaucuauuggcacuugagagaaaacuaaagaaaaugcugggucccucugcuguagacauaggaaacggaugcuucgaaaccaaacacaaaugcaaccagaccugcuuagacaggauagcugcuggcaccuuuaaugcaggagaauuuucucuccccacuuuugauucauugaacauuacugcugcaucuuuaaaugaugauggauuggauaaccauacuauacugcucuauuacucaacugcugcuucuaguuuggcuguaacauuaaugcuagcuauuuuuauuguuuauauggucuccagagacaacguuucaugcuccaucugucuauaa

SEQ ID NO: 60528 - RNA, 1755 nt, Artificial Sequence
  derived and/or modified CDS sequence (wt) from hemagglutinin__InfluenzaB__ALN39798
augaaggcaauaauuguacuacucaugguaguaacauccaaugcagaucgaaucugcacugggauaacaucuucaagcucaccucauguggucaaaacagcuacucaaggggaggucaaugugacuggcgugauaccacugacaacaacaccaacaaaaucuuauuuugcaaaucucaaaggaacaaggaccagagggaaacuaugcccggacugucucaacuguacagaucuggauguggccuugggcaggccaauguguguggggaccacaccuucugcuaaagcuucaauacuccaugaggucagaccuguuacauccgggugcuuuccuauaaugcacgacagaacaaaaaucaggcaacuacccaaucuucucagaggauaugaaaagaucagguuaucaacccaaaacguuaucgaugcagaaaaagcaccaggaggacccuacagacuuggaaccucaggaucuugcccuaacgcuaccaguaaaaucggauuuuuugcaacaauggcuugggcugucccaaaggacaacuacaaaaaugcaacgaacccacaaacaguggaaguaccauacauuuguacagaaggggaagaccaaauuacuguuuggggguuccauucggauaacaaaacccaaaugaagagccucuauggagacucaaauccucaaaaguucaccucaucugcuaauggaguaaccacacauuauguuucucagauuggcgacuucccagaucaaacagaagacggaggacuaccacaaagcggcagaauuguuguugauuacaugaugcaaaaaccugggaaaacaggaacaauugucuaucaaagggguguuuuguugccucaaaagguguggugcgcgaguggcaggagcaaaguaauaaaagggucauugccuuuaauuggugaagcagauugccuucaugaagaauacgguggauuaaacaaaaguaagccuuacuacacaggaaaacaugcaaaagccauaggaaauugcccaauauggguaaaaacaccuuugaagcuugccaaugggaccaaauauagaccuccugcaaaacuauugaaggaaagggguuucuucggagcuauugcugguuuccuagaaggaggaugggaaggaaugauugcagguuggcacggauacacaucucacggagcacauggaguggcaguggcggcagaccuuaagaguacacaagaagcuauaaauaagauaacaaaaaaucucaauucuuugagugaacuagaaguaaagaaccuucaaagacuaaguggugccauggaugaacuccacaacgaaauacucgagcuggaugaaaagguggaugaucucagagcugacacuauaagcucacaaauagaacuugcagucuugcuuuccaacgaaggaauaauaaacagugaagacgagcaucuauuggcacuugagagaaaacuaaagaaaaugcugggucccucugcuguagacauaggaaacggaugcuucgaaaccaaacacaaaugcaaccagaccugcuuagacaggauagcugcuggcaccuuuaaugcaggagaauuuucucuccccacuuuugauucauugaacauuacugcugcaucuuuaaaugaugauggauuggauaaccauacuauacugcucuauuacucaacugcugcuucuaguuuggcuguaacauuaaugcuagcuauuuuuauuguuuauauggucuccagagacaacguuucaugcuccaucugucuauaa

SEQ ID NO: 60529 - RNA, 1755 nt, Artificial Sequence; identical to SEQ ID NO: 60343
  derived and/or modified CDS sequence (wt) from hemagglutinin__InfluenzaB__ALN39799

SEQ ID NO: 60530 - RNA, 1755 nt, Artificial Sequence
  derived and/or modified CDS sequence (wt) from hemagglutinin__InfluenzaB__ALN39800
augaaggcaauaauuguacuacucaugguaguaacauccaaugcagaucgaaucugcacugggauaacaucuucaaacucaccucauguggucaaaacagcuacucaaggggaggucaaugugacuggcgugauaccacugacaacaacaccaacaaaaucuuauuuugcaaaucucaaaggaacaaggaccagagggaaacuaugcccggacugucucaacuguacagaucuggauguggccuugggcaggccaauguguguggggaccacaccuucugcuaaagcuucaauacuccaugaggucagaccuguuacauccgggugcuuuccuauaaugcacgacagaacaaaaaucaggcaacuacccaaucuucucagaggauaugaaaagaucagguuaucaacccaaaacguuaucgaugcagaaaaagcaccaggaggacccuacagacuuggaaccucaggaucuugcccuaacgcuaccaguaaaaucggauuuuuugcaacaauggcuugggcugucccaaaggacaacuacaaaaaugcaacgaacccacaaacaguggaaguaccauacauuuguacagaaggggaagaccaaauuacuguuuggggguuccauucggauaacaaaacccaaaugaagagccucuauggagacucaaauccucaaaaguucaccucaucugcuaauggaguaaccacacauuauguuucucagauuggcgacuucccagaucaaacagaagacggaggacuaccacaaagcggcagaauuguuguugauuacaugaugcaaaaaccugggaaaacaggaacaauugucuaucaaagggguguuuuguugccucaaaagguguggugcgcgaguggcaggagcaaaguaauaaaagggucauugccuuuaauuggugaagcagauugccuucaugaagaauacgguggauuaaacaaaaguaagccuuacuacacaggaaaacaugcaaaagccauaggaaauugcccaauauggguaaaaacaccuuugaagcuugccaaugggaccaaauauagaccuccugcaaaacuauugaaggaaagggguuucuucggagcuauugcugguuuccuagaaggaggaugggaaggaaugauugcagguuggcacggauacacaucucacggagcacauggaguggcaguggcggcagaccuuaagaguacacaagaagcuauaaauaagauaacaaaaaaucucaauucuuugagugaacuagaaguaaagaaccuucaaagacuaaguggugccauggaugaacuccacaacgaaauacucgagcuggaugaaaagguggaugaucucagagcugacacuauaagcucacaaauagaacuugcagucuugcuuuccaacgaaggaauaauaaacagugaagacgagcaucuauuggcacuugagaaaaaacuaaagaaaaugcugggucccucugcuguagacauaggaaacggaugcuucgaaaccaaacacaaaugcaaccagaccugcuuagacaggauagcugcuggcaccuuuaaugcaggagaauuuucucuccccacuuuugauucauugaacauuacugcugcaucuuuaaaugaugauggauuggauaaccauacuauacugcucuauuacucaacugcugcuucuaguuuggcuguaacauuaaugcuagcuauuuuuauuguuuauauggucuccagagacaacguuucaugcuccaucugucuauaa

SEQ ID NO: 60531 - RNA, 1755 nt, Artificial Sequence; identical to SEQ ID NO: 60521
  derived and/or modified CDS sequence (wt) from hemagglutinin__InfluenzaB__ALN39801

SEQ ID NO: 60532 - RNA, 1755 nt, Artificial Sequence
  derived and/or modified CDS sequence (wt) from hemagglutinin__InfluenzaB__ALN39802
augaaggcaauaauuguacuacucaugguaguaacauccaaugcagaucgaaucugcacugggauaacaucuucaaacucaccucauguggucaaaacagcuacucaaggggaggucaaugugacuggcgugauaccacugacaacaacaccaacaaaaucuuauuuugcaaaucucaaaggaacaaggaccagagggaaacuaugcccggacugucucaacuguacagaucuggauguggccuugggcaggccaauguguguggggaccacaccuucugcuaaagcuucaauacuccaugaggucagaccuguuacauccgggugcuuuccuauaaugcacgacagaacaaaaaucaggcaacuacccaaucuucucagaggauaugaaaagaucagguuaucaacccaaaacguuaucgaugcagaaaaagcaccaggaggacccuacagacuuggaaccucaggaucuugcccuaacgcuaccaguaaaaucggauuuuuugcaacaauggcuugggcugucccaaaggacaacuacaaaaaugcaacgaacccacaaacaguggaaguaccauacauuuguacagaaggggaagaccaaauuacuguuuggggguuccauucggauaacaaaacccaaaugaagagccucuauggagacucaaauccucaaaaguucaccucaucugcuaauggaguaaccacacauuauguuucucagauuggcgacuucccagaucaaacagaagacggaggacuaccacaaagcggcagaauuguuguugauuacauggugcaaaaaccugggaaaacaggaacaauugucuaucaaagggguguuuuguugccucaaaagguguggugcgcgaguggcaggagcaaaguaauaaaagggucauugcccuuaauuggugaagcagauugccuucaugaagaauacgguggauuaaacaaaagcaagccuuacuacacaggaaaacaugcaaaagccauaggaaauugcccaauauggguaaaaacaccuuugaagcuugccaauggaaccaaauauagaccuccugcaaaacuauugaaggaaagggguuucuucggagcuauugcugguuuccuagaaggaggaugggaaggaaugauugcagguuggcacggauacacaucucacggagcacauggaguggcaguggcggcagaccuuaagaguacacaagaagcuauaaauaagauaacaaaaaaucucaauucuuugagugaacuagaaguaaagaaccuucaaagacuaaguggugccauggaugaacuccacaacgaaauacucgagcuggaugaaaaaguggaugaucucagagcugacacuauaagcucacaaauagaacuugcagucuugcuuuccaacgaaggaauaauaaacagugaagaugagcaucuauuggcacuugagagaaaacuaaagaaaaugcugggucccucugcuguagacauaggaaacggaugcuucgaaaccaaacacaaaugcaaccagaccugcuuagacaggauagcugcuggcaccuuuaaugcaggagaauuuucucuccccacuuuugauucauugaacauuacugcugcaucuuuaaaugaugauggauuggauaaccauacuauacugcucuauuacucaacugcugcuucuaguuuggcuguaacauuaaugcuagcuauuuuuauuguuuauauggucuccagagacaacguuucaugcuccaucugucuauaa

SEQ ID NO: 60533 - RNA, 1755 nt, Artificial Sequence; identical to SEQ ID NO: 60521
  derived and/or modified CDS sequence (wt) from hemagglutinin__InfluenzaB__ALN39803

SEQ ID NO: 60534 - RNA, 1755 nt, Artificial Sequence
  derived and/or modified CDS sequence (wt) from hemagglutinin__InfluenzaB__ALN39804
augaaggcaauaauuguacuacucaugguaguaacauccaaugcagaucgaaucugcacugggauaacaucuucaaacucaccucauguggucaaaacagcuacucaaggggaggucaaugugacuggcgugauaccacugacaacaacaccaacaaaaucuuauuuugcaaaucucaaaggaacaaggaccagagggaaacuaugcccggacugucucaacuguacagaucuggauguggccuugggcaggccaauguguguggggaccacaccuucugcuaaagcuucaauacuccaugaggucagaccuguuacauccgggugcuuuccuauaaugcacgacagaacaaaaaucaggcaacuacccaaucuucucagaggauaugaaaagaucagguuaucaacccaaaacguuaucgaugcagaaaaagcaccaggaggacccuacagacuuggaaccucaggaucuugcccuaacgcuaccaguaaaaucggauuuuuugcaacaauggcuugggcugucccaaaggacaacuacaaaaaugcaacgaacccacaaacaguggaaguaccauacauuuguacagaaggggaagaccaaauuacuguuuggggguuccauucggauaacaaaacccaaaugaagagccucuauggagacucaaauccucaaaaguucaccucaucugcuaauggaguaaccacacauuauguuucucagauuggcgacuucccagaucaaacagaagacggaggacuaccacaaagcggcagaauuguuguugauuacaugaugcaaaaaccugggaaaacaggaacaauugucuaucaaagggguguuuuguugccucaaaagguguggugcgcgaguggcaggagcaaaguaauaaaagggucauugccuuuaauuggugaagcagauugccuucaugaagaauacgguggauuaaacaaaagcaagccuuacuacacaggaaaacaugcaaaagccauaggaaauugcccaauauggguaaaaacaccuuugaagcuugccaauggaaccaaauauagaccuccugcaaaacuauugaaggaaagggguuucuucggagcuauugcugguuuccuagaaggaggaugggaaggaaugauugcagguuggcacggauacacaucucacggagcacauggaguggcaguggcggcagaccuuaagaguacacaagaagcuauaaauaagauaacaaaaaaucucaauucuuugagugaacuagaaguaaagaaccuucaaagacuaaguggugccauggaugaacuccacaacgaaauacucgagcuggaugaaaaaguggaugaucucagagcugacacuauaagcucacaaauagaacuugcagucuugcuuuccaacgaaggaauaauaaacagugaagacgagcaucuauuggcacuugagagaaaacuaaagaaaaugcugggucccucugcuguagacauaggaaacggaugcuucgaaaccaaacacaaaugcaaccagaccugcuuagacaggauagcugcuggcaccuuuaaugcaggagaauuuucucuccccacuuuugauucauugaacauuacugcugcaucuuuaaaugaugauggauuggauaaccauacuauacugcucuauuacucaacugcugcuucuaguuuggcuguaacauuaaugcuagcccuuuuuauuguuuauauggucuccagagacaacguuucaugcuccauuugucuauaa

SEQ ID NO: 60535 - RNA, 1758 nt, Artificial Sequence; identical to SEQ ID NO: 60487
  derived and/or modified CDS sequence (wt) from hemagglutinin__InfluenzaB__ALN39805

SEQ ID NO: 60536 - RNA, 1758 nt, Artificial Sequence
  derived and/or modified CDS sequence (wt) from hemagglutinin__InfluenzaB__ACN29380
augaaggcaauaauuguacuacucaugguaguaacauccaaugcagaucgaaucugcacuggaauaacaucgucaaacucaccacaugucgucaaaacugcuacucaaggggaggucaaugugacugguguaauaccacugacaacaacacccaccaaaucucauuuugcaaaucucaaaggaacagaaaccagggggaaacuaugcccaaaaugccucaacugcacagaucuggacguagccuugggcagaccaaaaugcacggggaaaauacccucggcaagaguuucaauacuccaugaagucagaccuguuacaucugggugcuuuccuauaaugcacgacagaacaaaaauuagacagcugccuaaccuucuccgaggauacgaacauaucagguuaucaacccauaacguuaucaaugcagaaaaugcaccaggaggacccuacaaaauuggaaccucagggucuugcccuaacauuaccaauggaaacggauuuuucgcaacaauggcuugggccgucccaaaaaacgacaaaaacaaaacagcaacaaauccauuaacaauagaaguaccauacauuuguacagaaggagaagaccaaauuaccguuuggggguuccacucugacaacgagacccaaauggcaaagcucuauggggacucaaagccccagaaguucaccucaucugccaacggagugaccacacauuacguuucacagauugguggcuucccaaaucaaacagaagacggaggacuaccacaaagugguagaauuguuguugauuacauggugcaaaaaucugggaaaacaggaacaauuaccuaucaaagggguauuuuauugccucaaaagguguggugcgcaaguggcaggagcaagguaauaaaaggauccuugccuuuaauuggagaagcagauugccuccacgaaaaauacgguggauuaaacaaaagcaagccuuacuacacaggggaacaugcaaaggccauaggaaauugcccaauaugggugaaaacacccuugaagcuggccaauggaaccaaauauagaccuccugcaaaacuauuaaaggaaagggguuucuucggagcuauugcugguuucuuagaaggaggaugggaaggaaugauugcagguuggcacggauacacaucccauggggcacauggaguagcgguggcagcagaccuuaagagcacucaagaggccauaaacaagauaacaaaaaaucucaacucuuugagugagcuggaaguaaagaaucuucaaagacuaagcggugccauggaugaacuccacaacgaaauacuagaacuagaugagaaaguggaugaucucagagcugauacaauaagcucacaaauagaacucgcaguccugcuuuccaaugaaggaauaauaaacagugaagaugaacaucucuuggcgcuugaaagaaagcugaagaaaaugcugggccccucugcuguagagauagggaauggaugcuuugaaaccaaacacaagugcaaccagaccugucucgacagaauagcugcugguaccuuugaugcaggagaauuuucucuccccaccuuugauucacugaauauuacugcugcaucuuuaaaugacgauggauuggauaaucauacuauacugcuuuacuacucaacugcugccuccaguuuggcuguaacacugaugauagcuaucuuuguuguuuauauggucuccagagacaauguuucuugcuccaucugucuauaa

SEQ ID NO: 60537 - RNA, 1758 nt, Artificial Sequence
  derived and/or modified CDS sequence (wt) from hemagglutinin__InfluenzaB__EPI498048
augaaggcaauaauuguacuacucaugguaguaacauccaaugcagaucgaaucugcacugggauaacaucgucaaacucaccacaugucgucaaaacugcuacucaaggggaggucaaugugacugguguaauaccacugacaacaacacccaccaaaucucauuuugcaaaucucaaaggaacagaaaccagggggaaacuaugcccaaaaugccucaacugcacagaucuggacguagccuugggcagaccaaaaugcacggggaaaauacccucggcaagaguuucaauacuccaugaagucagaccuguuacaucugggugcuuuccuauaaugcacgacagaacaaaaauuagacagcugccuaaccuucuccgaggauacgaacauaucagguuaucaacccauaacguuaucaaugcagaaaaugcaccaggaggacccuacaaaauuggaaccucagggucuugcccuaacauuaccaauggaaacggauuuuucgcaacaauggcuugggccgucccaaaaaacgacaaaaacaaaacagcaacaaauccauuaacaauagaaguaccauacauuuguacagaaggagaagaccaaauuaccguuuggggguuccacucugacagcgagacccaaauggcaaagcucuauggggacucaaagccccagaaguucaccucaucugccaacggagugaccacacauuacguuucacagauugguggcuucccaaaucaaacagaagacggaggacuaccacaaagugguagaauuguuguugauuacauggugcaaaaaucugggaaaacaggaacaauuaccuaucaaagggguauuuuauugccucaaaagguguggugcgcaaguggcaggagcaagguaauaaaaggauccuugccuuuaauuggagaagcagauugccuccacgaaaaauacgguggauuaaacaaaagcaagccuuacuacacaggggaacaugcaaaggccauaggaaauugcccaauaugggugaaaacacccuugaagcuggccaauggaaccaaauauagaccuccugcaaaacuauuaaaggaaagggguuucuucggagcuauugcugguuucuuagaaggaggaugggaaggaaugauugcagguuggcacggauacacaucccauggggcacauggaguagcgguggcagcagaccuuaagagcacucaagaggccauaaacaagauaacaaaaaaucucaacucuuugagugagcuggaaguaaagaaucuucaaagacuaagcggugccauggaugaacuccacaacgaaauacuagaacuagaugagaaaguggaugaucucagagcugauacaauaagcucacaaauagaacucgcaguccugcuuuccaaugaaggaauaauaaacagugaagaugaacaucucuuggcgcuugaaagaaagcugaagaaaaugcugggccccucugcuguagagauagggaauggaugcuuugaaaccaaacacaagugcaaccagaccugucucgacagaauagcugcugguaccuuugaugcaggagaauuuucucuccccaccuuugauucacugaauauuacugcugcaucuuuaaaugacgauggauuggauaaucauacuauacugcuuuacuacucaacugcugccuccaguuuggcuguaacacugaugauagcuaucuuuguuguuuauauggucuccagagacaauguuucuugcuccaucugucuauaa

SEQ ID NO: 60538 - RNA, 1758 nt, Artificial Sequence
  derived and/or modified CDS sequence (wt) from hemagglutinin__InfluenzaB__ANC28539
augaaggcaauaauuguacuacucaugguaguaacauccaaugcagaucgaaucugcacugggauaacaucgucaaacucaccacaugucgucaaaacugcuacucaaggggaggucaaugugacugguguaauaccacugacaacaacacccaccaaaucucauuuugcaaaucucaaaggaacagaaaccagggggaaacuaugcccaaaaugccucaacugcacagaucuggacguagccuugggcagaccaaaaugcacggggaaaauacccucggcaagaguuucaauacuccaugaagucagaccuguuacaucugggugcuuuccuauaaugcacgacagaacaaaaauuagacagcugccuaaccuucuccgaggauacgaacauaucagguuaucaacccauaacguuaucaaugcagaaaaugcaccaggaggacccuacaaaauuggaaccucagggucuugcccuaacauuaccaauggaaacggauuuuucgcaacaauggcuugggccgucccaaaaaacgacaaaaacaaaacagcaacaaauccauuaacaauagaaguaccauacauuuguacagaaggagaagaccaaauuaccguuuggggguuccacucugacaacgaggcccaaauggcaaagcucuauggggacucaaagccccagaaguucaccucaucugccaacggagugaccacacauuacguuucacagauugguggcuucccaaaucaaacagaagacggaggacuaccacaaagugguagaauuguuguugauuacauggugcaaaaaucugggaaaacaggaacaauuaccuaucaaagggguauuuuauugccucaaaagguguggugcgcaaguggcaggagcaagguaauaaaaggauccuugccuuuaauuggagaagcagauugccuccacgaaaaauacgguggauuaaacaaaagcaagccuuacuacacaggggaacaugcaaaggccauaggaaauugcccaauaugggugaaaacacccuugaagcuggccaauggaaccaaauauagaccuccugcaaaacuauuaaaggaaagggguuucuucggagcuauugcugguuucuuagaaggaggaugggaaggaaugauugcagguuggcacggauacacaucccauggggcacauggaguagcgguggcagcagaccuuaagagcacucaagaggccauaaacaagauaacaaaaaaucucaacucuuugagugagcuggaaguaaagaaucuucaaagacuaagcggugccauggaugaacuccacaacgaaauacuagaacuagaugagaaaguggaugaucucagagcugauacaauaagcucacaaauagaacucgcaguccugcuuuccaaugaaggaauaauaaacagugaagaugaacaucucuuggcgcuugaaagaaagcugaagaaaaugcugggccccucugcuguagagauagggaauggaugcuuugaaaccaaacacaagugcaaccagaccugucucgacagaauagcugcugguaccuuugaugcaggagaauuuucucuccccaccuuugauucacugaauauuacugcugcaucuuuaaaugacgauggauuggauaaucauacuauacugcuuuacuacucaacugcugccuccaguuuggcuguaacacugaugauagcuaucuuuguuguuuauauggucuccagagacaauguuucuugcuccaucugucuauaa

SEQ ID NO: 60539 - RNA, 1758 nt, Artificial Sequence
  derived and/or modified CDS sequence (wt) from hemagglutinin__InfluenzaB__EPI827073
augaaggcaauaauuguacuacucaugguaguaacauccaaugcagaucgaaucugcacugggauaacaucgucaaacucaccacaugucgucaaaacugcuacucaaggggaggucaaugugacugguguaauaccacugacaacaacacccaccaaaucucauuuugcaaaucucaaaggaacagaaaccagggggaaacuaugcccaaaaugccucaacugcacagaucuggacguagccuugggcagaccaaaaugcacggggaaaauacccucggcaagaguuucaauacuccaugaagucagaccuguuacaucugggugcuuuccuauaaugcacgacagaacaaaaauuagacagcugccuaaccuucuccgaggauacgaacauaucagguuaucaacccauaacguuaucaaugcagaaaaugcaccaggaggacccuacaaaauuggaaccucagggucuugcccuaacauuaccaauggaaacggauuuuucgcaacaauggcuugggccgucccaaaaaacgacaaaaacaaaacagcaacaaauccauuaacaauagaaguaccauacauuuguacagaaggagaagaccaaauuaccguuugggggcuccacucugacaacgagauccaaauggcaaagcucuauggggacucaaagccccagaaguucaccucaucugccaacggagugaccacacauuacguuucacagauugguggcuucccaaaucaaacagaagacggaggacuaccacaaagugguagaauuguuguugauuacauggugcaaaaaucugggaaaacaggaacaauuaccuaucaaagggguauuuuauugccucaaaagguguggugcgcaaguggcaggagcaagguaauaaaaggauccuugccuuuaauuggagaagcagauugccuccacgaaaaauacgguggauuaaacaaaagcaagccuuacuacacaggggaacaugcaaaggccauaggaaauugcccaauaugggugaaaacacccuugaagcuggccaauggaaccaaauauagaccuccugcaaaacuauuaaaggaaagggguuucuucggagcuauugcugguuucuuagaaggaggaugggaaggaaugauugcagguuggcacggauacacaucccauggggcacauggaguagcgguggcagcagaccuuaagagcacucaagaggccauaaacaagauaacaaaaaaucucaacucuuugagugagcuggaaguaaagaaucuucaaagacuaagcggugccauggaugaacuccacaacgaaauacuagaacuagaugagaaaguggaugaucucagagcugauacaauaagcucacaaauagaacucgcaguccugcuuuccaaugaaggaauaauaaacagugaagaugaacaucucuuggcgcuugaaagaaagcugaagaaaaugcugggccccucugcuguagagauagggaauggaugcuuugaaaccaaacacaagugcaaccagaccugucucgacagaauagcugcugguaccuuugaugcaggagaauuuucucuccccaccuuugauucacugaauauuacugcugcaucuuuaaaugacgauggauuggauaaucauacuauacugcuuuacuacucaacugcugccuccaguuuggcuguaacacugaugauagcuaucuuuguuguuuauauggucuccagagacaauguuucuugcuccaucugucuauaa

SEQ ID NO: 60540 - RNA, 1758 nt, Artificial Sequence; identical to SEQ ID NO: 58759
  derived and/or modified CDS sequence (wt) from hemagglutinin__InfluenzaB__EPI244699

SEQ ID NO: 60541 - RNA, 1758 nt, Artificial Sequence; identical to SEQ ID NO: 58752
  derived and/or modified CDS sequence (wt) from hemagglutinin__InfluenzaB__EPI244702

SEQ ID NO: 60542 - RNA, 1755 nt, Artificial Sequence
  derived and/or modified CDS sequence (wt) from hemagglutinin__InfluenzaB__EPI540671
augaaggcaauaauuguacuacucaugguaguaacauccaacgcagaucgaaucugcacugggauaacaucuucaaacucaccucauguggucaaaacagcuacucaaggggaggucaaugugacuggcgugauaccacugacaacaacaccaacaaaaucuuauuuugcaaaucucaaaggaacaaggaccagagggaaacuaugcccggacugucucaacuguacagaucuggauguggccuugggcaggccaauguguguggggaccacaccuucugcuaaagcuucaauacuccaugaggucagaccuguuacauccgggugcuuuccuauaaugcacgacagaacaaaaaucaggcaacuacccaaucuucucagaggauaugaaaagaucagguuaucaacccaaaacguuaucgaugcagaaaaagcaccaggaggacccuacagacuuggaaccucaggaucuugcccuaacgcuaccaguaaaaucggauuuuuugcaacaauggcuugggcugucccaaaggacaacuacaaaaaugcaacgaacccacuaacaguggaaguaccauacauuuguacagaaggggaagaccaaauuacuguuuggggguuccauucggauaacaaaacccaaaugaagagccucuauggagacucaaauccucaaaaguucaccucaucugcuaauggaguaaccacgcauuauguuucucagauuggcgacuucccagaucaaacagaagacggaggacuaccacaaagcggcagaauuguuguugauuacaugaugcaaaaaccugggaaaacaggaacaauugucuaucaaagggguguuuuguugccucaaaagguguggugcgcgaguggcaggagcaaaguaauaaaagggucauugccuuuaauuggugaagcagauugccuucaugaagaauacgguggauuaaacaaaagcaagccuuacuacacaggaaaacaugcaaaagccauaggaaauugcccaauauggguaaaaacaccuuugaagcuugccaauggaaccaaauauagaccuccugcaaaacuauugaaggaaagggguuucuucggagcuauugcugguuuccuagaaggaggaugggaaggaaugauugcagguuggcacggauacacaucucacggagcacauggaguggcaguggcggcagaccuuaagaguacacaagaagcuauaaauaagauaacaaaaaaucucaauucuuugagugaacuagaaguaaagaaccuucaaagacuaaguggugccauggaugaacuccacaacgaaauacucgagcuggaugaaaaaguggaugaucucagagcugacacuauaagcucacaaauagaacuugcagucuugcuuuccaacgaaggaauaauaaacagugaagacgagcaucuauuggcacuugagagaaaacuaaagaaaaugcugggucccucugcuguagacauaggaaacggaugcuucgaaaccaaacacaaaugcaaccagaccugcuuagacaggauagcugcuggcaccuuuaaugcaggagaauuuucucuccccacuuuugauucauugaacauuacugcugcaucuuuaaaugaugauggauuggauaaccauacuauacugcucuauuacucaacugcugcuucuaguuuggcuguaacauuaaugcuagcuauuuuuauuguuuauauggucuccagagacaacguuucaugcuccaucugucuauaa

SEQ ID NO: 60543 - RNA, 1755 nt, Artificial Sequence
  derived and/or modified CDS sequence (wt) from hemagglutinin__InfluenzaB__EPI573303
augaaggcaauaauuguacuacucaugguaguaacauccaacgcagaucgaaucugcacugggauaacaucuucaaacucaccucauguggucaaaacagcuacucaaggggaggucaaugugacuggcgugauaccacugacaacaacaccaacaaaaucuuauuuugcaaaucucaaaggaacaaggaccagagggaaacuaugcccggacugucucaacuguacagaucuggauguggccuugggcaggccaauguguguggggaccacaccuucugcuaaagcuucaauacuccaugaggucagaccuguuacauccgggugcuuuccuauaaugcacgacagaacaaaaaucaggcaacuacccaaucuucucagaggauaugaaaagaucagguuaucaacccaaaacguuaucgaugcagaaaaagcaccaggaggacccuacagacuuggaaccucaggaucuugcccuaacgcuaccaguaaaaucggauuuuuugcaacaauggcuugggcugucccaaaggacaacuacaaaaaugcaacgaacccacuaacaguggaaguaccauacauuuguacagaaggggaagaccaaauuacuguuuggggguuccauucggaugacaaaacccaaaugaagagccucuauggagacucaaauccucaaaaguucaccucaucugcuaauggaguaaccacgcauuauguuucucagauuggcgacuucccagaucaaacagaagacggaggacuaccacaaagcggcagaauuguuguugauuacaugaugcaaaaaccugggaaaacaggaacaauugucuaucaaagggguguuuuguugccucaaaagguguggugcgcgaguggcaggagcaaaguaauaaaagggucauugccuuuaauuggugaagcagauugccuucaugaagaauacgguggauuaaacaaaagcaagccuuacuacacaggaaaacaugcaaaagccauaggaaauugcccaauauggguaaaaacaccuuugaagcuugccaauggaaccaaauauagaccuccugcaaaacuauugaaggaaagggguuucuucggagcuauugcugguuuccuagaaggaggaugggaaggaaugauugcagguuggcacggauacacaucucacggagcacauggaguggcaguggcggcagaccuuaagaguacacaagaagcuauaaauaagauaacaaaaaaucucaauucuuugagugaacuagaaguaaagaaccuucaaagacuaaguggugccauggaugaacuccacaacgaaauacucgagcuggaugaaaaaguggaugaucucagagcugacacuauaagcucacaaauagaacuugcagucuugcuuuccaacgaaggaauaauaaacagugaagacgagcaucuauuggcacuugagagaaaacuaaagaaaaugcugggucccucugcuguagacauaggaaacggaugcuucgaaaccaaacacaaaugcaaccagaccugcuuagacaggauagcugcuggcaccuuuaaugcaggagaauuuucucuccccacuuuugauucauugaacauuacugcugcaucuuuaaaugaugauggauuggauaaccauacuauacugcucuauuacucaacugcugcuucuaguuuggcuguaacauuaaugcuagcuauuuuuauuguuuauauggucuccagagacaacguuucaugcuccaucugucuauaa

SEQ ID NO: 60544 - RNA, 1755 nt, Artificial Sequence
  derived and/or modified CDS sequence (wt) from hemagglutinin__InfluenzaB__EPI829466
augaaggcaauaauuguacuacucaugguaguaacauccaacgcagaucgaaucugcacugggauaacaucuucaaacucaccucauguggucaaaacagcuacucaaggggaggucaaugugacuggcgugauaccacugacaacaacaccaacaaaaucuuauuuugcaaaucucaaaggaacaaggaccagagggaaacuaugcccggacugucucaacuguacagaucuggauguggccuugggcaggccaauguguguggggaccacaccuucugcuaaagcuucaauacuccaugaggucagaccuguuacauccgggugcuuuccuauaaugcacgacagaacaaaaaucaggcaacuacccaaucuucucagaggauaugaaaagaucagguuaucaacccaaaacguuaucgaugcagaaaaagcaccaggaggacccuacagacuuggaaccucaggaucuugcccuaacgcuaccaguaaaaucggauuuuuugcaacaauggcuugggcugucccaaaggacaacuacaaaaaugcaacgaacccacuaacaguggaaguaccauacauuuguacagaaggggaagaccaaauuacuguuuggggguuccauucggaugacaaaacccaaaugaagagccucuauggagacucaaauccucaaaaguucaccucaucugcuaauggaguaaccacgcauuauguuucucagauuggcgacuucccagaucaaacagaagacgaaggacuaccacaaagcggcagaauuguuguugauuacaugaugcaaaaaccugggaaaacaggaacaauugucuaucaaagggguguuuuguugccucaaaagguguggugcgcgaguggcaggagcaaaguaauaaaagggucauugccuuuaauuggugaagcagauugccuucaugaagaauacgguggauuaaacaaaagcaagccuuacuacacaggaaaacaugcaaaagccauaggaaauugcccaauauggguaaaaacaccuuugaagcuugccaauggaaccaaauauagaccuccugcaaaacuauugaaggaaagggguuucuucggagcuauugcugguuuccuagaaggaggaugggaaggaaugauugcagguuggcacggauacacaucucacggagcacauggaguggcaguggcggcagaccuuaagaguacacaagaagcuauaaauaagauaacaaaaaaucucaauucuuugagugaacuagaaguaaagaaccuucaaagacuaaguggugccauggaugaacuccacaacgaaauacucgagcuggaugaaaaaguggaugaucucagagcugacacuauaagcucacaaauagaacuugcagucuugcuuuccaacgaaggaauaauaaacagugaagacgagcaucuauuggcacuugagagaaaacuaaagaaaaugcugggucccuccgcuguagacauaggaaacggaugcuucgaaaccaaacacaaaugcaaccagaccugcuuagacaggauagcugcuggcaccuuuaaugcaggagaauuuucucuccccacuuuugauucauugaacauuacugcugcaucuuuaaaugaugauggauuggauaaccauacuauacugcucuauuacucaacugcugcuucuaguuuggcuguaacauuaaugcuagcuauuuuuauuguuuauauggucuccagagacaacguuucaugcuccaucugucuauaa

SEQ ID NO: 60545 - RNA, 1755 nt, Artificial Sequence
  derived and/or modified CDS sequence (wt) from hemagglutinin__InfluenzaB__EPI684429
augaaggcaauaauuguacuacucaugguaguaauguccaaugcagaucgaaucugcacugguauaacaucuucaaacucaccucauguggucaaaacagcuacucaaggggaggucaaugugacuggcgugauaccacugacaacaacaccaacaaaaucuuauuuugcaaaucucaaaggaacaaggaccagagggaaacuaugcccggacugucucaacuguacagaucuggauguggccuugggcaggccaauguguguggggaccacaccuucugcuaaagcuucaauacuccaugaggucagaccuguuacauccgggugcuuuccuauaaugcacgacagaacaaaaaucaggcaacuacccaaucuucucagaggauaugaaaagaucagguuaucaacccaaaacguuaucgaugcagaaaaagcaccaggaggacccuacagacuuggaaccucaggaucuugcccuaacgcuaccaguaaaaucggauuuuuugcaacaauggcuugggcugucccaaaggacaacuacaaaaaugcaacgaacccacaaacaguggaaguaccauacauuuguacagaaggggaagaccaaauuacuguuuggggguuccauucggauaacaaaacccaaaugaagagccucuauggagacucaaauccucaaaaguucaccucaucugcuaauggaguaaccacacauuauguuucucagauuggcgacuucccagaucaaacagaagacggaggacuaccacaaagcggcagaauuguuguugauuacauggugcaaaaaccugggaaaacaggaacaauugucuaucaaagggguguuuuguugccucaaaagguguggugcgugaguggcaggagcaaaguaauaaaagggucauugccuuuaauuggugaagcagauugccuucaugaagaauacgguggauuaaacaaaagcaagccuuacuacacaggaaaacaugcaaaagccauaggaaauugcccaauauggguaaaaacaccuuugaagcuugccaauggaaccaaauauagaccuccugcaaaacuauugaaggaaagggguuucuucggagcuauugcugguuuccuagaaggaggaugggaaggaaugauugcagguuggcacggauacacaucucacggagcacauggaguggcaguggcggcagaccuuaagaguacacaagaagcuauaaauaagauaacaaaaaaucucaauucuuugagugaacuagaaguaaagaaccuucaaagacuaaguggugccauggaugaacuccacaacgaaauacucgagcuggaugaaaaaguggaugaucucagagcugacacuauaagcucacaaauagaacuugcagucuugcuuuccaacgaaggaauaauaaacagugaagacgagcaucuauuggcacuugagagaaaacuaaagaaaaugcugggucccucugcuguagacauaggaaacggaugcuucgaaaccaaacacaaaugcaaccagaccugcuuagacaggauagcugcuggcaccuuuaaugcaggagaauuuucucuccccacuuuugauucauugaacauuacugcugcaucuuuaaaugaugacggauuggauaaccauacuauacugcucuauuacucaacugcugcuucuaguuuggcuguaacauuaaugcuagcuauuuuuauuguuuauauggucuccagagacaacguuucaugcuccaucugucuauaa

SEQ ID NO: 60546 - RNA, 1758 nt, Artificial Sequence; identical to SEQ ID NO: 58764
  derived and/or modified CDS sequence (wt) from hemagglutinin__InfluenzaB__AFH58447

SEQ ID NO: 60547 - RNA, 1758 nt, Artificial Sequence
  derived and/or modified CDS sequence (wt) from hemagglutinin__InfluenzaB__EPI173279
augaaggcaauaauuguaauacucaugguaguaacauccaaugcagaucgaaucugcacuggaauaacaucgucaaacucaccacaugucgucaaaacugcuacucaaggggaggucaaugugacuggugugauaccacugacaacaacacccaccaaaucucauuuugcaaaucucaaaggaacagaaaccagggggaaacuaugcccaaaaugccucaacugcacagaucuggacguagccuugggcagaccaaaaugcacggggaaaauacccucggcaagaguuucaauacuccaugaagucagaccuguuacaucugggugcuuuccuauaaugcacgacagaacaaaaauuagacagcugccuaaccuucuccgaggauacgaacauaucagguuaucaacucauaacguuaucaaugcagaaaaugcaccaggaggacccuacaaaauuggaaccucagggucuugcccuaacauuaccaauggaaacggauuuuucgcaacaauggcuugggccgucccaaaaaacgacaaaaacaaaacagcaacaaauccauuaacaauagaaguaccauacauuuguacagaaggagaagaccaaauuaccguuuggggguuccacucugacagcgagacccaaauggcaaagcucuauggggacucaaagccccagaaguucaccucaucugccaacggagugaccacacauuacguuucacagauugguggcuucccaaaucaaacagaagacgggggacuaccacaaagugguagaauuguuguugauuacauggugcaaaaaucugggaaaacaggaacaauuaccuaucaaagggguauuuuauugccucaaaagguguggugcgcaaguggcaggagcaagguaauaaaaggauccuugccuuuaauuggagaagcagauugccuccacgaaaaauacgguggauuaaacaaaagcaagccuuacuacacaggggaacaugcaaaggccauaggaaauugcccaauaugggugaaaacacccuugaagcuggccaauggaaccaaauauagaccuccugcaaaacuauuaaaggaaagggguuucuucggagcuauugcugguuucuuagaaggaggaugggaaggaaugauugcagguuggcacggauacacaucccauggggcacauggaguagcgguggcagcagaccuuaagagcacucaagaggccauaaacaagauaacaaaaaaucucaacucuuugagugagcuggaaguaaagaaucuucaaagacuaagcggugccauggaugaacuccacaacgaaauacuagaacuagaugagaaaguggaugaucucagagcugauacaauaagcucacaaauagaacucgcaguccugcuuuccaaugaaggaauaauaaacagugaagaugaacaucucuuggcgcuugaaagaaagcugaagaaaaugcugggccccucugcuguagagauagggaauggaugcuuugaaaccaaacacaagugcaaccagaccugucucgacagaauagcugcugguaccuuugaugcaggagaauuuucucuccccaccuuugauucacugaauauuacugcugcaucuuuaaaugacgauggauuggauaaucauacuauacugcuuuacuacucaacugcugccuccaguuuggcuguaacacugaugauagcuaucuuuguuguuuauauggucuccagagacaauguuucuugcuccaucugucuauaa

SEQ ID NO: 60548 - RNA, 1758 nt, Artificial Sequence
  derived and/or modified CDS sequence (wt) from hemagglutinin__InfluenzaB__EPI163726
augaaggcaauaauuguacuacucaugguaguaacauccaaugcagaucgaaucugcacugggauaacaucgucaaacucaccacaugucgucaaaacugcuacucaaggggaggucaaugugacugguguaauaccacugacaacaacacccaccaaaucucauuuugcaaaucucaaaggaacagaaaccagggggaaacuaugcccaaaaugccucaacugcacagaucuggacguagccuugggcagaccaaaaugcacggggaaaauacccucggcaagaguuucaauacuccaugaagucagaccuguuacaucugggugcuuuccuauaaugcacgacagaacaaaaauuagacagcugccuaaccuucuccgaggauacgaacauaucagguuaucaacucauaacguuaucaaugcagaaaaugcaccaggaggacccuacaaaauuggaaccucagggucuugcccuaacauuaccaauggaaacggauuuuucgcaacaauggcuugggccgucccaaaaaacgacaaaaacaaaacagcaacaaauccauuaacaauagaaguaccauacauuuguacagaaggagaagaccaaauuaccguuuggggguuccacucugacagcgagacccaaauggcaaagcucuauggggacucaaagccccagaaguucaccucaucugccaacggagugaccacacauuacguuucacagauugguggcuucccaaaucaaacagaagacgggggacuaccacaaagugguagaauuguuguugauuacauggugcaaaaaucugggaaaacaggaacaauuaccuaucaaagggguauuuuauugccucaaaagguguggugcgcaaguggcaggagcaagguaauaaaaggauccuugccuuuaauuggagaagcagauugccuccacgaaaaauacgguggauuaaacaaaagcaagccuuacuacacaggggaacaugcaaaggccauaggaaauugcccaauaugggugaaaacacccuugaagcuggccaauggaaccaaauauagaccuccugcaaaacuauuaaaggaaagggguuucuucggagcuauugcugguuucuuagaaggaggaugggaaggaaugauugcagguuggcacggauacacaucccauggggcacauggaguagcgguggcagcagaccuuaagagcacucaagaggccauaaacaagauaacaaaaaaucucaacucuuugagugagcuggaaguaaagaaucuucaaagacuaagcggugccauggaugaacuccacaacgaaauacuagaacuagaugagaaaguggaugaucucagagcugauacaauaagcucacaaauagaacucgcaguccugcuuuccaaugaaggaauaauaaacagugaagaugaacaucucuuggcgcuugaaagaaagcugaagaaaaugcugggccccucugcuguagagauagggaauggaugcuuugaaaccaaacacaagugcaaccagaccugucucgacagaauagcugcugguaccuuugaugcaggagaauuuucucuccccaccuuugauucacugaauauuacugcugcaucuuuaaaugacgauggauuggauaaucauacuauacugcuuuacuacucaacugcugccuccaguuuggcuguaacacugaugauagcuaucuuuguuguuuauauggucuccagagacaauguuucuuguuccaucugucuauaa

SEQ ID NO: 60549 - RNA, 1758 nt, Artificial Sequence; identical to SEQ ID NO: 60522
  derived and/or modified CDS sequence (wt) from hemagglutinin__InfluenzaB__EPI636340

SEQ ID NO: 60550 - RNA, 1758 nt, Artificial Sequence
  derived and/or modified CDS sequence (wt) from hemagglutinin__InfluenzaB__EPI645995
augaaggcaauaauuguacuacucaugguaguaacauccaaugcagaucgaaucugcacugggauaacaucgucaaacucaccacaugucgucaaaacugcuacucaaggggaggucaaugugaccgguguaauaccacugacaacaacacccaccaaaucucauuuugcaaaucucaaaggaacagaaaccagggggaaacuaugcccaaaaugccucaacugcacagaucuggauguagccuugggcagaccaaaaugcacagggaaaauacccucugcaaggguuucaauacuccaugaagucagaccuguuacaucugggugcuuuccuauaaugcacgauagaacaaaaauuagacagcugccuaaccuucuccgaggauacgaacaugucagguuaucaacucacaacguuaucaaugcagaagaugcaccaggaggacccuacaaaauuggaaccucagggucuugcccuaacauuaccaauggaaacggauucuucgcaacaauggcuugggccgucccaaaaaacgacaaaaacaaaacagcaacaaauccauuaacaauagaaguaccauacauuuguacagaaggagaagaccaaauuaccguuuggggguuccacucugacgacgagacccaaauggcaaagcucuauggggacucaaagccccagaaguucaccucaucugccaacggagugaccacacauuacguuucacagauugguggcuucccaaaucaaacagaagacggaggacuaccacaaaguggcagaauuguuguugauuacauggugcaaaaaucuggaaaaacaggaacaauuaccuaucaaagagguauuuuauugccucaaaagguguggugcgcaaguggcaggagcaagguaauaaaaggauccuugccuuuaauuggagaagcagauugccuccaugaaaaauacgguggauuaaacaaaagcaagccuuacuacacaggggaacaugcaaaggccauaggaaauugcccaauaugggugaaaacacccuugaagcuggccaauggaaccaaauauagaccuccugcaaaacuauuaaaggaaagggguuucuucggagcuauugcugguuucuuagagggaggaugggaaggaaugauugcagguuggcacggauacacaucccauggggcacauggaguagcgguggcagcugaccuuaagagcacucaagaggccauaaacaagauaacaaaaaaucucaacucuuugagugagcuggaaguaaagaaucuucaaagacuaagcggugccauggaugaacuccacaacgaaauacuagaacuagaugagaaaguggaugaucucagagcugauacaauaagcucacaaauagaacucgcaguccugcuuuccaaugaaggaauaauaaacagugaagaugaacaucucuuggcgcuugaaagaaagcugaagaaaaugcugggccccucugcuguagagauagggaauggaugcuuugaaaccaaacacaagugcaaccagaccugucucgacagaauagcugcugguaccuuugaugcaggagaauuuucucuccccaccuuugauucacugaauauuacugcugcaucuuuaaaugacgauggauuggauaaucauacuauacugcuuuacuacucaacugcugccuccaguuuggcuguaacacugaugauagcuaucuuuguuguuuauauggucuccagagacaauguuucuugcuccauuugucuauaa

SEQ ID NO: 60551 - RNA, 1755 nt, Artificial Sequence
  derived and/or modified CDS sequence (wt) from hemagglutinin__InfluenzaB__EPI539769
augaaggcaauaauuguacuacucaugguaguaacauccaaugcagaucgaaucugcacugggauaacaucuucaaacucaccucauguggucaaaacagcuacucaaggggaggucaaugugacuggcgugauaccacugacaacaacaccaacaaaaucuuauuuugcaaaucucaaaggaacaaggaccagagggaaacuaugcccggauugucucaacuguacagaucuggauguggccuugggcaggccaauguguguggggaccacaccuucugcuaaagcuucaauacuccaugaggucagaccuguuacauccgggugcuuuccuauaaugcacgacagaacaaaaaucaggcaacuacccaaucuucucagaggauaugaaaagaucagguuaucaacccaaaacguuaucgaugcagaaaaagcaccaggaggacccuacagacuuggaaccucaggaucuugcccuaacgcuaccaguaaaauuggauuuuuugcaacaauggcuugggcugucccaaaggacaacuacaaaaaugcaacgaacccacuaacaguggaaguaccauacauuuguacagaaggggaagaccaaauuacuguuuggggguuccauucggauaacaaaacccaaaugaagagccucuauggagacucaaauccucaaaaguucaccucaucugcuaauggaguaaccacacauuauguuucucagauuggcgacuucccagaucaaacagaagacggaggacuaccacaaagcggcagaauuguuguugauuacaugaugcaaaaaccugggaaaacaggaacaauugucuaucaaagggguguuuuguugccucaaaagguguggugcgcgaguggcaggagcaaaguaauaaaagggucauugccuuuaauuggugaagcagauugccuucaugaagaauacgguggauuaaacaaaagcaagccuuacuacacaggaaaacaugcaaaagccauaggaaauugcccaauauggguaaaaacaccuuugaagcuugccaauggaaccaaauauagaccuccugcaaaacuauugaaggaaagggguuucuucggagcuauugcugguuuccuagaaggaggaugggaaggaaugauugcagguuggcacggauacacaucucacggagcacauggaguggcaguggcggcagaccuuaagaguacacaagaagcuauaaauaagauaacaaaaaaucucaauucuuugagugaacuagaaguaaagaaccuucaaagacuaaguggugccauggaugaacuccacaacgaaauacucgagcuggaugaaaaaguggaugaucucagagcugacacuauaagcucacaaauagaacuugcagucuugcuuuccaacgaaggaauaauaaacagugaagacgagcaucuacuggcacuugagagaaaacuaaagaaaaugcugggucccucugcuguagacauaggaaacggaugcuucgaaaccaaacacaaaugcaaccagaccugcuuagacaggauagcugcuggcaccuuuaaugcaggagaauuuucucuccccacuuuugauucauugaacauuacugcugcaucuuuaaaugaugauggauuggauaaccauacuauacugcucuauuacucaacugcugcuucuaguuuggcuguaacauuaaugcuagcuauuuuuauuguuuauauggucuccagagacaacguuucaugcuccaucugucuauaa

SEQ ID NO: 60552 - RNA, 1755 nt, Artificial Sequence
  derived and/or modified CDS sequence (wt) from hemagglutinin__InfluenzaB__EPI551249
augaaggcaauaauuguacuacucaugguaguaacauccaaugcagaucgaaucugcacugggauaacaucuucaaacucaccucauguggucaaaacagcuacucaaggggaggucaaugugacuggcgugauaccacugacaacaacaccaacaaaaucuuauuuugcaaaucucaaaggaacaaggaccagagggaaacuaugcccggauugucucaacuguacagaucuggauguggccuugggcaggccaauguguguggggaccacaccuucugcuaaagcuucaauacuccaugaggucagaccuguuacauccgggugcuuuccuauaaugcacgacagaacaaaaaucaggcaacuacccaaucuucucagaggauaugaaaagaucagguuaucaacccaaaacguuaucgaugcagaaaaagcaccaggaggacccuacagacuuggaaccucaggaucuugcccuaacgcuaccaguaaaauuggauuuuuugcaacaauggcuugggcugucccaaaggacaacuacaaaaaugcaacgaacccacuaacaguggaaguaccauacauuuguacagaaggggaagaccaaauuacuguuuggggguuccauucggaugacaaaacccaaaugaagagccucuauggagacucaaauccucaaaaguucaccucaucugcuaauggaguaaccacacauuauguuucucagauuggcgacuucccagaucaaacagaagacggaggacuaccacaaagcggcagaauuguuguugauuacaugaugcaaaaaccugggaaaacaggaacaauugucuaucaaagggguguuuuguugccucaaaagguguggugcgcgaguggcaggagcaaaguaauaaaagggucauugccuuuaauuggugaagcagauugccuucaugaagaauacgguggauuaaacaaaagcaagccuuacuacacaggaaaacaugcaaaagccauaggaaauugcccaauauggguaaaaacaccuuugaagcuugccaauggaaccaaauauagaccuccugcaaaacuauugaaggaaagggguuucuucggagcuauugcugguuuccuagaaggaggaugggaaggaaugauugcagguuggcacggauacacaucucacggagcacauggaguggcaguggcggcagaccuuaagaguacacaagaagcuauaaauaagauaacaaaaaaucucaauucuuugagugaacuagaaguaaagaaccuucaaagacuaaguggugccauggaugaacuccacaacgaaauacucgagcuggaugaaaaaguggaugaucucagagcugacacuauaagcucacaaauagaacuugcagucuugcuuuccaacgaaggaauaauaaacagugaagacgagcaucuacuggcacuugagagaaaacuaaagaaaaugcugggucccucugcuguagacauaggaaacggaugcuucgaaaccaaacacaaaugcaaccagaccugcuuagacaggauagcugcuggcaccuuuaaugcaggagaauuuucucuccccacuuuugauucauugaacauuacugcugcaucuuuaaaugaugauggauuggauaaccauacuauacugcucuauuacucaacugcugcuucuaguuuggcuguaacauuaaugcuagcuauuuuuauuguuuauauggucuccagagacaacguuucaugcuccaucugucuauaa

SEQ ID NO: 60553 - RNA, 1755 nt, Artificial Sequence
  derived and/or modified CDS sequence (wt) from hemagglutinin__InfluenzaB__EPI544259
augaaggcaauaauuguacuacucaugguaguaacauccaaugcagaucgaaucugcacugggauaacaucuucaaacucaccucauguggucaaaacagcuacucaaggggaggucaaugugacuggcgugauaccacugacaacaacaccaacaaaaucuuauuuugcaaaucucaaaggaacaaggaccagagggaaacuaugcccggauugucucaacuguacagaucuggauguggccuugggcaggccaauguguguggggaccacaccuucugcuaaagcuucaauacuccaugaggucagaccuguuacauccgggugcuuuccuauaaugcacgacagaacaaaaaucaggcaacuacccaaucuucucagaggauaugaaaagaucagguuaucaacccaaaacguuaucgaugcagaaaaagcaccaggaggacccuacagacuuggaaccucaggaucuugcccuaacgcuaccaguaaaauuggauuuuuugcaacaauggcuugggcugucccaaaggacaacuacaaaaaugcaacgaacccacuaacaguggaaguaccauacauuuguacagaaggggaagaccaaauuacuguuuggggguuccauucggauaacaaaaaccaaaugaagagccucuauggagacucaaauccucaaaaguucaccucaucugcuaauggaguaaccacacauuauguuucucagauuggcgacuucccagaucaaacagaagacggaggacuaccacaaagcggcagaauuguuguugauuacaugaugcaaaaaccugggaaaacaggaacaauugucuaucaaagggguguuuuguugccucaaaagguguggugcgcgaguggcaggagcaaaguaauaaaagggucauugccuuuaauuggugaagcagauugccuucaugaagaauacgguggauuaaacaaaagcaagccuuacuacacaggaaaacaugcaaaagccauaggaaauugcccaauauggguaaaaacaccuuugaagcuugccaauggaaccaaauauagaccuccugcaaaacuauugaaggaaagggguuucuucggagcuauugcugguuuccuagaaggaggaugggaaggaaugauugcagguuggcacggauacacaucucacggagcacauggaguggcaguggcggcagaccuuaagaguacacaagaagcuauaaauaagauaacaaaaaaucucaauucuuugagugaacuagaaguaaagaaccuucaaagacuaaguggugccauggaugaacuccacaacgaaauacucgagcuggaugaaaaaguggaugaucucagagcugacacuauaagcucacaaauagaacuugcagucuugcuuuccaacgaaggaauaauaaacagugaagacgagcaucuacuggcacuugagagaaaacuaaagaaaaugcugggucccucugcuguagacauaggaaacggaugcuucgaaaccaaacacaaaugcaaccagaccugcuuagacaggauagcugcuggcaccuuuaaugcaggagaauuuucucuccccacuuuugauucauugaacauuacugcugcaucuuuaaaugaugauggauuggauaaccauacuauacugcucuauuacucaacugcugcuucuaguuuggcuguaacauuaaugcuagcuauuuuuauuguuuauauggucuccagagacaacguuucaugcuccaucugucuauaa

SEQ ID NO: 60554 - RNA, 1755 nt, Artificial Sequence
  derived and/or modified CDS sequence (wt) from hemagglutinin__InfluenzaB__EPI592699
augaaggcaauaauuguacuacucaugguaguaacauccaaugcagaucgaaucugcacugggauaacaucuucaaacucaccccauguggucaaaacagcuacucaaggggaggucaaugugacuggcgugauaccacugacaacaacaccaacaaaaucuuauuuugcaaaucucaaaggaacaaggaccagagggaaacuaugcccggacugucucaacuguacagaucuggauguggccuugggcaggccaauguguguggggaccacaccuucugcuaaagcuucaauacuccaugaggucagaccuguuacauccgggugcuuuccuauaaugcacgacagaacaaaaaucaggcaacuacccaaucuucucagaggauaugaaaagaucagguuaucaacccaaaacguuaucgaugcagaaaaagcaccaggaggacccuacagacuuggaaccucaggaucuugcccuaacgcuaccaguaaaaucggauuuuuugcaacaauggcuugggcugucccaaaggacaacuacaaaaaugcaacaaacccacaaacaguggaaguaccauacauuuguacagaaggggaagaccaaauuacuguuuggggguuccauucggauaacaaaauccaaaugaagagccucuauggagacucaaauccucaaaaguucaccucaucugcuaauggaguaaccacacauuaugucucucagauuggcgacuucccagaucaaacagaagacggaggacuaccacaaagcggcagaauuguuguugauuacauggugcaaaaaccugggaaaacaggaacaauugucuaucaaagggguguuuuguugccucaaaagguguggugcgcgaguggcaggagcaaaguaauaaaagggucauugccuuuaauuggugaagcagauugccuucaugaagaauacgguggauuaaacaaaagcaagccuuacuacacaggaaaacaugcaaaagccauaggaaauugcccaauauggguaaaaacaccuuugaagcuugccaauggaaccaaauauagaccuccugcaaaacuauugaaggaaagggguuucuucggagcuauugcugguuuccuagaaggaggaugggaaggaaugauugcagguuggcacggauacacaucucacggagcacauggaguggcaguggcggcagaccuuaagaguacacaagaagcuauaaauaagauaacaaaaaaucucaauucuuugagugaacuagaaguaaagaaccuucaaagacuaaguggugccauggaugaacuccacaacgaaauacucgagcuggaugaaaaaguggaugaucucagagcugacacuauaagcucacaaauagaacuugcagucuugcuuuccaacgaaggaauaauaaacagugaagacgagcaucuauuggcacuugagagaaaacuaaagaaaaugcugggucccucugcuguagacauaggaaacggaugcuucgaaaccaaacacaaaugcaaccagaccugcuuagacaggauagcugcuggcaccuuuaaugcaggagaauuuucucuccccacuuuugauucauugaacauuacugcugcaucuuuaaaugaugauggauuggauaaccauacuauacugcucuauuacucaacugcugcuucuaguuuggcuguaacauuaaugcuagcuauuuuuauuguuuauauggucuccagagacaacguuucaugcuccaucugucuauaa

SEQ ID NO: 60555 - RNA, 1755 nt, Artificial Sequence
  derived and/or modified CDS sequence (wt) from hemagglutinin__InfluenzaB__EPI592707
augaaggcaauaauuguacuacucaugguaguaacauccaaugcagaucgaaucugcacugggauaacaucuucaaacucaccccauguggucaaaacagcuacucaaggggaggucaaugugacuggcgugauaccacugacaacaacaccaacaaaaucuuauuuugcaaaucucaaaggaacaaggaccagagggaaacuaugcccggacugucucaacuguacagaucuggauguggccuugggcaggccaauguguguggggaccacaccuucugcuaaagcuucaauacuccaugaggucagaccuguuacauccgggugcuuuccuauaaugcacgacagaacaaaaaucaggcaacuacccaaucuucucagaggauaugaaaagaucagguuaucaacccaaaacguuaucgaugcagaaaaagcaccaggaggacccuacagacuuggaaccucaggaucuugcccuaacgcuaccaguaaaaucggauuuuuugcaacaauggcuugggcugucccaaaggacaacuacaaaaaugcaacaaacccacaaacaguggaaguaccauacauuuguacagaaggggaagaccaaauuacuguuuggggguuccauucggauaacaaaacccaaaugaagagccucuauggagacucaaauccucaaaaguucaccucaucugcuaauggaguaaccacacauuaugucucucagauuggcgacuucccagaucaaacagaagacggaggacuaccacaaagcggcagaauuguuguugauuacauggugcaaaaaccugggaaaacaggaacaauugucuaucaaagggguguuuuguugccucaaaagguguggugcgcgaguggcaggagcaaaguaauaaaagggucauugccuuuaauuggugaagcagauugccuucaugaagaauacgguggauuaaacaaaagcaagccuuacuacacaggaaaacaugcaaaagccauaggaaauugcccaauauggguaaaaacaccuuugaagcuugccaauggaaccaaauauagaccuccugcaaaacuauugaaggaaagggguuucuucggagcuauugcugguuuccuagaaggaggaugggaaggaaugauugcagguuggcacggauacacaucucacggagcacauggaguggcaguggcggcagaccuuaagaguacacaagaagcuauaaauaagauaacaaaaaaucucaauucuuugagugaacuagaaguaaagaaccuucaaagacuaaguggugccauggaugaacuccacaacgaaauacucgagcuggaugaaaaaguggaugaucucagagcugacacuauaagcucacaaauagaacuugcagucuugcuuuccaacgaaggaauaauaaacagugaagacgagcaucuauuggcacuugagagaaaacuaaagaaaaugcugggucccucugcuguagacauaggaaacggaugcuucgaaaccaaacacaaaugcaaccagaccugcuuagacaggauagcugcuggcaccuuuaaugcaggagaauuuucucuccccacuuuugauucauugaacauuacugcugcaucuuuaaaugaugauggauuggauaaccauacuauacugcucuauuacucaacugcugcuucuaguuuggcuguaacauuaaugcuagcuauuuuuauuguuuauauggucuccagagacaacguuucaugcuccaucugucuauaa

SEQ ID NO: 60556 - RNA, 1755 nt, Artificial Sequence
  derived and/or modified CDS sequence (wt) from hemagglutinin__InfluenzaB__EPI693094
augaaggcaauaauuguacuacucaugguaguaacauccaaugcagaucgaaucugcacugggauaacaucuucaaacucaccccauguggucaaaacagcuacucaaggggaggucaaugugacuggcgugauaccacugacaacaacaccaacaaaaucuuauuuugcaaaucucaaaggaacaaggaccagagggaaacuaugcccggacugucucaacuguacagaucuggauguggccuugggcaggccaauguguguggggaccacaccuucugcuaaagcuucaauacuccaugaggucagaccuguuacauccgggugcuuuccuauaaugcacgacagaacaaaaaucaggcaacuacccaaucuucucagaggauaugaaaagaucagguuaucaacccaaaacguuaucgaugcagaaaaagcaccaggaggacccuacagacuuggaaccucagaaucuugcccuaacgcuaccaguaaaaucggauuuuuugcaacaauggcuugggcugucccaaaggacaacuacaaaaaugcaacaaacccacaaacaguggaaguaccauacauuuguacagaaggggaagaccaaauuacuguuuggggguuccauucggauaacaaaauccaaaugaagagccucuauggagacucaaauccucaaaaguucaccucaucugcuaauggaguaaccacacauuaugucucucagauuggcgacuucccagaucaaacagaagacggaggacuaccacaaagcggcagaauuguuguugauuacauggugcaaaaaccugggaaaacaggaacaauugucuaucaaagggguguuuuguugccucaaaagguguggugcgcgaguggcaggagcaaaguaauaaaagggucauugccuuuaauuggugaagcagauugccuucaugaagaauacgguggauuaaacaaaagcaagccuuacuacacaggaaaacaugcaaaagccauaggaaauugcccaauauggguaaaaacaccuuugaagcuugccaauggaaccaaauauagaccuccugcaaaacuauugaaggaaagggguuucuucggagcuauugcugguuuccuagaaggaggaugggaaggaaugauugcagguuggcacggauacacaucucacggagcacauggaguggcaguggcggcagaccuuaagaguacacaagaagcuauaaauaagauaacaaaaaaucucaauucuuugagugaacuagaaguaaagaaccuucaaagacuaaguggugccauggaugaacuccacaacgaaauacucgagcuggaugaaaaaguggaugaucucagagcugacacuauaagcucacaaauagaacuugcagucuugcuuuccaacgaaggaauaauaaacagugaagacgagcaucuauuggcacuugagagaaaacuaaagaaaaugcugggucccucugcuguagacauaggaaacggaugcuucgaaaccaaacacaaaugcaaccagaccugcuuagacaggauagcugcuggcaccuuuaaugcaggagaauuuucucuccccacuuuugauucauugaacauuacugcugcaucuuuaaaugaugauggauuggauaaccauacuauacugcucuauuacucaacugcugcuucuaguuuggcuguaacauuaaugcuagcuauuuuuauuguuuauauggucuccagagacaacguuucaugcuccaucugucuauaa

SEQ ID NO: 60557 - RNA, 1758 nt, Artificial Sequence
  derived and/or modified CDS sequence (wt) from hemagglutinin__InfluenzaB__EPI678796
augaaggcaauaauuguacuacucaugguaguaacauccaaugcagaucgaaucugcacugggauaacaucgucaaacucaccacaugucgucaaaacugcuacucaaggggaggucaaugugaccgguguaauaccacugacaacaacacccaccaaaucucauuuugcaaaucucaaaggaacagaaaccagggggaaacuaugcccaaaaugccucaacugcacagaucuggauguagccuugggcagaccaaaaugcacagggaaaauacccucugcaaggguuucaauacuccaugaagucagaccuguuacaucugggugcuuuccuauaaugcacgauagaacaaaaauuagacagcugccuaaccuucuccgaggauacgaacaugucagguuaucaacucacaacguuaucaaugcagaagaugcaccaggaggacccuacaaaauuggaaccucagggucuugcccuaacauuaccaauggaaacggauucuucgcaacaauggcuugggccgucccaaaaaacgacaaaaacaaaacagcaacaaauccauuaacaauagaaguaccauacauuuguacagaaggagaagaccaaauuaccguuuggggguuccacucugacaacgagacccaaauggcaaagcucuauggggacucaaagccccagaaguucaccucaucugccaacggagugaccacacauuacguuucacagauugguggcuucccaaaucaaacagaagacggaggacuaccacaaagugguagaauuguuguugauuacauggugcaaaaaucuggaaaaacaggaacaauuaccuaucaaagagguauuuuauugccucaaaagguguggugcgcaaguggcaggagcaagguaauaaaaggauccuugccuuuaauuggagaagcagauugccuccaugaaaaauacgguggauuaaacaaaagcaagccuuacuacacaggggaacaugcaaaggccauaggaaauugcccaauaugggugaaaacacccuugaagcuggccaauggaaccaaauauagaccuccugcaaaacuauuaaaggaaagggguuucuucggagcuauugcugguuucuuagagggaggaugggaaggaaugauugcagguuggcacggauacacaucccauggggcacauggaguagcgguggcagcugaccuuaagagcacucaagaggccauaaacaagauaacaaaaaaucucaacucuuugagugagcuggaaguaaagaaucuucaaagacuaagcggugccauggaugaacuccacaacgaaauacuagaacuagaugagaaaguggaugaucucagagcugauacaauaagcucacaaauagaacucgcaguccugcuuuccaaugaaggaauaauaaacagugaagaugaacaucucuuggcgcuugaaagaaagcugaagaaaaugcugggccccucugcuguagagauagggaauggaugcuuugaaaccaaacacaagugcaaccagaccugucucgacagaauagcugcugguaccuuugaugcaggagaauuuucucuccccaccuuugauucacuuaauauuacugcugcaucuuuaaaugacgauggauuggauaaucauacuauacugcuuuacuacucaacugcugccuccaguuuggcuguaacacugaugauagcuaucuuuguuguuuauauggucuccagagacaauguuucuugcuccauuugucuauaa

SEQ ID NO: 60558 - RNA, 1758 nt, Artificial Sequence
  derived and/or modified CDS sequence (wt) from hemagglutinin__InfluenzaB__EPI721064
augaaggcaauaauuguacuacucaugguaguaacauccaaugcagaucgaaucugcacugggauaacaucgucaaacucaccacaugucgucaaaacugcuacucaaggggaggucaaugugaccgguguaauaccacugacaacaacacccaccaaaucucauuuugcaaaucucaaaggaacagaaaccagggggaaacuaugcccaaaaugccucaacugcacagaucuggauguagccuugggcagaccaaaaugcacagggaaaauacccucugcaaggguuucaauacuccaugaagucagaccuguuacaucugggugcuuuccuauaaugcacgauagaacaaaaauuagacagcugccuaaccuucuccgaggauacgaacaugucagguuaucaacucacaacguuaucaaugcagaagaugcaccaggaggacccuacaaaauuggaaccucaaggucuugcccuaacauuaccaauggaaacggauucuucgcaacaauggcuugggccgucccaaaaaacgacaaaaacaaaacagcaacaaauccauuaacaauagaaguaccauacauuuguacagaaggagaagaccaaauuaccguuuggggguuccacucugacaacgagacccaaauggcaaagcucuauggggacucaaagccccagaaguucaccucaucugccaacggagugaccacacauuacguuucacagauugguggcuucccaaaucaaacagaagacggaggacuaccacaaagugguagaauuguuguugauuacauggugcaaaaaucuggaaaaacaggaacaauuaccuaucaaagagguauuuuauugccucaaaagguguggugcgcaaguggcaggagcaagguaauaaaaggauccuugccuuuaauuggagaagcagauugccuccaugaaaaauacgguggauuaaacaaaagcaagccuuacuacacaggggaacaugcaaaggccauaggaaauugcccaauaugggugaaaacacccuugaagcuggccaauggaaccaaauauagaccuccugcaaaacuauuaaaggaaagggguuucuucggagcuauugcugguuucuuagagggaggaugggaaggaaugauugcagguuggcacggauacacaucccauggggcacauggaguagcgguggcagcugaccuuaagagcacucaagaggccauaaacaagauaacaaaaaaucucaacucuuugagugagcuggaaguaaagaaucuucaaagacuaagcggugccauggaugaacuccacaacgaaauacuagaacuagaugagaaaguggaugaucucagagcugauacaauaagcucacaaauagaacucgcaguccugcuuuccaaugaaggaauaauaaacagugaagaugaacaucucuuggcgcuugaaagaaagcugaagaaaaugcugggccccucugcuguagagauagggaauggaugcuuugaaaccaaacacaagugcaaccagaccugucucgacagaauagcugcugguaccuuugaugcaggagaauuuucucuccccaccuuugauucacuuaauauuacugcugcaucuuuaaaugacgauggauuggauaaucauacuauacugcuuuacuacucaacugcugccuccaguuuggcuguaacacugaugauagcuaucuuuguuguuuauauggucuccagagacaauguuucuugcuccauuugucuauaa

SEQ ID NO: 60559 - RNA, 1758 nt, Artificial Sequence; identical to SEQ ID NO: 58768
  derived and/or modified CDS sequence (wt) from hemagglutinin__InfluenzaB__EPI328904

SEQ ID NO: 60560 - RNA, 1755 nt, Artificial Sequence
  derived and/or modified CDS sequence (wt) from hemagglutinin__InfluenzaB__EPI543191
augaaggcaauaauuguacuacuuaugguaguaacauccaaugcagaucgaaucugcacugggauaacaucuucaaacucaccucauguggucaaaacagcuacucaaggggaggucaaugugacuggcgugauaccacugacaacaacaccaacaaaaucuuauuuugcaaaucucaaaggaacaaggaccagagggaaacuaugcccggacugucucaacuguacagaucuggauguggccuugggcaggccaauguguguggggaccacaccuucugcuaaagcuucaauacuccacgaggucagaccuguuacauccgggugcuuuccuauaaugcacgacagaacaaaaaucaggcaacuacccaaucuucucagaggauaugaaaagaucagguuaucaacccaaaacguuaucgaugcagaaaaagcaccaggaggacccuacagacuuggaaccucaggaucuugcccuaacgcuaccaguaaaaucggauuuuucgcaacaauggcuugggcugucccaaaggacaacuacaaaaaugcaacgaacccacuaacaguggaaguaccauacauuuguacagaaggggaagaccaaauuacuguuuggggguuccauucagauaaaaaaacccaaaugaagagccuauauggagacucaaauccucaaaaguucaccucaucugcuaauggaguaaccacacauuauguuucucagauuggcgacuucccagaucaaacagaagacggaggacuaccacaaagcggcagaauuguuguugauuacaugaugcaaaaaccugggaaaacaggaacaauugucuaucaaagagguguuuuauugccucaaaagguguggugcgcgaguggcaggagcaaaguaauaaaagggucauugccuuuaauuggugaagcagauugccuucaugaagaauacgguggauuaaacaaaagcaagccuuacuacacaggaaaacaugcaaaagccauaggaaauugcccaauauggguaaaaacaccuuugaagcuugccaauggaaccaaauauagaccuccugcaaaacuauugaaggaaagggguuucuucggagcuauugcugguuuccuagaaggaggaugggaaggaaugauugcagguuggcacggauacacaucucacggagcacauggaguggcaguggcggcagaccuuaagaguacacaagaagccauaaauaagauaacaaaaaaucucaauucuuugagugagcuagaaguaaagaaccuucaaagacuaaguggugccauggaugaacuccacaacgaaauacucgaacuggaugagaaaguggaugaucucagagcugacacuauaagcucacaaauagaacuugcagucuugcuuuccaacgaaggaauaauaaacagugaagacgagcauuuauuggcacuugagagaaaacuaaagaaaaugcugggucccucugcuguagacauaggaaacggaugcuucgaaaccaaacacaaaugcaaccagaccugcuuagacaggauagcugcuggcaccuuuaaugcaggagaauuuucccuccccacuuuugauucauugaacauuacugcugcaucuuuaaaugaugauggauuggauaaccauacuauacugcucuauuacucaacugcugcuucuaguuuggcuguaacauuaaugcuagcuauuuuuauuguuuauauggucuccagagacaacguuucaugcuccaucugucuauaa

SEQ ID NO: 60561 - RNA, 1755 nt, Artificial Sequence
  derived and/or modified CDS sequence (wt) from hemagglutinin__InfluenzaB__EPI500359
augaaggcaauaauuguacuacuuaugguaguaacauccaaugcagaucgaaucugcacugggauaacaucuucaaacucaccucauguggucaaaacagcuacucaaggggaggucaaugugacuggcgugauaccacugacaacaacaccaacaaaaucuuauuuugcaaaucucaaaggaacaaggaccagagggaaacuaugcccggacugucucaacuguacagaucuggauguggccuugggcaggccaauguguguggggaccacaccuucugcuaaagcuucaauacuccacgaggucagaccuguuacauccgggugcuuuccuauaaugcacgacagaacaaaaaucaggcaacuacccaaucuucucagaggauaugaaaagaucagguuaucaacccaaaacguuaucgaugcagaaaaagcaccaggaggacccuacagacuuggaaccucaggaucuugcccuaacgcuaccaguaaaaucggauuuuucgcaacaauggcuugggcugucccaaaggacaacuacaaaaaugcaacgaacccacuaacaguggaaguaccauacauuuguacagaaggggaagaccaaauuacuguuuggggguuccauucagauaacaaaacccaaaugaagagccuauauggagacucaaauccucaaaaguucaccucaucugcuaauggaguaaccacacauuauguuucucagauuggcgacuucccagaucaaacagaagacggaggacuaccacaaagcggcagaauuguuguugauuacaugaugcaaaaaccugggaaaacaggaacaauugucuaucaaagagguguuuuauugccucaaaagguguggugcgcgaguggcaggagcaaaguaauaaaagggucauugccuuuaauuggugaagcagauugccuucaugaagaauacgguggauuaaacaaaagcaagccuuacuacacaggaaaacaugcaaaagccauaggaaauugcccaauauggguaaaaacaccuuugaagcuugccaauggaaccaaauauagaccuccugcaaaacuauugaaggaaagggguuucuucggagcuauugcugguuuccuagaaggaggaugggaaggaaugauugcagguuggcacggauacacaucucacggagcacauggaguggcaguggcggcagaccuuaagaguacacaagaagccauaaauaagauaacaaaaaaucucaauucuuugagugagcuagaaguaaagaaccuucaaagacuaaguggugccauggaugaacuccacaacgaaauacucgaacuggaugagaaaguggaugaucucagagcugacacuauaagcucacaaauagaacuugcagucuugcuuuccaacgaaggaauaauaaacagugaagacgagcauuuauuggcacuugagagaaaacuaaagaaaaugcugggucccucugcuguagacauaggaaacggaugcuucgaaaccaaacacaaaugcaaccagaccugcuuagacaggauagcugcuggcaccuuuaaugcaggagaauuuucccuccccacuuuugauucauugaacauuacugcugcaucuuuaaaugaugauggauuggauaaccauacuauacugcucuauuacucaacugcugcuucuaguuuggcuguaacauuaaugcuagcuauuuuuauuguuuauauggucuccagagacaacguuucaugcuccaucugucuauaa

SEQ ID NO: 60562 - RNA, 1755 nt, Artificial Sequence
  derived and/or modified CDS sequence (wt) from hemagglutinin__InfluenzaB__EPI543185
augaaggcaauaauuguacuacucaugguaguaacauccaaugcagaucgaaucugcacugggauaacaucuucaaacucaccucauguggucaaaacagcuacucaaggggaggucaaugugacuggcgugauaccacugacaacaacaccaacaaaaucuuauuuugcaaaucucaaaggaacaaggaccagagggaaacuaugcccggacugucucaacuguacagaucuggauguggccuugggcaggccaauguguguggggaccacaccuucugcuaaagcuucaauacuccaugaggucagaccuguuacauccgggugcuuuccuauaaugcacgacagaacaaaaaucaggcaacuacccaaucuucucagaggauaugaaaagaucagguuaucaacccaaaacguuaucgaugcagaaaaagcaccaggaggacccuacagacuuggaaccucaggaucuugcccuaacgcuaccaguaaaaucggauuuuuugcaacaauggcuugggcugucccaaaggacaacuacaaaaaugcaacgaacccacaaacaguggaaguaccauacauuuguacagaaggggaagaccaaauuacuguuuggggguuccauucggauaacaaaaaccaaaugaagagccucuauggagacucaaauccucaaaaguucaccucaucugcuaauggaguaaccacacauuauguuucucagauuggcgacuucccagaucaaacagaagacggaggacuaccacaaagcggcagaauuguuguugauuacaugaugcaaaaaccugggaaaacaggaacaauugucuaucaaagggguguuuuguugccucaaaagguguggugcgcgaguggcaggagcaaaguaauaaaagggucauugccuuuaauuggugaagcagauugccuucaugaagaauacgguggauuaaacaaaagcaagccuuacuacacaggaaaacaugcaaaagccauaggaaauugcccaauauggguaaaaacaccuuugaagcuugccaauggaaccaaauauagaccuccugcaaaacuauugaaggaaagggguuucuucggagcuauugcugguuuccuagaaggaggaugggaaggaaugauugcagguuggcacggauacacaucccacggagcacauggaguggcaguggcggcagaccuuaagaguacacaagaagcuauaaauaagauaacaaaaaaucucaauucuuugagugaacuagaaguaaagaaccuucaaagacuaaguggugccauggaugaacuccacaacgaaauacucgagcuggaugaaaaaguggaugaucucagagcugacacuauaagcucacaaauagaacuugcagucuugcuuuccaacgaaggaauaauaaacagugaagacgagcaucuauuggcacuugagagaaaacuaaagaaaaugcugggucccucugcuguagacauaggaaacggaugcuucgaaaccaaacacaaaugcaaccagaccugcuuagacaggauagcugcuggcaccuuuaaugcaggagaauuuucucuccccacuuuugauucauugaacauuacugcugcaucuuuaaaugaugauggauuggauaaccauacuauacugcucuauuacucaacugcugcuucuaguuuggcuguaacauuaaugcuagcuauuuuuauuguuuauauggucuccagagacaacguuucaugcuccaucugucuauaa

SEQ ID NO: 60563 - RNA, 1755 nt, Artificial Sequence
  derived and/or modified CDS sequence (wt) from hemagglutinin__InfluenzaB__EPI536447
augaaggcaauaauuguacuacucaugguaguaacauccaaugcagaucgaaucugcacugggauaacaucuucaaacucaccucauguggucaaaacagcuacucaaggggaggucaaugugacuggcgugauaccacugacaacaacaccaacaaaaucuuauuuugcaaaucucaaaggaacaaggaccagagggaaacuaugcccggacugucucaacuguacagaucuggauguggccuugggcaggccaauguguguggggaccacaccuucugcuaaagcuucaauacuccaugaggucagaccuguuacauccgggugcuuuccuauaaugcacgacagaacaaaaaucaggcaacuacccaaucuucucagaggauaugaaaagaucagguuaucaacccaaaacguuaucgaugcagaaaaagcaccaggaggacccuacagacuuggaaccucaggaucuugcccuaacgcuaccaguaaaaucggauuuuuugcaacaauggcuugggcugucccaaaggacaacuacaaaaaugcaacgaacccacaaacaguggaaguaccauacauuuguacagaaggggaagaccaaauuacuguuuggggguuccauucggauaacaaaacccaaaugaagagccucuauggagacucaaauccucaaaaguucaccucaucugcuaauggaguaaccacacauuauguuucucagauuggcgacuucccagaucaaacagaagacggaggacuaccacaaagcggcagaauuguuguugauuacaugaugcaaaaaccugggaaaacaggaacaauugucuaucaaagggguguuuuguugccucaaaagguguggugcgcgaguggcaggagcaaaguaauaaaagggucauugccuuuaauuggugaagcagauugccuucaugaagaauacgguggauuaaacaaaagcaagccuuacuacacaggaaaacaugcaaaagccauaggaaauugcccaauauggguaaaaacaccuuugaagcuugccaauggaaccaaauauagaccuccugcaaaacuauugaaggaaagggguuucuucggagcuauugcugguuuccuagaaggaggaugggaaggaaugauugcagguuggcacggauacacaucccacggagcacauggaguggcaguggcggcagaccuuaagaguacacaagaagcuauaaauaagauaacaaaaaaucucaauucuuugagugaacuagaaguaaagaaccuucaaagacuaaguggugccauggaugaacuccacaacgaaauacucgagcuggaugaaaaaguggaugaucucagagcugacacuauaagcucacaaauagaacuugcagucuugcuuuccaacgaaggaauaauaaacagugaagacgagcaucuauuggcacuugagagaaaacuaaagaaaaugcugggucccucugcuguagacauaggaaacggaugcuucgaaaccaaacacaaaugcaaccagaccugcuuagacaggauagcugcuggcaccuuuaaugcaggagaauuuucucuccccacuuuugauucauugaacauuacugcugcaucuuuaaaugaugauggauuggauaaccauacuauacugcucuauuacucaacugcugcuucuaguuuggcuguaacauuaaugcuagcuauuuuuauuguuuauauggucuccagagacaacguuucaugcuccaucugucuauaa

SEQ ID NO: 60564 - RNA, 1755 nt, Artificial Sequence
  derived and/or modified CDS sequence (wt) from hemagglutinin__InfluenzaB__NP_056660
augaaggcaauaauuguacuacucaugguaguaacauccaaugcagaucgaaucugcacugggauaacaucgucaaacucaccucaugugguuaaaacugccacucaaggggaagucaaugugacuggugugauaccacuaacaacaacaccuaccaaaucucauuuugcaaaucucaaaggaacacagaccagaggaaaacuaugcccaaacuguuuuaacugcacagaucuggacguggcccuaggcagaccaaaaugcauggggaacacacccuccgcaaaagucucaauacuccaugaagucaaaccugcuacaucuggaugcuuuccuauaaugcacgacagaacaaaaaucagacaacuaccuaaucuucucagaggauaugaaaacaucagguuaucaaccaguaauguuaucaauacagagacggcaccaggaggacccuacaagguggggaccucaggaucuugcccuaacguugcuaaugggaacggcuucuucaacacaauggcuuggguuaucccaaaagacaacaacaagacagcaauaaauccaguaacaguagaaguaccauacauuuguucagaaggggaagaccaaauuacuguuuggggguuccacucugaugacaaaacccaaauggaaagacucuauggagacucaaauccucaaaaguucaccucaucugccaauggaguaaccacacauuauguuucucagauugguggcuucccaaaucaaacagaagacgaagggcuaaaacaaagcggcagaauuguuguugauuacaugguacaaaaaccuggaaaaacaggaacaauuguuuaucaaagaggcauuuuauugccucaaaaaguguggugcgcaaguggcaggagcaagguaauaaaaggguccuugccuuuaauuggugaagcagauugccuccacgaaaaguacgguggauuaaauaaaagcaagccuuacuacacaggagagcaugcaaaggccauaggaaauugcccaauaugggugaaaacacccuugaagcuggccaauggaaccaaauauagaccgccugcaaaacuauuaaaggaaagagguuucuucggagcuauugcugguuucuuggaaggaggaugggaaggaaugauugcagguuggcacggauacacaucucauggagcacauggaguggcaguggcagcagaccuuaagaguacacaagaagcuauaaacaagauaacaaaaaaucucaacuauuuaagugagcuagaaguaaaaaaccuucaaagacuaagcggagcaaugaaugagcuucacgacgaaauacucgagcuagacgaaaaaguggaugaucuaagagcugauacaauaagcucacaaauagagcuugcagucuugcuuuccaacgaagggauaauaaacagugaagaugagcaucucuuggcacuugaaagaaaacugaagaaaaugcuuggccccucugcuguagaaauagggaaugggugcuuugaaaccaaacacaaaugcaaccagacuugccuagacaggauagcugcuggcaccuuuaaugcaggagauuuuucucuucccacuuuugauucauuaaacauuacugcugcaucuuuaaaugaugauggcuuggauaaucauacuauacugcucuacuacucaacugcugcuucuagcuuggcuguaacauuaaugauagcuaucuucauugucuacauggucuccagagacaauguuucuuguuccaucugucuguga

SEQ ID NO: 60565 - RNA, 1755 nt, Artificial Sequence
  derived and/or modified CDS sequence (wt) from hemagglutinin__InfluenzaB__ABG85167
augaaggcaauaauuguacuacucaugguaguaacauccaaugcagaucgaaucugcacugggauaacaucgucaaacucaccucaugugguuaaaacugccacucaaggggaagucaaugugacuggugugauaccacuaacaacaacaccuaccagaucucauuuugcaaaucucaaaggaacacagaccagaggaaaacuaugcccaaacuguuuuaacugcacagaucuggacguggccuuggguagaccaaaaugcauggggaacauaccuuccgcaaaagucucaauacuccaugaagucaaaccuguuacaucuggaugcuuuccuauaaugcacgacagaacaaaaaucagacaacuaccuaaucuucucagaggauaugaaaacaucagguuaucaaccaguaauguuaucaaugcagagacggcaccaggaggacccuacaagguggggaccucaggaucuugcccuaacguugcuaauaggaacggcuucuucaacacaauggcuuggguuaucccaaaagacaacaacaagacagcaauaaauccaguaacaguagaaguaccauacauuuguucagaaggggaagaccaaauuacuguuuggggguuccacucugaugacaaaacccaaauggaaagacucuauggagacucaaauccucaaaaguucaccucaucugccaauggaguaaccacacauuauguuucucagauugguggcuucccaaaucaaacagaagacgaaggguuaaaacaaagcggcagaauuguuguugauuacaugguacaaaaaccuggaaaaacaggaacaauuguuuaucaaagaggcauuuuauugccucaaaaaguguggugcgcaaguggcaggagcaagguaauaaaaggguccuugccuuuaauuggugaagcagauugccuccacgaaaaguacgguggauuaaauaaaagcaagccuuacuacacaggagagcaugcaaaggccauaggaaauugcccaauaugggugaaaacacccuugaagcuagccaauggaaccaaauauagaccgccugcaaaacuauuaaaggaaagagguuucuucggagcuauugcugguuucuuggaaggaggaugggaaggaaugauugcagguuggcacggauacacaucucauggagcacauggaguggcaguggcagcagaccuuaagaguacacaagaagcuauaaacaagauaacaaaaaaucucaacucuuuaagugagcuagaaguaaaaaaccuucaaagacuaagcggagcaaugaaugggcuucacgacgaaauacucgagcuagacgaaaaaguggaugaucuaagagcugauacaauaagcucacaaauagagcuugcagucuugcuuuccaacgaagggauaauaaacagugaagaugagcaucucuuggcacuugaaagaaaacugaagaaaaugcugggccccucugcuguagaaauagggaaugggugcuuugaaaccaaacacaaaugcaaccagacuugccuagacaggauagcugcuggcaccuuuaaugcaggagauuuuucucuucccacuuuugauucauuaaacauuacugcugcaucuuuaaaugaugaugacuuggauaaucauacuauacugcucuacuacucaacugcugcuucuagcuuggcuguaacauugaugauagcuaucuucauugucuacauggucuccagagacaauguuucuuguuccaucugucuguga

SEQ ID NO: 60566 - RNA, 1755 nt, Artificial Sequence
  derived and/or modified CDS sequence (wt) from hemagglutinin__InfluenzaB__EPI376346
augaaggcaauaauuguacuacuaaugguaguaacauccaaugcagaucgaaucugcacugggauaacaucuucaaacucaccucauguggucaaaacagcuacucaaggggaggucaaugugacuggugugauaccacuaacaacaacaccaacaaaaucuuauuuugcaaaucucaaaggaacaaagaccagagggaaacuaugcccagacugucucaacuguacagaucuggauguggcccugggcaggccaaugugugugggaacuacaccuucugcgaaagccucaauacuucacgaagucagaccuguuacauccgggugcuucccuauaaugcacgacagaacaaaaaucaggcaacuagccaaucuucucagaggauaugaaaauaucagguuaucaacccaaaacguuaucgaugcagaaaaggcaccaggaggacccuacagacuuggaaccucaggaucuugcccuaacgcuaccaguaaaagcggauuuuucgcaacaauggcuugggcugucccaaaggacaacaacaaaaaugcaacgaacccauuaacaguagaaguaccauacauuugugcagaaggggaagaccaaauuacuguuuggggguuccauucagaugacaaaacccaaaugaagaaccucuauggagacucaaauccucaaaaguucaccucaucugcuaauggaguaaccacacauuauguuucucagauuggcggcuucccagaucaaacagaagacggaggacuaccacaaagcggcagaauugucguugauuacaugaugcaaaaaccugggaaaacaggaacaauugucuaucaaagagguguuuuguugccucaaaagguguggugcgcgaguggcaggagcaaaguaauaaaaggguccuugccuuuaauuggugaagcagauugccuucaugaaaaauacgguggauuaaacaaaagcaagccuuacuacacaggagaacaugcaaaagccauaggaaauugcccaauaugggugaaaacaccuuugaagcuugccaauggaaccaaauauagaccuccugcaaaacuauuaaaggaaagggguuucuucggagcuauugcugguuuccuagaaggaggaugggaaggaaugauugcagguuggcacggauacacaucucacggagcacauggaguggcaguugcugcagaccuuaagagcacacaagaagcuauaaacaagauaacaaaaaaucucaacucuuugagugagcuagaaguaaagaaucuucaaaggcuaaguggugccauggaugaacuccacaacgaaauacucgagcuggaugagaaaguggaugaccucagagcugacacuauaaguucacaaauagaacuugcagucuugcuuuccaacgaaggaauaauaaacagugaagacgagcaucuauuggcacuugagagaaaacuaaagaaaaugcugggucccucugcuguagacauaggaaauggaugcuucgaaaccaaacacaaaugcaaccagaccugcuuagacaggauagcugcuggcaccuuuaaugcaggagaguuuucucuccccacuuuugauucauugaacauuacugcugcaucuuuaaaugaugauggauuggauaaccauacuauacugcucuauuacucaacugcugcuucuaguuuggcuguaacauugaugcuagcuauuuuuauuguuuauauggucuccagagacaacguuucaugcuccaucugucuauaa

SEQ ID NO: 60567 - RNA, 1755 nt, Artificial Sequence
  derived and/or modified CDS sequence (wt) from hemagglutinin__InfluenzaB__EPI368425
augaaggcaauaauuguacuacuaaugguaguaacauccaaugcagaucgaaucugcacugggauaacaucuucaaacucaccucauguggucaaaacagcuacucaaggggaggucaaugugacuggugugauaccacuaacaacaacaccaacaaaaucuuauuuugcaaaucucaaaggaacaaagaccagagggaaacuaugcccagacugucucaacuguacagaucuggauguggcccugggcaggccaaugugugugggaacuacaccuucugcgaaagcuucaauacuucacgaagucagaccuguuacauccgggugcuucccuauaaugcacgacagaacaaaaaucaggcaacuagccaaucuucucagaggauaugaaaauaucagguuaucaacccaaaacguuaucgaugcagaaaaggcaccaggaggacccuacagacuuggaaccucaggaucuugcccuaacgcuaccaguaaaagcggauuuuucgcaacaauggcuugggcugucccaaaggacaacaacaaaaaugcaacgaacccauuaacaguagaaguaccauacauuugugcagaaggggaagaccaaauuacuguuuggggguuccauucagauaacaaaacccaaaugaagaaccucuauggagacucaaauccucaaaaguucaccucaucugcuaauggaguaaccacacauuauguuucucagauuggcggcuucccagaucaaacagaagacggaggacuaccacaaagcggcagaauugucguugauuacaugaugcaaaaaccugggaaaacaggaacaauugucuaucaaagagguguuuuguugccucaaaagguguggugcgcgaguggcaggagcaaaguaauaaaaggguccuugccuuuaauuggugaagcagauugccuucaugaaaaauacgguggauuaaacaaaagcaagccuuacuacacaggagaacaugcaaaagccauaggaaauugcccaauaugggugaaaacaccuuugaagcuugccaauggaaccaaauauagaccuccugcaaaacuauuaaaggaaagggguuucuucggagcuauugcugguuuccuagaaggaggaugggaaggaaugauugcagguuggcacggauacacaucucacggagcacauggaguggcaguugcugcagaccuuaagagcacacaagaagcuauaaacaagauaacaaaaaaucucaacucuuugagugagcuagaaguaaagaaucuucaaaggcuaaguggugccauggaugaacuccacaacgaaauacucgagcuggaugagaaaguggaugaccucagagcugacacuauaaguucacaaauagaacuugcagucuugcuuuccaacgaaggaauaauaaacagugaagacgagcaucuauuggcacuugagagaaaacuaaagaaaaugcugggucccucugcuguagacauaggaaauggaugcuucgaaaccaaacacaaaugcaaccagaccugcuuagacaggauagcugcuggcaccuuuaaugcaggagaguuuucucuccccacuuuugauucauugaacauuacugcugcaucuuuaaaugaugauggauuggauaaccauacuauacugcucuauuacucaacugcugcuucuaguuuggcuguaacauugaugcuagcuauuuuuauuguuuauauggucuccagagacaacguuucaugcuccaucugucuauaa

SEQ ID NO: 60568 - RNA, 1755 nt, Artificial Sequence; identical to SEQ ID NO: 58838
  derived and/or modified CDS sequence (wt) from hemagglutinin__InfluenzaB__ACH53430

SEQ ID NO: 60569 - RNA, 1758 nt, Artificial Sequence
  derived and/or modified CDS sequence (wt) from hemagglutinin__InfluenzaB__EPI331151
augaaggcaauaauuguacuacucaugguaguaacauccaaugcagaucgaaucugcacugggauaacaucgucaaacucaccacaugucgucaaaacugcuacucaaggggaggucaaugugaccgguguaauaccacugacaacaacacccaccaaaucucauuuugcaaaucucaaaggaacagaaaccagggggaaacuaugcccaaaaugccucaacugcacagaucuggacguagccuugggcagaccaaaaugcacggggaaaauacccucggcaagaguuucaauacuccaugaagucagaccuguuacaucugggugcuuuccuauaaugcacgauagaacaaaaauuagacagcugccuaaccuucuccgaggauacgaacauaucagguuaucaacucauaacguuaucaaugcagaaaaugcaccaggaggacccuacaaaauuggaaccucagggucuugcccuaacguuaccaauggaaacggauucuucgcaacaauggcuugggccgucccaaaaaacgacaaaaacaaaacagcaacaaauccauuaacaauagaaguaccauacauuuguacagaaggagaagaccaaauuaccguuuggggguuccacucugacaacgagacccaaauggcaaagcucuauggggacucaaagccccagaaguucaccucaucugccaacggagugaccacacauuacguuucacagauugguggcuucccaaaucaaacagaagacggaggacuaccacaaagugguagaauuguuguugauuacauggugcaaaaaucugggaaaacaggaacaauuaccuaucaaagagguauuuuauugccucaaaagguguggugcgcaaguggcaggagcaagguaauaaaaggauccuugccuuuaauuggagaagcagauugccuccacgaaaaauacgguggauuaaacaaaagcaagccuuacuacacaggggaacaugcaaaggccauaggaaauugcccaauaugggugaaaacacccuugaagcuggccaauggaaccaaauauagaccuccugcaaaacuauuaaaggaaagggguuucuucggagcuauugcugguuucuuagaaggaggaugggaaggaaugauugcagguuggcacggauacacaucccauggggcacauggaguagcgguggcagcagaccuuaagagcacucaagaggccauaaacaagauaacaaaaaaucucaacucuuugagugagcuggaaguaaagaaucuucaaagacuaagcggugccauggaugaacuccacaacgaaauacuagaacuagaugagaaaguggaugaucucagagcugauacaauaagcucacaaauagaacucgcaguccugcuuuccaaugaaggaauaauaaacagugaagaugaacaucucuuggcgcuugaaagaaagcugaagaaaaugcugggccccucugcuguagagauagggaauggaugcuuugaaaccaaacacaagugcaaccagaccugucucgacagaauagcugcugguaccuuugaugcaggagaauuuucucuccccaccuuugauucacugaauauuacugcugcaucuuuaaaugacgauggauuggauaaucauacuauacugcuuuacuacucaacugcugccuccaguuuggcuguaacacugaugauagcuaucuuuguuguuuauauggucuccagagacaauguuucuuguuccaucugucuauaa

SEQ ID NO: 60570 - RNA, 1758 nt, Artificial Sequence
  derived and/or modified CDS sequence (wt) from hemagglutinin__InfluenzaB__EPI356777
augaaggcaauaauuguacuacucaugguaguaacauccaaugcagaucgaaucugcacugggauaacaucgucaaacucaccacaugucgucaaaacugcuacucaaggggaggucaaugugaccgguguaauaccacugacaacaacacccaccaaaucucauuuugcaaaucucaaaggaacagaaaccagggggaaacuaugcccaaaaugccucaacugcacagaucuggacguagccuugggcagaccaaaaugcacggggaaaauacccucggcaagaguuucaauacuccaugaagucagaccuguuacaucugggugcuuuccuauaaugcacgauagaacaaaaauuagacagcugccuaaccuucuccgaggauacgaacauaucagguuaucaacucauaacguuaucaaugcagaaaaugcaccaggaggacccuacaaaauuggaaccucagggucuugcccuaacguuaccaauggaaacggauucuucgcaacaauggcuugggccgucccaaaaaacgacaaaaacaaaacagcaacaaauccauuaacaauagaaguaccauacauuuguacagaaggagaagaccaaauuaccguuuggggguuccacucugacgacgagacccaaauggcaaagcucuauggggacucaaagccccagaaguucaccucaucugccaacggagugaccacacauuacguuucacagauugguggcuucccaaaucaaacagaagacggaggacuaccacaaagugguagaauuguuguugauuacauggugcaaaaaucugggaaaacaggaacaauuaccuaucaaagagguauuuuauugccucaaaagguguggugcgcaaguggcaggagcaagguaauaaaaggauccuugccuuuaauuggagaagcagauugccuccacgaaaaauacgguggauuaaacaaaagcaagccuuacuacacaggggaacaugcaaaggccauaggaaauugcccaauaugggugaaaacacccuugaagcuggccaauggaaccaaauauagaccuccugcaaaacuauuaaaggaaagggguuucuucggagcuauugcugguuucuuagaaggaggaugggaaggaaugauugcagguuggcacggauacacaucccauggggcacauggaguagcgguggcagcagaccuuaagagcacucaagaggccauaaacaagauaacaaaaaaucucaacucuuugagugagcuggaaguaaagaaucuucaaagacuaagcggugccauggaugaacuccacaacgaaauacuagaacuagaugagaaaguggaugaucucagagcugauacaauaagcucacaaauagaacucgcaguccugcuuuccaaugaaggaauaauaaacagugaagaugaacaucucuuggcgcuugaaagaaagcugaagaaaaugcugggucccucugcuguagagauagggaauggaugcuuugaaaccaaacacaagugcaaccagaccugucucgacagaauagcugcugguaccuuugaugcaggagaauuuucucuccccaccuuugauucacugaauauuacugcugcaucuuuaaaugacgauggauuggauaaucauacuauacugcuuuacuacucaacugcugccuccagucuggcuguaacacugaugauagcuaucuuuguuguuuauauggucuccagagacaauguuucuuguuccaucugucuauaa

SEQ ID NO: 60571 - RNA, 1752 nt, Artificial Sequence; identical to SEQ ID NO: 58439
  derived and/or modified CDS sequence (wt) from hemagglutinin__InfluenzaB__CY018349

SEQ ID NO: 60572 - RNA, 1752 nt, Artificial Sequence
  derived and/or modified CDS sequence (wt) from hemagglutinin__InfluenzaB__AY581945
augaaggcaauaauuguacuacucaugguaguaacauccaacgcagaucgaaucugcacugggauaacaucuucaaacucaccucauguggucaaaacagcuacucaaggggaagucaaugugacuggugugauaccacugacaacaacaccaacaaaaucucauuuugcaaaucuaaaaggaacaaagaccagagggaaacuaugcccaaacugucucaacugcacagaucuggauguggccuuggcgagaccaauguguguggggaccacaccuucggcaaaagcuucaauacuccacgaagucagaccuguuacauccgggugcuuuccuauaaugcacgacagaacaaaaaucagacagcuacccaaucuucucagaggauaugaaaauaucagauuaucaacccaaaacguuaucaacgcagaaagagcaccaggaggacccuacagacuuggaaccucaggaucuugcccuaacguuaccaguagagacggauucuucgcaacaauggcuugggcugucccaagggacaacaaaacagcaacgaauccacuaacaguagaaguaccauacauuuguacaaaaggagaagaccaaauuacuguuuggggguuccauucugauaacaaaacccaaaugaaaaaccucuauggagacucaaauccucaaaaguucaccucaucugccaauggaguaaccacacauuauguuucucagauugguggcuucccaaaucaaacagaagacggagggcuaccacaaagcggcagaauuguuguugauuacauggugcaaaaaccugggaaaacaggaacaauugucuaucaaagagguguuuuguugccucaaaagguguggugcgcaaguggcaggagcaagguaauaaaaggguccuugccuuuaauuggugaagcagauugccuucacgaaaaauacgguggauuaaacaaaagcaagccuuacuacacaggagaacaugcaaaagccauaggaaauugcccaauaugggugaaaacaccuuugaagcuugccaauggaaccaaauauagaccuccugcaaaacuauuaaaggaaagggguuucuucggagcuauugcugguuucuuagaaggaggaugggaaggaaugauugcagguuggcacggauacacaucucauggagcacauggaguggcaguggcagcagaccuuaagaguacgcaagaagccauaaacaagauaacaaaaaaucucaauucuuugagugagcuagaaguaaagaaucuucaaagacuaaguggugccauggaugaacuccacaacgaaauacucgagcuggaugagaaaguggaugaucucagagcugacacaauaagcucgcaaauagagcuugcagucuugcuuuccaacgaaggaauaauaaacagugaagaugagcaucuauuggcacuugagagaaaacuaaagaaaaugcugggucccucugcuguagacauagggaauggaugcuucgaaaccaaacacaagugcaaccagaccugcuuagacaggauagcugcuggcaccuuuaaugcaggagaauuuucucuucccacuuuugauucacugaauauuacugcugcaucuuuaaaugaugauggauuggauaaucauacuauacugcucuacuacucaacugcugcuucuaguuuggcuguaacauugaugauagcuauuuuuauuguuuauauggucuccagagacaauguuucuugcuccaucugucuauaa

SEQ ID NO: 60573 - RNA, 1755 nt, Artificial Sequence
  derived and/or modified CDS sequence (wt) from hemagglutinin__InfluenzaB__EPI541351
augaaggcaauaauuguacuacucaugguaguaacauccaaugcagaucgaaucugcacugggauaacaucuucaaacucaccucauguggucaaaacagcuacucaaggggaggucaaugugacuggugugauaccacuaacaacaacaccaacaaaaucuuauuuugcaaaucucaaaggaacaaagaccagagggaaacuaugcccagacugucucaacuguacagaucuggauguggccuugggcaggccaaugugugugggaacuacaccuucugcgaaagcuucaauacuucacgaagucagaccuguuacauccgggugcuucccuauaaugcacgacagaacaaaaaucaggcaacuagccaaucuucucagaggauaugaaaauaucagguuaucaacccaaaacguuaucgaugcagaaaaagcaccaggaggacccuacagacuuggaaccucaggaucuugcccaaacgcuaccaguaaaagcggauuuuucgcaacaauggcuugggcugucccaaaggacaacaacaaaaaugcaacgaacccauuaacaguagagguaccauacauuugugcagaaggagaagaccaaauuacuguuuggggguuccauucggauaacaaaacccaaaugaagaaccucuauggagacucaaauccccaaaaguucaccucaucugcuaauggaguaaccacacauuauguuucucagauuggcggcuucccagaucaaagagaagacggaggacuaccacaaagcggcagaauugucguugauuacaugaugcaaaaaccugggaaaacaggaacaauugucuaucaaagagguguuuuguugccucaaaagguguggugcgcgaguggcaggagcaaaguaauaaaaggguccuugccuuuaauuggugaagcagauugccuucaugaaaaauacgguggauuaaacaaaagcaagccuuacuacacaggagaacaugcaaaagccauaggaaauugcccaauaugggugaaaacaccuuugaagcuugccaauggaaccaaauauagaccuccugcaaaacuauuaaaggaaagggguuucuucggagcuauugcugguuuccuagaaggaggaugggaaggaaugauugcagguuggcacggauacacaucucacggagcacauggaguggcaguugcugcagaccuuaagagcacacaagaagcuauaaacaagauaacaaaaaaucucaacucuuugagugagcuagaaguaaagaaucuucaaaggcuaaguggugccauggaugaacuccacaacgaaauacucgagcuggaugagaaaguggaugaucucagagcugacacuauaaguucacaaauagaacuugcagucuugcuuuccaacgaaggaauaauaaacagugaagaugagcaucuauuggcacuugagagaaaacuaaagaaaaugcugggucccucugcuguagacauagggaauggaugcuucgaaaccaaacacaaaugcaaccagaccugcuuagacaggauagcugcuggcaccuuuaaugcaggagaauuuucucuccccacuuuugauucauugaacauuacugcugcaucuuuaaaugaugauggauuggauaaccauacuauacugcucuauuacucaacugcugcuucuaguuuggcuguaacauugaugcuagcuauuuuuauuguuuauauggucuccagagacaacguuucaugcuccaucugucuauaa

SEQ ID NO: 60574 - RNA, 1755 nt, Artificial Sequence
  derived and/or modified CDS sequence (wt) from hemagglutinin__InfluenzaB__EPI541760
augaaggcaguaauuguacuacucaugguaguaacauccaaugcagaucgaaucugcacugggauaacaucuucaaacucaccucauguggucaaaacagcuacucaaggggaggucaaugugacuggcgugauaccacugacaacaacaccaacaaaaucuuauuuugcaaaucucaaaggaacaaggaccagagggaaacuaugcccggacugucucaacuguacagaucuggauguggccuugggcaggccaauguguguggggaccacaccuucugcuaaagcuucaauacuccaugaggucagaccuguuacauccgggugcuuuccuauaaugcacgacagaacaaaaaucaggcaacuacccaaucuucucagaggauaugaaaagaucagguuaucaacccaaaacguuaucgaugcagaaaaagcaccaggaggacccuacagacuuggaaccucaggaucuugcccuaacgcuaccaguaaaaucggauuuuuugcaacaauggcuugggcugucccaaaggacaacuacaaaaaugcaacgaacccauuaacaguggaaguaccauacauuuguacagaaggggaagaccaaauuacuguuuggggguuccauucggauaacaaaacccaaaugaagagccucuauggagacucaaauccucaaaaguucaccucaucugcuaauggaguaaccacacauuauguuucucagauuggcgacuucccagaucaaacagaagacggaggacuaccacaaagcggcagaauuguuguugauuacaugaugcaaaaaccugggaaaacaggaacaauugucuaucaaagggguguuuuguugccucaaaagguguggugcgcgagugguaggagcaaaguaauaaaagggucauugccuuuaauuggugaagcagauugccuucaugaagaauacgguggauuaaacaaaagcaagccuuacuacacaggaaaacaugcaaaagccauaggaaauugcccaauauggguaaaaacaccuuugaagcuugccaauggaaccaaauauagaccuccugcaaaacuauugaaggaaagggguuucuucggagcuauugcugguuuccuagaaggaggaugggaaggaaugauugcagguuggcacggauacacaucucacggagcacauggaguggcaguggcggcagaccuuaagaguacacaagaagcuauaaauaagauaacaaaaaaucucaauucuuugagugaacuagaaguaaagaaccuucaaagacuaaguggugccauggaugaacuccacaacgaaauacucgagcuggaugaaaaaguggaugaucucagagcugacacuauaagcucacaaauagaacuugcagucuugcuuuccaacgaaggaauaauaaacagugaagacgagcaucuauuggcacuugagagaaaacuaaagaaaaugcugggucccucugcuguagacauaggaaacggaugcuucgaaaccaaacacaaaugcaaccagaccugcuuagacaggauagcugcuggcaccuuuaaugcaggagaauuuucucuccccacuuuugauucauugaacauuacugcugcaucuuuaaaugaugauggauuggauaaccauacuauacugcucuauuacucaacugcugcuucuaguuuggcuguaacauuaaugcuagcuauuuuuauuguuuauauggucuccagagacaacguuucaugcuccaucugucuauaa

SEQ ID NO: 60575 - RNA, 1758 nt, Artificial Sequence; identical to SEQ ID NO: 58899
  derived and/or modified CDS sequence (wt) from hemagglutinin__InfluenzaB__EPI477397

SEQ ID NO: 60576 - RNA, 1758 nt, Artificial Sequence
  derived and/or modified CDS sequence (wt) from hemagglutinin__InfluenzaB__EPI492571
augaaggcaauaauuguacuacucaugguaguaacauccaaugcagaucgaaucugcacugggauaacaucgucaaacucaccacaugucgucaaaacugcuacucaaggggaggucaaugugaccgguguaauaccacugacaacaacacccaccaaaucucauuuugcaaaucucaaaggaacagaaaccagggggaaacuaugcccaaaaugccucaacugcacagaucuggacguagccuugggcagaccaaaaugcacagggaaaauacccucggcaagaguuucaauacuccaugaagucagaccuguuacaucugggugcuuuccuauaaugcacgauagaacaaaaauuagacagcugccuaaccuucuccgaggauacgaacauaucagguuaucaacucacaacguuaucaaugcagaagaugcaccaggaggacccuacaaaauuggaaccucagggucuugcccuaacguuaccaauggaaacggauucuucgcaacaauggcuugggccgucccaaaaaacgacaaaaacaaaacagcaacaaauccauuaacaauagaaguaccauacauuuguacagaaggagaagaccaaauuaccguuuggggguuccacucugacaucgagacccaaauggcaaagcucuauggggacucaaagccccagaaguucaccucaucugccaacggagugaccacacauuacguuucacagauugguggcuucccaaaucaaacagaagacggaggacuaccacaaagugguagaauuguuguugauuacauggugcaaaaaucuggaaaaacaggaacaauuaccuaucaaagagguauuuuauugccucaaaagguguggugcgcaaguggcaggagcaagguaauaaaaggauccuugccuuuaauuggagaagcagauugccuccacgaaaaauacgguggauuaaacaaaagcaagccuuacuacacaggggaacaugcaaaggccauaggaaauugcccaauaugggugaaaacacccuugaagcuggccaauggaaccaaauauagaccuccugcaaaacuauuaaaggaaagggguuucuucggagcuauugcugguuucuuagaaggaggaugggaaggaaugauugcagguuggcacggauacacaucccauggggcacauggaguagcgguggcagcugaccuuaagagcacucaagaggccauaaacaagauaacaaaaaaucucaacucuuugagugagcuggaaguaaagaaucuucaaagacuaagcggugccauggaugaacuccacaacgaaauacuagaacuagaugagaaaguggaugaucucagagcugauacaauaagcucacaaauagaacucgcaguccugcuuuccaaugaaggaauaauaaacagugaagaugaacaucucuuggcgcuugaaagaaagcugaagaaaaugcugggccccucugcuguagagauagggaauggaugcuuugaaaccaaacacaagugcaaccagaccugucucgacagaauagcugcugguaccuuugaugcaggagaauuuucucuccccaccuuugauucacugaauauuacugcugcaucuuuaaaugacgauggauuggauaaucauacuauacugcuuuacuacucaacugcugccuccaguuuggcuguaacacugaugauagcuaucuuuguuguuuauauggucuccagagacaauguuucuugcuccaucugucuauaa

SEQ ID NO: 60577 - RNA, 1758 nt, Artificial Sequence
  derived and/or modified CDS sequence (wt) from hemagglutinin__InfluenzaB__EPI498340
augaaggcaauaauuguacuacucaugguaguaacauccaaugcagaucgaaucugcacugggauaacaucgucaaacucaccacaugucgucaaaacugcuacucaaggggaggucaaugugaccgguguaauaccacugacaacaacacccaccaaaucucauuuugcaaaucucaaaggaacagaaaccagggggaaacuaugcccaaaaugccucaacugcacagaucuggacguagccuugggcagaccaaaaugcacagggaaaauacccucggcaagaguuucaauacuccaugaagucagaccuguuacaucugggugcuuuccuauaaugcacgauagaacaaaaauuagacagcugccuaaccuucuccgaggauacgaacauaucagguuaucaacucacaacguuaucaauacagaagaugcaccaggaggacccuacaaaauuggaaccucagggucuugcccuaacguuaccaauggaaacggauucuucgcaacaauggcuugggccgucccaaaaaacgacaaaaacaaaacagcaacaaauccauuaacaauagaaguaccauacauuuguacagaaggagaagaccaaauuaccguuuggggguuccacucugacaucgagacccaaauggcaaagcucuauggggacucaaagccccagaaguucaccucaucugccaacggagugaccacacauuacguuucacagauugguggcuucccaaaucaaacagaagacggaggacuaccacaaagugguagaauuguuguugauuacauggugcaaaaaucuggaaaaacaggaacaauuaccuaucaaagagguauuuuauugccucaaaagguguggugcgcaaguggcaggagcaagguaauaaaaggauccuugccuuuaauuggagaagcagauugccuccacgaaaaauacgguggauuaaacaaaagcaagccuuacuacacaggggaacaugcaaaggccauaggaaauugcccaauaugggugaaaacacccuugaagcuggccaauggaaccaaauauagaccuccugcaaaacuauuaaaggaaagggguuucuucggagcuauugcugguuucuuagaaggaggaugggaaggaaugauugcagguuggcacggauacacaucccauggggcacauggaguagcgguggcagcugaccuuaagagcacucaagaggccauaaacaagauaacaaaaaaucucaacucuuugagugagcuggaaguaaagaaucuucaaagacuaagcggugccauggaugaacuccacaacgaaauacuagaacuagaugagaaaguggaugaucucagagcugauacaauaagcucacaaauagaacucgcaguccugcuuuccaaugaaggaauaauaaacagugaagaugaacaucucuuggcgcuugaaagaaagcugaagaaaaugcugggccccucugcuguagagauagggaauggaugcuuugaaaccaaacacaagugcaaccagaccugucucgacagaauagcugcugguaccuuugaugcaggagaauuuucucuccccaccuuugauucacugaauauuacugcugcaucuuuaaaugacgauggauuggauaaucauacuauacugcuuuacuacucaacugcugccuccaguuuggcuguaacacugaugauagcuaucuuuguuguuuauauggucuccagagacaauguuucuugcuccaucugucuauaa

SEQ ID NO: 60578 - RNA, 1758 nt, Artificial Sequence
  derived and/or modified CDS sequence (wt) from hemagglutinin__InfluenzaB__EPI516490
augaaggcaauaauuguacuacucaugguaguaacauccaaugcagaucgaaucugcacugggauaacaucgucaaacucaccacaugucgucaaaacugcuacucaaggggaggucaaugugaccgguguaauaccacugacaacaacacccaccaaaucucauuuugcaaaucucaaaggaacagaaaccagggggaaacuaugcccaaaaugccucaacugcacagaucuggacguagccuugggcagaccaaaaugcacagggaaaauacccucggcaagaguuucaauacuccaugaagucagaccuguuacaucugggugcuuuccuauaaugcacgauagaacaaaaauuagacagcugccuaaccuucuccgaggauacgaacauaucagguuaucaacucacaacguuaucaaugcagaagaugcaccaggaggacccuacaaaauuggaaccucagggucuugcccuaacguuaccaauggaaacggauucuucgcaacaauggcuugggccgucccaaaaaacgacaaaaacaaaacagcaacaaauccauuaacaauagaaguaccauacauuuguacagaaggagaagaccaaauuaccguuuggggguuccacucugacaacgagauccaaauggcaaagcucuauggggacucaaagccccagaaguucaccucaucugccaacggagugaccacacauuacguuucacagauugguggcuucccaaaucaaacagaagacggaggacuaccacaaagugguagaauuguuguugauuacauggugcaaaaaucuggaaaaacaggaacaauuaccuaucaaagagguauuuuauugccucaaaagguguggugcgcaaguggcaggagcaagguaauaaaaggauccuugccuuuaauuggagaagcagauugccuccacgaaaaauacgguggauuaaacaaaagcaagccuuacuacacaggggaacaugcaaaggccauaggaaauugcccaauaugggugaaaacacccuugaagcuggccaauggaaccaaauauagaccuccugcaaaacuauuaaaggaaagggguuucuucggagcuauugcugguuucuuagaaggaggaugggaaggaaugauugcagguuggcacggauacacaucccauggggcacauggaguagcgguggcagcugaccuuaagagcacucaagaggccauaaacaagauaacaaaaaaucucaacucuuugagugagcuggaaguaaagaaucuucaaagacuaagcggugccauggaugaacuccacaacgaaauacuagaacuagaugagaaaguggaugaucucagagcugauacaauaagcucacaaauagaacucgcaguccugcuuuccaaugaaggaauaauaaacagugaagaugaacaucucuuggcgcuugaaagaaagcugaagaaaaugcugggccccucugcuguagagauagggaauggaugcuuugaaaccaaacacaagugcaaccagaccugucucgacagaauagcugcugguaccuuugaugcaggagaauuuucucuccccaccuuugauucacugaauauuacugcugcaucuuuaaaugacgauggauuggauaaucauacuauacugcuuuacuacucaacugcugccuccaguuuggcuguaacacugaugauagcuaucuuuguuguuuauauggucuccagagacaauguuucuugcuccaucugucuauaa

SEQ ID NO: 60579 - RNA, 1755 nt, Artificial Sequence
  derived and/or modified CDS sequence (wt) from hemagglutinin__InfluenzaB__EPI538119
augaaggcaauaauuguacuacucaugguaguaacauccaaugcagaucgaaucugcacugggauaacaucuucaaacucaccucauguggucaaaacagcuacucaaggggaggucaaugugacuggcgugauaccacugacaacaacaccaacaaaaucuuauuuugcaaaucucaaaggaacaaggaccagagggaaacuaugcccggacugucucaacuguacagaucuggauguggccuugggcaggccaauguguguggggaccacaccuucugcuaaagcuucaauacuccaugaggucagaccuguuacauccgggugcuuuccuauaaugcacgacagaacaaaaaucaggcaacuacccaaucuucucagaggauaugaaaagaucagguuaucaacccaaaacguuaucgaugcagaaaaagcaccaggaggacccuacagacuuggaaccucaggaucuugcccuaaugcuaccaguaaaaucggauuuuuugcaacaauggcuugggcugucccaaaggacaacuacaaaaaugcaacgaacccacuaacaguggaaguaccauacauuuguacagaaggggaagaccaaauuacuguuuggggguuccauucggauaacaaaacccaaaugaagagccucuauggagacucaaauccucaaaaguucaccucaucugcuaauggaguaaccacacauuauguuucucagauuggcgacuucccagaucaaacagaagacggaggacuaccacaaagcggcagaauuguuguugauuacaugaugcaaaaaccugggaaaacaggaacaauugucuaucaaagggguguuuuguugccucaaaagguguggugcgcgaguggcaggagcaaaguaauaaaagggucauugccuuuaauuggugaagcagauugccuucaugaagaauacgguggauuaaacaaaagcaagccuuacuacacaggaaaacaugcaaaagccauaggaaauugcccaauauggguaaaaacaccuuugaagcuugccaauggaaccaaauauagaccuccugcaaaacuauugaaggaaaggggguucuucggagcuauugcugguuuccuagaaggaggaugggaaggaaugauugcagguuggcacggauacacaucucacggagcacauggaguggcaguggcggcagaccuuaagaguacacaagaagcuauaaauaagauaacaaaaaaucucaauucuuugagugaacuagaaguaaagaaccuucaaagacuaaguggugccauggaugaacuccacaacgaaauacucgagcuggaugaaaaaguggaugaucucagagcugacacuauaagcucacaaauagaacuugcagucuugcuuuccaacgaaggaauaauaaacagugaagacgaacaucuauuggcacuugagagaaaacuaaagaaaaugcugggucccucugcuguagacauaggaaacggaugcuucgaaaccaaacacaaaugcaaccagaccugcuuagacaggauagcugcuggcaccuuuaaugcaggagaauuuucucuccccacuuuugauucauugaacauuacugcugcaucuuuaaaugaugauggauuggauaaccauacuauacugcucuauuacucaacugcugcuucuaguuuggcuguaacauuaaugcuagcuauuuuuauuguuuauauggucuccagagacaacguuucaugcuccaucugucuauaa

SEQ ID NO: 60580 - RNA, 1755 nt, Artificial Sequence
  derived and/or modified CDS sequence (wt) from hemagglutinin__InfluenzaB__EPI538125
augaaggcaauaauuguacuacucaugguaguaacauccaaugcagaucgaaucugcacugggauaacaucuucaaacucaccucauguggucaaaacagcuacucaaggggaggucaaugugacuggcgugauaccacugacaacaacaccaacaaaaucuuauuuugcaaaucucaaaggaacaaggaccagagggaaacuaugcccggacugucucaacuguacagaucuggauguggccuugggcaggccaauguguguggggaccacaccuucugcuaaagcuucaauacuccaugaggucagaccuguuacauccgggugcuuuccuauaaugcacgacagaacaaaaaucaggcaacuacccaaucuucucagaggauaugaaaagaucagguuaucaacccaaaacguuaucgaugcagaaaaagcaccaggaggacccuacagacuuggaaccucaggaucuugcccuaaugcuaccaguaaaaucggauuuuuugcaacaauggcuugggcugucccaaaggacaacuacaaaaaugcaacgaacccacuaacaguggaaguaccauacauuuguacagaaggggaagaccaaauuacuguuuggggguuccauucggauaaaaaaacccaaaugaagagccucuauggagacucaaauccucaaaaguucaccucaucugcuaauggaguaaccacacauuauguuucucagauuggcgacuucccagaucaaacagaagacggaggacuaccacaaagcggcagaauuguuguugauuacaugaugcaaaaaccugggaaaacaggaacaauugucuaucaaagggguguuuuguugccucaaaagguguggugcgcgaguggcaggagcaaaguaauaaaagggucauugccuuuaauuggugaagcagauugccuucaugaagaauacgguggauuaaacaaaagcaagccuuacuacacaggaaaacaugcaaaagccauaggaaauugcccaauauggguaaaaacaccuuugaagcuugccaauggaaccaaauauagaccuccugcaaaacuauugaaggaaaggggguucuucggagcuauugcugguuuccuagaaggaggaugggaaggaaugauugcagguuggcacggauacacaucucacggagcacauggaguggcaguggcggcagaccuuaagaguacacaagaagcuauaaauaagauaacaaaaaaucucaauucuuugagugaacuagaaguaaagaaccuucaaagacuaaguggugccauggaugaacuccacaacgaaauacucgagcuggaugaaaaaguggaugaucucagagcugacacuauaagcucacaaauagaacuugcagucuugcuuuccaacgaaggaauaauaaacagugaagacgaacaucuauuggcacuugagagaaaacuaaagaaaaugcugggucccucugcuguagacauaggaaacggaugcuucgaaaccaaacacaaaugcaaccagaccugcuuagacaggauagcugcuggcaccuuuaaugcaggagaauuuucucuccccacuuuugauucauugaacauuacugcugcaucuuuaaaugaugauggauuggauaaccauacuauacugcucuauuacucaacugcugcuucuaguuuggcuguaacauuaaugcuagcuauuuuuauuguuuauauggucuccagagacaacguuucaugcuccaucugucuauaa

SEQ ID NO: 60581 - RNA, 1755 nt, Artificial Sequence
  derived and/or modified CDS sequence (wt) from hemagglutinin__InfluenzaB__EPI556422
augaaggcaauaauuguacuacucaugguaguaacauccaaugcagaucgaaucugcacugggauaacaucuucaaacucaccucauguggucaaaacagcuacucaaggggaggucaaugugacuggcgugauaccacugacaacaacaccaacaaaaucuuauuuugcaaaucucaaaggaacaaggaccagagggaaacuaugcccggacugucucaacuguacagaucuggauguggccuugggcaggccaauguguguggggaccacaccuucugcuaaagcuucaauacuccaugaggucagaccuguuacauccgggugcuuuccuauaaugcacgacagaacaaaaaucaggcaacuacccaaucuucucagaggauaugaaaagaucagguuaucaacccaaaacguuaucgaugcagaaaaagcaccaggaggacccuacagacuuggaaccucaggaucuugcccuaaugcuaccaguaaaaucggauuuuuugcaacaauggcuugggcugucccaaaggacaacuacaaaaaugcaacgaacccacuaacaguggaaguaccauacauuuguacagaaggggaagaccaaauuacuguuuggggguuccauucggauauaaaaacccaaaugaagagccucuauggagacucaaauccucaaaaguucaccucaucugcuaauggaguaaccacacauuauguuucucagauuggcgacuucccagaucaaacagaagacggaggacuaccacaaagcggcagaauuguuguugauuacaugaugcaaaaaccugggaaaacaggaacaauugucuaucaaagggguguuuuguugccucaaaagguguggugcgcgaguggcaggagcaaaguaauaaaagggucauugccuuuaauuggugaagcagauugccuucaugaagaauacgguggauuaaacaaaagcaagccuuacuacacaggaaaacaugcaaaagccauaggaaauugcccaauauggguaaaaacaccuuugaagcuugccaauggaaccaaauauagaccuccugcaaaacuauugaaggaaaggggguucuucggagcuauugcugguuuccuagaaggaggaugggaaggaaugauugcagguuggcacggauacacaucucacggagcacauggaguggcaguggcggcagaccuuaagaguacacaagaagcuauaaauaagauaacaaaaaaucucaauucuuugagugaacuagaaguaaagaaccuucaaagacuaaguggugccauggaugaacuccacaacgaaauacucgagcuggaugaaaaaguggaugaucucagagcugacacuauaagcucacaaauagaacuugcagucuugcuuuccaacgaaggaauaauaaacagugaagacgaacaucuauuggcacuugagagaaaacuaaagaaaaugcugggucccucugcuguagacauaggaaacggaugcuucgaaaccaaacacaaaugcaaccagaccugcuuagacaggauagcugcuggcaccuuuaaugcaggagaauuuucucuccccacuuuugauucauugaacauuacugcugcaucuuuaaaugaugauggauuggauaaccauacuauacugcucuauuacucaacugcugcuucuaguuuggcuguaacauuaaugcuagcuauuuuuauuguuuauauggucuccagagacaacguuucaugcuccaucugucuauaa

SEQ ID NO: 60582 - RNA, 1755 nt, Artificial Sequence
  derived and/or modified CDS sequence (wt) from hemagglutinin__InfluenzaB__EPI614608
augaaggcaauaauuguacuacucaugguaguaacauccaaugcagaucgaaucugcacugggauaacaucuucaaacucaccucauguggucaaaacagcuacucaaggggaggucaaugugacuggcgugauaccacugacaacaacaccaacaaaaucuuauuuugcaaaucucaaaggaacaaggaccagagggaaacuaugcccggacugucucaacuguacagaucuggauguggccuugggcaggccaauguguguggggaccacaccuucugcuaaagcuucaauacuccaugaggucagaccuauuacauccgggugcuuuccuauaaugcacgacagaacaaaaaucaggcaacuacccaaucuucucagaggauaugaaaagaucagguuaucaacccaaaacguuaucgaugcagaaaaagcaccaggaggacccuacagacuuggaaccucaggaucuugcccuaaugcuaccaguaaaaucggauuuuuugcaacaauggcuugggcugucccaaaggacaacuacaaaaaugcaacgaacccacuaacaguggaaguaccauacauuuguacagaaggggaagaccaaauuacuguuuggggguuccauucggaugaaaaaacccaaaugaagagccucuauggagacucaaauccucaaaaguucaccucaucugcuaauggaguaaccacacauuauguuucucagauuggcgacuucccagaucaaacagaagacggaggacuaccacaaagcggcagaauuguuguugauuacaugaugcaaaaaccugggaaaacaggaacaauugucuaucaaagggguguuuuguugccucaaaagguguggugcgcgaguggcaggagcaaaguaauaaaagggucauugccuuuaauuggugaagcagauugccuucaugaagaauacgguggauuaaacaaaagcaagccuuacuacacaggaaaacaugcaaaagccauaggaaauugcccaauauggguaaaaacaccuuugaagcuugccaauggaaccaaauauagaccuccugcaaaacuauugaaggaaaggggguucuucggagcuauugcugguuuccuagaaggaggaugggaaggaaugauugcagguuggcacggauacacaucucacggagcacauggaguggcaguggcggcagaccuuaagaguacacaagaagcuauaaauaagauaacaaaaaaucucaauucuuugagugaacuagaaguaaagaaccuucaaagacuaaguggugccauggaugaacuccacaacgaaauacucgagcuggaugaaaaaguggaugaucucagagcugacacuauaagcucacaaauagaacuugcagucuugcuuuccaacgaaggaauaauaaacagugaagacgaacaucuauuggcacuugagagaaaacuaaagaaaaugcugggucccucugcuguagacauaggaaacggaugcuucgaaaccaaacacaaaugcaaccagaccugcuuagacaggauagcugcuggcaccuuuaaugcaggagaauuuucucuccccacuuuugauucauugaacauuacugcugcaucuuuaaaugaugauggauuggauaaccauacuauacugcucuauuacucaacugcugcuucuaguuuggcuguaacauuaaugcuagcuauuuuuauuguuuauauggucuccagagacaacguuucaugcuccaucugucuauaa

SEQ ID NO: 60583 - RNA, 1755 nt, Artificial Sequence
  derived and/or modified CDS sequence (wt) from hemagglutinin__InfluenzaB__EPI614610
augaaggcaauaauuguacuacucaugguaguaacauccaaugcagaucgaaucugcacugggauaacaucuucaaacucaccucauguggucaaaacagcuacucaaggggaggucaaugugacuggcgugauaccacugacaacaacaccaacaaaaucuuauuuugcaaaucucaaaggaacaaggaccagagggaaacuaugcccggacugucucaacuguacagaucuggauguggccuugggcaggccaauguguguggggaccacaccuucugcuaaagcuucaauacuccaugaggucagaccuguuacauccgggugcuuuccuauaaugcacgacagaacaaaaaucaggcaacuacccaaucuucucagaggauaugaaaagaucagguuaucaacccaaaacguuaucgaugcagaaaaagcaccaggaggacccuacagacuuggaaccucaggaucuugcccuaaugcuaccaguaaaaucggauuuuuugcaacaauggcuugggcugucccaaaggacaacuacaaaaaugcaacgaacccacuaacaguggaaguaccauacauuuguacagaaggggaagaccaaauuacuguuuggggguuccauucggaugaaaaaacccaaaugaagagccucuauggagacucaaauccucaaaaguucaccucaucugcuaauggaguaaccacacauuauguuucucagauuggcgacuucccagaucaaacagaagacggaggacuaccacaaagcggcagaauuguuguugauuacaugaugcaaaaaccugggaaaacaggaacaauugucuaucaaagggguguuuuguugccucaaaagguguggugcgcgaguggcaggagcaaaguaauaaaagggucauugccuuuaauuggugaagcagauugccuucaugaagaauacgguggauuaaacaaaagcaagccuuacuacacaggaaaacaugcaaaagccauaggaaauugcccaauauggguaaaaacaccuuugaagcuugccaauggaaccaaauauagaccuccugcaaaacuauugaaggaaaggggguucuucggagcuauugcugguuuccuagaaggaggaugggaaggaaugauugcagguuggcacggauacacaucucacggagcacauggaguggcaguggcggcagaccuuaagaguacacaagaagcuauaaauaagauaacaaaaaaucucaauucuuugagugaacuagaaguaaagaaccuucaaagacuaaguggugccauggaugaacuccacaacgaaauacucgagcuggaugaaaaaguggaugaucucagagcugacacuauaagcucacaaauagaacuugcagucuugcuuuccaacgaaggaauaauaaacagugaagacgaacaucuauuggcacuugagagaaaacuaaagaaaaugcugggucccucugcuguagacauaggaaacggaugcuucgaaaccaaacacaaaugcaaccagaccugcuuagacaggauagcugcuggcaccuuuaaugcaggagaauuuucucuccccacuuuugauucauugaacauuacugcugcaucuuuaaaugaugauggauuggauaaccauacuauacugcucuauuacucaacugcugcuucuaguuuggcuguaacauuaaugcuagcuauuuuuauuguuuauauggucuccagagacaacguuucaugcuccaucugucuauaa

SEQ ID NO: 60584 - RNA, 1758 nt, Artificial Sequence
  derived and/or modified CDS sequence (wt) from hemagglutinin__InfluenzaB__AAA43697
augaaggcaauaauuguacuacucaugguaguaacauccaaugcagaucgaaucugcacugggauaacaucgucaaacucaccccauguggucaaaacugcuacucaaggggaagucaaugugacuggugugauaccacugacaacaacaccaaccaaaucucauuuugcaaaucucaaaggaacaaaaaccagagggaaacuaugcccaaagugucucaacugcacagaucuggacguggccuuggcgagaccaaagugcauggggaccauaccuucggcaaaagcuucaauacuccaugaagucaaaccuguuacaucugggugcuuuccuauaaugcacgacagaacaaaaauuagacagcuacccaaucuucucagaggauacgaacauaucagguuaucaacccauaacguuaucaacgcagaaacggcaccaggaggacccuacaaaguuggaaccucagggucuugcccuaacguuaccaauggaaacggauucuucgcaacaauggcuugggcugucccaaaaaacgacaacaacaaaacagcaacaaauccauuaacaguagaaguaccauacauuuguacagaaggagaagaccaaauuacuguuuggggguuccacucugauagcgaaacccaaaugguaaaacucuauggagacucaaagccucagaaguucaccucaucugccaauggaguaaccacacauuacguuucacagauugguggcuucccaaaucaagcagaagacggagggcuaccacaaagcgguagaauuguuguugauuacauggugcaaaaaucuggaaaaacaggaacaauuaccuaccaaagagguauuuuauugccucaaaaaguguggugcgcaaguggcaggagcaagguaauaaaaggguccuugccuuuaauuggugaagcagauugccuccacgaaaaauacgguggauuaaacaaaagcaagccuuacuacacaggagaacaugcaaaagccauaggaaauugcccaauaugggugaaaacacccuugaagcuggccaauggaaccaaauauagaccuccugcaaaacuauuaaaggaaagggguuucuucggagcuauugcugguuucuuagaaggaggaugggaaggaaugauugcagguuggcacggauacacaucccauggagcacauggaguagcaguggcagcagaccuuaagaguacgcaagaagccauaaacaagauaacaaaaaaucucaauucuuugagugagcuggaaguaaagaaucuucaaagacuaagcggugccauggaugaacuccacaacgaaauacucgaacuggaugagaaaguggaugaucucagagcugauacaauaagcucgcaaauagagcucgcagucuugcuuuccaacgaaggaauaauaaacagugaagaugagcaucucuuggcgcuugaaagaaaacugaagaaaaugcugggccccucugcuguagagauagggaauggaugcuucgaaaccaaacacaagugcaaccagaccugccuagacagaauagcugcuggcaccuuuaaugcaggagaauuuucucuucccaccuuugauucacuaaauauuacugcugcaucuuuaaaugaugauggauuggauaaucauacuauacugcuuuacuacucaacugcugcuuccaguuuggcuguaacauugaugauagcuaucuuuauuguuuauauggucuccagagacaauguuucuugcuccaucugucuauag

SEQ ID NO: 60585 - RNA, 1755 nt, Artificial Sequence
  derived and/or modified CDS sequence (wt) from hemagglutinin__InfluenzaB__EPI271545
augaaggcaauaauuguacuacucaugguaguaacauccaaugcagaucgaaucugcacugggauaacaucuucaaacucaccucauguggucaaaacagcuacucaaggggaggucaaugugacuggcgugauaccacugacaacaacaccaacaaaaucuuauuuugcaaaucucaaaggaacaaggaccagagggaaacuaugcccggacugucucaacuguacagaucuggauguggccuugggcaggccaauguguguggggaccacaccuucugcuaaagcuucaauacuccacgaggucagaccuguuacauccgggugcuuuccuauaaugcacgacagaacaaaaaucaggcaacuacccaaucuucucagaggauaugaaaauaucagguuaucaacccaaaacguuaucgaugcagaaaaagcaccaggaggacccuacagacuuggaaccucaggaucuugcccuaacgcuaccaguaaaaucggauuuuuugcaacaauggcuugggcugucccaaaggacaacuacaaaaaugcaacgaacccacuaacaguagaaguaccauacauuuguacagaaggggaagaccaaauuacuguuuggggguuccauucagauaacaaaacccaaaugaagagccucuauggagacucaaauccucaaaaguucaccucaucugcuaauggaguaaccacacauuauguuucucagauuggcgacuucccagaucaaacagaagacggaggacuaccacaaagcggcagaauuguuguugauuacaugaugcaaaaaccugggaaaacaggaacaauugucuaucaaagagguguuuuguugccucaaaagguguggugcgcgaguggcaggagcaaaguaauaaaagggucauugccuuuaauuggugaagcagauugccuucaugaaaaauacgguggauuaaacaaaagcaagccuuacuacacaggagaacaugcaaaagccauaggaaauugcccaauauggguaaaaacaccuuugaagcuugccaauggaaccaaauauagaccuccugcaaaacuauugaaggaaagggguuucuucggagcuauugcugguuuccuagaaggaggaugggaaggaaugauugcagguuggcacggauacacaucucacggagcacauggaguggcaguggcggcagaccuuaagaguacacaagaagcuauaaauaagauaacaaaaaaucucaauucuuugagugagcuagaaguaaagaaccuucaaagacuaaguggugccauggaugaacuccacaacgaaauacucgagcuggaugagaaaguggaugaucucagagcugacacuauaagcucacaaauagaacuugcagucuugcuuuccaacgaaggaauaauaaacagugaagacgagcaucuauuggcacuugagagaaaacuaaagaaaaugcugggucccucugcuguagacauaggaaacggaugcuucgaaaccaaacacaaaugcaaccagaccugcuuagacaggauagcugcuggcaccuuuaaugcaggagaauuuucucuccccacuuuugauucauugaacauuacugcugcaucuuuaaaugaugauggauuggauaaccauacuauacugcucuauuacucaacugcugcuucuaguuuggcuguaacauuaaugcuagcuauuuuuauuguuuauauggucuccagagacaacguuucaugcuccaucugucuauaa

SEQ ID NO: 60586 - RNA, 1755 nt, Artificial Sequence
  derived and/or modified CDS sequence (wt) from hemagglutinin__InfluenzaB__AGB08329
augaaggcaauaauuguacuacucaugguaguaacauccaaugcagaucgaaucugcacugggauaacaucuucaaacucaccucauguggucaaaacagcuacucaaggggaggucaaugugacuggcgugauaccacugacaacaacaccaacaaaaucuuauuuugcaaaucucaaaggaacaaggaccagagggaaacuaugcccggacugucucaacuguacagaucuggauguggccuugggcaggccaauguguguggggaccacaccuucugcuaaagcuucaauacuccacgaggucagaccuguuacauccgggugcuuuccuauaaugcacgacagaacaaaaaucaggcaacuacccaaucuucucagaggauaugaaaauaucagguuaucaacccaaaacguuaucgaugcagaaaaagcaccaggaggacccuacagacuuggaaccucaggaucuugcccuaacgcuaccaguaaaaucggauuuuuugcaacaauggcuugggcugucccaaaggacaacuacaaaaaugcaacgaacccacuaacaguagaaguaccauacauuuguacagaaggggaagaccaaauuacuguuuggggguuccauucagauaacaaaauccaaaugaagagccucuauggagacucaaauccucaaaaguucaccucaucugcuaauggaguaaccacacauuauguuucucagauuggcgacuucccagaucaaacagaagacggaggacuaccacaaagcggcagaauuguuguugauuacaugaugcaaaaaccugggaaaacaggaacaauugucuaucaaagagguguuuuguugccucaaaagguguggugcgcgaguggcaggagcaaaguaauaaaagggucauugccuuuaauuggugaagcagauugccuucaugaaaaauacgguggauuaaacaaaagcaagccuuacuacacaggagaacaugcaaaagccauaggaaauugcccaauauggguaaaaacaccuuugaagcuugccaauggaaccaaauauagaccuccugcaaaacuauugaaggaaagggguuucuucggagcuauugcugguuuccuagaaggaggaugggaaggaaugauugcagguuggcacggauacacaucucacggagcacauggaguggcaguggcggcagaccuuaagaguacacaagaagcuauaaauaagauaacaaaaaaucucaauucuuugagugagcuagaaguaaagaaccuucaaagacuaaguggugccauggaugaacuccacaacgaaauacucgagcuggaugagaaaguggaugaucucagagcugacacuauaagcucacaaauagaacuugcagucuugcuuuccaacgaaggaauaauaaacagugaagacgagcaucuauuggcacuugagagaaaacuaaagaaaaugcugggucccucugcuguagacauaggaaacggaugcuucgaaaccaaacacaaaugcaaccagaccugcuuagacaggauagcugcuggcaccuuuaaugcaggagaauuuucucuccccacuuuugauucauugaacauuacugcugcaucuuuaaaugaugauggauuggauaaccauacuauacugcucuauuacucaacugcugcuucuaguuuggcuguaacauuaaugcuagcuauuuuuauuguuuauauggucuccagagacaacguuucaugcuccaucugucuauaa

SEQ ID NO: 60587 - RNA, 1755 nt, Artificial Sequence; identical to SEQ ID NO: 58767
  derived and/or modified CDS sequence (wt) from hemagglutinin__InfluenzaB__EPI294880

SEQ ID NO: 60588 - RNA, 1752 nt, Artificial Sequence; identical to SEQ ID NO: 58478
  derived and/or modified CDS sequence (wt) from hemagglutinin__InfluenzaB__CY018765

SEQ ID NO: 60589 - RNA, 1401 nt, Artificial Sequence
  derived and/or modified CDS sequence (wt) from neuraminidase__InfluenzaB__AAN39743
augcuaccuucaacuauacaaacguuaacccuauuucucacaucagggggaguacuguuaucacuauaugugucagccuuacugucauacuuacuguauucggauauauugcuaaaauucucaccaacaaaaguaauugcaccaacaaugucauuggacugcgcgaacgcaucaaauguucaggcugugaaccauucugcaacagaagagaugacauuucuucucccagaaccggaguggacauacccucguuuaucuugccaggguucaaccuuucagaaagcacuccuaauuagcccucauagauucggagaagccaaaggaaacucagcucccuugauaauaagggaaccuuuuauugcuuguggaccaaaggaguguauacacuuugcucuaacccauuaugcagcucaaccagggggauacuacaaugggacaagagaggacagaaacaagcugaggcaucugauuucagucaacuuaggcaaaaucccaacuguagaaaacuccauuuuccacauggcagcuuggaguggauccgcaugccaugaugguagagaauggacuuauaucggaguugauggcccugacaguaaugcauugaucaaaauaaaauauggagaagcauacacugacacauaccauuccuaugcaaacaacauccuaagaacacaagaaagugccugcaauugcaucgggggagauuguuaucuuaugauaacugauggcucagcuucaggaauuaguagaugcagauuccuuaagauucgagagggucgaauaauaaaagaaauauuuccaacaggaagaguagagcauacugaagaaugcacaugcggauuugccagcaauaaaaccauagaaugugucuguagagauaacaguuacacagcaaaaagacccuuugucaaauuaaauguggaaacugauacagcugaaauaagauugaugugcacagagacuuauuuggacacccccagaccagaugauggaagcauaacagggccuugcgaaucuaauggggacaaagggaauggagguaucaagggaggauuuguccaucaaagaauggcauccaggauuggaagaugguacucucgaacgaugucuaaaacuaaaagaauggggauggaacuguaugucaaguaugauggagacccauggacugacagugacgcccuugcuccuaguggaguaauggucucaauggaagaaccugguugguauucuuucgguuucgaaauaaaagauaagaaaugcgauguccccuguauugggauagagaugguacacgaugguggaaaaaagacuuggcacucagcagcaacagccauuuacuguuuaaugggcucaggacaguugcuaugggacacugucacagguguugauauggcucuguaa

SEQ ID NO: 60590 - RNA, 1401 nt, Artificial Sequence
  derived and/or modified CDS sequence (wt) from neuraminidase__InfluenzaB__AAN39747
augcuaccuucaacuauacaaacguuaauccuauuucucacaucagggggaguguuguuaucacuauaugugucagccuuacugucauacuuacuguauucggauauauugcuaaaauuuucaccaacaaaaauaauugcaccaacaaugucauuggacugcgcgaacgcaucaaauguucaggccgugaaccauucugcaacaaaagagaugacauuucuucucccagaaccggaguggacauacccucguuuaucuugccaggguucaaccuuucagaaagcacuccuaauuagcccucauagauucggggaagccaaaggaaacucagcucccuugauaauaagggaaccuuuuauugcuuguggaccaaaggaguguaaacacuuugcucugacccauuaugcagcucaaccagggggauacuacaauggaacaagagaggacagaaacaagcugaggcaucugauuucagucaacuuaggcaaaauaccaacuguagaaaacuccauuuuccacauggcagcuuggaguggguccgcaugccaugauggcagagaauggacuuacaucggaguugauggcccugacaguaaugcauugaucaaaauaaaauauggagaagcauacacugacacauaccauuccuaugcaaacaacauccuaagaacacaagaaagugccugcaauugcaucgggggagauuguuaucuuaugauaacugauggcucagcuucaggaauuaguaaaugcagauuccuuaagauucgagagggucgaauaauaaaagaaauauuuccaacaggaagaguagagcauacugaagaaugcacaugcggauuugccagcaauaaaaccauagaaugugccuguagagauaacaguuacacagcaaaaagacccuuugucaaauuaaauguggaaacugauacagcugaaauaagauugaugugcacaaagacuuauuuggacacccccagaccagaugauggaagcauaacagggccuugcgaaucuaauggggacaaagggaguggagguaucaagggaggauuuguccaucaaagaauggcauccaagauuggaagaugguacucucgaacgaugucuaaaacuaaaagaauggggauggaacuguaugucaaguaugauggagacccauggacugacagugacgcccuugcuccuaguggaguaauggucucaauagaagaaccugguugguauucuuucggcuucgaaauaaaagauaagaaaugcgauguccccuguauugggauagagaugguacacgaugguggaaaaaagacuuggcacucagcagcaacagccauuuacuguuuaaugggcucaggacaguugcuaugggacacugucacagguguugauauggcucuguaa

SEQ ID NO: 60591 - RNA, 1401 nt, Artificial Sequence
  derived and/or modified CDS sequence (wt) from neuraminidase__InfluenzaB__AAN39749
augcuaccuucaacuauacaaacguuaacccuauuucucacaucagggggaguacuguuaucacuauaugugucagccuuacugucauacuuacuguauucggauauauugcuaaaauuuucaccaacaaaaguaauugcaccaacaaugucauuggacugcgcgaacgcaucaaauguucaggcugugaaucauucugcaacagaagagaugacauuucuucucccagaaccggaguggacauacccucguuuaucuugccaggguucaaccuuucagaaagcacuccuaauuagcccucauagauucggagaagccaaaggaaacucagcucccuugauaauaagggaaccuuuuauugcuuguggaccaaaggaguguaaacacuuugcucuaacccauuaugcagcucaaccagggggauacuacaauggaacaagggaggacagaaacaagcugaggcaucugauuucagucaacuuaggcaaaaucccaacuguagaaaacuccauuuuccacauggcagcuuggaguggauccgcaugccaugaugguagagaauggacuuauaucggaguugauggcccugacaguaaugcauugaucaaaauaaaauauggagaagcauacacugacacauaccauuccuaugcaaacaacauccuaagaacacaagaaagugccugcaauugcaucgggggagauuguuaucuuaugauaacugauggcucagcuucaggaauuaguagaugcagauuccuuaagauucgagagggucgaauaauaaaagaaauauuuccaacaggaagaguagagcauacugaagaaugcacaugcggauuugccagcaauaaaaccauagaaugugccuguagagauaacaguuacacagcaaaaagacccuuugucaaauuaaauguggaaacugauacagcugaaauaagauugaugugcacagagacuuauuuggacacccccagaccagaugauggaagcauaacagggccuugcgaaucuaauggggacaaagggaauggagguaucaagggaggauuuguccaucaaagaauggcauccaggauuggaagaugguacucucgaacgaugucuaaaacuaaaagaauggggauggaacuguaugucaaguaugauggagacccauggacugacagugacgcccuugcuccuaguggaguaauggucucaauggaagaaccugguugguauucuuucgguuucgaaauaaaagauaagaaaugcgauguccccuguauugggauagagaugguacacgaugguggaaaaaagacuuggcacucagcagcaacagccauuuacuguuuaaugggcucaggacaguugcuaugggacacugucacagguguugauauggcucuguaa

SEQ ID NO: 60592 - RNA, 1401 nt, Artificial Sequence
  derived and/or modified CDS sequence (wt) from neuraminidase__InfluenzaB__AAN39751
augcuaccuucaacuauacaaacguuaacccuauuucucacaucagggggaguacuguuaucacuauaugugucagccuuacugucauacuuacuguauucggauauauugcuaaaauuuucaccaacaaaaguaauugcaccaacaaugucauuggacugcgcgaacgcaucaaauguucaggcugugaaucauucugcaacagaagagaugacauuccuucucccagaaccggaguggacauacccucguuuaucuugccaggguucaaccuuucagaaagcacuccuaauuagcccucauagauucggagaagccaaaggaaacucagcucccuugauaauaagggaaccuuuuauugcuuguggaccaaaggagugcaaacacuuugcucuaacccauuaugcagcucaaccagggggauacuacaauggaacaagggaggacagaaacaagcugaggcauuugauuucagucaacuuaggcaaaaucccaacuguagaaaacuccauuuuccacauggcagcuuggaguggauccgcaugccaugaugguagagaauggacuuauaucggaguugauggcccugacaguaaugcauugaucaaaauaaaauauggagaagcauacacugacacauaccauuccuaugcaaacaacauccuaagaacacaagaaagugccugcaauugcaucgggggagauuguuaucuuaugauaacugauggcucagcuucaggaauuaguagaugcagauuccuuaagauucgagagggucgaauauuaaaagaaauauuuccaacaggaagaguagagcauacugaagaaugcacaugcggauuugccagcaauaaaaccauagaaugugccuguagagauaacaguuacacagcaaaaagacccuuuguccaauuaaauguggaaacugacacagcugaaauaagauugaugugcacagagacuuauuuggacacccccagaccagaugauggaagcauaacagggccuugcgaaucuaauggggacaaagggaauggagguaucaagggaggauuuguccaucaaagaauggcauccaggauuggaagaugguacucucgaacgaugucuaaaacuaaaagaauggggauggaccuguaugucaaguaugauggagacccauggacugacagugacgcccuugcuccuaguggaguaauggucucaauggaagaaccugguugguauucuuucgguuucgaaauaaaagauaagaaaugcgauguccccuguauugggauagagaugguacacgaugguggaaaaaagacuuggcacucagcagcaacagccauuuacuguuuaaugggcucaggacaguugcuaugggacacugucacagguguugauauggcucuguaa

SEQ ID NO: 60593 - RNA, 1401 nt, Artificial Sequence
  derived and/or modified CDS sequence (wt) from neuraminidase__InfluenzaB__AAN39753
augcuaccuucaacuauacaaacguuaacccuauuucucacaucagggggaguacuguuaucacuauaugugucagccuuacugucauacuuacuguauucggauauauugcuaaaauuuucaccaacaaaaguaauugcaccaacaaugucauuggacugcgcgaacgcaucaaauguucaggcugugaaucauucugcaacagaagagaugacauuucuucucccagaaccggaguggacauacccucguuuaucuugccaggguucaaccuuucagaaagcacuccuaauuagcccucauagauucggagaagccaaaggaaacucagcucccuugauaauaagggaaccuuuuauugcuuguggaccaaaggaguguaaacacuuugcucuaacccauuaugcagcucaaccaggggaauacuacaauggaacaagggaggacagaaacaagcugaggcaucugauuucagucaacuuaggcaaaaucccaacuguagaaaacuccauuuuccacauggcagcuuggaguggauccgcaugccaugaugguagagaauggacuuauaucggaguugauggcccugacaguaaugcauugaucaaaauaaaauauggagaagcauacacugacacauaccauuccuaugcaaacaacauccuaagaacacaagaaagugccugcaauugcaucgggggagauuguuaucuuaugauaacugauggcucagcuucaggaauuaguagaugcagauuccuuaagauucgagagggucgaauaauaaaagaaauauuuccaacaggaagaguagagcauacugaagaaugcacaugcggauuugccaguaauaaaacaauagaaugugccuguagagauaacaguuacacagcaaaaagacccuuugucaaauuaaauguggaaacugacacagcugaaauaagauugaugugcacagagacuuauuuggacacccccagaccagaugauggaagcauaacagggccuugcgaaucuaauggggacaaaggaaauggagguaucaagggaggauuuguccaucaaagaauggcauccaggauuggaagaugguacucucgaacgaugucuaaaacuaaaagaauggggauggaacuguaugucaaguaugauggagacccauggacugacagugacgcccuugcuccuaguggaguaauggucucaauggaagaaccugguugguauucuuucgguuucgaaauaaaagauaagaaaugcgauguccccuguauugggauagagaugguacacgaugguggaaaaaagacuuggcacucagcagcaacagccauuuacuguuuaaugggcucaggacaguugcuaugggacacugucacagguguugauauggcucuguaa

SEQ ID NO: 60594 - RNA, 1401 nt, Artificial Sequence
  derived and/or modified CDS sequence (wt) from neuraminidase__InfluenzaB__AAN39759
augcuaccuucaacuauacaaacguuaacccuauuccucacaucagggggaguguuauuaucacuauaugugucagcuucacugucauacuuacuauauucggauauauugcuaaaacuuucaccaacagaaauaacugcaccaacaaugccauuggauugugcaaacgcaucaaauguucaggcugugaaccguucugcaacaaaaggggugacacuucuucucccagaaccggaguggacauacccgcguuuaucuugcccgggcucaaccuuucagaaagcacuccuaauuagcccucauagauucggagaaaccaaaggaaacucagcucccuuaauaauaagggaaccuuuuauugcuuguggaccaaaggaaugcaaacacuuugcucuaacccauuaugcagcccaaccagggggauacuacaauggaacaagagaagacagaaacaagcugaggcaucuaauuucagucaaauugggcaaaaucccaacaguagaaaacuccauuuuccacauggcagcauggagcggguccgcaugccaugaugguaaagaauggacauauauaggaguugauggcccugacaguaaugcauugcucaaaauaaaauauggagaagcauauacugacacauaccauuccuaugcaaacaacauccuaagaacacaagaaagugcuugcaauugcaucgggggaaauuguuaucuuaugauaacugauggcucagcuucagguauuagugagugcagauuucuuaagauucgagagggccgaauaauaaaagaaauauuuccaacaggaagaguaaaacauacugaagaaugcacaugcggauuugccagcaauaaaaccauagaaugugccuguagagauaacaguuacacagcaaaaagacccuuugucaaauuaaauguggagacugauacagcagaaauaagauugaugugcacagagacuuauuuggacacccccagaccagaugauggaagcauaacagggccuugugaaucuaauggggauaaagggaguggaggcaucaagggaggauuuguucaucaaagaauggaauccaagauuggaaggugguacucucgaacaaugucuaaaacuaaaaggauggggaugggacuguaugucaaguaugauggagacccauggacugacagugaugcccuugcucuuaguggaguaaugguuucaauugaagaaccugguugguacuccuuuggcuucgaaauaaaagauaagaaaugugauguccccuguauugggauagagaugguacaugaugguggaaaggagacuuggcacucagcagcaacagccauuuacuguuuaaugggcucaggacaacugcuaugggacacugucacagguguugauauggcucuguaa

SEQ ID NO: 60595 - RNA, 1401 nt, Artificial Sequence
  derived and/or modified CDS sequence (wt) from neuraminidase__InfluenzaB__AAN39761
augcuaccuucaacuauacaaacguuaacccuauuucucacaucagggggaguguuauuaucacuauaugugucagcuucacugucauacuuacuauauucggauauauugcuaaaauuuucacaaacagaaauaacugcaccaacaaugccauuggauugugcaaacgcaucaaauguucaggcugugaaccguucugcaacaaaaggggugacgcuucuucucccagaaccggaguggacguacccucguuuaucuugcccgggcucaaccuuucagaaagcacuccuaauuagcccucauagauucggagaaaccaaaggaaacucagcucccuugauaauaagggaaccuuuuauugcuuguggaccaaaggaaugcaaacacuuugcucuaacccauuaugcagcucaaccagggggauacuacaauggaacaagagaagacagaaacaagcugaggcaucuaauuucagucaaauugggcaaaaucccaacaguagaaaacucuauuuuccacauggcagcuuggagcggguccgcaugccaugaugguagagaauggacauauaucggaguugauggcccugacaguaaugcauugcucaaaauaaaauauggagaagcauauacugacacauaccauuccuaugcaaaaaacauccuaaggacacaagaaagugccugcaauugcaucgggggagauuguuaucuuaugauaacugauggcucagcuucagggauuagugaaugcagauuccuuaagauucgagagggccgaauaauaaaagaaauauuuccaacaggaagaauaaaacauacugaagaaugcacaugcggauuugccagcaauaaaaccauagaaugugccuguagagauaacaguuacacagcaaaaagacccuuugucaaauuaaauguggagacugauacagcggaaauaagauugaugugcacagagacuuauuuggacacccccagaccagaugauggaagcauaacagggccuugcgaaucuaauggggacaaagggaguggaggcaucaagggaggauuuguucaucaaagaauggcauccaagauuggaaggugguacucucgaacgaugucuaaaacuaaaagaauggggaugggauuguaugucaaguaugauggagacccauggacugacagugaagcccuugcucuuaguggaguaaugguuucaauggaagaaccugguugguauuccuuuggcuucgaaauaaaagauaagaaaugugauguccccuguauugggauagaaaugguacaugauggugggaaaacgacuuggcacucagcagcaacagccauuuacuguuuaaugggcucaggacaacugcugugggacacugucacagguguugauauggcucuguaa

SEQ ID NO: 60596 - RNA, 1401 nt, Artificial Sequence
  derived and/or modified CDS sequence (wt) from neuraminidase__InfluenzaB__AAN39769
augcuaccuucaacuauacaaacguuaacccuauuucucacaucagggggaguguuauuaucacuauaugugucagccuuacugucauacuuacuguauucggauauauugcuaaaauuuucaccaacaaaaauaauugcaccaacaacgucguuggacuccgcgaacgcaucaaauuuucaggccgugaaccauucugcaacaaaagagaugacauuucuucucccagaaccggaguggacauacccucguuuaucuugccaggguucaaccuuucaaaaagcacuccuaauuagcccucauagauucggagaagccaaaggaaacucagcucccuugauaauaagggaaccuuuuauugcuuguggaccaaaggaguguaaacacuuugcucuaacccauuaugcagcucaaccagggggauacuacaauggaacaagagaggacagaaacaagcugaggcaucugauuucagucaacuuaggcaaaauaccaacuguagaaaacuccauuuuccacauggcagcuuggaguggguccgcaugccaugaugguagagaauggacuuauaucggaguugauggcccugacaguaaugcauugaucaaaauaaaauauggagaagcauacacugacacauaccauuccuaugcaaacaacauccuaagaacacaagaaagugccugcaacugcaucgggggagauuguuaucuuaugauaacugauggcucagcuucaggaauuaguaaaugcagauuccuuaagauucgagagggucgaauaauaaaagaaauauuuccaacaggaagaguagagcauacugaagaaugcacaugcggauuugccagcaauaaaaccauagaaugugccuguagagauaacaguuacacagcaaaaagacccuuugucaaauuaaauguggaaacugauacagcagaaauaagauuaaugugcacagagacuuauuuggacacccccagaccagaugauggaagcauaacagggccuugcgaaucuaauggggacaaagggaguggagguaucaagggaggauuuguccaucaaagaauggcauccaagauuggaagaugguacucucgaacgaugucuaaaacuaaaagaauggggauggaacuguaugucaaguaugauggagacccauggacugacagugaugcccuugcuccuaguggaguaauggucucaauagaagaaccugguugguauucuuucggcuucgaaauaaaagauaagaaaugcgauguccccuguauugggauagagaugguacacgaugguggaaaaacaacuuggcacucagcagcaacagccauuuacuguuuaaugggcucaggacaguugcuaugggacacugucacagguguugauauggcucuguaa

SEQ ID NO: 60597 - RNA, 1401 nt, Artificial Sequence
  derived and/or modified CDS sequence (wt) from neuraminidase__InfluenzaB__AAN39771
augcuaccuucaacuauacaaacauuaacccuauuucucacaucagggggaguguuauuaucacuauaugugucagccuuacugucauacuuacuguauucggauauauugcuaaaauuuucaccaacaaaaauaauugcaccaacaacgucguuggacuccgcgaacgcaucaaauuuucaggccgugaaccauucugcaacaaaagagaugacauuucuucucccagaaccggaguggacauacccucguuuaucuugccaggguucaaccuuucaaaaagcacuccuaauuagcccucauagauucggagaagccaaaggaaacucagcucccuugauaauaagggaaccuuuuauugcuuguggaccaaaggaguguaaacacuuugcucuaacccauuaugcagcucaaccagggggauacuacaauggaacaagagaggacagaaacaagcugaggcaucugauuucagucaacuuaggcaaaauaccaacuguagaaaacuccauuuuccacauggcagcuuggaguggguccgcaugccaugaugguagagaguggacuuauaucggaguugauggcccugacaguaaugcauugaucaaaauaaaauauggagaagcauacacugacacauaccauuccuaugcaaacaacauccuaagaacacaagaaagugccugcaacugcaucgggggagauuguuaucuuaugauaacugauggcucagcuucaggaauuaguaaaugcagauuccuuaagauucgagagggucgaauaguaaaagaaauauuuccaacaggaagaguagagcauacugaagaaugcacaugcggauuugccagcaauaaaaccauagaaugugccuguagagauaacaguuacacagcaaaaagacccuuugucaaauuaaauguggaaacugauacagcagaaauaagauugaugugcacagagacuuauuuggacacccccagaccagaugauggaagcauaacagggccuugcgaaucuaauggggacaaagggaguggagguaucaagggaggauuuguccaucaaagaauggcauccaagauuggaagaugguacucucgaacgaugucuaaaacuaaaagaauggggauggaacuguaugucaaguaugauggagacccauggacugacagugaugcccuugauccuaguggaguaauggucucaauagaagaaccugguugguauucuuucggcuucgaaauaaaagauaagaaaugcgauguccccuguauugggauagagaugguacacgaugguggaaaaacaacuuggcacucagcagcaacagccauuuacuguuuaaugggcucaggacaguugcuaugggacacuaucacagguguugauauggcucuguaa

SEQ ID NO: 60598 - RNA, 1401 nt, Artificial Sequence
  derived and/or modified CDS sequence (wt) from neuraminidase__InfluenzaB__AAN39773
augcuaccuucaacuauacaaacauuaacccuauuucucacaucagggggaguguuauuaucacuauaugugucagccuuacugucauacuuacuguauucggauauauugcuaaaauuuucaccaacaaaaauaauugcaccaacaacgucguuggacuccgcgaacgcaucaaauuuucaggccgugaaccauucugcaacaaaagagaugacauuucuucucccagaaccggaguggacauacccucguuuaucuugccaggguucaaccuuucaaaaagcacuccuaauuagcccucauagauucggagaagccaaaggaaacucagcucccuugauaauaagggaaccuuuuauugcuuguggaccaaaggaguguaaacacuuugcucuaacccauuaugcagcucaaccagggggauacuacaauggaacaagagaggacagaaacaagcugaggcaucugauuucagucaacuucggcaaaauaccaacuguagaaaacuccauuuuccacauggcagcuuggaguggguccgcaugccaugaugguagagaguggacuuauaucggaguugauggcccugacaguaaugcauugaucaaaauaaaauauggagaagcauacacugacacauaccauuccuaugcaaacaacauccuaagaacacaagaaagugccugcaacugcaucgggggagauuguuaucuuaugauaacugauggcucagcuucaggaauuaguaaaugcagauuccuuaagauucgagagggucgaauaguaaaagaaauauuuccaacaggaagaguagagcauacugaagaaugcacaugcggauuugccagcaauaaaaccauagaaugugccuguagagauaacaguuacacagcaaaaagacccuuugucaaauuaaauguggaaacugauacagcagaaauaagauugaugugcacagagacuuauuuggacacccccagaccagaugauggaagcauaacagggccuugcgaaucuaauggggacaaagggaguggagguaucaagggaggauuuguccaucaaagaauggcauccaagauuggaagaugguacucucgaacgaugucuaaaacuaaaagaauggggauggaacuguaugucaaguaugauggagacccauggacugacagugaugcccuugcuccuaguggaguaauggucucaauagaagaaccugguugguauucuuucggcuucgaaauaaaagauaagaaaugcgauguccccuguauugggauagagaugguacacgaugguggaaaaacaacuuggcacucagcagcaacagccauuuacuguuuaaugggcucaggacaguugcuaugggacacuaucacagguguugauauggcucuguaa

SEQ ID NO: 60599 - RNA, 1401 nt, Artificial Sequence
  derived and/or modified CDS sequence (wt) from neuraminidase__InfluenzaB__AAN39775
augcuaccuucaacuauacaaacguuaacccuauuucucacaucagggggaguguuauuaucacuauaugugucagccuuacugucauacuuacuguauucggauauauugcuaaaauuuucaccaacaaaaauaauugcaccaacaacgucguuggacuccgcgaacgcaucaaauuuucaggccgugaaccauucugcaacaaaagagaugacauuucuucucccagaaccggaguggacauacccucguuuaucuugccaggguucaaccuuucaaaaagcacuccuaauuagcccucauagauucggagaagccaaaggaaacucagcucccuugauaauaagggaaccuuuuauugcuuguggaccaaaggaguguaaacacuuugcucuaacccauuaugcagcucaaccagggggauacuacaauggaacaagagaggacagaaacaagcugaggcaucugauuucagucaacuuaggcaaaauaccaacuguagaaaacuccauuuuccacauggcagcuuggaguggguccgcaugccaugaugguaaagaauggacuuauaucggaguugauggcccugacaguaaugcauugaucaaaauaaaauauggagaagcauacacugacacauaccauuccuaugcaaacaacauccuaagaacacaagaaagugccugcaacugcaucggaggagauuguuaucuuaugauaacugauggcucagcuucaggaauuaguaaaugcagauuccuuaagauucgagagggucgaauaauaaaagaaauauuuccaacaggaagaguagagcauacugaagaaugcacaugcggauuugccagcaauaaaaccauagaaugugccuguagagauaacaguuacacagcaaaaagacccuuugucaaauuaaauguggaaacugauacagcagaaauaagauuaaugugcacagagacuuauuuggacacccccagaccagaugauggaagcauaacagggccuugcgaaucuaauggggacaaagggaguggagguaucaagggaggauuuguccaucaaagaauggcauccaagauuggaagaugguacucucgaacgaugucuaaaacuaaaagaauggggauggaacuguaugucaaguaugauggagacccauggacugacagugaugcccuugcuccuaguggaguaauggucucaauagaagaaccugguugguauucuuucggcuucgaaauaaaagauaagaaaugcgauguccccuguauugggauagagaugguacacgaugguggaaaaacaacuuggcacucagcagcaacagccauuuacuguuuaaugggcucaggacaguugcuaugggacacugucacagguguugauauggcucuguaa

SEQ ID NO: 60600 - RNA, 1401 nt, Artificial Sequence
  derived and/or modified CDS sequence (wt) from neuraminidase__InfluenzaB__AAN39777
augcuaccuucaacuauacaaacguuaacccuauuucucacaucagggggaguguuauuaucacuauaugugucagcuucacugucauacuuacuauauucggauauauugcuaaaauuuucacaaacagaaauaacugcaccaacaaugccauuggauugugcaaacgcaucaaauguucaggcugugaaccguucugcaacaaaaggggugacacuucuucccccagaaccggaguggacguacccucguuuaucuugcccgggcucaaccuuucagaaagcacuccuaauuagcccucauagauucggagaaaccaaaggaaacucagcucccuugauaauaagggaaccuuucauugcuuguggaccaaaggaaugcaaacauuuugcucuaacccauuaugcagcucaaccagggggauacuacaauggaacaagagaagacagaaacaagcugaggcaucuaauuucagucaaauugggcaaaaucccaacaguagaaaacucuauuuuccacauggcagcuuggagcggguccgcaugccaugaugguagagaauggacauauaucggaguugauggcccugacaguaaugcauugcucaaaauaaaauauggagaagcauauacugacacauaccauuccuaugcaaaaaacauccuaaggacacaagaaagugccugcaauugcaucgggggagauuguuaucuuaugauaacugauggcucagcuucagggauuagugaaugcagauuccuuaagauucgagagggccgaauaauaaaagaaauauuuccaacaggaagaguaaaacauacugaagaaugcacaugcggauuugccagcaauaaaaccauagaaugugccuguagagauaacaguuacacagcaaaaagacccuuugucaaauuaaauguggagacugauacagcggaaauaagauugaugugcacagagacuuauuuagacacccccagaccagaugauggaagcauaacagggccuugcgaaucuaaugggaacaaagggaguggaggcaucaagggaggauuuguucaucaaagaauggcauccaagauuggaaggugguacucucgaacgaugucuaaaacuaaaagaauggggauggggcuguaugucaaguaugauggagacccauggacugacagugaagcccuugcucuuaguggaguaaugguuucaauggaagaaccugguugguauuccuuuggcuucgaaauaaaagauaagaaaugugauguccccuguauugggauagaaaugguacaugauggugggaaaacgacuuggcacucagcagcaacagccauuuacuguuuaaugggcucaggacaacugcugugggacacugucacagguguugauauggcucuguaa

SEQ ID NO: 60601 - RNA, 1401 nt, Artificial Sequence
  derived and/or modified CDS sequence (wt) from neuraminidase__InfluenzaB__AAN39779
augcuaccuucaacuauacaaacguuaacccuauuucucacaucagggggaguguuauuaucacuauaugugucagccuuacugucauacuuacuguauucggauauauugcuaaaauuuucaccaacaaaaauaauugcaccaacaacgucguuggacuccgcgaacgcaucaaauuuucaggccgugaaccauucugcaacaaaagagaugacauuucuucucccagaaccggaguggacauacccucguuuaucuugccaggguucaaccuuucaaaaagcacuccuaauuagcccucauagauucggagaagccaaaggaaacucagcucccuugauaauaagggaaccuuuuauugcuuguggaccaaaggaguguaaacacuuugcucuaacccauuaugcagcucaaccagggggauacuacaauggaacaagagaggacagaaacaagcugaggcaucugauuucagucaacuuaggcaaaauaccaacuguagaaaacuccauuuuccacauggcagcuuggaguggguccgcaugccaugaugguagagaauggacuuauaucggaguugauggcccugacaguaaugcauugaucaaaauaaaauauggagaagcauacacugacacauaccauuccuaugcaaacaacauccuaagaacacaagaaagugccugcaacugcaucggaggagauuguuaucuuaugauaacugauggcucagcuucaggaauuaguaaaugcagauuccuuaagauucgagagggucgaauaauaaaagaaauauuuccaacaggaagaguagagcauacugaagaaugcacaugcggauuugccagcaauaaaaccauagaaugugccuguagagauaacaguuacacagcaaaaagacccuuugucaaauuaaauguggaaacugauacagcagaaauaagauuaaugugcacagagacuuauuuggacacccccagaccagaugauggaagcauaacagggccuugcgaaucuaauggggacaaagggaguggagguaucaagggaggauuuguccaucaaagaauggcauccaagauuggaagaugguacucucgaacgaugucuaaaacuaaaagaauggggauggaacuguaugucaaguaugauggagacccauggacugacagugaugcccuugcuccuaguggaguaauggucucaauagaagaaccugguugguauucuuucggcuucgaaauaaaagauaagaaaugcgauguccccuguauugggauagagaugguacacgaugguggaaaaacaacuuggcacucagcagcaacagccauuuacuguuuaaugggcucaggacaguugcuaugggacacugucacagguguugauauggcucuguaa

SEQ ID NO: 60602 - RNA, 1401 nt, Artificial Sequence
  derived and/or modified CDS sequence (wt) from neuraminidase__InfluenzaB__AAN39781
augcuaccuucaacuauacaaacguuaacccuauuucucacaucagggggaguguuauuaucacuauaugugucagcuucacugucauacuuacuauauucggauauauugcuaaaauuuucaucaacagaaauaacugcaccaacaaugccauugaauugugcaaacgcaucaaauguucaggcugugaaccauucugcaacaaaaggggugacacuuccucucccagaaccggaguggacauacccucguuuaucuugcccgggcucaaccuuucagaaagcacuccuaaucagcccucauagauucggagaaaccaaaggaaacucagcucccuugauaauaagggaaccuuuuauugcuuguggaccaaaggaaugcaaacacuuugcucuaacccauuaugcagcccaaccagggggauacuacaauggaacaagagaagacagaaacaagcugaggcaccuaauuucagucaaauugggcaaaaucccaacaguagaaaacuccauuuuucacauggcagcuuggagcggguccgcaugccaugaugguagagaauggacauauaucggaguugauggcccugacaguaaugcauugcucaaaauaaaauauggagaagcauauacugacacauaccauuccuaugcaaacaacauccuaagaacacaagaaagugccugcaauugcaucgggggagauuguuaucuuaugauaacugauggcucagcuucagggguuagugaaugcagauuucuuaagauucgagagggccgaauaauaaaagaaauauuuccaacaggaagaguagaacauacugaagaaugcacaugcggauuugccagcaauaaaaccauagaaugugccuguagagauaacaguuacacagcaaaaagacccuuugucaaauuaaauguggagacugauacagcagaaauaagauugaugugcacagagacuuacuuggacacccccagaccagaugauggaagcauaacagggccuugugaaucuaauggggauaaagggaguggaggcaucaagggaggauuuguucaucaaagaauggcauccaagauuggaaggugguacucucgaacgaugucuaaaaauaaaaggauggggaugggacuguaugucaaguaugauggagacccauggauugacagugaugcccuuacucuuagcggaguaaugguuucaauggaagaaccugguugguauuccuuuggcuucgaaauaaaagauaagaaaugugauguccccuguauugggauagagaugguacaugaugguggaaaggagacuuggcacucagcagcaacagccauuuacuguuuaaugggcucaggacaacugcuaugggacacugucacaggcguuaauauggcuuuguaa

SEQ ID NO: 60603 - RNA, 1401 nt, Artificial Sequence
  derived and/or modified CDS sequence (wt) from neuraminidase__InfluenzaB__AAN39783
augcuaccuucaacuauacaaacguuaacccuauuucucacaucagggggaguguuauuaucacuauaugugucagcuucacugucauacuuacuauauucggauauauugcuaaaauuuucacaaacagaaauaacugcaccaacaaugccauuggauugugcaaacgcaucaaauguucaggcugugaaccguucugcaacaaaaggggugacacuucuucucccagaaccggaguggacguacccucguuuaucuugcccgggcucaaccuuucagaaagcacuccuaauuagcccccauagauucggagaaaccaaaggaaacucagcucccuugauaauaagggaaccuuuuauugcuuguggaccaaaggaaugcaaacacuuugcucuaacccauuaugcagcucaaccagggggauacuacaauggaacaagagaagacagaaacaagcugaggcaucuaauuucagucaaauugggcaaaaucccaacaguagaaaacucuauuuuccacauggcugcuuggagcggguccgcaugccaugaugguagagaauggacauauaucggaguugauggccccgacaguaaugcauugcucaaaauaaaauauggagaagcauauacugacacauaccauuccuaugcaaaaaacauccuaaggacacaagaaagugccugcaauugcaucgggggagauuguuaucuuaugauaacugauggcucagcuucagggauuagugaaugcagauuccuuaagauucgagagggccgaauaauaaaagaaauauuuccaacaggaagaguaaaacauacugaagaaugcacaugcggauuugccagcaacaaaaccauagaaugugccuguagagauaacaguuacacagcaaaaagacccuuugucaaauuaaauguggagacugauacagcggaaauaagauugaugugcacagagacuuauuuggacacccccagaccaaaugauggaagcauaacagggccuugcgaaucuaauggggacaaagggaguggaggcaucaagggaggauuuguucaucaaagaauggcauccaagauuggaaggugguacucucgaacgaugucuaaaacuaaaagaauggggaugggacuguaugucaaguaugauggagacccauggacugacagugaagcccuugcucuuaguggaguaaugguuucaauggaagaaccugguugguauuccuuuggcuucgaaauaaaagauaagaaaugugauguccccuguauugggauagaaaugguacaugauggugggaaaacgacuuggcacucagcagcaacagccauuuacuguuuaaugggcucaggacaacugcugugggacacugucacagguguugauauggcucuguaa

SEQ ID NO: 60604 - RNA, 1401 nt, Artificial Sequence
  derived and/or modified CDS sequence (wt) from neuraminidase__InfluenzaB__AAN39785
augcuaccuucaacuauacaaacguuaacccuauuucucacaucagggggagugcuguuaucacuauaugugucagccuuacuaucauacuuacuguauucggauauauugcuaaaauuuucaccaacaaaaguaauugcaccaacaaugucauuggacuacgcgaacgcaucaaauguucaggcugugaaucauucugcaacagaagagaugacauuucuucucccagaaccggaguggacauacccucguuuaucuugccaggguucaaccuuucagaaagcacucuuaauuagcccucacagauucggagaagccaaaggaaacucagcucccuugauaauaagggaaccuuuuauugcuuguggaccaaaggaguguaaacacuuugcacuaacucauuaugcagcucaaccagggggauacuauaauggaacaagggaggacagaaacaagcugaggcaucugauuucagucaacuuaggcaaaaucccaacuguagaaaacuccauuuuccacauggcagcuuggaguggauccgcaugccaugaugguagagaauggacuuauaucggaguugauggcccugacaguaaugcauugaucaaaauaaaauauggagaagcauacacugacacauaccauuccuaugcaaacaacauccuaagaacacaagaaagugccugcaauugcaucgggggagauuguuaucuuaugauaacugauggcucagcuucaggaauuaguagaugcagauuccuaaagauucgagagggucgaauaauaaaagaaauauuuccaacaggaagaguagagcauacugaagaaugcacaugcggauuugccagcaauaaaaccauagaaugugccuguagagauaacaguuacacagcaaaaagacccuuugucaaauuaaauguggaaacugauacagcugaaauaagauugaugugcacagagacuuauuuggacacccccagaccagaugauggaagcauaacagggccuugcgaaucuaauggggacaaagggaguggagguaucaagggaggauuuguccaucaaagaaugacauccaggauuggaagaugguacucucgaacuaugucuaaaacuaaaagaauggggauggaacuguaugucaaguacgauggagacccauggacugacagugacgcccuugcuccuaguggaguaauggucucaauggaagaaccugguugguauucuuucgguuucgaaauaaaagauaagaaaugcgauguccccuguauugggauagagaugguacacgaugguggaaaaaagacuuggcacucagcagcaacagccauuuacuguuuaaugggcucaggacaguugcuaugggacacugucacagguguugauauggcuuuguaa

SEQ ID NO: 60605 - RNA, 1401 nt, Artificial Sequence
  derived and/or modified CDS sequence (wt) from neuraminidase__InfluenzaB__AAN39787
augcuaccuucaacuauacaaacguuaacccuauuucucacaucagggggaguguuguuaucacuauaugugucagccuuacugucauacuuacuguauucggauauauugcuaaaauuuucaccaacaaaaguaauugcaccaacaaugucauuggacuacgcgaacgcaucaaauguucaggcugugaaucauucugcaacagaagagaugacauuucuucucccagaaccggaguggacauacccucguuuaucuugccaggguucaaccuuucagaaagcacucuuaauuagcccucauagauucggagaagccaaaggaaacucagcucccuugauaauaagggaaccuuuuauugcuuguggaccaaaggaguguaaacauuuugcucuaacccauuaugcagcucaaccagggggauacuauaauggaacaagggaggacagaaacaagcugaggcaucugauuucagucaacuuaggcaaaaucccaacuguagaaaacuccauuuuccacauggcagcuuggaguggauccgcaugccaugaugguagagaauggacuuauaucggaguugauggcccugacagcaaugcauugaucaaaauaaaauauggagaagcauacacugacacauaccauuccuaugcaaacaacauccuaagaacacaagaaagugccugcaauugcaucgggggagauuguuaucuuaugauaacugauggcucagcuucaggaauuaguagaugcagauuccuaaagauucgagagggucgaauaauaaaagaaauauuuccaacaggaagaguagagcauacugaagaaugcacaugcggauuugccagcaauaaaaccauagaaugugccuguagagauaacaguuacacagcaaaaagacccuuugucaaauuaaauguggaaacugauacagcugaaauaagauugaugugcacagagacuuauuuggacacccccagaccagaugauggaagcauaacagggccuugcgaaucuaauggggacaaagggaauggagguaucaagggaggauuuguccaucaaagaauggcauccaggauuggaagaugguacucucgaacgaugucuaaaacuaaaagaauggggauggagcuguaugucaaguaugauggagacccauggacugacagugacgcccuugcuccuaguggaguaauggucucaauggaggaaccugguugguauucuuucgguuucgaaauaaaagauaagaaaugcgauguccccuguauugggauagagaugguacacgaugguggaaaaaagacuuggcacucagcagcaacagccauuuacuguuuaaugggcucaggacaguugcuaugggacacugucacagguguugauauggcuuuguaa

SEQ ID NO: 60606 - RNA, 1401 nt, Artificial Sequence
  derived and/or modified CDS sequence (wt) from neuraminidase__InfluenzaB__AAN39795
augcuaccuucaacuauacaaacguuaacccuauuucucacaucagggggaguguuauuaucacuauaugugucagcuucacugucauacuuacuguauucggauauauugcuaaaauuuucaccaacagaaauaacugcaccaacaaugccauuggauugugcaaacgcaucaaauguucaggcugugaaccguucugcaacaaaaggggugacacuucuucucccagaaccggaguggacauacccucguuuaucuugcccgggcucaaccuuucagaaagcacuccuaauuagcccucauagauucggagaaaccagaggaaacucagcucccuugauaauaagggaaccuuuuauugcuuguggaccaaaggaaugcaaacacuuugcucuaacccauuaugcagcucaaccagggggauacuacaauggaacaagagaagacagaaacaagcugaggcaucuaauuucagucaaauugggcaaaaucccaacgguagaaaacuccauuuuccacauggcagcuuggagcggguccgcaugccaugaugguagggaauggacauauaucggaguugauggcccugacaguaaugcauugcucaaaauaaaauauggagaagcauauacugacacauaccauuccuaugcaaacaacauccuaagaacacaagaaagugccugcaauugcaucggaggagauuguuaucuuaugauaacugauggcucagcuucagggacuaguaaaugcagauuucuuaagauucgagagggccgaauaauaaaagaaauauuuccaacaggaagaguagaacauacugaagaaugcacaugcggauuugccagcaauaaaaccauagaaugugccuguagagauaacaauuacacagcaaaaagacccuuugucaaauuaaauguggagacugaugcagcggaaauaagauugaugugcacagagacuuauuuggacacccccagaccagaugauggaagcauaacagggccuugcgaaucuaauggggauaaagggcgugguggcaucaagggaggauuuguucaucaaagaauggcauccaagauuggaaggugguauucucgaacgaugucuaaaacugaaaggauggggauggaacuguaugucaaguaugauggagacccauggacugacagugacgcccuugcucuuaguggaguaaugguuucaauggaggaaccugguugguauuccuuuggcuucgaaauaaaagauaagaaaugugauguccccuguauugggauagagaugguacaugaugguggaaaaaagacuuggcacucagcagcaacagccauuuacuguuuaaugggcucaggacaacugcuaugggacacugucacagguguugauauggcucuguaa

SEQ ID NO: 60607 - RNA, 1401 nt, Artificial Sequence
  derived and/or modified CDS sequence (wt) from neuraminidase__InfluenzaB__AAN39797
augcuaccuucaacuauacaaacguuaacccuauuucucacaucagggggaguacuguuaucacuauaugugucagccuuacugucauacuuacuguauucggauauauugcuaaaauuuucaccaacaaaaguaauugcaccaacaaugucauuggacugcgcgaacgcaucaaauguucaggcugugaaccauucugcaacagaagagaugacauuucuucucccagaaccggaguggacauacccucguuuaucuugccaggguucaaccuuucagaaagcacuccuaauuagcccucauagauucggagaagccaaaggaaacucagcucccuugauaauaagggaaccuuuuauugcuuguggaccaaaggaguguaaacacuuugcucuaacccauuaugcagcucaaccagggggauacuacaauggaacaagagaggacagaaacaagcugaggcaucugauuucagucaacuuaggcaaaaucccaacuguagaaaacuccauuuuccacauggcagcuuggaguggauccgcaugccaugaugguagagaauggacuuauaucggaguugauggcccugacaguaaugcauugaucaaaauaaaauauggagaagcauacacugacacauaccauuccuaugcaaacaacauccuaagaacacaagaaagugccugcaauugcaucgggggagauuguuaucuuaugauaacugauggcucagcuucaggaauuaguaggugcagauuccuuaagauucgagagggucgaauaauaaaagaaauauuuccaacaggaagaguagaacauacugaagaaugcacaugcggauuugccagcaauaaaaccauagaaugugccuguagagauaacaguuacacagcaaaaagacccuuugucaaauuaaauguggaaacugauacagcugaaauaagauugaugugcacagagacuuauuuggacacccccagaccagaugauggaagcauaacagggccuugcgaaucuaauggggacaaaggaaauggagguaucaagggaggauuuguccaucaaagaauggcauccaggauuggaagaugguacucucgaacgaugucuaaaacuaaaagaauggggauggaacuguaugucaaguaugauggagacccauggacugacagugacgcccuugcuccuaguggaguaauggucucaauggaagaaccugguugguauucuuucgguuucgaaauaaaagauaagaaaugcgauguccccuguauugggauagagaugguacacgaugguggaaaaaagacuuggcacucagcagcaacagccauuuacuguuuaaugggcucaggacaguugcuaugggacacugucacagguguugauauggcucuguaa

SEQ ID NO: 60608 - RNA, 1401 nt, Artificial Sequence
  derived and/or modified CDS sequence (wt) from neuraminidase__InfluenzaB__AAN39799
augcuaccuucaacuauacaaacguuaacccuauuucucacaucagggggaguguuguuaucacuauaugugucagccuuacugucauacuuacuguauucggauguauugcuaaaauuuucaccaacaaaaauaauugcaccaacaaugucguuggacugcgcgaacgcaucaaauguucaggcugugaaccauucugcaacagaagagaugacauuucuucucccagaaccggaguggacauacccucguuuaucuugccaggguucaaccuuucagaaagcacuccuaauuagcccucauagauucggagaagccaaaggaaacucagcucccuugauaauaagggaaccuuuuauugcuuguggaccaaaggaguguaaacacuuugcucuaacccauuaugcagcucaaccagggggauacuacaauggaacaagagaggacagaaacaagcugaggcaucugauuucggucaacuuaggcaaaaucccaacuguagaaaacuccauuuuccacauggcagcuuggaguggauccgcaugccaugaugguagagaauggacuuauaucggaguugauggcccugacaguaaugcauugaucaaaauagaauauggagaagcauacacugacacauaccauuccuaugcauacaacauccuaagaacacaagaaagugccugcaauugcaucgggggagauuguuaucuuaugauaacugauggcucagcuucaggaauuaguaaaugcagauuccuuaagauucgagagggucgaauaauaaaagaaauauuuccaacaggaagaguagagcauacugaagaaugcacaugcggauuugccagcaauaaaaccauagaaugugccuguagagauaacaguuacacagcaaaaagacccuuugucaaauuaaauguggaaacugauacagcugaaauaagauugaugugcacagagacuuauuuggacacccccagaccagaugauggaagcauaacagggccuugcgaaucuaauggggacaaagggaguggagguaucaagggaggauuuguccaucaaagaauggcauccaagauuggaagaugguacucucgaacgaugucuaaaacuaaaagaauggggauggaacuguaugucaaguaugauggagacccauggacugacagugacgcccuugcuccuaguggaguaauggucucaauggaagaaccugguugguauucuuucggcuucgaaauaaaagauaagaaaugcgauguccccuguauugggauagagaugguacacgaugguggaaaaaagacuuggcacucagcagcaacagccauuuacuguuuaaugggcucaggacaguugcuaugggacacugucacagguguugauauggcucuguaa

SEQ ID NO: 60609 - RNA, 1401 nt, Artificial Sequence
  derived and/or modified CDS sequence (wt) from neuraminidase__InfluenzaB__AAN39801
augcuacccucaacuauacaaacguuaacccuauuccucacaucagggggaguguuauuaucgcuauaugugucagcuucacugucauacuuacuauauucggauauauugcuaaaauuuucaccaacagaaauaacugcaccaacaaugccauuggauugugcaaacgcaucaaaugcucaggcugugaaccguucugcaacaaaaggggugacacuucuucucccagaaccggaguggacauacccgcgcuuaucuugcccgggcucaaccuuucagaaagcacuccuaauuagcccucauagauucggagaaaccaaaggaaacucagcucccuugauaauaagggaaccuuuuauugcuuguggaccaaaggaaugcaaacacuuugcucuaacccauuaugcagcccaaccagggggauacuacaauggaacaagagaagacagaaacaagcugaggcaucuaauuucagucaaauugggcaaaaucccaacaguagaaaacuccauuuuccacauggcagcauggagcggguccgcaugccaugaugguaaagaauggacauauaucggaguugauggcccugacaguaaugcauugcucaaaauaaaauauggagaagcauauacugacacauaccauuccuaugcaaacaacauccuaagaacacaagaaagugccugcaauugcaucgggggaaauuguuaucuuaugauaacugauggcucagcuucagguauuagugagugcagauuucucaagauucgagagggccgaauaauaaaagaaauauuuccaacaggaagaguaaaacauacugaagaaugcacaugcggauuugccagcaauaaaaccauagaaugugccuguagagauaacaguuacacagcaaaaagacccuuugucaaauuaaauguggagacugauacagcagaaauaagauugaugugcacagagacuuauuuggacacccccagaccagaugauggaagcauaacagggccuugugaaucuaauggggauaaagggaguggaggcaucaagggaggauuuguucaucaaagaauggcauccaagauuggaaggugguacucucgaacaaugucuaaaacuaaaaggauggggaugggacuguaugucaaguaugauggagacccauggacugacagugaugcccuugcucuuaguggaguaaugguuucaauggaagaaccugguugguacuccuuuggcuucgaaauaaaagauaagaaaugugauguccccuguauugggauagagaugguacaugaugguggaaaggagacuuggcacucagcagcaacagccauuuacuguuuaaugggcucaggacaacugcuaugggacacugucacagguguugauauggcucuguaa

SEQ ID NO: 60610 - RNA, 1401 nt, Artificial Sequence
  derived and/or modified CDS sequence (wt) from neuraminidase__InfluenzaB__AAN39803
augcuaccuucaacuauacaaacguuaacccuauuucucacaucagggggaguguuauuaucacuauaugugucagcuucacugucauacuuacuguauucggauauauugcuaaaauuuucaccaacagaaauaacugcaccaaaagugccauuggauugugcaaacgcaucaaauguucaggcugugaaccguucugcaacaaaagggaugacacuucuucucucagaaccggaguggacauacccucguuuaucuugccagggcucaaccuuucagaaagcacuccuaauuagcccucauagauucggagaaaccagaggaaacucagcucccuugauaauaagggaaccuuuuauugcuuguggaccaaaggaaugcaaacacuuugcucuaacccauuaugcagcucaaccagggggauacuacaauggaacaagagaggacagaaacaagcugaggcaucugauuucagucaaauugggcaaaaucccaacaguagaaaacuccauuuuccacauggcagcuuggagcggguccgcaugccaugaugguagagaauggacauauaucggacuugauggcccugacaguaaugcauugaucaaaauaaaauauggagaagcauauacugacacauaccauuccuaugcaaacaacauccuaagaacacaagaaagugccugcaauugcaucgggggagauuguuaucuuaugauaacugauggcucagcuucaggaauuaguaaaugcagauuucuuaagauucgagagggucgaauaauaaaagaaauauuucccacaggaagaguagaacauacugaagaaugcacaugcggauuugccagcaauaaaaccauagaaugugccuguagagauaacaguuacacagcaaaaagacccuuugucaaauuaaauguggagacugauacagcugaaauaagauugaugugcacagagacuuauuuggacacccccagaccagaugauggaagcauaacagggccuugcgaaucuaauggggacaaagggcguggaggcaucaagggaggauuuguucaucaaagaauggcauccaagauuggaagaugguacucucgaacgaugucuaaaacugaaagaauggggauggaacuguaugucaaguaugauggagacccauggacugacagugacgcccuugcuccuaguggaguaaugguuucaaugaaagaaccugguugguauuccuuuggcuucgaaauaaaagauaagaaaugugauguccccuguauugggauagagaugguacaugaugguggaaaagagacuuggcacucagcagcaacagccauuuacuguuuaaugggcucaggacaauugcuaugggacacugucacagguguugauauggcucuguaa

SEQ ID NO: 60611 - RNA, 1401 nt, Artificial Sequence
  derived and/or modified CDS sequence (wt) from neuraminidase__InfluenzaB__ABA02232
augcuaccuucaacuauacaaacguuaacccuauuucucacaucagggggaguguuauuaucacuauaugugucagcuucauugucauacuuacuauauucggauauauugcuaaaauuuucaccaacagaaauaacugcaccaacaaugccauuggauugugcaaacgcaucaaauguucaggcugugaaccguucugcaacaaaaggggugacacuucuucucccagaaccggaguggacauacccgcguuuaucuugcccgggcucaaccuuucagaaagcacuccuaauuagcccucauagauucggagaaaccaaaggaaacucagcucccuugauaauaagggaaccuuuuauugcuuguggaccaaaggaaugcaaacacuuugcucuaacccauuaugcagcccaaccagggggauacuacaauggaacaagaggagacagaaacaagcugaggcaucuaauuucagucaaauugggcaaaaucccaacaguagaaaacuccauuuuccacauggcagcauggagcggguccgcaugccaugaugguaaagaauggacauauaucggaguugauggcccugaaaauaaugcauugcucaaaauaaaauauggagaagcauauacugacacauaccauuccuaugcaaacaacauccuaagaacacaagaaagugccugcaauugcaucgggggaaauuguuaucuuaugauaacugauggcucagcuucagguauuagugaaugcagauuucuuaagauucgagagggccgaauaauaaaagaaauauuuccaacaggaagaguaaaacauacugaagaaugcacaugcggauuugccagcaauaaaaccauagaaugugccuguagagauaacaguuacacagcaaaaagacccuuugucaaauuaaacguggagacugauacagcagaaauaagauugaugugcacagagacuuauuuggacacccccagaccagaugauggaagcauaacagggccuugugaaucuaauggggacaaagggaguggaggcaucaagggaggauuuguucaucaaagaauggcauccaagauuggaaggugguacucucgaacgaugucuaaaacuaaaaggaugggaaugggauuguaugucaaguaugauggagacccauggacugacagugaugcccuugcucuuaguggaguaaugguuucaauggaagaaccugguugguacuccuuuggcuucgaaauaaaagauaagaaaugugauguccccuguauugggauagagaugguacaugaugguggaaaggagacuuggcacucagcagcaacagccauuuacuguuuaaugggcucaggacaacugcuaugggacacugucacagguguugauauggcucuguaa

SEQ ID NO: 60612 - RNA, 1401 nt, Artificial Sequence
  derived and/or modified CDS sequence (wt) from neuraminidase__InfluenzaB__ABI84039
augcuaccuucaacuauacaaacguuaacccuauuucucacaucagggggaguauuauuaucacuauaugugucagcuucauuaucauacuuacuauauucggauauauugcuaaaauucucaccaacagaaauaacugcaccaacaaugccauuggauugugcaaacgcaucaaauguucaggcugugaaccguucugcaacaaaaggggugacacuucuucucccagaaccggaguggacauacccgcguuuaucuugcccgggcucaaccuuucagaaagcacuccuaauuagcccucauagauucggagaaaccaaaggaaacucagcucccuugauaauaagggaaccuuuuauugcuuguggaccaaaugaaugcaaacacuuugcucuaacccauuaugcagcccaaccagggggauacuacaauggaacaagaggagacagaaacaagcugaggcaucuaauuucagucaaauugggcaaaaucccaacaguagaaaacuccauuuuccacauggcagcauggagcggguccgcaugccaugaugguaaggaauggacauauaucggaguugauggcccugacaauaaugcauugcucaaaauaaaauauggagaagcauauacugacacauaccauuccuaugcaaacaacauccuaagaacacaagaaagugccugcaauugcaucgggggaaauuguuaucuuaugauaacugauggcucagcuucagguguuagugaaugcagauuucuuaagauucgagagggccgaauaauaaaagaaauauuuccaacaggaagaguaaaauauacugaggaaugcacaugcggauuugccagcaauaaaaccauagaaugugccuguagagauaacaguuacacagcaaaaagacccuuugucaaauuaaacguggagacugauacagcagaaauaagauugaugugcacagauacuuauuuggacacccccagaccagaugauggaagcauaacaggcccuugugaaucuaauggggacaaagggaguggaggcauaaagggaggauuuguucaucaaagaauggcauccaagauuggaaggugguacucucgaacgaugucuaaaacugaaaggauggggaugggacuguaugucaaguaugauggagacccaugggcugacagugaugcccuugcuuuuaguggaguaaugguuucaaugaaagaaccugguugguacuccuuuggcuucgaaauaaaagauaagaaaugcgauguccccuguauugggauagagaugguacaugaugguggaaaagagacuuggcacucagcagcaacagccauuuacuguuuaaugggcucaggacagcugcugugggacacugucacagguguugacauggcucuguaa

SEQ ID NO: 60613 - RNA, 1401 nt, Artificial Sequence
  derived and/or modified CDS sequence (wt) from neuraminidase__InfluenzaB__ABI84051
augcuaccuucaacuauacaaacguuaacccuauuucucacaucagggggaguguuguuaucacuauaugugucagcuucauugucauacuuacuauauucggauauauugcuaagauuuucacaaacagaaauaacugcaccaauaaugccauuggauugugcaaacgcaucaaauguucaggcugugaaccauucugcaacaaaaggggugacacuucuucucccagaaccggaguggacguacccucguuuaucuugcccgggcucaaccuuucagaaagcacuccuaauuagcccccauagauucggagaaaccaaaggaaacucagcucccuugauaauaagggaaccuuuuauugcuuguggaccaaaggaaugcaaacacuuugcucuaacccauuaugcagcucaaccagggggauacuacaauggaacaagagaagacagaaacaagcugaggcaucuaauuucagucaaauugggcaaaaucccaacaguagaaaacucuauuuuccacauggcagcuuggagcggguccgcaugccaugaugguagagaauggacauauauuggaguugauggccccgacaguaaugcauugcucaaaauaaaauauggagaagcauauacugacacauaccauuccuaugcaaaaaacauccuaaggacacaagaaagugccugcaauugcaucgggggagauuguuaucuuaugauaacugauggcccagcuucagggauuagugaaugcagauuccucaagauucgagagggccgaauaauaaaagaaauauuuccaacaggaagaguaaaacauacugaggaaugcacaugcggauuugccagcaacaaaaccauagaaugugccuguagagauaacaguuacacagcaaaaagacccuuugucaaauuaaauguggagacugauacagcggaaauaagauugaugugcacagagacuuauuuggacacccccagaccaaaugauggaagcauaacagggccuugcgaaucuaauggggacaaagggaguggaggcaucaagggaggauuuguucaucaaagaauggcauccaagauuggaaggugguacucucgaacgaugucuaaaacuaaaagaauggggaugggacuguauguaaaguaugauggagacccauggacugacagugaagcccuugcucuuaguggaguaaugguuucaauggaagaaccugguugguauuccuuuggcuucgaaauaaaagauaagaaaugugauguccccuguauugggauagaaaugguacaugauggugggaaaacgacuuggcacucagcagcaacagccauuuacuguuuaaugggcucaggacaacugcugugggacacugucacagguguugauauggcucuguaa

SEQ ID NO: 60614 - RNA, 1401 nt, Artificial Sequence
  derived and/or modified CDS sequence (wt) from neuraminidase__InfluenzaB__ABI84062
augcuaccuucaacuauacaaacguuaacccuauuucucacaucagggggaguauuauuaucacuauaugugucagcuucauugucauacuuauuauauucggauauauugcuaaaauucucaccaacagaaauaauugcaccaauaaugccauuggauugugcaaacgcaucaaauguucaggcugugaaccguucuacaacaaaaggggugacacuucuucucccagaaccggaguggacauacccgcguuuaucuugcccgggcucaaccuuucagaaagcacuccuaauuagcccucauagauucggagaaaccaaaggaaacucagcucccuugauaauaagggaaccuuuuauugcuuguggaccaaaggaaugcaaacacuuugcucuaacucauuaugcagcccaaccagggggauacuacaauggaacaagaggagacagaaacaagcugaggcaucuaauuucagucaaauugggcaaaaucccaacaguagaaaacuccauuuuccacauggcagcauggagcggguccgcaugccaugaugguaaagaauggacauauaucggaguugauggcccugacaauaaugcauugcucaaaauaaaauauggagaagcauauacugacacauaccauuccuaugcaaacaacauccuaagaacacaagaaagugccugcaauugcaucgggggaaauuguuaucuuaugauaacugauggcccagccucagguauuagugaaugcagauuucuuaagauucgagagggccgaauaauaaaagaaauauuuccaacagggagaguaaaacauacugaagaaugcacaugcggauuugccagcaauaaaaccauagaaugugccuguagagauaacaguuacacagcaaaaagacccuuugucaaauuaaacguggagaccgauacagcagaaauaagauugaugugcacagagacuuauuuggacacccccagaccagaugauggaagcauaacagggccuugugaaucuaauggggacaaagggaguggaggcaucaagggaggauuuguucaucaaagaauggcauccaagauuggaaggugguacucucgaacgaugucuaaaaccgaaagaaugggaaugggacuguaugucaaguaugauggagacccaugggcugacagugaugcccuugcucuuaguggaguaaugguuucaauggaagaaccugguugguacuccuuuggcuucgaaauaaaagauaagaaaugugauguccccuguauugggauagagaugguacaugaugguggaaaggagacuuggcacucagcagcaacagccauuuacuguuuaaugggcucaggacagcugcugugggacacugucacagguguugauauggcucuguaa

SEQ ID NO: 60615 - RNA, 1401 nt, Artificial Sequence
  derived and/or modified CDS sequence (wt) from neuraminidase__InfluenzaB__ABL76280
augcuaccuucaacuauacaaacguuaacccuauuucucacaucagggggaguguuauuaucacuauaugugucagcuucacugucauacuuacuauauucggauauauugcuaaaauuuucaccaacagaaauaacugcaccaacaaugccauugaauugugcaaacgcaucaaauguucaggcugugaaccguucugcaacaaaaggggugacacuucuucucccagaaccggaguggacauacccucguuuaucuugcccgggcucaaccuuucagaaagcacuccuaauuagcccucauagauucggagaaaccaaaggaaacucagcucccuugauaauaagggaaccuuuuauugcuuguggaccaaaggaaugcaaacacuuugcucuaacccauuaugcagcccaaccagggggauacuacaauggaacaagagaagacagaaacaagcugaggcaucuaauuucagucaaauugggcaaaaucccaacaguagaaaacuccauuuuccacauggcagcuuggagcggguccgcaugccaugaugguagagaauggacauauaucggaguugauggcccugacaguaaugcauugcucaaaauaaaauauggagaagcauauacugacacauaccauuccuaugcaaacaacauccuaagaacacaagaaagugccugcaauugcaucgggggagauuguuaucuuaugauaacugauggcucagcuucagggauuagugaaugcagauuucuuaagauucgagagggccgaauaauaaaagaaauauuuccaacaggaagaguagaacauacugaagaaugcacaugcggauuugccagcaauaaaaccauagaaugugccuguagagauaacaguuacacagcaaaaagacccuuugucaaauuaaauguggagacugauacagcagaaauaagauugaugugcacagagacuuauuuggacacccccagaccagaugauggaagcauaacagggccuugugaaucuaauggggauaaagggaguggaggcaucaagggaggauuuguucaucaaagaauggcauccaagauuggaaggugguacucucgaacgaugucuaaaacuaaaaggauggggaugggacuguaugucaaguaugauggagacccauggauugacagugaugcccuuacucuuagcggaguaaugguuucaauggaagaaccugguugguauuccuuuggcuucgaaauaaaagauaagaaaugugauguccccuguauugggauagagaugguacaugaugguggaaagaagacuuggcacucagcagcaacagccauuuacuguuuaaugggcucaggacaacugcuaugggacacugucacaggcguugauauggcucuguaa

SEQ ID NO: 60616 - RNA, 1401 nt, Artificial Sequence
  derived and/or modified CDS sequence (wt) from neuraminidase__InfluenzaB__ABL76302
augcuaccuucaacuauacaaacguuaacccuauuucucacaucagggggaguguuauuaucacuauaugugucagcuucacugucauacuuacuauauucggauauauugcuaaaauuuccaccaacagaaauaacugcaccaacaaugccauuggauugugcaaacgcaucaaauguucaggcugugaaccguucugcaacaaaaggggugacacuucuucucccggaaccggaguggacauacccucguuuaucuugcccgggcucaaccuuucagaaagcacuccuaauuagcccucauagauucggagaaaccaaaggaaacucagcucccuugauaauaagggaaccuuuuauugcuuguggaccaaaggaaugcaaacacuuugcucuaacccauuaugcagcccaaccagggggauacuacaauggaacaagagaagacagaaacaagcugaggcaucuaauuucagucaaauugggcaaaaucccaacaguagaaaacuccauuuuucacauggcagcuuggagcggguccgcaugccaugaugguagagaauggacauauaucggaguugauggcccugacaguaaugcauugcucaaaauaaaauauggagaagcauauacugacacauaccauuccuaugcaaacaacauccuaagaacacaagaaagugccugcaauugcaucgggggaaauuguuaucuuaugauaacugauggcucagcuucagggauuagugaaugcagauuucuuaagauucgagagggccgaauaauaaaagaaauauuuccaacaggaagaguaaaacauacugaagaaugcacaugcggauuugccagcaauaaaaccauagaaugugccuguagagauaacaguuacacagcaaaaagacccuuugucaaauuaaauguggagacugauacagcagaaauaagauugaugugcacagagacuuauuuggacacccccagaccagaugauggaagcauaacagggccuugugaaucuaauggggauaaagggaguggaggcaucaagggaggauuuguucaucaaagaauggcauccaagauuggaaggugguacucccgaacgaugucuaaaacuaaaaggauggggaugggacuguaugucaaguaugauggagacccauggacugacagugauccccuugcucuuaguggaguaaugguuucaauggaagaaccugguugguauuccuuuggcuucgaaauaaaagauaagaaaugugauguccccuguauugggauagagaugguacaugaugguggaaaggagacuuggcacucagcagcaacagccauuuacuguuuaaugggcucaggacaaaugcuaugggacaccgucacagguguugauauggcucuguaa

SEQ ID NO: 60617 - RNA, 1401 nt, Artificial Sequence
  derived and/or modified CDS sequence (wt) from neuraminidase__InfluenzaB__ABL76313
augcuaccuucaacuauacaaacguuaacccuauuucucacaucagggggaguguuauuaucacuauaugugucagcuucacugucauacuuacuauauucggauauauugcuaaaauuuucaccaaaagaaauaacugcaccaacaaugccauugaauugugcaaacgcaucaaauguucaggcugugaaccguucugcgacaaaaggggugacauuuccucucccagaaccggaguggacauacccucguuuaucuugcccgggcucaaccuuucagaaagcacuccuaauuagcccucauagauucggagaaaccaaaggaaacucagcucccuugauaauaagggaaccuuuuauugcuuguggaccaaaggaaugcaaacacuuugcucuaacccauuaugcagcccaaccagggggauacuacaauggaacaagagaagacagaaacaagcugaggcaucuaauuucagucaaauugggcaaaaucccaacaguagaaaacuccauuuuccacauggcagcuuggagcggguccgcaugccaugaugguagagaauggacauauaucggaguugauggcccugacaguaaugcauugcucaaaauaaaauauggagaagcauauacugacacauaccauuccuaugcaaacaacauccuaagaacacaagaaagugccugcaauugcaucgggggagauuguuaucuuaugauaacugauggcucagcuucagggauuagugaaugcagauuucuuaagauucgagagggccgaauaauaaaagaaauauuuccaacaggaagaguagaacauacugaagagugcacaugcggauuugccagcaauaaaaccauagaaugugccuguagagauaacaguuacacagcaaaaagacccuuugucaaauuaaauguggagacugauacagcagaaauaagauugaugugcacagagacuuacuuggacacccccagaccagaugauggaagcauaacagggccuugugaaucuaauggggauaaagggaguggaggcaucaagggaggauuuguucaucaaagaauggcauccaagauuggaaggugguacucucgaacgaugucuaaaaccaaaaggauggggaugggacuguaugucaaguaugauggagacccauggauugacagugaugcccuuacucuuagcggaguaaugguuucaguggaagaaccugguugguauuccuuuggcuucgaaauaaaagauaagaaaugugauguccccuguauugggauagagaugguacaugaugguggaaagacgacuuggcacucagcagcaacagccauuuacuguuuaaugggcucaggacaacuacuaugggacacugucacaggcguugauauggcucuguaa

SEQ ID NO: 60618 - RNA, 1401 nt, Artificial Sequence
  derived and/or modified CDS sequence (wt) from neuraminidase__InfluenzaB__ABL76335
augcuacccucaacuauacaaacguuaacccuauuucucacaucagggggaguguuauuaucacuauaugugucagcuucacugucauacuuacuauauucggauauauugcuaaaauuuucaccaacagaaauaacugcaccaacaaugccauugaauugugcaaacgcaucaaauguucaggcugugaaccguucugcaacaaaaggggugacacuuccucucccagaaccggaguggacauacccucguuuaucuugcccgggcucaaccuuucagaaagcacuccuaauuagcccucauagauucggagaaaccaaaggaaacucagcucccuugauaauaagggaaccuuuuauugcuuguggaccaaaggaaugcaaacacuuugcucuaacccauuaugcagcccaaccagggggauacuacaauggaacaagagaagacagaaacaagcugaggcaucuaauuucagucaaauugggcaaaaucccaacaguagaaaacuccauuuuccacauggcagcuuggagcggguccgcaugccaugaugguagggaauggacauauaucggaguugauggcccugacaguaaugcauugcucaaaauaaaauauggagaagcauauacugacacauaccauuccuaugcaaacaacauccuaagaacacaagaaagugccugcaauugcaucgggggagauuguuaucuuaugauaacugauggcucagcuucagggauuagugaaugcagauuucuuaagauucgagagggccgaauaauaaaagaaauauuuccaacaggaagaguagaacauacugaagaaugcacaugcggauuugccagcaauaaaaccauagaaugugccuguagagauaacaguuacacagcaaaaagacccuuugucaaauuaaauguggagacugauacagcagaaauaagauugaugugcacagagacuuacuuggacacccccagaccagaugauggaagcauaacagggccuugugaaucuaauggggauaaagggaguggaggcaucaagggaggauuuguucaucaaagaauggcauccaagauuggaaggugguacucucgaacgaugucuaaaacuaaaaggauggggaugggacuguaugucaaguaugauggagacccauggauugacagugaugcccuuacucuuagcggaguaaugguuucaauggaagaaccugguugguauuccuuuggcuucgaaauaaaagauaagaaaugugauguccccuguauugggauagagaugguacaugaugguggaaagacgacuuggcacucagcagcaacagccauuuacuguuuaaugggcucaggacaacugcuaugggacacugucacaggcguugauauggcucuguaa

SEQ ID NO: 60619 - RNA, 1401 nt, Artificial Sequence
  derived and/or modified CDS sequence (wt) from neuraminidase__InfluenzaB__ABL76346
augcuaccuucaacuauacaaacguuaacccuauuucucacaucagggggaguguuauuaucacuauaugugucagcuucacugucauacuuacuauauucggauauauugcuaaaauuuucaccaaaagaaauaacuacaccaacaaugccauugaauugugcaaacgcaucaaauguucaggcugugaaucguucugcaacaaaaggggugacacuucuucucccagaaccggaguggacauacccucguuuaucuugcccgggcucaaccuuucagaaagcacuccuaauuagcccucauagauucggagaaaccaaaggaaacucagcucccuugauaauaagggaaccuuuuauugcuuguggaccaaaggaaugcaaacacuuugcucuaacccauuaugcagcccaaccagggggauacuacaauggaacaagagaagacagaaacaagcugaggcaucuaauuucagucaaauugggcaaaaucccaacaguagaaaacuccauuuuccacauggcagcuuggagcggguccgcaugccaugaugguagagaauggacauauaucggaguugauggcccugacaguaaugcauugcucaaaauaaaauauggagaagcauauacugacacauaccauuccuaugcaaacaacauccuaagaacacaagaaagugccugcaauugcaucgggggagauuguuaucuuaugauaacugauggcucagcuucagggauuagugaaugcagauuucuuaagauucgagagggccgaauaauaaaagaaauauuuccaacaggaagaguagaacauacugaagaaugcacaugcggauuugccagcaauaaaaccauagaaugugccuguagagauaacaguuacacagcaaaaagacccuuugucaaauuaaauguggagacugauacagcagaaauaagauugaugugcacagagacuuacuuggacacccccagaccagaugauggaagcauaacagggccuugugaaucuaauggggauaaagggaguggaggcaucaagggaggauuuguucaucaaagaauggcauccaagauuggaaggugguacucucgaacgaugucuaaaacuaaaaggauggggaugggacuguaugucaaguaugauggagacccauggauugacagugaugcccuuacucuuagcggaguaaugguuucaauggaagaaccugguugguauuccuuuggcuucgaaauaaaagauaagaaaugugauguccccuguauugggauagagaugguacaugaugguggaaagacuacuuggcacucagcagcaacagccauuuacuguuuaaugggcucaggacaacugcuaugggacacugucacaggcguugauauggcucuguaa

SEQ ID NO: 60620 - RNA, 1401 nt, Artificial Sequence; identical to SEQ ID NO: 60619
  derived and/or modified CDS sequence (wt) from neuraminidase__InfluenzaB__ABL76357

SEQ ID NO: 60621 - RNA, 1401 nt, Artificial Sequence
  derived and/or modified CDS sequence (wt) from neuraminidase__InfluenzaB__ABL76368
augcuacccucaacuauacaaacguuaacccuauuccucacaucagggggaguguuauuaucacuauaugugucagcuucacugucauacuuacuauauucggauauauugcuaaaauuuucaccaacagaaauaacugcaccaacaaugccauuggauugugcaaacgcaucaaauguucaggcugugaaccguucugcaacaaaaggggugacacuucuucucccagaaccggaguggacauacccgcguuuaucuugcccgggcucaaccuuucagaaagcacuccuaauuagcccucauagauucggagaaaccaaaggaaacucagcucccuugauaauaagggaaccuuuuauugcuuguggaccaaaggaaugcaaacacuuugcucuaacccauuaugcagcccaaccagggggauacuacaauggaacaagagaagacagaaacaaacugaggcaucuaauuucggucaaauugggcaaaaucccaacaguagaaaacuccauuuuccacauggcagcauggagcggguccgcaugccaugaugguaaagaauggacauauaucggaguugauggcccugacaguaaugcauugcucaaaauaaaauauggagaagcauauacugacacauaccauuccuaugcaaacaacauccuaagaacacaagaaagugcuugcaauugcaucgggggaaauuguuaucuuaugauaacugauggcucagcuucagguauuagugagugcagauuucuuaagauucgagagggccgaauaauaaaagaaauauuuccaacaggaagaguaaaacauacugaagaaugcacaugcggauuugccagcaauaaaaccauagaaugugccuguagagauaacaguuacacagcaaaaagacccuuugucaaauuaaauguggagacugauacagcagaaauaagauugaugugcacagagacuuauuuggacacccccagaccagaugauggaagcauaacagggccuugugaaucuaauggggauaaagggaguggaggcaucaagggaggauuuguucaucaaagaauggcauccaagauuggaaggugguacucucgaacaaugucuaaaacuaaaaggauggggaugggacuguaugucaaguaugauggagacccauggacugacaguggugcccuugcucuuaguggaguaaugguuucaauggaagaaccugguugguacuccuuuggcuucgaaauaaaagauaagaaaugugauguccccuguauugggauagagaugguacaugaugguggaaaggagacuuggcacucagcagcaacagccauuuacuguuuaaugggcucaggacaacugcuaugggacacugucacagguguugauauggcucuguaa

SEQ ID NO: 60622 - RNA, 1404 nt, Artificial Sequence
  derived and/or modified CDS sequence (wt) from neuraminidase__InfluenzaB__ABL76379
augcuaccuucaacuauacaaacguuaacccuauuucucacaucagggggaguguuauuaucacuauaugugucagcuucacugucauacuuacuauauucggauauauugcuaaaauuuucaccaacagaaauaacugcaccaacaaugccauuggauugugcaaacgcaucaaauguucaggcugugaaccguucugcaacaaaaggggugacauuucuucuucucccagaaccggaguggacauacccgcguuuaucuugcccgggcucaaccuuucagaaagcacuccuaauuagcccucauagauucggagaaaccaaaggaaacucagcucccuugauaauaagggaaccuuuuauugcuuguggaccaaaggaaugcaaacacuuugcucuaacccauuaugcagcccaaccagggggauacuacaauggaacaagaggagacagaaacaagcuaaggcaucuaauuucagucaaauugggcaaaaucccaacaguagaaaacuccauuuuccacauggcagcauggagcggguccgcaugccaugaugguaaagaauggacauauaucggaguugauggcccugacaguaaugcauugcucaaaauaaaauauggagaagcauauacugacacauaccauuccuaugcaaacaacauccuaagaacacaagaaagugccugcaauugcaucgggggaaauuguuaucuuaugauaacugauggcucagcuucagguauuagugaaugcagauuucuuaagauucgagagggccgaauaauaaaagaaauauuuccaacaggaagagugaaacauacugaagaaugcacaugcggauuugccagcaauaaaaccauagaaugugccuguagagauaacaguuacacagcaaaaagacccuuugucaaauuaaauguggagacugauacagcagaaauaagauugaugugcacagagacuuauuuggacacccccagaccagaugauggaagcauaacagggccuugugaaucuaauggggacaaagggaguggaggcaucaagggaggauuuguucaucaaagaauggcauccaagauuggaaggugguacucucgaacgaugucuaaaacuaaaaggauggggaugggacuguaugucaaguaugauggagacccauggacugacagugaugcccuugcucuuaguggaguaaugguuucaauggaagaaccugguugguacuccuuuggcuucgaaauaaaagauaagaaaugugauguccccuguauugggauagagaugguacaugaugguggaaaggagacuuggcacucagcagcaacagccauuuacuguuuaaugggcucaggacaacugcuaugggacacugucacagguguugauauggcucuguaa

SEQ ID NO: 60623 - RNA, 1401 nt, Artificial Sequence
  derived and/or modified CDS sequence (wt) from neuraminidase__InfluenzaB__ABL76390
augcuacccucaacuauacaaacguuaacccuauuccucacaucagggggaguguuauuaucacuauaugugucagcuucacugucauacuuacuauauucggauauauugcuaaaauuuucaccaacagaaauaacugcaccaacaaugccauuggauugugcaaacgcaucaaauguucaggcugugaaccguucuucaacaaaaggggugacauuucuucucccagaaccggaguggacauacccgcguuuaucuugcccgggcucaaccuuucagaaagcacuccuaauuagcccucauagauucggagaaaccaaaggaaacucagcucccuugauaauaagggaaccuuuuauugcuuguggaccaaaggaaugcaaacacuuugcucuaacccauuaugcagcccaaccagggggauacuacaauggaacaagagaagacagaaacaaacugaggcaucuaauuucggucaaauugggcaaaaucccaacaguagaaaacuccauuuuccacauggcagcauggagcggguccgcaugccaugaugguaaagaauggacauauaucggaguugauggcccugacaguaaugcauugcucaaaauaaaauauggagaagcauauacugacacauaccauuccuaugcaaacaacauccuaagaacacaagaaagugcuugcaauugcaucgggggaaauuguuaucuuaugauaacugauggcucagcuucaggcauuagugagugcagauuucuuaagauucgagagggccgaauaauaaaagaaauauuuccaacaggaagaguaaaacauacugaagaaugcacaugcggauuugccagcaauaaaaccauagaaugugccuguagagauaacaguuacacagcaaaaagacccuuugucaaauuaaauguggagacugauacagcagaaauaagauugaugugcacagagacuuauuuggacacccccagaccagaugauggaagcauaacagggucuugugaaucugauggggauaaagggaguggaggcaucaagggaggauuuguucaucaaagaauggcauccaagauuggaaggugguacucucgaacaaugucuaaaacuaaaaggauggggaugggacuguaugucagguaugauggagacccauggacugacaguagugcccuugcucuuaguggaguaaugguuucaauggaagaaccugguugguacuccuuuggcuucgaaauaaaagauaagaaaugugauguccccuguauugggauagagaugguacaugaugguggaaaggagacuuggcacucagcagcaacagccauuuacuguuuaaugggcucaggacaacugcuaugggacacugucacagguguugauauggcucuguaa

SEQ ID NO: 60624 - RNA, 1401 nt, Artificial Sequence
  derived and/or modified CDS sequence (wt) from neuraminidase__InfluenzaB__ABL76412
augcuaccuucaacuauacaaacguuaacccuauuucucacaucagggggaguguuauuaucacuauaugugucagcuucacugucauacuuacuauauucggauauauugcuaaaauuuucaccaacagaaauaacugcaccaacaaugccauuggauugugcaaacgcaucaaauguucaggcugugaaccguucugcaacaaaaggggugacacuucuuaucccagaaccggaguggacauacccgcguuuaucuugcccgggcucaaccuuucagaaagcacuccuaauuagcccucauagauucggagaaaccaaaggaaacucagcucccuugauaauaagggaaccuuuuauugcuuguggaccaaaggaaugcaaacacuuugcucuaacccauuauacagcccaaccagggggauacuacaauggaacaagaggagacagaaacaagcugaggcaucuaauuucagucaaauugggcaaaaucccaacaguagaaaacuccauuuuccacauggcagcauggagcggguccgcaugccaugaugguaaagaauggacauauaucggaguugauggcccugacaguaaugcauugcucaaaauaaaauauggagaagcauauacugacacauaccauuccuaugcaaacaacauccuaagaacacaagaaagugccugcaauugcaucgggggaaauuguuaucuuaugauaacugauggcucagcuucagguauuagugaaugcagauuucuuaagauucgagagggccgaauaauaaaagaaauauuuccaacaggaagaguaaaacauacugaagaaugcacaugcggauuugccagcaauaaaaccauagaaugugccuguagagauaacaguuacacagcaaaaagacccuuugucaaauuaaauguggagacugauacagcagaaauaagacugaugugcacagagacuuauuuggacacccccagaccagaugauggaagcauaacagggccuugugaaucuaauggggacaaagggaguggaggcaucaagggaggauuuguucaucaaagaauggcauccaagauuggaaggugguacucucgaacgaugucuaaaacuaaaaggauggggaugggacuguaugucaaguaugauggagacccauggacugacagugaugcccuugcucuuaguggaguaaugguuucaauggaagaaccugguugguacuccuuuggcuucgaaauaaaagauaagaaaugugauguccccuguauugggauagagaugguacaugaugguggaaaggagacuuggcacucagcagcaacagccauuuacuguuuaaugggcucaggacaauugcuaugggacacugucacagguguugauauggcacuguaa

SEQ ID NO: 60625 - RNA, 1401 nt, Artificial Sequence
  derived and/or modified CDS sequence (wt) from neuraminidase__InfluenzaB__ABL76423
augcuaccuucaacuauacaaacguuaacccuauuucucacaucagggggaguguuauuaucacuauaugugucagcuucacugucauacuuacuauauucggauauauugcuaaaauuuucaccaacagaaauaacugcaccaacaaugccauuggauugugcaaacgcaucaaauguucaggcugugaaccauucugcaacaaaaggggugacacuucuucucccagaaccggaguggacauacccgcguuuaucuugcccgggcucaaccuuucagaaagcacuccuaauuagcccucauagauucggagaaaccaaaggaaacucagcucccuugauaauaagggaaccuuuuauugcuuguggaccaaaggaaugcaaacacuuugcucuaacccauuaugcagcccaaccagggggguacuacaauggaacaagaggagacagaaacaagcugaggcaucuaauuucagucaaauugggcaaaaucccaacaguagaaaacuccauuuuccacauggcagcauggagcggguccgcaugccaugaugguaaagaauggacauauaucggaguugauggcccugacaguaaugcauugcucaaaauaaaauauggagaagcauauacugacacauaccauuccuaugcaaacaacauccuaagaacacaagaaagugccugcaauugcaucgggggaaauuguuaucuuaugauaacugauggcucagcuucagguauuagugaaugcagauuucuuaagauucgagagggccgaauaauaaaagaaauauuuccaacaggaagaguaaaacacacugaagaaugcacaugcggauuugccagcaauaaaaccauagaaugugccuguagagauaacaguuacacagcaaaaagacccuuugucaaauuaaauguggagacugauacagcagaaauaagacugaugugcacagagacuuauuuggacacccccagaccagaugauggaagcauaacagggccuugugaaucuaauggggacaaagggaguggaggcaucaagggaggauuuguucaucaaagaauggcauccaagauuggaaggugguacucucgaacgaugucuaaaacuaaaaggauggggaugggacuguaugucaaguaugauggagacccauggacugacagugaugcccuugcuuuuaguggaguaaugguuucaauggaagaaccugguugguacuccuuuggcuucgaaauaaaagauaagaaaugugauguucccuguauugggauagagaugguacaugaugguggaaaggagacuuggcacucagcagcaacagccauuuacuguuuaaugggcucaggacaauugcuaugggacacugucacagguguugauauggcucuguaa

SEQ ID NO: 60626 - RNA, 1401 nt, Artificial Sequence
  derived and/or modified CDS sequence (wt) from neuraminidase__InfluenzaB__ABL76434
augcuaccuucaacuauacaaacguuaacccuauuucucacaucagggggaguauuauuaucacuauaugugucagcuucauugucauacuuacuauauucggauauauugcuaaaauucucaccaacagaaauaacugcaccaacaaugccauuggauugugcaaacgcaucaaauguucaggcugugaaccguucugcaacaaaaggggugacacuucuucucccagaaccggaguggacauacccgcguuuaucuugcccgggcucaaccuuucagaaagcacuccuaauuagcccucauagauucggagaaaccaaaggaaacucagcucccuugauaauaagggaaccuuuuauugcuuguggaccaaaggaaugcaaacacuuugcucuaacccauuaugcagcccaaccagggggauacuacaauggaacaagaggagacagaaacaagcugaggcaucuaauuucagucaaauugggcaaaaucccaacaguagaaaacuccauuuuccacauggcagcauggagcggguccgcaugccaugaugguaaagaauggacauauaucggaguugauggcccugacaauaaugcauugcucaaaauaaaauauggagaagcauauacugacacauaccauuccuaugcaaacaacauccuaagaacacaagaaagugccugcaauugcaucgggggaaauuguuaucuuaugauaacugauggcucagcuucagguauuagugaaugcagauuucuuaagauucgagagggccgaauaauaaaagaaauauuuccaacaggaagaguaaaacauacugaagaaugcacaugcggauuugccagcaauaaaaccauagaaugugccuguagagauaacaguuacacagcaaaaagacccuuugucaaauuaaacguggagacugauacagcagaaauaagauugaugugcacagagacuuauuuggacacccccagaccagaugauggaagcauaacagggccuugugaaucuaauggggacaaagggaguggaggcaucaagggaggauuuguucaucaaagaauggcauccaagauuggaaggugguacucucgaacgaugucuaaaacuaaaaggauggggaugggacuguaugucaaguaugauggagacccaugggcugacagugaugcccuugcucuuaguggaguaaugguuucaauggaagaaccugguugguacuccuuuggcuucgaaauaagagauaagaaaugugauguccccuguauugggauagagaugguacaugaugguggaaaagagacuuggcacucagcagcaacagccauuuacuguuuaaugggcucaggacagcugcugugggacacugucacagguguugauauggcucuguaa

SEQ ID NO: 60627 - RNA, 1401 nt, Artificial Sequence
  derived and/or modified CDS sequence (wt) from neuraminidase__InfluenzaB__ABL76456
augcuaccuucaacuauacaaacguuaacccuauuucucacaucagggggaguauuauuaucacuauaugugucagcuucauugucauacuuacuauauucggauauauugcuaaaauucucaccaacagaaauaacugcaccaacaaugccauuggauugugcaaacgcaucaaauguucaggcugugaaccguucugcaacaaaaggggugaaacuucuucucccagaaccggaguggacauacccgcguuuaucuugcccgggcucaaccuuucagaaagcacuccuaauuagcccucauagauucggagaaaccaaaggaaacucagcucccuugauaauaagggaaccuuuuauugcuuguggaccaaaggaaugcaaacacuuugcucuaacccauuaugcagcccaaccagggggauacuacaaugggacaagaggagacagaaacaagcugaggcaucuaauuucagucaaauugggcaaaaucccaacaguagaaaacuccauuuuccacauggcagcauggagcggguccgcaugccaugaugguaaggaauggacauauaucggaguugauggcccugacaauaaugcauugcucaaaauaaaauauggagaagcauauacugacacauaccauuccuaugcaaacaacauccuaagaacacaagaaagugccugcaauugcaucgggggaaauuguuaucuuaugauaacugauggcucagcuucagguguuagugaaugcagauuucuuaagauucgagagggccgaauaauaaaagaaauauuuccaacaggaagaguaaaacauacugaagaaugcacaugcggauuugccagcaauaaaaccauagaaugugccuguagagauaacaguuacacagcaaaaagacccuuugucaaauuaaacguggagacugauacagcagaaauaagauugaugugcacagagacuuauuuggacacccccagaccagaugauggaagcauaacagggccuugugaaucuaauggggacaaagggaguggaggcaucaagggaggauuuguucaucaaagaauggcauccaagauuggaaggugguacucucgaacgaugucuaaaacuaaaaggauggggaugggacuguaugucaaguaugauggagacccaugggcugacagugaugcccuugcucuuaguggaguaaugguuucaauggaagaaccugguugguacuccuuuggcuucgaaauaaaagauaagaaaugugauguccccuguauugggauagagaugguacaugaugguggaaaagagacuuggcacucagcagcaacagccauuuacuguuuaaugggcucaggacagcugcugugggacacugucacagguguugauauggcucuguaa

SEQ ID NO: 60628 - RNA, 1401 nt, Artificial Sequence
  derived and/or modified CDS sequence (wt) from neuraminidase__InfluenzaB__ABL76467
augcuaccuucaacuauacaaacguuaacccuauuucucacaucagggggaguauuauuaucacuauaugugucagcuucauugucauacuuacuauauucggauauauugcuaaaauucucaccaacagaaauaacugcaccaacaaugccauuggauugugcaaacgcaucaaauguucaggcugugaaccguucugcaacaaaaggggugacacuucuucucccagaaccggaguggacauacccgcguuuaucuugcccgggcucaaccuuucagaaagcacuccuaauuagcccucauagauucggagaaaccaaaggaaacucagcucccuugauaauaagggaaccuuuuauugcuuguggaccaaaggaaugcaaacacuuugcucuaacccauuaugcagcccaaccagggggauacuacaauggaacaagaggagacagaaacaagcugaggcaucuaauuucagucaaauugggcaaaaucccaacaguagaaaacuccauuuuccacauggcagcauggagcggguccgcaugccaugaugguaaagaauggacauauauuggaguugauggcccugacaauaaugcauugcucaaaauaaaauauggagaagcauauacugacacauaccauuccuaugcaaacaacauccuaagaacacaagaaagugccugcaauugcaucgggggaaauuguuaucuuaugauaacugauggcucagcuucagguauuagugaaugcagauuucuuaagauucgagagggccgaauaauaaaagaaauauuuccaacaggaagaguaaaacauacugaagaaugcacaugcggauuugccagcaauaaaaccauagaaugugccuguagagauaacaguuacacagcaaaaagacccuuugucaaauuaaacguggagacugauacagcagaaauaagauugaugugcacagagacuuauuuggacacccccagaccagaugauggaagcauaacagggccuugugaaucuaauggggacaaagggaguggaggcaucaagggaggauuuguucaucaaagaauggcauccaagauuggaaggugguacucucgaacgaugucuaaaacuaaaaggauggggaugggacuguaugucaaguaugauggagacccaugggcugacagugaugcccuugcucuuaguggaguaaugguuucaauggaagaaccugguugguacuccuuuggcuucgaaauaaaagauaagaaaugugauguccccuguauugggauagagaugguacaugaugguggaaaagagacuuggcacucagcagcaacagccauuuacuguuuaaugggcucaggacagcugcugugggacacugucacagguguugauauggcucuguaa

SEQ ID NO: 60629 - RNA, 1401 nt, Artificial Sequence
  derived and/or modified CDS sequence (wt) from neuraminidase__InfluenzaB__ABL76478
augcuaccuucaacuauacaaacguuaacccuauuucucacaucagggggaguauuauuaucacuauaugugucagcuucauugucauacuuacuauauucggauauauugcuaaaauucucaccaacagaaauaacugcaccaacaaugccauuggauugugcaaacgcaucaaauguucaggcugugaaccguucugcaacaaaaggggugaaacuucuucucccagaaccggaguggacauacccgcguuuaucuugcccgggcucaaccuuucagaaagcacuccuaauuagcccucauagauucggagaaaccaaaggaaacucagcucccuugauaauaagggaaccuuuuauugcuuguggaccaaaggaaugcaaacacuuugcucuaacccauuaugcagcccaaccagggggauacuacaaugggacaagaggagacagaaacaagcugaggcaucuaauuucagucaaauugggcaaaaucccaacaguagaaaacuccauuuuccacauggcagcauggagcggguccgcaugccaugaugguaaggaauggacauauaucggaguugauggcccugacaauaaugcauugcucaaaauaaaauauggagaagcauauacugacacauaccauuccuaugcaaacaacauccuaagaacacaagaaagugccugcaauugcaucgggggaaauuguuaucuuaugauaacugauggcucagcuucagguguuagugaaugcagauuucuuaagauucgagagggccgaauaauaaaagaaauauuuccaacaggaagaguaaaacauacugaagaaugcacaugcggauuugccagcaauaaaaccauagaaugugccuguagagauaacaguuacacagcaaaaagacccuuugucaaauuaaacguggagacugauacagcagaaauaagauugaugugcacaaagacuuauuuggacacccccagaccagaugauggaagcauaacagggccuugugaaucuaauggggacaaagggaguggaggcaucaagggaggauuuguucaucaaagaauggcauccaagauuggaaggugguacucucgaacgaugucuaaaacuaaaaggauggggaugggacuguaugucaaguaugauggagacccaugggcugacagugaugcccuugcucuuaguggaguaaugguuucaauggaagaaccugguugguacuccuuuggcuucgaaauaaaagauaagaaaugugauguccccuguauugggauagagaugguacaugaugguggaaaagagacuuggcacucagcagcaacagccauuuacuguuuaaugggcucaggacagcugcugugggacacugucacagguguugauauggcucuguaa

SEQ ID NO: 60630 - RNA, 1401 nt, Artificial Sequence
  derived and/or modified CDS sequence (wt) from neuraminidase__InfluenzaB__ABL76522
augcuaccuucaacuauacaaacguuaacccuauuucucacaucagggggaguauuauuaucacuauaugugucagcuucauugucauacuuacuauauucggauauauugcuaaaauucucaccaacagaaauaacugcaccaacaaugccauuggauugugcaaacgcaucaaauguucaggcugugaaccguucugcaacaaaaggggugacacuucuucucccagaaccggaguggacauacccgcguuuaucuugcccgggcucaaccuuucagaaagcacuccuaauuagcccucauagauucggagaaaccaaaggaaacucagcucccuugauaauaagggaaccuuuuauugcuuguggaccaaaugaaugcaaacacuuugcucuaacccauuaugcagcccaaccagggggauacuacaauggaacaagaggagacagaaacaagcugaggcaucuaauuucagucaaauugggcaaaaucccaacaguagaaaacuccauuuuccacauggcagcauggagcggguccgcaugccaugaugguaaggaauggacauauaucggaguugauggcccugacaauaaugcauugcucaaaauaaaauauggagaagcauauacugacacauaccauuccuaugcaaacaacauccuaagaacacaagaaagugccugcaacugcaucgggggaaauuguuaucuuaugauaacugauggcucagcuucagguguuagugaaugcagauuucuuaagauucgagagggccgaauaauaaaagaaauauuuccaacaggaagaguaaaacauacugaagaaugcacaugcggauuugccagcaauaaaaccauagaaugugccuguagagauaacaguuacacagcaaaaagacccuuugucaaauuaaacguggagacugauacagcagaaauaagauugaugugcacagagacuuauuuggacacccccagaccagaugauggaagcauaacagggccuugugaaucuaauggggacaaagggaguggaggcaucaagggaggauuuguucaucaaagaauggcauccaagauuggaaggugguacucucgaacgaugucuaaaacugaaaggauggggaugggacuguaugucaaguaugauggagacccaugggcugacagugaugcccuugcucuuaguggaguaaugguuucaauggaagaaccugguugguacuccuuuggcuucgaaauaaaagauaagaaaugcgauguccccuguauugggauagagaugguacaugaugguggaaaagagacuuggcacucagcagcaacagccauuuacuguuuaaugggcucaggacagcugcugugggacacugucacagguguugauauggcucuguaa

SEQ ID NO: 60631 - RNA, 1401 nt, Artificial Sequence
  derived and/or modified CDS sequence (wt) from neuraminidase__InfluenzaB__ABL76533
augcuaccuucaacuauacaaacguuaacccuauuucucacaucagggggaguauuauuaucacuauaugugucagcuucauugucauacuuacuauauucggauauauugcuaaaauucucaccaacagaaauaacugcaccaacaaugccauuggauugugcaaacgcaucaaauguucaggcugugaaccguucugcaacaaaaggggugacacuucuucucccagaaccggaguggacauacccgcguuuaucuugcccgggcucaaccuuucagaaagcacuccuaauuagcccucauagauucggagaaaccaaaggaaacucagcucccuugauaauaagggaaccuuuuauugcuuguggaccaaaugaaugcaaacacuuugcucuaacccauuaugcagcccaaccagggggauacuacaauggaaaaagaggagacagaaacaagcugaggcaucuaauuucagucaaauugggcaaaaucccaacaguagaaaacuccauuuuccacauggcagcauggagcggguccgcaugccaugaugguaaggaauggacauauaucggaguugauggcccugacaauaaugcauugcucaaaauaaaauauggagaagcauauacugacacauaccauuccuaugcaaacaacauccuaagaacacaagaaagugccugcaauugcaucgggggaaauuguuaucuuaugauaacugauggcucagcuucagguguuagugaaugcagauuucuuaagauucgagagggccgaauaauaaaagaaauauuuccaacaggaagaguaaaacauacugaagaaugcacaugcggauuugccagcaauaaaaccauagaaugugccuguagagauaacaguuacacagcaaaaagacccuuugucaaauuaaacguggagacugauacagcagaaauaagauugaugugcacagagacuuauuuggacacccccagaccagaugauggaagcauaacagggccuugugaaucuaauggggacaaagggaguggaggcaucaagggaggauuuguucaucaaagaauggcauccaagauuggaaggugguacucucgaacgaugucuaaaacugaaaggauggggaugggacuguaugucaaguaugauggagacccaugggcugacagugaugcccuugcucuuaguggaguaaugguuucaauggaagaaccugguugguacuccuuuggcuucgaaauaaaagauaagaaaugcgauguccccuguauugggauagagaugguacaugaugguggaaaagagacuuggcacucagcagcaacagccauuuacuguuuaaugggcucaggacagcugcugugggacacugucacagguguugauauggcucuguaa

SEQ ID NO: 60632 - RNA, 1401 nt, Artificial Sequence
  derived and/or modified CDS sequence (wt) from neuraminidase__InfluenzaB__ABL76544
augcuaccuucaacuauacaaacguuaacccuauuucucacaucagggggaguauuauuaucacuauaugugucagcuucauugucauacuuacuauauucggauauauugcuaaaauucucaccaacagaaauaacugcaccaacaaugccauuggauugugcaaacgcaucaaauguucaggcugugaaccguucugcaacaaaaggggugacacuucuucucccagaaccggaguggacauacccgcguuuaucuugcccgggcucaaccuuucagaaagcacuccuaauuagcccucauagauucggagaaaccaaaggaaacucagcucccuugauaauaagggaaccuuuuauugcuuguggaccaaaugaaugcaaacacuuugcucuaacccauuaugcagcccaaccagggggauacuacaauggaacaagaggagaaagaaacaagcugaggcaucuaauuucagucaaauugggcaaaaucccaacaguagaaaacuccauuuuccacauggcagcauggagcggguccgcaugccaugaugguaaggaauggacauauaucggaguugauggcccugacaauaaugcauugcucaaaauaaaauauggagaagcauauacugacacauaccauuccuaugcaaacaacauccuaagaacacaagaaagugccugcaacugcaucgggggaaauuguuaucuuaugauaacugauggcucagcuucagguguuagugaaugcagauuucuuaagauucgagagggccgaauaauaaaagaaauauuuccaacaggaagaguaaaacauacugaagaaugcacaugcggauuugccagcaauaaaaccauagaaugugccuguagagauaacaguuacacagcaaaaagacccuuugucaaauuaaacguggagacugauacagcagaaauaagauugaugugcacagagacuuauuuggacacccccagaccagaugauggaagcauaacagggccuugugaaucuaauggggacaaaggaaguggaggcaucaagggaggauuuguucaucaaagaauggcauccaagauuggaaggugguacucucgaacgaugucuaaaacugaaaggauggggaugggacuguaugucaaguaugauggagacccaugggcugacagugaugcccuugcucuuaguggaguaaugguuucaauggaagaaccugguugguacuccuuuggcuucgaaauaaaagauaagaaaugcgauguccccuguauugggauagagaugguacaugaugguggaaaagagacuuggcacucagcagcaacagccauuuacuguuuaaugggcucaggacagcugcugugggacacugucacagguguugauauggcucuguaa

SEQ ID NO: 60633 - RNA, 1401 nt, Artificial Sequence
  derived and/or modified CDS sequence (wt) from neuraminidase__InfluenzaB__ABL76566
augcuaccuucaacuauacaaacguuaacccuauuucucacaucagggggaguauuauuaucacuauaugugucagcuucauugucauacuuacuauauucggauauauugcuaaaauucucaccaacagaaauaacugcaccaacaaugccauuggauugugcaaacgcaucaaauguucaggcugugaaccguucugcaacaaaaggggugacacuucuucucccagaaccggaguggacauacccgcguuuaucuugcccgggcucaaccuuucagaaagcacuccuaauuagcccucauagauucggagaaaccaaaggaaacucagcucccuugauaauaagggaaccuuuuauugcuuguggaccaaaugaaugcaaacacuuugcucuaacccauuaugcagcccaaccagggggauacuacaauggaaaaagaggagacagaaacaagcugaggcaucuaauuucagucaaauugggcaaaaucccaacaguagaaaacuccauuuuccacauggcagcauggagcggguccgcaugccaugaugguaaggaauggacauauaucggaguugauggcccugacaauaaugcauugcucaaaauaaaauauggagaagcauauacugacacauaccauuccuaugcaaacaacauccuaagaacacaagaaagugccugcaauugcaucgggggaaauuguuaucuuaugauaacugauggcucagcuucagguguuagugaaugcagguuucuuaagauucgagagggccgaauaauaaaagaaauauuuccaacaggaagaguaaaacauacugaggaaugcacaugcggauuugccagcaauaaaaccauagaaugugccuguagagauaacaguuacacagcaaaaagacccuuugucaaauuaaacguggagacugauacagcagaaauaagauugaugugcacagagacuuauuuggacacccccagaccagaugauggaagcauaacagggccuugugaaucuaauggggacaaagggaguggaggcaucaagggaggauuuguucaucaaagaauggcauccaagauuggaaggugguacucucgaacgaugucuaaaacugaaaggauggggaugggacuguaugucaaguaugauggagacccaugggcugacagugaugcccuugcucuuaguggaguaaugguuucaauggaagaaccugguugguacuccuuuggcuucgaaauaaaagauaagaaaugcgauguccccuguauugggauagagaugguacaugaugguggaaaagagacuuggcacucagcagcaacagccauuuacuguuuaaugggcucaggacagcugcugugggacacugucacagguguugauauggcucuguaa

SEQ ID NO: 60634 - RNA, 1401 nt, Artificial Sequence
  derived and/or modified CDS sequence (wt) from neuraminidase__InfluenzaB__ABL76588
augcuaccuucaacuauacaaacguuaacccuauuucucacaucagggggaguauuauuaucacuauaugugucagcuucauugucauacuuacuauauucggauauauugcuaaaauucucaccaacagaaauaacugcaccaacaaugccauuggauuaugcaaacgcaucaaauguucaggcugugaaccguucugcaacaaaaggggugacacuucuucucccagaaccggaguggacauacccgcguuuaucuugcccgggcucaaccuuucagaaagcacuccuaauuagcccucauagauucggagaaaccaaaggaaacucagcucccuugauaauaagggaaccuuuuauugcuuguggaccaaaugaaugcaaacacuuugcucuaacccauuaugcagcccaaccagggggauacuacaauggaacaagaggagacagaaacaagcugaggcaucuaauuucagucaaauugggcaaaaucccaacaguagaaaacuccauuuuccacauggcagcauggagcggguccgcaugccaugaugguaaggaauggacauauaucggaguugauggcccugacaauaaugcauugcucaaaauaaaauauggagaagcauauacugacacauaccauuccuaugcaaacaacauccuaagaacacaagaaagugccugcaauugcaucgggggaaauuguuaucuuaugauaacugauggcucagcuucagguguuagugaaugcagauuucuuaagauucgagagggccgaauaauaaaagaaauauuuccaacaggaagaguaaaacauacugaagaaugcacaugcggauuugccagcaauaaaaccauagaaugugccuguagagauaacaguuacacagcaaaaagacccuuugucaaauuaaacguggagacugauacagcagaaauaagauugaugugcacagagacuuauuuggacacccccagaccagaugauggaagcauaacagggccuugugaaucuaauggggacaaagggaguggaggcaucaagggaggauuuguucaucaaagaauggcauccaagauuggaaggugguacucucgaacgaugucuaaaacugaaaggauggggaugggacuguaugucaaguaugauggagacccaugggcugacagugaugcccuugcucuuaguggaguaaugguuucaauggaagaaccugguugguacuccuuuggcuucgaaauaaaagauaagaaaugcgauguccccuguauugggauagagaugguacaugaugguggaaaagagacuuggcacucagcagcaacagccauuuacuguuuaaugggcucaggacagcugcugugggacacugucacagguguugauauggcucuguaa

SEQ ID NO: 60635 - RNA, 1401 nt, Artificial Sequence
  derived and/or modified CDS sequence (wt) from neuraminidase__InfluenzaB__ABL76599
augcuaccuucaacuauacaaacguuaacccuauuucucacaucagggggaguauuauuaucacuauaugugucagcuucauugucauacuuacuauauucggauauauugcuaaaauucucaccaacagaaauaacugcaccaacaaugccauuggauugugcaaacgcaucaaauguucaggcugugaaccguucugcaacaaaaggggugacacuucuucucccagaaccggaguggacauacccgcguuuaucuugcccgggcucaaccuuucagaaagcacuccuaauuagcccucauagauucggggaaaccaaaggaaacucagcucccuugauaauaagggaaccuuuuauugcuuguggaccaaaugaaugcaaacacuuugcucuaacccauuaugcagcccaaccagggggauacuacaauggaacaagaggagacagaaacaagcugaggcaucuaauuucagucaaauugggcaaaaucccaacaguagaaaacuccauuuuccacauggcagcauggagcggguccgcaugccaugaugguaaggaauggacauauaucggaguugauggcccugacaauaaugcauugcucaaaauaaaauauggagaagcauauacugacacauaccauuccuaugcaaacaacauccuaagaacacaagaaagugccugcaauugcaucgggggaaauuguuaucuuaugauaacugauggcucagcuucagguguuagugaaugcagauuucuuaagauucgagagggccgaauaauaaaagaaauauuuccaacaggaagaguaaaacauacugaagaaugcacaugcggauuugccagcaauaaaaccauagaaugugccuguagagauaacaguuacacagcaaaaagacccuuugucaaauuaaacguggagacugauacagcagaaauaagauugaugugcacagagacuuauuuggacacccccagaccagaugauggaagcauaacagggccuugugaaucuaauggggacaaagggaguggaggcaucaagggaggauuuguucaucaaagaauggcauccaagauuggaaggugguacucucgaacgaugucuaaaacugaaaggauggggaugggacuguaugucaaguaugauggagacccaugggcugacagugaugcccuugcucuuaguggaguaaugguuucaauggaagaaccugguugguacuccuuuggcuucgaaauaaaagauaagaaaugcgauguccccuguauugggauagagaugguacaugaugguggaaaagagacuuggcacucagcagcaacagccauuuacuguuuaaugggcucaggacagcugcugugggacacugucacagguguugauauggcucuguaa

SEQ ID NO: 60636 - RNA, 1401 nt, Artificial Sequence
  derived and/or modified CDS sequence (wt) from neuraminidase__InfluenzaB__ABL76610
augcuaccuucaacuauacaaacguuaacccuauuucucacaucagggggaguauuauuaucacuauaugugucagcuucauugucauacuuacuauauucggauauauugcuaaaauucucaccaacagaaauaacugcaccaacaaugccauuggauugugcaaacgcaucaaauguucaggcugugaaccguucugcaacaaaaggggugacacuucuucucccagaaccggaguggacauacccgcguuuaucuugcccgggcucaaccuuucagaaagcacuccuaauuagcccucauagauucggagaaaccaaaggaaacucagcucccuugauaauaagggaaccuuuuauugcuuguggaccaaaugaaugcaaacacuuugcucuaacccauuaugcagcccaaccagggggauacuacaauggaacaagaggagacagaaacaagcugaggcaucuaauuucagucaaauugggcaaaaucccaacaguagaaaacuccauuuuccacauggcagcauggagcggguccgcaugccaugaugguaaggaauggacauauaucggaguugauggcccugacaauaaugcauugcucaaaauaaaauauggagaagcauauacugacacauaccauuccuaugcaaacaacauccuaagaacacaagaaagugccugcaauugcaucgggggaaauuguuaucuuaugauaacugauggcucagcuucagguguuagugaaugcagauuucuuaagauucgagagggccgaauaauaaaagaaauauuuccaacaggaagaguaaaacauacugaagaaugcacaugcggauuugccagcaauaaaaccauagaaugugccuguagagauaacaguuacacagcaaaaagacccuuugucaaauuaaacguggagacugauacagcagaaauaagauugaugugcacagagacuuauuuggacacccccagaccagaugauggaagcauaacagggccuugugaaucuaauggggacaaagggaguggaggcaucaagggaggauuuguucaucaaagaauggcauccaagauuggaaggugguacucucgaacgaugucuaaaacugaaaggauggggaugggacuguaugucaaguaugauggagacccaugggcugacagugaugcccuugcucuuaguggaguaaugguuucaauggaagaaccugguugguacuccuuuggcuucgaaauaaaagauaagaaaugcgauguccccuguauugggauagagaugguacaugaugguggaaaagagacuuggcacucagcagcaacagccauuuacuguuuaaugggcucaggacagcugcugugggacacugucacagguguugauauggcucuguaa

SEQ ID NO: 60637 - RNA, 1401 nt, Artificial Sequence
  derived and/or modified CDS sequence (wt) from neuraminidase__InfluenzaB__ABL76621
augcuaccuucaacuauacaaacguuaacccuauuucucacaucagggggaguauuauuaucacuauaugugucagcuucauugucauacuuacuauauucggauauauugcuaaaauucucaccaacagaaauaacugcaccaacaaugccauuggauugugcaaacgcaucaaauguucaggcugugaaccguucugcaacaaaaggggugacacuccuucucccagaaccggaguggacauacccgcguuuaucuugcccgggcucaaccuuucagaaagcacuccuaauuagcccucauagauucggagaaaccaaaggaaacucagcucccuugauaauaagggaaccuuuuauugcuuguggaccaaaggaaugcaaacacuuugcucuaacccauuaugcagcccaaccagggggauacuacaauggaacaagaggagacagaaacaagcugaggcaucuaauuucagucaaauugggcaaaaucccaacaguagaaaacuccauuuuccacauggcagcauggagcggguccgcaugccaugaugguaaggaauggacauauaucggaguugauggcccugacaauaaugcauugcucaaaauaaaauauggagaagcauauacugacacauaccauuccuaugcaaacaacauccuaagaacacaagaaagugccugcaauugcaucgggggaaauuguuaucuuaugauaacugauggcucagcuucagguguuagugaaugcagauuucuuaagauucgagagggccgaauaauaaaagaaauauuuccaacaggaagaguaaaacauacugaagagugcacaugcggauuugccagcaauaaaaccauagaaugugccuguagagauaacaguuacacagcaaaaagacccuuugucaaauuaaacguggagacugauacagcagaaauaagauugaugugcacagagacuuauuuggacacccccagaccagaugauggaagcauaacagggccuugugaaucuaauggggaaaaagggaguggaggcaucaagggaggauuuguucaucaaagaauggcauccaagauuggaaggugguacucucgaacgaugucuaaaacuaaaaggauggggaugggacuguaugucaaguaugauggagacccaugggcugacagugaugcccuugcucuuaguggaguaaugguuucaauggaagaaccugguugguacuccuuuggcuucgaaauaaaagauaagaaaugugauauccccuguauugggauagagaugguacaugaugguggaaaagagacuuggcacucagcagcaacagccauuuacuguuuaaugggcucaggacagcugcugugggacacugucacagguguugauauggcucuguaa

SEQ ID NO: 60638 - RNA, 1401 nt, Artificial Sequence
  derived and/or modified CDS sequence (wt) from neuraminidase__InfluenzaB__ABL76632
augcuaccuucaacuauacaaacguuaacccuauuucucacaucagggggaguguuauuaucacuauaugugucagcuucauugucauacuuacuauauucggauauauugcuaaaauuuucacaaacagaaauaacugcaccaauaaugccauuggauugugcaaacgcaucaaauguucaggcugugaaccguucugcaacaaaaggggugacacuucuucucccagaaccggaguggacauacccucguuuaucuugcccgggcucaaccuuucagaaagcacuccuaauuagcccccauagauucggagaaaccaaaggaaacucagcucccuugauaauaagggaaccuuuuauugcuuguggaccaacggaaugcaaacacuuugcucuaacccauuaugcagcucaaccagggggauacuacaauggaacaagagaagacagaaacaagaugaggcaucuaauuucagucaaauugggcaaaaucccaacaguagaaaacuccauuuuccacauggcagcuuggagcggguccgcaugccaugaugguaaagaauggacauauaucggaguugauggccccgacaguaaugcauugcucaaaauaaaauauggagaagcauauacugacacauaccauuccuaugcaaaaaacauccuaaggacacaagaaagugccugcaauugcaucgggggagauuguuaucuuaugauaacugauggcccagcuucagggauuagugaaugcagauuccuuaagauucgagagggccgaauaauaaaagaaauauuuccaacaggaagaguaaaacauacugaggaaugcacaugcggauuugccagcaacaaaaccauagaaugugcuuguagagauaacaguuacacagcaaaaagacccuuugucaaauuaaauguggagacugauacagcggaaauaagauugaugugcacagagacuuauuuggacacccccagaccaaaugauggaagcauaacagggccuugcgaaucugauggggacaaagggaguggaggcaucaagggaggauuuguucaucaaagaauggcauccaagauuggaaggugguacucucgaacgaugucuaaaacuaaaagaauggggaugggacuguauguaaaguaugauggagacccauggacugacagugaagcccuugcucuuaguggaguaaugguuucaauggaagaaccugguugguauuccuuuggcuucgaaauaaaagauaagaagugugauguccccuguauugggauagaaaugguacaugauggugggaaaacgacuuggcacucagcagcaacagccguuuacuguuuaaugggcucaggacaacugcugugggacacugucacagguguugauauggcucuguaa

SEQ ID NO: 60639 - RNA, 1401 nt, Artificial Sequence
  derived and/or modified CDS sequence (wt) from neuraminidase__InfluenzaB__ABL76643
augcuaccuucaacuauacaaacguuaacccuauuucucacaucagggggaguguuauuaucacuauaugugucagcuucauugucauacuuacuauauucggauauauugcuaaaauuuucacaaacagaaauaacugcaccaauaaugccauuggauugugcaaacgcaucaaauguucaggcugugaaccguucugcaacaaaaggggugacacuucuucucccagaaccggaguggacauacccucguuuaucuugcccgggcucaaccuuucagaaagcacuccuaauuagcccccauagauucggagaaaccaaaggaaacucagcucccuugauaauaagggaaccuuuuauugcuuguggaccaacggaaugcaaacacuuugcucuaacccauuaugcagcucaaccagggggauacuacaauggaacaagagaagacagaaacaagcugaggcaucuaauuucagucaaauugggcaaaaucccaacaguagaaaacuccauuuuccacauggcagcuuggagcggguccgcaugccaugaugguaaagaauggacauauaucggaguugauggccccgacaguaaugcauugcucaaaauaaaauauggagaagcauauacugacacauaccauuccuaugcaaaaaacauccuaaggacacaagaaagugccugcaauugcaucgggggagauuguuaucuuaugauaacugauggcccagcuucagggauuagugaaugcagauuccuuaagauucgagagggccgaauaauaaaagaaauauuuccaacaggaagaguaaaacauacugaggaaugcacaugcggauuugccagcaacaaaaccauagaaugugcuuguagagauaacaguuacacagcaaaaagacccuuugucaaauuaaauguggagacugauacagcggaaauaagauugaugugcacagagacuuauuuggacacccccagaccaaaugauggaagcauaacagggccuugcgaaucugauggggacaaagggaguggaggcaucaagggaggauuuguucaucaaagaauggcauccaagauuggaaggugguacucucgaacgaugucuaaaacuaaaagaauggggaugggacuguauguaaaguaugauggagacccauggacugacagugaagcccuugcucuuaguggaguaaugguuucaauggaagaaccugguugguauuccuuuggcuucgaaauaaaagauaagaaaugugauguccccuguauugggauagaaaugguacaugauggugggaaaacgacuuggcacucagcagcaacagccauuuacuguuuaaugggcucaggacaacugcugugggacacugucacagguguugauauggcucuguaa

SEQ ID NO: 60640 - RNA, 1401 nt, Artificial Sequence
  derived and/or modified CDS sequence (wt) from neuraminidase__InfluenzaB__ABL76654
augcuaccuucaacuauacaaacguuaacccuauuucucacaucagggggaguguuauuaucacuauaugugucagcuucauugucauacuuacuauauucggauauauugcuaaaauuuucacaaacagaaauaacugcaccaauaaugccauuggauugugcaaacgcaucaaauguucaggcugugaaccguucuacaacaaaaggggugacacuucuucucccagaaccggaguggacauacccucguuuaucuugcccgggcucaaccuuucagaaagcacuccuaauuagcccccauagauucggagaaaccaaaggaaacucagcucccuugauaauaagggaaccuuuuauugcuuguggaccaacggaaugcaaacacuuugcucuaacccauuaugcagcucaaccagggggauacuacaauggaacaagagaagacagaaacaagcugaggcaucuaauuucagucaaauugggcaaaaucccaacaguagaaaacuccauuuuccacauggcagcuuggagcggguccgcaugccaugaugguaaagaauggacauauaucggaguugauggccccgacaguaaugcauugcucaaaauaaaauauggagaagcauauacugacacauaccauuccuaugcaaaaaacauccuaaggacacaagaaagugccugcaauugcaucgggggagauuguuaucuuaugauaacugauggcccagcuucagggauuagugaaugcagauuccuuaagauucgagagggccgaauaauaaaagaaauauuuccaacaggaagaguaaaacauacugaggaaugcacaugcggauuugccagcaacaaaaccauagaaugugcuuguagagauaacaguuacacagcaaaaagacccuuugucaaauuaaauguggagacugauacagcggaaauaagauugaugugcacagagacuuauuuggacacccccagaccaaaugauggaagcauaacagggccuugcgaaucugauggggacaaagggaguggaggcaucaagggaggauuuguucaucaaagaauggcauccaagauuggaaggugguacucucgaacgaugucuaaaacuaaaagaauggggaugggacuguauguaaaguaugauggagacccauggacugacagugaagcccuugcucuuaguggaguaaugguuucaauggaagaaccugguugguauuccuuuggcuucgaaauaaaagauaagaaaugugauguccccuguauugggauagaaaugguacaugauggugggaaaacgacuuggcacucagcagcaacagccauuuacuguuuaaugggcucaggacaacugcugugggacacugucacagguguugauauggcucuguaa

SEQ ID NO: 60641 - RNA, 1401 nt, Artificial Sequence
  derived and/or modified CDS sequence (wt) from neuraminidase__InfluenzaB__ABL76665
augcuaccuucaacuauacaaacguuaacccuauuucucacaucagggggaguguuauuaucacuauaugugucagcuucauugucauacuuacuauauucggauauauugcuaaaauuuucacaaacagaaauaacugcaccaauaaugccauuggauugugcaaacgcaucaaauguucaggcugugaaccguucugcaacaaaaggggugacacuucuucucccagaaccggaguggacauacccucguuuaucuugcccgggcucaaccuuucagaaagcacuccuaauuagcccccauagauucggagaaaccaaaggaaacucagcucccuugauaauaagggaaccuuuuauugcuuguggaccaacggaaugcaaacacuuugcucuaacccauuaugcagcucaaccagggggauacuacaauggaacaagagaagacagaaacaagcugaggcaucuaauuucagucaaauugggcaaaaucccaacaguagaaaacuccauuuuccacauggcagcuuggagcggguccgcaugccaugaugguaaagaauggacauauaucggaguugauggccccgacaguaaugcauugcucaaaauaaaauauggagaagcauauacugacacauaccauuccuaugcaaaaaacauccuaaggacacaagaaagugccugcaauugcaucgggggagauuguuaucuuaugauaacugauggcccagcuucagggauuagugaaugcagauuccuuaagauucgagagggccgaauaauaaaagaaauauuuccaacaggaagaguaaaacauacugaggaaugcacaugcggauuugccagcaacaaaaccauagaaugugcuuguagagauaacaguuacacagcaaaaagacccuuugucaaauuaaauguggagacugauacagcggaaauaagauugaugugcacagagacuuauuuggacacccccagaccaaaugauggaagcauaacagggccuugcgaauuugauggggacaaagggaguggaggcaucaagggaggauuuguucaucaaagaauggcauccaagauuggaaggugguacucucgaacgaugucuaaaacuaaaagaauggggaugggacuguauguaaaguaugauggagacccauggacugacagugaagcccuugcucuuaguggaguaaugguuucaauggaagaaccugguugguauuccuuuggcuucgaaauaaaagauaagaaaugugauguccccuguauugggauagaaaugguacaugauggugggaaaacgacuuggcacucagcagcaacagccauuuacuguuuaaugggcucaggacaacugcugugggacacugucacagguguugauauggcucuguaa

SEQ ID NO: 60642 - RNA, 1401 nt, Artificial Sequence
  derived and/or modified CDS sequence (wt) from neuraminidase__InfluenzaB__ABL76676
augcuaccuucaacuauacaaacguuaacccuauuucucacaucagggggaguguuauuaucacuauaugugucagcuucauugucauacuuacuauauucggauauauugcuaaaauuuucacaaacaggaauaacugcaccaauaaugccauuggauugugcaaacgcaucaaauguucaggcugugaaccguucugcaacaaaaggggugacacuucuucucccagaaccggaguggacguacccucguuuaucuugcccgggcucaaccuuucagaaagcacuccuaauuagcccccauagauucggagaaaccaaaggaaacucagcucccuugauaauaagggaaccuuuuauugcuuguggaccaaaggaaugcaaacacuuugcucuaacccauuaugcagcucagccagggggauacuacaauggaacaagagaagacagaaacaagcugaggcaucuaauuucagucaaauugggcaaaaucccaacaguagaaaacucuauuuuccacauggcagcuuggagcggguccgcaugccaugaugguagagaauggacauauaucggaguugauggccccgacaguaaugcauugcucaaaauaaaauauggagaagcauauacugacacauaccauuccuaugcaaaaaacauccuaaggacacaagaaagugccugcaauugcaucgggggagauuguuaucuuaugauaacugauggaccagcuucagggauuagugaaugcagauuccuuaagauucgagagggccgaauaauaaaagaaauauuuccaacaggaagaguaaaacauacugaggaaugcacaugcggauuugccagcaacaaaaccauagaaugugccuguagagauaacaguuacacagcaaaaagacccuuugucaaauuaaauguggagacugauacagcggaaauaagauugaugugcacagagacuuauuuggacacccccagaccaaaugauggaagcauaacagggccuugcgaaucuaauggggacaaagggaguggaggcaucaagggaggauuuguucaucaaagaauggcauccaagauuggaaggugguacucucgaacgaugucuaaaacuaaaagaauggggaugggacuguauguaaaguaugauggagacccauggacugacagugaagcccuugcucuuaguggaguaaugguuucaauggaagaaccugguugguauuccuuuggcuucgaaauaaaagauaagaaaugugauguccccuguauugggauagaaaugguacaugauggugggaaaacgacuuggcacucagcagcaacagccauuuacuguuuaaugggcucaggacaacugcugugggacacugucacagguguugauauggcucuguaa

SEQ ID NO: 60643 - RNA, 1401 nt, Artificial Sequence
  derived and/or modified CDS sequence (wt) from neuraminidase__InfluenzaB__ABL76687
augcuaccuucaacuauacaaacguuaacccuauuucucacaucagggggaguguuauuaucacuauaugugucagcuucauugucauacuuacuauauucggauauauugcuaaaauuuucacaaacagaaauaacugcaccaauaaugccauuggauugugcaaacgcaucaaauguucaggcugugaaccguucugcaacaaaaggggugacacuucuucucccagaaccggaguggacauacccucguuuaucuugcccgggcucaaccuuucagaaagcacuccuaauuagcccccauagauucggagaaaccaaaggaaacucagcccccuugauaauaagggaaccuuuuauugcuuguggaccaacggaaugcaaacacuuugcucuaacccauuaugcagcucaaccagggggauacuacaauggaacaagagaagacagaaacaagcugaggcaucuaauuucagucaaauugggcaaaaucccaacaguagaaaacuccauuuuccacauggcagcuuggagcggguccgcaugccaugaugguaaagaauggacauauaucggaguugauggccccgacaguaaugcauugcucaaaauaaaauauggagaagcauauacugacacauaccauuccuaugcaaaaaacauccuaaggacacaagaaagugccugcaauugcaucgggggagauuguuaucuuaugauaacugauggcccagcuucagggauuagugaaugcagauuccuuaagauucgagagggccgaauaauaaaagaaauauuuccaacaggaagaguaaaacauacugaggaaugcacaugcggauuugccagcaacaaaaccauagaaugugcuuguagagauaacaguuacacagcaaaaagacccuuugucaaauuaaauguggagacugauacagcggaaauaagauugaugugcacagagacuuauuuggacacccccagaccaaaugauggaagcauaacagggccuugcgaauuugauggggacaaagggaguggaggcaucaagggaggauuuguucaucaaagaauggcauccaagauuggaaggugguacucucgaacgaugucuaaaacuaaaagaauggggaugggacuguauguaaaguaugauggagacccauggacugacagugaagcccuugcucuuaguggaguaaugguuccaauggaagaaccugguugguauuccuuuggcuucgaaauaaaagauaagaaaugugauguccccuguauugggauagaaaugguacaugauggugggaaaacgacuuggcacucagcagcaacagccauuuacuguuuaaugggcucaggacaacugcugugggacacugucacagguguugauauggcucuguaa

SEQ ID NO: 60644 - RNA, 1401 nt, Artificial Sequence
  derived and/or modified CDS sequence (wt) from neuraminidase__InfluenzaB__ABL76698
augcuaccuucaacuauacaaacguuaacccuauuucucacaucagggggaguguuauuaucacuauaugugucagcuucacugucauacuuacuguauucggauauauugcuaaaauuuucaccaacagaaauaacugcaccaacaaugccauuggauugugcaaacgcaucaaauguucaggcugugaaccguucugcaacaaaagggaugacacuucuucucccagaaccggaguggacauacccucguuuaucuugcccgggcucaaccuuucagaaagcacuccuaauuagcccucauagauucggagaaaccagaggaaacucagcucccuugacaauaagggaaccuuuuauugcuuguggaccaaaggaaugcaaacacuuugcucuaacccauuaugcagcucaaccagggggauacuacaauggaacaagagaggacagaaacaagcugaggcaucugauuucagucaaauugggcaaaauaccaacaguagaaaacuccauuuuccacauggcagcuuggagcggguccgcaugccaugaugguagagaauggacauauaucggaguugauggcccugacaguaaugcauugaucaaaauaaaauauggagaagcauauacugacacauaccauuccuaugcaaacaacauccuaagaacacaagaaagugccugcaauugcauugggggagauuguuaucuuaugauaacugauggcucagcuucaggaauuaguaaaugcagauuucuuaagauucgagagggucgaauaauaaaagaaauauuuccaacaggaagaguagaacauacugaagaaugcacaugcggauuugccagcaacaaaaccauagaaugugccuguagagauaacaguuacacagcaaaaagacccuuugucaaauuaaauguggagacugauacagcugaaauaagauugaugugcacagagacuuauuuggacacccccagaccagaugauggaagcauaacagggccuugcgaaucuaauggggacaaagggcguggaggcaucaagggaggauuuguucaucaaagaauggcauccaagauuggaagaugguacucucgaacgaugucuaaaacugaaagaauggggauggaacuguaugucaaguaugauggagacccauggacugacagugaagcccuugcuccuaguggaguaaugguuucaauggaagaaccugguugguauucuuuuggcuucgaaauaaaagauaagaaaugugauguccccuguauugggauagagaugguacacgaugguggaaaaaagacuuggcacucagcagcaacagccauuuacuguuuaaugggcucaggacaauugcuaugggacacugucacagguguugauauggcucuguaa

SEQ ID NO: 60645 - RNA, 1401 nt, Artificial Sequence
  derived and/or modified CDS sequence (wt) from neuraminidase__InfluenzaB__ABL76720
augcuaccuucaacuauacaaacguuaacccuauuucucacaucagggggaguauuauuaucacuauaugugucagcuucauuaucauacuuacuauauucggauauauugcuaaaauucucaccaacagaaauaacugcaccaacaaugccauuggauugugcaaacgcaucaaauguucaggcugugaaccguucugcaacaaaaggggugacacuucuucucccagaaccggaguggacauacccgcguuuaucuugcccgggcucaaccuuucagaaagcacuccuaauuagcccucauagauucggagaaaccaaaggaaacucagcucccuugauaauaagggaaccuuuuauugcuuguggaccaaaugaaugcaaacacuuugcucuaacccauuaugcagcccaaccagggggauacuacaauggaacaagaggagacagaaacaagcugaggcaucuaauuucagucaaauugggcaaaaucccaacaguagaaaacuccauuuuccacauggcagcauggagcggguccgcaugccaugaugguaaggaauggacauauaucggaguugauggcccugacaauaaugcauugcucaaaauaaaauauggagaagcauauacugacacauaccauuccuaugcaaacaaaauccuaagaacacaagaaagugccugcaauugcaucgggggaaauuguuaucuuaugauaacugauggcucagcuucagguguuagugaaugcagauuucuuaagauucgagagggccgaauaauaaaagaaauauuuccaacaggaagaguaaaacacacugaggaaugcacaugcggauuugccagcaauaaaaccauagaaugugccuguagagauaacaguuacacagcaaaaagacccuuugucaaauuaaacguggagacugauacagcagaaauaagauugaugugcacagauacuuauuuggacacccccagaccagaugauggaagcauaacaggcccuugugaaucuaauggggacaaagggaguggaggcaucaagggaggauuuguucaucaaagaauggcauccaagauuggaaggugguacucucgaacgaugucuaaaacugaaaggauggggaugggacuguaugucaaguaugauggagacccaugggcugacagugaugcccuagcuuuuaguggaguaaugguuucaaugaaagaaccugguugguacuccuuuggcuucgaaauaaaagauaagaaaugcgauguccccuguauugggauagagaugguacaugaugguggaaaagagacuuggcgcucagcagcaacagccauuuacuguuuaaugggcucaggacagcugcugugggacacugucacagguguugacauggcucuguaa

SEQ ID NO: 60646 - RNA, 1401 nt, Artificial Sequence
  derived and/or modified CDS sequence (wt) from neuraminidase__InfluenzaB__ABL76731
augcuaccuucaacuauacaaacguuaacccuauuucucacaucagggggaguauuauuaucacuauaugugucagcuucauuaucauacuuacuauauucggauauauugcuaaaauucucaccaacagaaauaacugcaccaacaaugccauuggauugugcaaacgcaucaaauguucaugcugugaaccguucugcaacaaaaggggugacacuucuucucccagaaccggaguggacauacccgcguuuaucuugcccgggcucaaccuuucagaaagcacuccuaauuagcccucauagauucggagaaaccaaaggaaacucagcucccuugauaauaagggaaccuuuuauugcuuguggaccaaaugaaugcaaacacuuugcuauaacccauuaugcagcccaaccagggggauacuacaauggaacaagaggagacagaaacaagcugaggcaucuaauuucagucaaauugggcaaaaucccaacaguagaaaacuccauuuuccacauggcagcauggagcggguccgcaugccaugaugguaaggaauggacauauaucggaguugauggcccugacaauaaugcauugcucaaaauaaaauauggagaagcauauacugacacauaccauuccuaugcaaacaacauccuaagaacacaagaaagugccugcaauugcaucgggggaaauuguuaucuuaugauaacugauggcucagcuucagguguuagugaaugcagauuucuuaagauucgagagggccgaauaauaaaagaaauauuuccaacaggaagaguaaaacauacugaggaaugcacaugcggauuugccagcaauaaaaccauagaaugugccuguagagauaacaguuacacagcaaaaagacccuuugucaaauuaaacguggaaacugauacagcagaaauaagauugaugugcacagauacuuauuuggacacccccagaccagaugauggaagcauaacaggcccuugugaaucuaauggggacaaagggaguggaggcaucaagggaggauuuguucaucaaagaauggcauccaagauuggaaggugguacucucgaacgaugucuaaaacugaaaggauggggaugggacuguaugucaaguaugauggagacccaugggcugacagugaugcccuugcuuuuaguggaguaaugguuucaaugaaagaaccugguugguacuccuuuggcuucgaaauaaaagauaagaaaugcgauguccccuguauugggauagagaugguacaugaugguggaaaagagacuuggcacucagcagcaacagccauuuacuguuuaaugggcucaggacagcugcugugggacacugucacagguguugacauggcucuguaa

SEQ ID NO: 60647 - RNA, 1401 nt, Artificial Sequence
  derived and/or modified CDS sequence (wt) from neuraminidase__InfluenzaB__ABL76742
augcuaccuucaacuauacaaacguuaacccuauuucucacaucagggggaguauuauuaucacuauaugugucagcuucauuaucauacuuacuauauucggauauauugcuaaaauucucaccaacagaaauaacugcaccaacaaugccauuggauugugcaaacgcaucaaauguucaggcugugaaccguucugcaacaaaaggggugacacuucuucucccagaaccggaguggacauacccgcguuuaucuugcccgggcucaaccuuucagaaagcacuccuaauuagcccucauagauucggagaaaccaaaggaaacucagcucccuugauaauaagggaaccuuuuauugcuuguggaccaaaugaaugcaaacacuuugcucuaacccauuaugcagcccaaccagggggauacuacaauggaacaagaggagacagaaacaagcugaggcaucuaauuucagucaaauugggcaaaaucccaacaguagaaaacuccauuuuccacauggcagcauggagcggguccgcaugccaugaugguaaggaauggacauauaucggaguugauggcccugacaauaaugcauugcucaaaauaaaauauggagaagcauauacugacacauaccauuccuaugcaaacaaaauccuaagaacacaagaaagugccugcaauugcaucgggggaaauuguuaucucaugauaacugauggcucagcuucagguguuagugaaugcagauuucuuaagauucgagagggccgaauaauaaaagaaauauuuccaacaggaagaguaaaacacacugaggaaugcacaugcggauuugccagcaauaaaaccauagaaugugccuguagagauaacaguuacacagcaaaaagaccuuuugucaaauuaaacguggagacugauacagcagaaauaagauugaugugcacagauacguauuuggacacccccagaccagaugauggaagcauaacaggcccuugugaaucuaauggggacaaagggaguggaggcaucaagggaggauuuguucaucaaagaauggcauccaagauuggaaggugguacucucgaacgaugucuaaaacugaaaggauggggaugggacuguaugucaaguaugauggagacccaugggcugacagugaugcccuagcuuuuaguggaguaaugguuucaaugaaagaaccugguugguacuccuuuggcuucgaaauaaaagauaagaaaugcgauguccccuguauugggauagagaugguacaugaugguggaaaagagacuuggcacucagcagcaacagccauuuacuguuuaaugggcucaggacagcugcugugggacacugucacagguguugacauggcucuguaa

SEQ ID NO: 60648 - RNA, 1401 nt, Artificial Sequence
  derived and/or modified CDS sequence (wt) from neuraminidase__InfluenzaB__ABL76753
augcuaccuucaacuauacaaacguuaacccuauuucucacaucagggggaguguuauuaucacuauaugugucagcuucauugucauacuuacuauauucggauauauugcuaaaauuuucacaaacagaaauaacugcaccaauaaugccauuggauugugcaaacgcaucaaauguucaggcugugaaccguucugcaacaaaaggggugacacuucuucucccagaaccggaguggacguacccucguuuaucuugcccgggcucaaccuuucagaaagcacuccuaauuagcccccauagauucggagaaaccacaggaaacucagcucccuugauaauaagggaaccuuuuauugcuuguggaccaaaggaaugcaaacacuuugcucuaacccauuaugcagcucaaccagggggauacuacaauggaacaagagaagacagaaacaagcugaggcaucuaauuucagucaaauugggcaaaaucccaacaguagaaaacucuauuuuccacauggcagcuuggagcggguccgcaugccaugaugguagagaauggacauauaucggaguugauggccccgacaauaaugcauugcucaaaauaaaauauggagaagcauauacugacacauaccauuccuaugcaaaaaacauccuaaggacacaagaaagugccugcaauugcaucgggggagacuguuaucuuaugauaacugauggcccagcuucagggauuagugaaugcagauuccuuaagauucgagagggccgaauaauaaaagaaauauuuccaacaggaagaguaaaacauacugaggaaugcacaugcggauuugccagcaacaaaaccauagaaugugccuguagagauaacaguuacacagcaaaaagacccuuugucaaauuaaauguggagacugauacagcggaaauaagauugaugugcacagagacuuauuuggacacccccagaccaaaugauggaagcauaacagggccuugcgaaucuaauggggacaaagggaguggaggcaucaagggaggauuuguucaucaaagaauggcauccaagauuggaaggugguacucucgaacgaugucuaaaacuaaaagaauggggaugggacuguauguaaaguaugauggagacccauggacugacagugaagcccuugcucuuaguggaguaaugguuucaauggaagaaccugguugguauuccuuuggcuucgaaauaaaagauaagaaaugugauguccccuguauugggauagaaaugguacaugauggugggaaaacgacuuggcacucagcagcaacagccauuuacuguuuaaugggcucaggacaacugcugugggacacugucacagguguugauauggcucuguaa

SEQ ID NO: 60649 - RNA, 1401 nt, Artificial Sequence
  derived and/or modified CDS sequence (wt) from neuraminidase__InfluenzaB__ABL76764
augcuaccuucaacuauacaaacguuaacccuauuucucacaucagggggaguguuguuaucacuauaugugucagcuucacugucauacuuacuauauucggauauauugcuaaaauuuucaccaacagaaauaacugcaccaacaaugccauugaauugugcaaacgcaucaaauguucaggcugugaaccguucugcaacaaaaggggugacacuuccucucccagaaccggaguggacauacccucguuuaucuugcccgggcucaaccuuucagaaagcacuccuaauuagcccucauagauucggagaaaccaaaggaaacucagcucccuugauaauaagggaaccuuuuauugcuuguggaccaaaggaaugcaaacacuuugcucuaacccauuaugcagcccaaccagggggauacuacaauggaacaagagaagacagaaacaagcugaggcaucuaauuucagucaaauugggcaaaaucccaacaguagaaaacuccauuuuccacauggcagcuuggagcggguccgcaugccaugaugguagagaauggacauauaucggaguugauggcccugacaguaaugcauugcucaaaauaaaauauggagaagcauauacugacacauaccauuccuaugcaaacaacauccuaagaacacaagaaagugccugcaauugcaucgggggagauuguuaucuuaugauaacugauggcucagcuucagggauuagugaaugcagauuucuuaagauucgagagggccgaauaauaaaagaaauauuuccaacaggaagaguagaacauacugaagaaugcacaugcggauuugccagcaauaaaaccauagaaugugccuguagagauaacaguuacacagcaaaaagacccuuugucaaauuaaauguggagacugauacagcagaaauaagauugaugugcacagagacuuacuuggacacccccagaccagaugauggaagcauaacagggccuugugaaucuaauggggauaaagggaguggaggcaucaagggaggauuuguucaucaaagaauggcauccaagauuggaaggugguacucucgaacgaugucuaaaacuaaaaggauggggaugggacuguaugucaaguaugauggagacccauggauugacagugaugcccuuacucuuagcggaguaaugguuucaauggaagaaccugguugguauuccuuuggcuucgaaauaaaagauaagaaaugugauguccccuguauugggauagagaugguacaugaugguggaaagacgacuuggcacucagcagcaacagccauuuacuguuuaaugggcucaggacaacugcuaugggacacugucacaggcguugauauggcucuguaa

SEQ ID NO: 60650 - RNA, 1401 nt, Artificial Sequence
  derived and/or modified CDS sequence (wt) from neuraminidase__InfluenzaB__ABL76775
augcuaccuucaacuauacaaacguuaacccuauuucucacaucagggggaguguuguuaucacuauaugugucagcuucacugucauacuuacuauauucggauauauugcuaaaauuuucaccaacagaaauaacugcaccaacaaugccauugaauugugcaaacgcaucaaauguucaggcugugaaccguucugcaacaaaaggggugacacuuccucucccagaaccggaguggacauacccucguuuaucuugcccgggcucaaccuuucagaaagcacuccuaauuagcccucauagauucggagaaaccaaaggaaacucagcucccuugauaauaagggaaccuuuuauugcuuguggaccaaaggaaugcaaacacuuugcucuaacccauuaugcagcccaaccagggggauacuacaauggaacaagagaagacagaaacaagcugaggcaucuaauuucagucaaauugggcaaaaucccaacaguagaaaacuccauuuuccacauggcagcuuggagcggguccgcaugccaugaugguagagaauggacauauaucggaguugauggcccugacaguaaugcauugcucaaaauaaaauauggagaagcauauacugacacauaccauuccuaugcaaacaacauccuaagaacacaagaaagugccugcaauugcaucgggggagauuguuaucuuaugauaacugauggcucagcuucagggauuagugaaugcagauuucuuaagauucgagagggccgaauaauaaaagaaauauuuccaacaggaagaguagaacauacugaagaaugcacaugcggauuugccagcaauaaaaccauagaaugugccuguagagauaacaguuacacagcaaaaagacccuuugucaaauuaaauguggagacugauacagcagaaauaagauugaugugcacagagacuuacuuggacacccccagaccagaugauggaagcauaacagggccuugugaaucuaauggggauaaagggaguggaggcaucaagggaggauuuguucaucaaagaauggcauccaagauuggaaggugguacucucgaacgaugucuaaaacuaaaaggauggggaugggacuguaugucaaguaugauggagacccauggauugacagugaugcccuuacucuuagcggaguaaugguuucaauggaagaaccugguugguauuccuuuggcuucgaaauaaaagauaagaaaugugauguccccuguauugggauagagaugguacaugaugguggaaagacgacuuggcacucagcagcaacagccauuuacuguuuaaugggcucaggacaauugcuaugggacacugucacaggcguugauauggcucuguaa

SEQ ID NO: 60651 - RNA, 1401 nt, Artificial Sequence
  derived and/or modified CDS sequence (wt) from neuraminidase__InfluenzaB__ABL76797
augcuaccuucaacuauacaaacguuaacccuauuccucacaucagggggaguguuauuaucacuauaugugucagcuucacugucauacuuauuauauucggauauauugcuaaaauuuucaccaacagaaauaacugcaccaacaaugccauuggauugugcaaacgcaucaaauguucaggcugugaaccguucugcaacaaaaggggugacacuucuucucccagaaccggaguggacauacccgcguuuaucuugcccgggcucaaccuuucagaaagcacuccuaauuagcccucauagauucggagaaaccaaaggaaacucagcucccuugauaauaagggaaccuuuuauugcuuguggaccaaaggaaugcaaacacuuugcucuaacccauuaugcagcccaaccagggggauacuacaauggaacaagagaagacagaaacaagcugaggcaucuaauuucagucaaauugggcaaaaucccaacaguagaaaacuccauuuuccacauggcagcauggagcggguccgcaugccaugaugguaaagaauggacauauaucggaguugauggcccugacaguaaugcauugcucaaaauaaaauauggagaagcauauacugacacauaccauuccuaugcaaacaacauccuaagaacacaagaaagugccugcaauugcaucgggggaaauuguuaucuuaugauaacugauggcucagcuucagguauuagugaaugcagauuucuuaagauucgagagggccgaauaauaaaagaaauauuuccaacaggaagaguagaacauacugaagaaugcacaugcggauuugccagcaauaaaaccauagaaugugccuguagagauaacaguuacacagcaaaaagacccuuugucaaauuaaauguggagacugauacagcagaaauaagauugaugugcacagagacuuauuuggacacccccagaccagaugauggaagcauaacagggccuugugaaucuaauggggauaaagggaguggaggcaucaagggaggauuuguucaucaaagaauggcauccaagauuggaaggugguacucucgaacaaugucuaaaacuaaaagaauggggaugggacuguaugucaaguaugauggagacccauggacugacagugaugcccuugcucuuaguggaguaaugguuucaauggaagaaccugguugguacuccuuuggcuucgaaauaaaagauaagaaaugugauguccccuguauugggauagagaugguacaugaugguggaaaggagacuuggcacucagcagcaacagccauuuacuguuuaaugggcucaggacaacugcuaugggacacugucacagguguuaauauggcucuguaa

SEQ ID NO: 60652 - RNA, 1401 nt, Artificial Sequence
  derived and/or modified CDS sequence (wt) from neuraminidase__InfluenzaB__ABL76819
augcuacccucaacuauacaaacguuaacccuauuccucacaucagggggaguguuauuaucacuauaugugucagcuucacugucauacuuacuauauucggauauauugcuaaaauuuucaccaacagaaauaacugcaccaacaaugccauuggauugugcaaacgcaucaaauguucaggcugugaaccguucugcaacaaaaggggugacacuucuucucccagaaccggaguggacauacccgcguuuaucuugcccgggcucaaccuuucagaaagcacuccuaauuagcccucauagauucggagaaaccaaaggaaacucagcucccuugauaauaagggaaccuuuuauugcuuguggaccaaaggaaugcaaacacuuugcucuaacccauuaugcagcccaaccagggggauacuacaauggaacaagagaagacagaaacaagcugaggcaucuaauuucagucaaauugggcaaaaucccaacaguagaaaacuccauuuuccacauggcagcauggagcggguccgcaugccaugaugguaaagaauggacauauaucggaguugauggcccugacaguaaugcauugcucaaaauaaaauauggagaagcauauacugacacauaccauuccuaugcaaacaacauccuaagaacacaagaaagugcuugcaauugcaucgggggaaauuguuaucuuaugauaacugauggcucagcuucagguauuagugagugcagauuucuuaagauucgagagggccgaauaauaaaagaaauauuuccaacaggaagaguaaaacauacugaagaaugcacaugcggauuugccagcaauaaaaccauagaaugugccuguagagauaacaguuacacagcaaaaagacccuuugucaaauuaaauguggagacugauacagcagaaauaagauugaugugcacagagacuuauuuggacacccccagaccagaugauggaagcauaacagggccuugugaaucuaauggggauaaagggaguggaggcaucaagggaggauuuguucaucaaagaauggcauccaagauuggaaggugguacucucgaacaaugucuaaaacuaaaaggauggggaugggacuguaugucaaguaugauggagacccauggacugacagugaugcccuugcucuuaguggaguaaugguuucaauggaagaaccugguugguacuccuuuggcuucgaaauaaaagauaagaaaugugauguccccuguauugggauagaaaugguacaugaugguggaaaggagacuuggcacucagcagcaacagccauuuacuguuuaaugggcucaggacaacugcuaugggacacugucacagguguugauauggcucuguaa

SEQ ID NO: 60653 - RNA, 1401 nt, Artificial Sequence
  derived and/or modified CDS sequence (wt) from neuraminidase__InfluenzaB__ABL76830
augcuaccuucaacuauacaaacguuaacccuauuucucacaucagggggaguauuauuaucacuauaugugucagcuucauugucauacuuacuauauucggauauauugcuaaaauucucaccaacaaaaauaacugcaccaacaaugccauuggauugcgcaaacgcaucaaauguucaggcugugaaccguucugcaacaaaaggggugacacuucuucucccagaaccggaguggacauacccgcguuuaucuugcccgggcucaaccuuucagaaagcacuccuaauuagcccucauagauucggagaaaccaaaggaaacucagcucccuugauaauaagggaaccuuuuauugcuuguggaccaaaggaaugcaaacacuuugcucuaacccauuaugcagcccaaccagggggauacuacaauggaacaagaggagacagaaacaagcugaggcaucuaauuucagucaaauugggcaaaaucccaacaguagaaaacuccauuuuccacauggcagcauggagcggguccgcaugccaugaugguaaggaauggacauauaucggaguugauggcccugacaauaaugcauugcucaaaauaaaauauggagaagcauauacugacacauaccauuccuaugcaaacaacauccuaagaacacaagaaagugccugcaauugcaucgggggaaauuguuaucuuaugauaacugauggcucagcuucagguguuagugaaugcagauuucuuaagauucgagagggccgaauaauaaaagaaauauuuccaacaggaagaguaaaacauacugaagaaugcacaugcggauuugccagcaauaaaaccauagaaugugccuguagagauaacaguuacacagcaaaaagacccuuugucaaauuaaacguggagacugauacagcagaaauaagauugaugugcacaaagacuuauuuggacacccccagaccagaugauggaagcauaacagggccuugugaaucuaauggggacaaagggaguggaggcaucaagggaggauuuguucaucaaagaauggcauccaagauuggaaggugguacucucgaacgaugucuaaaacuaaaaggauggggaugggacuguaugucaaguaugauggagacccaugggcugacagugaugcccuugcucuuaguggaguaaugguuucaauggaagaaccugguugguacuccuuuggcuucgaaauaaaagauaagaaaugugauguccccuguauugggauagagaugguacaugaugguggaaaagagacuuggcacucagcagcuacagccauuuacuguuuaaugggcucaggacagcugcuaugggacacugucacagguguugauauggcucuguaa

SEQ ID NO: 60654 - RNA, 1401 nt, Artificial Sequence
  derived and/or modified CDS sequence (wt) from neuraminidase__InfluenzaB__ABL76852
augcuacccucaacuauacaaacguuaacccuauuccucacaucagggggaguguuauuaucacuauaugugucagcuucacugucauacuuacuauauucggauauauugcuaaaauuuucaccaacagaaauaacugcaccaacaaugccauuggauugugcaaacgcaucaaauguucaggcugugaaccguucugcaacaaaaggggugacacuucuucucccagaaccggaguggacauacccgcguuuaucuugcccgggcucaaccuuucagaaagcacuccuaauuagcccucauagauucggagaaaccaaaggaaacucagcucccuuaauaauaagggaaccuuuuauugcuuguggaccaaaggaaugcaaacacuuugcucuaacccauuaugcagcccaaccagggggauacuacaauggaacaagagaagacagaaacaagcugaggcaucuaauuucagucaaauugggcaaaaucccaacaguagaaaacuccauuuuccacauggcagcauggagcggguccgcaugccaugaugguaaagaauggacauauauaggaguugauggcccugacaguaaugcauugcucaaaauaaaauauggagaagcauauacugacacauaccauuccuaugcaaacaacauccuaagaacacaagaaagugcuugcaauugcaucgggggaaauuguuaucuuaugauaacugauggcucagcuucagguauuagugagugcagauuucuuaagauucgagagggccgaauaauaaaagaaauauuuccaacaggaagaguaaaacauacugaagaaugcacaugcggauuugccagcaauaaaaccauagaaugugccuguagagauaacaguuacacagcaaaaagacccuuugucaaauuaaauguggagacugauacagcagaaauaagauugaugugcacagagacuuauuuggacacccccagaccagaugauggaagcauaacagggccuugugaaucuaauggggauaaagggaguggaggcaucaagggaggauuuguucaucaaagaauggaauccaagauuggaaggugguacucucgaacaaugucuaaaacuaaaaggauggggaugggacuguaugucaaguaugauggagacccauggacugacagugaugcccuugcucuuaguggaguaaugguuucaauugaagaaccugguugguacuccuuuggcuucgaaauaaaagauaagaaaugugauguccccuguauugggauagagaugguacaugaugguggaaaggagacuuggcacucagcagcaacagccauuuacuguuuaaugggcucaggacaacugcuaugggacacugucacagguguugauauggcucuguaa

SEQ ID NO: 60655 - RNA, 1401 nt, Artificial Sequence
  derived and/or modified CDS sequence (wt) from neuraminidase__InfluenzaB__ABL76863
augcuacccucaacuauacaaacguuaacccuauuccucacaucagggggaguguuauuaucacuauaugugucagcuucacugucauacuuacuauauucggauauauugcuaaaauuuucaccaacagaaauaacugcaccaacaaugccauuggauugugcaaacgcaucaaauguucaggcugugaaccguucugcaacaaaaggggugacacuucuucucccagaaccggaguggacauacccgcguuuaucuugcccgggcucaaccuuucagaaagcacuccuaauuagcccucauagauucggagaaaccaaaggaaacucagcucccuugauaauaagggaaccuuuuauugcuuguggaccaaaggaaugcaaacacuuugcucuaacccauuaugcagcccaaccagggggauacuacaauggaacaagagaagacagaaacaagcugaggcaucuaauuucagucaaauugggcaaaaucccaacaguagaaaacuccauuuuccacauggcagcauggagcggguccgcaugccaugaugguaaagaauggacauauaucggaguugauggcccugacaguaaugcauugcucaaaauaaaauauggagaagcauauacugacacauaccauuccuaugcaaacaacauccuaagaacacaagaaagugcuugcaauugcaucgggggaaauuguuaucuuaugauaacugauggcucagcuucagguauuagugagugcagauuucuuaagauucgagagggccgaauaauaaaagaaauauuuccaacaggaagaguaaaacauacugaagaaugcacaugcggauuugccagcaauaaaaccauagaaugugcauguagagauaacaguuacacagcaaaaagacccuuugucaaauuaaauguggagacugauacagcagaaauaagauugaugugcacagagacuuauuuggacacccccagaccagaugauggaagcauaacagggccuugugaaucuaauggggauaaaggaaguggaggcaucaagggaggauuuguucaucaaagaauggcauccaagauuggaaggugguacucucgaacaaugucuaaaacuaaaaggauggggaugggacuguaugucaaguaugauggagacccauggacugacagugaugcccuugcucuuaguggaguaaugguuucaauggaagaaccugguugguacuccuuuggcuucgaaauaaaagauaagaaaugugauguccccugcauugggauagagaugguacaugaugguggaaaggagacuuggcacucagcagcaacagccauuuacuguuuaaugggcucaggacaacugcuaugggacacugucacagguguugauauggcuauguaa

SEQ ID NO: 60656 - RNA, 1401 nt, Artificial Sequence
  derived and/or modified CDS sequence (wt) from neuraminidase__InfluenzaB__ABL76874
augcuaccuucaacuauacaaacguuaacccuauuucucacaucagggggaguguuauuaucacuauaugugucagcuucacugucauacuuacuauauucggauauauugcuaaaauuuucaccaacagaaauaacugcaccaacaaugccauuggauugugcaaacgcaucaaauguucaggcugugaacaguucugcaacaaaaggggugacacuucuucucccagaaccggaguggacauacccgcguuuaucuugcccgggcucaaccuuucagaaagcacuccuaauuagcccucauagauucggagaaaccaaaggaaacucagcucccuugauaauaagggaaccuuuuauugcuuguggaccaaaggaaugcaaacacuuugcucuaacccauuaugcagcccaaccagggggauacuacaauggaacaagaggagacagaaacaagcugaggcaucuaauuucagucaaauugggcaaaaucccaacaguagaaaacuccauuuuccacauggcagcauggagcggguccgcaugccaugaugguaaagaauggacauauaucggaguugauggcccugacaguaaugcauugcucaaaauaaaauauggagaagcauauacugacacauaccauuccuaugcaaacaacauccuaagaacacaagaaagugccugcaauugcaucgggggaaauuguuaucuuaugauaacugauggcucagcuucagguauuagugaaugcagauuucuuaagauucgagagggccgaauaauaaaagaaauauuuccaacaggaagaguaaaacauacugaagaaugcacaugcggauuugccagcaauaaaaccauagaaugugccuguagagauaacaguuacacagcaaaaagacccuuugucaaauuaaauguggagacugauacagcagaaauaaaauugaugugcacagagacuuauuuggacacccccagaccagaugauggaagcauaacagggccuugugaaucuaauggggacaaagggaguggaggcaucaagggaggauuuguucaucaaagaauggcauccaagauuggaaggugguacucucgaacgaugucuaaaacuaaaaggauggggaugggacuguaugucaaguaugauggagacccauggacugacagugaugcccuugcucuuaguggaguaaugguuucaauggaagaaccugguugguacuccuuuggcuucgaaauaaaagauaagaaaugugauguccccuguauugggauagagaugguacaugaugguggaaaggagacuuggcauucagcagcaacagccauuuacuguuuaaugggcucaggacaauugcuaugggacacugucacggguguugauauggcucuguaa

SEQ ID NO: 60657 - RNA, 1401 nt, Artificial Sequence
  derived and/or modified CDS sequence (wt) from neuraminidase__InfluenzaB__ABL76885
augcuaccuucaacuauacaaacguuaacccuauuucucacaucagggggaguguuauuaucacuauaugugucagcuucacugucauacuuacuauauucggauauauugcuaaaauuuucacaaacagaaauaacugcaccaacaaugccauuggauuaugcaaacgcaucaaauguucaggcugugaaccguucugcaacaaaaggggugacacuucuucuuccagaaccggaguggacguacccucguuuaucuugcccgggcucaaccuuucagaaagcacuccuaauuagcccucauagauucggagaaaccaaaggaaacucagcucccuugauaauaagggaaccuuuuauugcuuguggaccaaaggaaugcaaacacuuugcucuaacccauuaugcagcucaaccagggggauacuacaauggaacaagagaagacagaaacaagcugaggcaucuaauuucagucaaauugggcaaaaucccaacaguagaaaacucuauuuuccacauggcagcuuggagcggguccgcaugccaugaugguagagaauggacauauaucggaguugauggcccugacaguaaugcauugcucaaaauaaaauauggagaagcauauacugacacauaccauuccuaugcaaaaaacauccuaaggacacaagaaagugccugcaauugcaucgggggagauuguuaucuuaugauaacugauggcucagcuucagggauuagugaaugcagauuccuuaagauucgagagggccgaauaauaaaagaaauauuuccaacaggaagaguaaaacauacugaagaaugcacaugcggauuugccagcaauaaaaccauagaaugugccuguagagauaacaguuacacagcaaaaagacccuuugucaaauuaaauguggagacugauacagcggaaauaagauugaugugcacagagacuuauuuggacacccccagaccagaugauggaagcauaacagggccuugcgaaucuaauggggacaaagggaguggaggcaucaagggaggauuuguucaucaaagaauggcauccaagauuggaaggugguacucucgaacgaugucuaaaacuaaaagaauggggaugggacuguaugucaaguaugauggagacccauggacugacagugaagcccuugcucuuaguggaguaaugguuucaauggaagaaccugguugguauuccuuuggcuucgaaauaaaagauaagaaaugugauguccccuguauugggauagaaaugguacaugauggugggaaaacgacuuggcacucagcagcaacagccauuuacuguuuaaugggcucaggacaacugcugugggacacugucacagguguugauauggcucuguaa

SEQ ID NO: 60658 - RNA, 1401 nt, Artificial Sequence
  derived and/or modified CDS sequence (wt) from neuraminidase__InfluenzaB__ABL76896
augcuaccuucaacuauacaaacguuaacccuauuucucacaucagggggaguguuauuaucacuauaugugucagcuucacugucauacuuacuauauucggauauauugcuaaaauuuucacaaacagaaauaacugcaccaacaaugccauuggauugugcaaacgcaucaaauguucaggcugugaaccguucugcaacaaaaggggugacacuucuucucccagaaccggaguggauguacccucguuuaucuugcccgggcucaaccuuucagaaagcacuccuaauuagcccucauagauucggagaaaccaaaggaaacucagcucccuugauaauaagggaaccuuuuauugcuuguggaccaaaggaaugcaaacacuuugcucuaacccauuaugcagcucaaccagggggauacuacaauggaacaagagaagacagaaacaagcugaggcaucuaauuucagucaaauugggcaaaaucccaacaguagaaaacucuauuuuccacauggcagcuuggagcggguccgcaugccaugaugguagagaauggacauauaucggaguugauggcccugacaguaaugcauugcucaaaauaaaauauggagaagcauauacugacacauaccauuccuaugcaaaaaacauccuaaggacacaagaaagugccugcaauugcaucgggggagauuguuaucuuaugauaacugauggcucagcuucagggauuagugaaugcagauuccuuaagauucgagagggccgaauaauaaaagaaauauuuccaacaggaagaguaaaacauacugaagaaugcacaugcggauuugccagcaauaaaaccauagaaugugccuguagagauaacaguuacacagcaaaaagacccuuugucaaauuaaauguggagacugauacagcggaaauaagauugaugugcacagagacuuauuuggacacccccagaccagaugauggaagcauaacagggccuugcgaaucuaauggggacaaagggaguggaggcaucaagggaggauuuguucaucaaagaauggcauccaagauuggaaggugguacucucgaacgaugucuaaaacuaaaagaauggggaugggacuguaugucaaguaugauggagacccauggacugacagugaagcccuugcucuuaguggaguaaugguuucaauggaagaaccugguugguauuccuuuggcuucgaaauaaaagauaagaaaugugauguccccuguauugggauagaaaugguacaugauggugggaaaacgacuuggcacucagcagcaacagccauuuacuguuuaaugggcucaggacaacugcugugggacgcugucacagguguugauauggcucuguaa

SEQ ID NO: 60659 - RNA, 1401 nt, Artificial Sequence
  derived and/or modified CDS sequence (wt) from neuraminidase__InfluenzaB__ABL76918
augcuaccuucaacuauacaaacguuaacccuauuucucacaucagggggaguauuauuaucacuauaugugucagcuucauugucauacuuacuauauucggauauauugcuaaaauuuucaccaacagaaauaacugcaccaacaaugccauuggauugugcaaacgcaucaaauguucaggcugugaaccguucugcaacaaaaggggugacacuucuucucccagaaccggaguggacauacccgcguuuaucuugcccgggcucaaccuuucagaaagcacuccuaauuagcccucauagauucggagaaaccaaaggaaacucagcucccuugauaauaagggaaccuuuuauugcuuguggaccaaaugaaugcaaacacuuugcucuaacccauuaugcagcccaaccagggggauacuacaauggaacaagaggagacagaaacaagcugaggcaucuaauuucagucaaauugggcaaaaucccaacaguagaaaacuccauuuuucacauggcagcauggagcggguccgcaugccaugaugguaaggaauggacauauaucggaguugauggcccugacaauaaugcauugcucaaaauaaaauauggagaagcauauacugacacauaccauuccuaugcaaacaacauccuaagaacacaagaaagugccugcaacugcaucgggggaaauuguuaucuuaugauaacugauggcucagcuucagguguuagugaaugcagauuucuuaagauucgagagggccgaauaauaaaagaaauauuuccaacaggaagaguaaaacauacugaagaaugcacaugcggauuugccagcaauaaaaccauagaaugugcuuguagagauaacaguuacacagcaaaaagacccuuugucaaauuaaacguggagacugauacagcagaaauaagauugaugugcacagagacuuauuuggacacccccagaccagaugauggaagcauaacagggccuugugaaucuaauggggacaaagggaguggaggcaucaagggaggauuuguucaccaaagaauggcauccaagauuggaaggugguacucucgaacgaugucuaaaacugaaaggauggggaugggacuguaugucaaguaugauggagacccaugggcugacagugaugcccuugcucuuauuggaguaaugguuucaauggaagaaccugguugguacuccuuuggcuucgaaauaaaagauaaaaaaugcgauguccccuguauugggauagagaugguacaugaugguggaaaagagacuuggcacucggcagcaacagccauuuacuguuuaaugggcucaggacagcugcugugggacacugucacagguguuaauauggcucuguaa

SEQ ID NO: 60660 - RNA, 1401 nt, Artificial Sequence
  derived and/or modified CDS sequence (wt) from neuraminidase__InfluenzaB__ABL76962
augcuaccuucaacuauacaaacguuaacccuauuucucacgucagggggaguguuguuaucacuauaugugucagccuuacugucauacuuacuguauucggauauauugcuaaaauuuucaccaacaaaaauaauugcaccaacaaugucguuggacugcgcgaacgcaucaaauguucaggcugugaaccauucugcaacagaagagaugacauuucuucucccagaaccggaguggacauauccucguuuaucuugccaggguucaaccuuucagaaagcacuccuaauuagcccucauagauucggagaagccaaaggaaacucagcucccuugauaauaagggaaccuuuuauugcuuguggaccaaaggaguguaaacacuuugcucuaacccauuaugcagcucaaccagggggauacuacaauggaacaagagaggacagaaacaagcugaggcaucugauuucagucaacuuagguaaaaucccaacuguagaaaacuccauuuuccacauggcagcuuggaguggauccgcaugccaugaugguagagaauggacuuacaucggaguugauggcccugacaguaaugcauugaucaaaauaaaauacggagaagcauacacugacacauaccauuccuaugcaaacaacauccuaagaacacaagaaagugccugcaauugcaucgggggagauuguuaucuuaugauaacugauggcucagcuucaggaauuaguaaaugcagauuccuuaagauucgagagggucgaauaauaaaagaaauauuuccaacaggaagaguagagcauacugaagaaugcacaugcggauuugccagcaauaaaaccauagaaugugccuguagagauaacaguuacacagcaaaaagacccuuugucaaauuaaauguggaaacugauacagcugaaauaagauugaugugcacagagacuuauuuggacacccccagaccagaugauggaagcauaacagggccuugcgaaucuaauggggacaaagggaguggagguaucaagggaggauuuguccaucaaagaauggcauccaagauuggaagaugguacucucgaacgaugucuaaaacuaaaagaauggggauggaacuguaugucaaguaugauggagacccauggacugacagugacgcccuugcuccuaguggaguaauggucucaauggaagaaccugguugguauucuuuuggcuucgaaauaaaagauaagaaaugcgauguccccuguauugggauagagaugguacacgaugguggaaaaaagacuuggcacucagcagcaacagccauuuacuguuugaugggcucaggacaguugcuaugggacacugucacagguguugauauggcucuguga

SEQ ID NO: 60661 - RNA, 1401 nt, Artificial Sequence; identical to SEQ ID NO: 60591
  derived and/or modified CDS sequence (wt) from neuraminidase__InfluenzaB__ABL76973

SEQ ID NO: 60662 - RNA, 1401 nt, Artificial Sequence
  derived and/or modified CDS sequence (wt) from neuraminidase__InfluenzaB__ABL76984
augcuaccuucaacuauacaaacguuaacccuauuucucacaucagggggaguguuauuaucacuauaugugucagcuucacugucauacuuauuauauucggauauauugcuaaaauuuucacaaacagaaauaacugcaccaacaaugccauuggauugugcaaacgcaucaaauguucaggcugugaaccuuucugcaacaaaaggggugacacuucuucucccagaaccggaguggacauacccucguuuaucuugcccgggcucaaccuuucagaaagcacuccuaauuagcccucauagauucggagaaaccaaaggaaacucagcucccuugauaauaagggaaccuuuuauugcuuguggaccaaaggaaugcaaacacuuugcucuaacccauuaugcagcccaaccagggggauacuacaauggaacaagagaagacagaaacaagcugaggcaucuaauuucagucaaauuaggcaaaauuccaacaguagaaaacuccauuuuccacauggcagcuuggagcggguccgcaugccaugaugguagagaauggacauauaucggaguugauggcccugacaguaaugcauugcucaaaauaaaauauggagaagcauauacugacacauaccauuccuaugcaaacaacauccuaagaacacaagaaagugccugcaauugcaucgggggaaauuguuaucuuaugauaacugauggcucagcuucagggauuagugaaugcagauuucucaagauucgagagggccgaauaauaaaagaaauauuuccaacaggaagaguagaacauacugaagaaugcacaugcggauuugccagcaauaaaaccauagaaugugccuguagagauaacaguuacacagcaaaaagacccuuugucaaauuaaauguggagacugauacagcagaaauaagauugaugugcacagagacuuauuuggacacccccagaccagaugauggaagcauaacagggccuugugaaucuaauggggauaaagggagugggggcaucaagggaggauuuguucaucaaagaauggcauccaagauuggaaggugguacucucgaacgauguccaaaacuaaaaggauggggaugggacuauaugucaaguaugauggagacccauggacugacagugaugcccuugcucuuaguggaguaaugguuucaauggaagaaccugguugguauuccuuuggcuucgaaauaaaagauaagaagugugauguccccuguauugggauagagaugguacaugaugguggaaagaggacuuggcacucagcagcaacagcuauuuacuguuuaaugggcucaggacaacuacuaugggacacugucacagguguugacauggcucuguaa

SEQ ID NO: 60663 - RNA, 1401 nt, Artificial Sequence; identical to SEQ ID NO: 60649
  derived and/or modified CDS sequence (wt) from neuraminidase__InfluenzaB__ABL77006

SEQ ID NO: 60664 - RNA, 1401 nt, Artificial Sequence
  derived and/or modified CDS sequence (wt) from neuraminidase__InfluenzaB__ABL77017
augcuaccuucaacuauacaaacguuaacccuauuucucacaucagggggaguguuauuaucacuauaugugucagcuucacugucauacuuauuauauucggauauauugcuaaaauuuucacaaacagaaauaacugcaccaacaaugccauuggauugugcaaacgcaucaaauguucaggcugugaaccuuucugcaacaaaaggggugacacuucuucucccagaaccggaguggacauacccucguuuaucuugcccgggcucgaccuuucagaaagcacuccuaauuagcccucauagauucggagaaaccaaaggaaacucagcucccuugauaauaagggaaccuuuuauugcuuguggaccaaaggaaugcaaacacuuugcucuaacccauuaugcagcccaaccagggggauacuacaauggaacaagagaagacagaaacaagcugaggcaucuaauuucagucaaauuaggcaaaauuccaacaguagaaaacuccauuuuccacauggcagcuuggagcggguccgcaugccaugaugguagagaauggacauauaucggaguugauggcccugacaguaaugcauugcucaaaauaaaauauggagaagcauauacugacacauaccauuccuaugcaaacaacauccuaagaacacaagaaagugccugcaauugcaucgggggaaauuguuaucuuaugauaacugauggcucagcuucagggauuagugaaugcagauuucucaagauucgagagggccgaauaauaaaagaaauauuuccaacaggaagaguagaacauacugaagaaugcacaugcggauuugccagcaauaaaaccauagaaugugccuguagagauaacaguuacacagcaaaaagacccuuugucaaauuaaauguggagacugauacagcagaaauaagauugaugugcacagagacuuauuuggacacccccagaccagaugauggaagcauaacagggccuugugaaucuaauggggauaaagggagugggggcaucaagggaggauuuguucaucaaagaauggcauccaagauuggaaggugguacucucgaacgauguccaaaacuaaaaggauggggaugggacuauaugucaaguaugauggagacccauggacugacagugaugcccuugcucuuaguggaguaaugguuucaauggaagaaccugguugguauuccuuuggcuucgaaauaaaagauaagaaaugugauguccccuguauugggauagagaugguacaugaugguggaaagaggacuuggcacucagcagcaacagccauuuacuguuuaaugggcucaggacaacuacuaugggacacugucacagguguugacauggcucuguaa

SEQ ID NO: 60665 - RNA, 1401 nt, Artificial Sequence
  derived and/or modified CDS sequence (wt) from neuraminidase__InfluenzaB__ABL77028
augcuaccuucaacuauacaaacguuaacccuauuccucacaucagggggaguguuauuaucacuauaugugucagcuucacugucauacuuacuauauucggauauauugcuaaaauuuucaccaacagaaauaacugcaccaacaaugccacuggauugugcaaacgcaucaaauguucaggcugugaaccguucugcaacaaaaggggugacacuucuucucccagaaccggaguggacauacccgcguuuaucuugcccgggcucaaccuuucagaaagcacuccuaauuagcccucauagauucggagaaaccaaaggaaacucagcucccuugauaauaagggaaccuuuuauugcuuguggaccaaaggaaugcaaacacuuugcucuaacccauuaugcagcccaaccagggggauacuacaauggaacaagagaagacagaaacaagcugaggcaucuaauuucagucaaauugggcaaaaucccaacaguagaaaacuccauuuuccacauggcagcauggagcggguccgcaugccaugaugguaaagaauggacauauaucggaguugauggcccugacaguaaugcauugcucaaaauaaaauauggagaagcauauacugacacauaccauuccuaugcaaacaacauccuaagaacacaagaaagugccugcaauugcaucgggggaaauuguuaucuuaugauaacugauggcucagcuucagguauuagugaaugcagauuucuuaagauucgagagggccgaauaauaaaagaaauauuuccaacaggaagaguagaacauacugaagaaugcacaugcggauuugccagcaauaaaaccauagaaugugccuguagagauaacaguuacacagcaaaaagacccuuugucaaauuaaauguggagacugauacagcagaaauaagauuaaugugcacagagacuuauuuggacacccccagaccagaugauggaagcauaacagggccuugugaaucuaauggggauaaagggaguggaggcaucaagggaggauuuguucaucaaagaauggcauccaagauuggaaggugguacucucgaacaaugucuaaaacuaaaaggauggggaugggacuguaugucaaguaugauggagacccauggacugacagugaugcccuugcucuuaguggaguaaugguuucaauggaagaaccugguugguacuccuuuggcuucgaaauaaaagauaagaaaugugauguccccuguauugggauagagaugguacaugaugguggaaaggagacuuggcacucagcagcaacagccauuuacuguuuaaugggcucaggacaacuguuaugggacacugucacagguguugauauggcucuguaa

SEQ ID NO: 60666 - RNA, 1401 nt, Artificial Sequence
  derived and/or modified CDS sequence (wt) from neuraminidase__InfluenzaB__ABL77039
augcuaccuucaacuauacaaacauuaacccuauuucucacaucagggggaguguuauuaucacuauaugugucagcuucacugucauacuuacuauauucggauauauugcuaaaauuuucaccaacagaaacaacugcaccaacaaugccauuagauugugcaaacgcaucaaauguucaggcugugaacuguucugcaacaaaaggggugacacuucuucucccagaaccggaguggacauacccgcguuuaucuugcccgggcucaaccuuucagaaagcacuccuaauuagcccucauagauucggagaaaccaaaggaaacucagcucccuugauaauaagggaaccuuuuauugcuuguggaccaaaggaaugcaaacacuuugcucuaacccauuaugcagcccaaccagggggauacuacaauggaacaagagaagacagaaacaagcugaggcaucuaauuucagucaaauugggcaaaaucccaacaguagaaaacuccauuuuccacauggcagcauggagcggguccgcaugccaugaugguaaagaauggacauauaucggaguugauggcccugacaguaaugcauugcucaaaauaaaauauggagaagcauauacugacacauaccauuccuaugcaaacaacauccuaagaacacaagaaagugccugcaauugcaucgggggaaauuguuaucuuaugauaacugauggcucagcuucagguauuagugaaugcagauuucuuaagauucgagagggccgaauaauaaaagaaauauuuccaacaggaagaguagaacauacugaagaaugcacaugcggauuugccagcaauaaaaccauagaaugugccuguagagauaacaguuacacagcaaaaagacccuuugucaaauuaaauguggagacugauacagcggaaauaagauugauguguacagagacuuauuuggacacccccagaccagaugauggaagcauaacagggccuugugaaucuaauggggauaaagggaguggaggcaucaagggaggauuuguucaucaaagaauggcauccaagauuggaaggugguacucucgaacgaugucuaaaacuaaaaggauggggaugggacuguaugucaaguaugauggagacccauggacugacagugaugcccuugcucuuaguggaguaaugguuucaauggaagaaccugguugguacuccuuuggcuucgaaauaaaagauaagaaaugugauguccccuguauugggauagagaugguacaugaugguggaaaggagacuuggcacucagcagcaacagccauuuacuguuuaaugggcucaggacaacugcuaugggacacugucacagguguugauauggcucuguaa

SEQ ID NO: 60667 - RNA, 1401 nt, Artificial Sequence
  derived and/or modified CDS sequence (wt) from neuraminidase__InfluenzaB__ABL77050
augcuacccucaacuauacaaacguuaacccuauuccucacaucagggggaguguuauuaucacuauaugugucagcuucacugucauacuuacuauauucggauauauugcuaaaauuuucaccaacagaaauaacugcaccagcaaugcccuuggauugugcaaacgcaucaaauguucaggcugugaaccguucugcaacaaaaggggugacacuucuucucccagaaccggaguggacauacccgcguuuaucuugcccgggcucaaccuuucagaaagcacuccuaauuagcccucauagauucggagaaaccaaaggaaacucagcucccuugauaauaagggaaccuuuuauugcuuguggaccaaaggaaugcaaacacuuugcucuaacccauuaugcagcccaaccagggggauacuacaauggaacaagagaagacagaaacaagcuaaggcaucuaauuucagucaaauuggguaaaaucccaacaguagaaaacuccauuuuccacauggcagcauggagcggguccgcaugccaugaugguaaagaauggacauauaucggaguugauggcccugacaguaaugcauugcucaaaauaaaauauggagaagcauauacugacacauaccauuccuaugcaaacaacauccuaagaacacaagaaagugccugcaauugcaucgggggaaauuguuaucuuaugauaacugauggcucagcuucagguauuagugagugcagauuucuuaagauucgagagggccgaauaauaaaagaaauauuuccaacaggaagaguaaaacauacugaagaaugcacaugcggauuugccagcaauaaaaccauagaaugugccuguagagauaacaguuacacagcaaaaagacccuuugucaaauuaaauguggagacugauacagcagaaauaagauugaugugcacagagacuuauuuggacacccccagaccagaugauggaagcauaacagggccuugugaaucuaauggggauaaagggaguggaggcaucaagggaggauuuguucaucaaagaauggcauccaagauuggaaggugguacucucgaacaaugucuaaaacuaaaaggauggggaugggacuguaugucaaguaugauggagacccauggacugacagugaugcccuugcucuuaguggaguaaugguuucaauggaagaaccugguugguacuccuuuggcuucgaaauaaaagauaagaaaugugauguccccuguauugggauagagaugguacaugaugguggaaaggagacuuggcacucagcagcaacagccauuuacuguuuaaugggcucaggacaacugcuaugggacacugucacagguguugauauggcucuguaa

SEQ ID NO: 60668 - RNA, 1401 nt, Artificial Sequence
  derived and/or modified CDS sequence (wt) from neuraminidase__InfluenzaB__ABL77072
augcuacccucaacuauacaaacguuaacccuauuucucacaucagggggaguguuauuaucacuauaugugucagccuuacugucauacuuacuguauucggauauauugcuaaaauuuucaccaacaaaaauaauugcaccaacaacgucguuggacuccgcgaacgcaucaaauuuucaggccgugaaccauucugcaacaaaagagaugacauuucuucucccagaaccggaguggacauacccucguuuaucuugccaggguucaaccuuucaaaaagcacuccuaauuagcccucauagauucggagaagccaaaggaaacucagcucccuugauaauaagggaaccuuuuauugcuuguggaccaaaggaguguaaacacuuugcucuaacccauuaugcagcucaaccagggggauacuacaauggaacaagagaggacagaaacaagcugaggcaucugauuucagucaacuuaggcaaaauaccaacuguagaaaacuccauuuuccacauggcagcuuggaguggguccgcaugccaugaugguagagaauggacuuauaucggaguugauggcccugacaguaaugcauugaucaaaauaaaauauggagaagcauacacugacacauaccauuccuaugcaaacaacauccuaagaacacaagaaagugccugcaacugcaucgggggagauuguuaucuuaugauaacugauggcucagcuucaggaauuaguaaaugcagauuccuuaagauucgagagggucgaauaauaaaagaaauauuuccaacaggaagaguagagcauacugaagaaugcacaugcggauuugccagcaauaaaaccauagaaugugccuguagagauaacaguuacacagcaaaaagacccuuugucaaauuaaauguggaaacugauacagcagaaauaagauugaugugcacagagacuuauuuggacacccccagaccagaugauggaagcauaacagggccuugcgaaucuaauggggacaaagggaguggagguaucaagggaggauuuguccaucaaagaauggcauccaagauuggaagaugguacucucgaacgaugucuaaaacuaaaagaauggggauggaacuguaugucaaguaugauggagacccauggacugacagugaugcccuugcuccuaguggaguaauggucucaauaaaagaaucugguugguauucuuucggcuucgaaauaaaagauaagaaaugcgauguccccuguauugggauagagaugguacacgaugguggaaaaacaacuuggcacucagcagcaacagccauuuacuguuuaaugggcucaggacaguugcuaugggacacugucacagguguugauauggcucuguaa

SEQ ID NO: 60669 - RNA, 1401 nt, Artificial Sequence
  derived and/or modified CDS sequence (wt) from neuraminidase__InfluenzaB__ABL77083
augcuacccucaacuauacaaacguuaacccuauuucucacaucagggggaguguuauuaucacuauaugugucagccuuacugucauacuuacuguauucggauauauugcuaaaauuuucaccaacaaaaauaauugcaccaacaacgucguuggacuccgcgaacgcaucaaauuuucaagccgugaaccauucugcaacaaaagagaugacauuucuucucccagaaccggaguggacauacccucguuuaucuugccaggguucaaccuuucaaaaagcacuccuaauuagcccucauagauucggagaagccaaaggaaacucagcucccuugauaauaagggaaccuuuuauugcuuguggaccaaaggaguguaaacacuuugcucuaacccauuaugcagcucaaccagggggauacuacaauggaacaagagaggacagaaacaagcugaggcaucugauuucagucaacuuaggcaaaauaccaacuguagaaaacuccauuuuccacauggcagcuuggaguggguccgcaugccaugaugguagagaauggacuuauaucggaguugauggcccugacaguaaugcauugaucaaaauaaaauauggagaagcauacacugacacauaccauuccuaugcaaacaacauccuaagaacacaagaaagugccugcaacugcaucgggggagauuguuaucuuaugauaacugauggcucagcuucaggaauuaguaaaugcagauuccuuaagauucgagagggucgaauaauaaaagaaauauuuccaacaggaagaguagagcauacugaagaaugcacaugcggauuugccagcaauaaaaccauagaaugugccuguagagauaacaguuacacagcaaaaagacccuuugucaaauuaaauguggaaacugauacagcagaaauaagauuaaugugcacagagacuuauuuggacacccccagaccagaugauggaagcauaacagggccuugcgaaucuaauggggacaaagggaguggagguaucaagggaggauuuguccaucaaagaauggcauccaagauuggaagaugguacucucgaacgaugucuaaaacuaaaagaauggggauggaacuguaugucaaguaugauggagacccauggacugacagugaugcccuugcuccuaguggaguaauggucucaauagaagaaccugguugguauucuuucggcuucgaaauaaaagauaagaaaugcgauguccccuguauugggauagagaugguacacgaugguggaaaaacaacuuggcacucagcagcaacagccauuuacuguuuaaugggcucaggacaguugcuaugggacacugucacagguguugauauggcucuguaa

SEQ ID NO: 60670 - RNA, 1401 nt, Artificial Sequence
  derived and/or modified CDS sequence (wt) from neuraminidase__InfluenzaB__ABL77094
augcuacccucaacuauacaaacguuaacccuauuucucacaucagggggaguguuauuaucacuauaugugucagccuuacugucauacuuacuguauucggauauauugcuaaaauuuucaccaacaaaaauaauugcaccaacaacgucguuggacuccgcgaacgcaucaaauuuucaggccgugaaccauucugcaacaaaagagaugacauuucuucucccagaaccggaguggacauacccucguuuaucuugccaggguucaaccuuucaaaaagcacuccuaauuagcccucauagauucggagaagccaaaggaaacucagcucccuugauaauaagggaaccuuuuauugcuuguggaccaaaggaguguaaacacuuugcucuaacccauuaugcagcucaaccagggggauacuacaauggaacaagagaggacagaaacaagcugaggcaucugauuucagucaacuuaggcaaaauaccaacuguagaaaacuccauuuuccacauggcagcuuggaguggguccgcaugccaugaugguagagaauggacuuauaucggaguugauggcccugacaguaaugcauugaucaaaauaaaauauggagaagcauacacugacacauaccauuccuaugcaaacaacauccuaagaacacaagaaagugccugcaacugcaucgggggagauuguuaucuuaugauaacugauggcucagcuucaggaauuaguaaaugcagauuucuuaagauucgagagggucgaauaauaaaagaaauauuuccaacaggaagaguagagcauacugaagaaugcacaugcggauuugccagcaauaaaaccauagaaugugccuguagagauaacaguuacacagcaaaaagacccuuugucaaauuaaauguggaaacugauacagcagaaauaagauugaugugcacagagacuuauuuggacacccccagaccagaugauggaagcauaacagggccuugcgaaucuaauggggacaaagggaguggagguaucaagggaggauuuguccaucaaagaauggcauccaaaauuggaagaugguacucucgaacgaugucuaaaacuaaaagaauggggauggaacuguaugucaaguaugauggagacccauggacugacagugaugcccuugcuccuaguggaguaauggucucaauagaagaaccugguugguauucuuucggcuucgaaauaaaagauaagaaaugcgauguccccuguauugggauagagaugguacacgaugguggaaaaacaacuuggcacucagcagcaacagccauuuacuguuuaaugggcucaggacaguugcuaugggacacugucacagguguugauauggcucuguaa

SEQ ID NO: 60671 - RNA, 1401 nt, Artificial Sequence
  derived and/or modified CDS sequence (wt) from neuraminidase__InfluenzaB__ABL77105
augcuaccuucaacuauacaaacguuaacccuauuccucacaucagggggaguguuauuaucacuauaugugucagcuucacugucauacuuacuauauucggauauauugcuaaaauuuucaucaacagaaauaacggcaccaacaaugccauuggauugugcaaacgcaucaaauguucaagcugugaaccguucugcaacagaaggggugacacuucuucucccagaaccggaguggacauacccgcguuuaucuugcccgggcucaaccuuucagaaagcacuccuaauuagcccucauagauucggagaaaccaaaggaaacucagcucccuugauaauaagggaaccuuuuauugcuuguggaccaaaggaaugcaaacacuuugcucuaacccauuaugcagcccaaccagggggauacuacaauggaacaagagaagacagaaacaagcugaggcaucuaauuucagucaaauugggcaaaaucccaacaguagaaaacuccauuuuccacauggcagcauggagcggguccgcaugccaugaugguaaagaauggacauauaucggaguugauggcccugacaguaaugcacugcucaaaauaaaauauggagaagcauauacugacacauaccauuccuaugcaaacaacauccuaagaacacaagaaagugccugcaauugcaucgggggaaauuguuaucuuaugauaacugauggcucagcuucagguauuagugaaugcagauuucuuaagauucgagagggccgaauaauaaaagaaauauuuccaacaggaagaguagaacauacugaagaaugcacauguggauuugcuagcaauaaaaccauagaaugugccuguagagauaacaguuacacagcaaaaagacccuuugucaaauuaaauguggagacugauacagcagaaauaagauugaugugcacagagacuuauuuggacacccccagaccagaugauggaagcauaacagggccuugugaaucuaauggggauaaagggaguggaggcaucaagggaggauuuguucaucaaagaauggcauccaagauuggaaggugguacucucgaacaaugucuaaaacuaaaaggauggggaugggacuguaugucaaguaugauggagacccauggacugacagugaugcccuugcucuuaguggaguaaugguuucaauggaagaaccugguugguacuccuucggcuucgaaauaaaagauaagaaaugugauguccccuguauugggauagagaugguacaugaugguggaaaggagacuuggcauucagcagcaacagccauuuacuguuuaaugggcucaggacaacugcuaugggacaccgucacagguguugauauggcucuguaa

SEQ ID NO: 60672 - RNA, 1401 nt, Artificial Sequence
  derived and/or modified CDS sequence (wt) from neuraminidase__InfluenzaB__ABL77127
augcuacccucaacuauacaaacguuaacccuauuucucacaucagggggaguguuauuaucacuauaugugucagccuuacugucauacuuacuguauucggauauauugcuaaaauuuucaccaacaaaaauaauugcaccaacaacgucguuggacuccgcgaacgcaucaaauuuucaggccgugaaccauucugcaacaaaagagaugacauuucuucucccagaaccggaguggacauacccucguuuaucuugccaggguucaaccuuucaaaaagcacuccuaauuagcccucauagauucggagaagccaaaggaaacucagcucccuugauaauaagggaaccuuuuauugcuuguggaccaaaggaguguaaacacuuugcucuaacccauuaugcagcucaaccagggggauacuacaauggaacaagagaggacagaaacaagcugaggcaucugauuucagucaacuuaggcaaaauaccaacuguagaaaacuccauuuuccacauggcagcuuggaguggguccgcaugccaugaugguagagaauggacuuauaucggaguugauggcccugacaguaaugcauugaucaaaauaaaauauggagaagcauacacugacacauaccauuccuaugcaaacaacauccuaagaacacaagaaagugccugcaacugcaucgggggagauuguuaucuuaugauaacugauggcucagcuucaggaauuaguaaaugcagauuccuuaagauucgagagggucgaauaauaaaagaaauauuuccaacaggaagaguagagcauacugaagaaugcacaugcggauuugccagcaauaaaaccauagaaugugccuguagagauaacaguuacacagcaaaaagacccuuugucaaauuaaauguggaaacugauacagcagaaauaagauuaaugugcacagagacuuauuuggacacccccagaccagaugauggaagcauaacagggccuugcgaaucuaauggggacaaagggaguggagguaucaagggaggauuuguccaucaaagaauggcauccaagauuggaagaugguacucucgaacgaugucuaaaacuaaaagaauggggauggaacuauaugucaaguaugauggagacccauggacugacagugaugcccuugcuccuaguggaguaauggucucaauagaagaaccugguugguauucuuucggcuucgaaauaaaagauaagaaaugcgauguccccuguauugggauagagaugguacacgaugguggaaaaacaacuuggcacucagcagcaacagccauuuacuguuuaaugggcucaggacaguugcuaugggacacugucacagguguugauauggcucuguaa

SEQ ID NO: 60673 - RNA, 1401 nt, Artificial Sequence
  derived and/or modified CDS sequence (wt) from neuraminidase__InfluenzaB__ABL77138
augcuacccucaacuauacaaacguuaacccuauuucucacaucagggggaguguuauuaucacuauaugugucagccuuacugucauacuuacuguauucggauauauugcuaaaauuuucaccaacaaaaauaauugcaccaacaacgucguuggacuccgcgaacgcaucaaauuuucaggccgugaaccauucugcaacaaaagagaugacauuucuucucccagaaccggaguggacauacccucguuuaucuugccaggguucaaccuuucaaaaagcacuccuaauuagcccucauagauucggagaagccaaaggaaacucagcucccuugauaauaagggaaccuuuuauugcuuguggaccaaaggaguguaaacacuuugcucuaacccauuaugcagcucaaccagggggauacuacaauggaacaagagaggacagaaacaagcugaggcaucugauuucagucaacuuaggcaaaauaccaacuguagaaaacuccauuuuccacauggcagcuuggaguggguccgcaugccaugaugguagagaauggacuuauaucggaguugauggcccugacaguaaugcauugaucaaaauaaaauauggagaagcauacacugacacauaccauuccuaugcaaacaacauccuaagaacacaagaaagugccugcaacugcaucgggggagauuguuaucuuaugauaacugauggcucagcuucaggaauuaguaaaugcagauuccuuaagauucgagagggucgaauaauaaaagaaauauuuccaacaggaagaguagagcauacugaagaaugcacaugcggauuugccagcaauaaaaccauagaaugugccuguagagauaacaguuacacagcaaaaagacccuuugucaaauuaaauguggaaacugauacagcagaaauaagauugaugugcacagagacuuauuuggacacccccagaccagaugauggaagcauaacagggccuugcgaaucuaauggggacaaagggaguggagguaucaagggaggauuuguccaucaaagaauggcauccaagauuggaagaugguacucucgaacgaugucuaaaacuaaaagaaugggaauggaacuguaugucaaguaugauggagacccauggacugacagugaugcccuugcuccuaguggaguaauggucucaauagaagaaccugguugguauucuuucggcuucgaaauaaaagauaagaaaugcgauguccccuguauugggauagagaugguacacgaugguggaaaaacaacuugguacucagcagcaacagccauuuacuguuuaaugggcucaggacaguugcuaugggacacugucacagguguugauauggcucuguaa

SEQ ID NO: 60674 - RNA, 1401 nt, Artificial Sequence; identical to SEQ ID NO: 60672
  derived and/or modified CDS sequence (wt) from neuraminidase__InfluenzaB__ABL77149

SEQ ID NO: 60675 - RNA, 1401 nt, Artificial Sequence
  derived and/or modified CDS sequence (wt) from neuraminidase__InfluenzaB__ABL77160
augcuaccuucaacuauacaaacguuaacccuauuucucacaucagggggaguguuauuaucacuauaugugucagcuucacugucauacuuacuauauucggauauauugcuaaaauuuucacaaacaaaaauaacugcaccaacaaugccauuggauugugcaaacgcaucaaauguucaggcugugaaccguucugcaacaaaaggggugacacuucuucucccagaaccggaguggacguacccucguuuaucuugcccgggcucaaccuuucagaaagcacuccuaauuagcccccauagauucggagaaaccaaaggaaacucagcucccuugauaauaagggaaccuuuuauugcuuguggaccaaaggaaugcaaacacuuugcucuaacccauuaugcagcucaaccagggggauacuacaauggaacaagagaagacagaaacaagcugaggcaucuaauuucagucaaauugggcaaaaucccaacaguagaaaacucuauuuuccacauggcugcuuggagcggguccgcaugccaugaugguagagaauggacauauaucggaguugauggccccgacaguaaugcauugcucaaaauaaaauauggagaagcauauacugacacauaccauuccuaugcaaaaaacauccuaaggacacaagaaagugccugcaauugcaucgggggagauuguuaucuuaugauaacugauggcucagcuucggggauuagugaaugcagauuccuuaagauucgagagggccgaauaauaaaagaaauauuuccaacaggaagaguaaaacauacugaagaaugcacaugcggauuugccagcaacaaaaccauagaaugugccuguagagauaacaguuacacagcaaaaagacccuuugucaaauuaaauguggagacugauacagcggaaauaagauugaugugcacagagacuuauuuggacacccccagaccaaaugauggaagcauaacagggccuugcgaaucugauggggacagggggaguggaggcaucaagggaggauuuguucaucaaagaauggaauccaagauuggaaggugguacucucgaacgaugucuaaaacuaaaagaauggggaugggacuguaugucaaguaugauggagacccauggacugacagugaagcccuugcucuuaguggaguaaugguuucaauggaagaaccugguugguauuccuuuggcuucgaaauaaaagauaagaaaugugauguccccuguauugggauagaaaugguacaugauggugggaaaacgacuuggcacucagcagcaacaaccauuuacuguuuaaugggcucaggacaauugcugugggacacugucacagguguugauauggcucuguaa

SEQ ID NO: 60676 - RNA, 1401 nt, Artificial Sequence
  derived and/or modified CDS sequence (wt) from neuraminidase__InfluenzaB__ABL77171
augcuaccuucaacuauacaaacguuaacccuauuucucacaucagggggaguauuauuaucacuauaugugucagcuucauugucauacuuacuauauucggauauauugcuaaaauucucaccaacagaaauaacugcaccaacaaugccauuggauugugcaaacgcaucaaauguucaggcugugaaccguucugcaacaaaaggggugacacuucuucucccagaaccagaguggacauacccgcguuuaucuugcccgggcucaaccuuucagaaagcacuccuaauuagcccucauagauucggagaaaccaaaggaaacucagcucccuugauaauaagggaaccuuuuauugcuuguggaccaaaggaaugcaaacacuuugcucuaacccauuaugcagcccaaccagggggauacuacaauggaacaagaggagacagaaacaagcugaggcaucuaauuucagucaaauugggcaaaaucccaacaguagaaaacuccauuuuccacauggcagcauggagcggguccgcaugccaugaugguaaagaauggacauauaucggaguugauggcccugacaauaaugcauugcucaaaauaaaauauggagaagcauauacugacacauaccauuccuaugcaaacaacauccuaagaacacaagaaagugccugcaauugcaucgggggaaauuguuaucuuaugauaacugauggcucagcuucagguauuagugaaugcagauuucuuaaaauucgagagggccgaauaauaaaagaaauauuuccaacaggaagaguaaaacauacugaagaaugcacaugcggauuugccagcaauaagaccauagaaugugccuguagagauaacaguuacacagcaaaaagacccuuugucaaauuaaacguggagacugauacagcagaaauaagauugaugugcacagagacuuauuuggacacccccagaccagaugauggaagcauaacagggccuugugaaucuaauggggacaaagggaguggaggcaucaagggaggauuuguucaucaaagaauggcauccaagauuggaaggugguacucucgaacgaugucuaaaacuaaaaggauggggaugggacuguaugucaaguaugauggagacccaugggcugacagugaugcccuugcucuuaguggaguaaugguuucaauggaagaaccugguugguacuccuuuggcuucgaaauaaaagauaagaaaugugauguccccuguauuggaauagagaugguacaugaugguggaaaagagacuuggcacucagcagcaacagccauuuacuguuuaaugggcucaggacagcugcugugggacacugucacagguguugauauggcucuguaa

SEQ ID NO: 60677 - RNA, 1401 nt, Artificial Sequence
  derived and/or modified CDS sequence (wt) from neuraminidase__InfluenzaB__ABL77182
augcuacccucaacuauacaaacauuaacccuauuucucacaucagggggaguguuauuaucacuauaugugucagccuuacugucauacuuacuguauucggauauauugcuaaaauuuucaccaacaaaaauaauugcaccaacaacgucguuggacuccgcgaacgcaucaaauuuucaggccgugaaccauucugcaacaaaagagaugacauuucuucucccagaaccggaguggacauacccucguuuaucuugccaggguucaaccuuucaaaaagcacuccuaauuagcccucauagauucggagaagccaaaggaaacucagcucccuugauaauaagggaaccuuuuauugcuuguggaccaaaggaguguaaacacuuugcucuaacccauuaugcagcucaaccagggggauacuacaauggaacaagagaggacagaaacaagcugaggcaucugauuucagucaacuuaggcaaaauaccaacuguagaaaacuccauuuuccacauggcagcuuggaguggguccgcaugccaugaugguagagaguggacuuauaucggaguugauggcccugacaguaaugcauugaucaaaauaaaauauggagaagcauacacugacacauaccauuccuaugcaaacaacauccuaagaacacaagaaagugccugcaacugcaucgggggagauuguuaucuuaugauaacugauggcucagcuucaggaauuaguaaaugcagauuccuuaagauucgagagggucgaauaguaaaagaaauauuuccaacaggaagaguagagcauacugaagaaugcacaugcggauuugccagcaauaaaaccauagaaugugccuguagagauaacaguuacacagcaaaaagacccuuugucaaauuaaauguggaaacugauacagcagaaauaagauugaugugcacagagacuuauuuggacacccccagaccagaugauggaagcauaacagggccuugcgaaucuaauggggacaaagggaguggagguaucaagggaggauuuguccaucaaagaauggcauccaagauuggaagaugguacucucgaacgaugucuaaaacuaaaagaauggggauggaacuguaugucaaguaugauggagacccauggacugacagugaugcccuugcuccuaguggaguaauggucucaauagaagaaccugguugguauucuuucggcuucgaaauaaaagauaagaaaugcgauguccccuguauugggauagagaugguacacgaugguggaaaaacaacuuggcacucagcagcaacagccauuuacuguuuaaugggcucaggacaguugcuaugggacacuaucacagguguugauauggcucuguaa

SEQ ID NO: 60678 - RNA, 1401 nt, Artificial Sequence
  derived and/or modified CDS sequence (wt) from neuraminidase__InfluenzaB__ABL77193
augcuaccuucaacuauacaaacguuaacccuauuucucacaucagggggaguguuauuaucacuauaugugucagcuucacugucauacuuacuauauucggauauauugcuaaaauuuucacaaacagaaauaacugcaccaacaaugccauuggauugugcaaacgcaucaaauguucaggcugugaaccguucugcaacaaaaggggugacacuucuucucccagaaccggaguggacguacccucguuuaucuugcccgggcucaaccuuucagaaagcacuccuaauuagcccccauagauucggagaaaccaaaggaaacucagcucccuugauaauaagggaaccuuuuauugcuuguggaccaaaggaaugcaaacacuuugcucuaacccauuaugcagcucaaccagggggauacuacaauggaacaagagaagacagaaacaagcugaggcaucuaauuucagucaaauugggcaaaaucccaacaguagaaaacucuauuuuccacauggcagcuuggagcggguccgcaugccaugaugguagagaauggacauauaucggaguugauggccccgacaguaaugcauugcucaaaauaaaauauggagaagcauauacugacacauaccauuccuaugcaaaaaacauccuaaggacacaagaaagugccugcaauugcaucgggggagauuguuaucuuaugauaacugauggcucagcuucagggauuagugaaugcagauuccuuaagauucgagagggccgaauaauaaaagaaauauuuccaacaggaagaguaaaacauacugaagaaugcacaugcggauuugccagcaacaaaaccauagaaugugccuguagagauaacaguuacacagcaaaaagacccuuugucaaauuaaauguggagacugauacagcggaaauaagauugaugugcacagagacuuauuuggacacccccagaccaaaugauggaagcauaacagggccuugcgaaucuaauggggacaaagggaguggaggcaucaagggaggauuuguucaucaaagaauggcauccaagauuggaaggugguacucucgaacgaugucuaaaacuaaaagaauggggaugggacuguaugucaaguaugauggagacccauggacugacagugaagcccuugcucuuaguggaguaaugguuucaauggaagaaccugguugguauuccuuuggcuucgaaauaaaagauaagaaaugugauguccccuguauugggauagaaaugguacaugauggugggaaaacgacuuggcacucagcagcaacagccauuuacuguuuaaugggcucaggacaacugcugugggacacugucacagguguugauauggcuuuguaa

SEQ ID NO: 60679 - RNA, 1401 nt, Artificial Sequence
  derived and/or modified CDS sequence (wt) from neuraminidase__InfluenzaB__ABL77204
augcuaccuucaacuauacaaacguuaacccuauuucucacaucagggggaguauuauuaucacuauaugugucagcuucauugucauacuuacuauauucggauauauugcuaaaauucucaccaacagaaauaacugcaccaacaaugccauuggauugugcaaacgcaucaaauguucaggcugugaaccguucugcaacaaaaggggugacacuucuuaucccagaaccggaguggacauacccgcguuuaucuugcccgggcucaaccuuucagaaagcacuccuaauuagcccucauagauucggagaaaccaaaggaaacucagcucccuugauaauaagggaaccuuuuauugcuuguggaccaaaggaaugcaaacacuuugcucuaacccauuaugcagcccaaccagggggauacuacaauggaacaagaggagacagaaacaagcugaggcaucuaauuucagucaaauugggcaaaaucccaacaguagaaaacuccauuuuccacauggcagcauggagcggguccgcaugccaugaugguaaggaauggacauauaucggaguugauggcccugacaauagugcauugcucaaaauaaaauauggagaagcauauacugacacauaccauuccuaugcaaacaacauccuaagaacacaagaaagugccugcaauugcaucgggggaaauuguuaucuuaugauaacugauggcucagcuucagguguuagugaaugcagauuucuuaagauucgagagggccgaauaauaaaagaaauauuuccaacaggaagaguaaaacauacugaagaaugcacaugcggauuugccagcaauaaaaccauagaaugugccuguagagauaacaguuacacagcaaaaagacccuuugucaaauuaaacguggaaacugauacagcagaaauaagauugaugugcacagagacuuauuuggacacccccagaccagaugauggaagcauaacagggccuugugaaucuaauggggacaaagggaguggaggcaucaaaggaggauuuguucaucaaagaauggcauccaaaauuggaaggugguacucucgaacgaugucuaaaacuaaaaggauggggaugggacuguaugucaaguaugauggagacccaugggcugacagugaugcccuugcucuuaguggaguaaugguuucaauggaagaaccugguugguacuccuuuggcuucgaaauaaaagauaagaaaugugauguccccuguauugggauagagaugguacaugaugguggaaaagagacuuggcacucagcagcaacagccauuuacuguuuaaugggcucaggacagcugcugugggacacugucacagguguugauauggcucuguaa

SEQ ID NO: 60680 - RNA, 1401 nt, Artificial Sequence
  derived and/or modified CDS sequence (wt) from neuraminidase__InfluenzaB__ABL77215
augcuaccuucaacuauacaaacguuaacccuauuucucacaucagggggaguauuauuaucacuauaugugucagcuucauugucauacuuacuauauucggauauauugcuaaaauucccaucaacagaaauuacugcaccaacaaugccauuggauugugcaaacgcaucaaauguucaggcugugaaccguucugcaacaaaaggggugacacuucuucucccagaaccggaguggacauacccgcguuuaucuugcccgggcucaaccuuucagaaagcacuccuaauuagcccucauagauucggagaaaccaaaggaaacucagcucccuugauaauaagggaaccuuuuauugcuuguggaccaaaggaaugcaaacacuuugcucuaacccacuaugcagcccaaccagggggauacuacaauggaacaagaggagacagaaacaagcugaggcaucuaauuucagucaaauugggcaaaaucccaacaguagaaaacuccauuuuccacauggcagcauggagcggguccgcaugccaugaugguaaggaauggacauauaucggaguugauggcccugacaauaaugcauugcucaaaauaaaauauggagaagcauauacugacacauaccauuccuaugcaaacaacauccuaagaacacaagaaagugccugcaauugcaucgggggaaauuguuaucuuaugauaacugauggcucagcuucagguguuagugaaugcagauuucuuaagauucgagagggccgaauaauaaaagaaauauuuccaacaggaagaauaaaacauacugaagaaugcacaugcggauuugcuagcaauaaaaccauagaaugugccuguagagauaacaguuacacagcaaaaagacccuuugucaaauuaaacguggagacugauacagcagaaauaagauugaugugcacagagacuuauuuggacacccccagaccagaugauggaagcauaacagggccuugugaaucuaauggggacaaagggaguggaggcaucaagggaggauuuguccaucaaagaauggcauccaagauuggaaggugguacucucgaacgaugucuaaaacuaaaaggauggggauggggcuguaugucaaguaugauggagacccaugggcugacagugaugcccuugcuuuuaguggaguaaugguuucaauggaagaaccugguugguacuccuuuggcuucgaaauaaaagacaagaaaugugauguccccuguauugggauagagaugguacaugaugguggaaaagagacuuggcacucagcagcuacagccauuuacuguuuaaugggcucaggacagcugcugugggacacugucacagguguuaauauggcucuguaa

SEQ ID NO: 60681 - RNA, 1401 nt, Artificial Sequence; identical to SEQ ID NO: 60639
  derived and/or modified CDS sequence (wt) from neuraminidase__InfluenzaB__ABL77226

SEQ ID NO: 60682 - RNA, 1401 nt, Artificial Sequence
  derived and/or modified CDS sequence (wt) from neuraminidase__InfluenzaB__ABL77237
augcuaccuucaacuauacaaacguuaacccuauuucucacaucagggggaguauuauuaucacuauaugugucagcuucauuaucauacuuacuauauucggauauauugcuaaaauucucaccaacagaaauaacugcaccaacaaugccauuggauugugcaaacgcaucaaauguucaggcugugaaccguucugcaacaaaaggggugacacuucuucucccagaaccggaguggacauacccgcguuuaucuugcccgggcucaaccuuucagaaagcacuccuaauuagcccucauagauucggagaaaccaaaggaaacucagcucccuugauaauaagggaaccuuuuauugcuuguggaccaaaugaaugcaaacacuuugcucuaacccauuaugcagcccaaccagggggauacuacaauggaacaagaggagacagaaacaagcugaggcaucuaauuucagucaaauugggcaaaaucccaacaguagaaaacuccauuuuccacauggcagcauggagcggguccgcaugccaugaugguaaggaauggacauauaucggaguugauggcccugacaauaaugcauugcucaaaauaaaauauggagaagcauauacugacacauaccauuccuaugcaaacaacauccuaagaacacaagaaagugccugcaauugcaucgggggaaauuguuaucuuaugauaacugauggcucagcuucagguguuagugaaugcagauuucuuaagauucgagagggccgaauaauaaaagaaauauuuccaacaggaagaguaaaacauacugaggaaugcacaugcggauuugccagcaauaaaaccauagaaugugccuguagagauaacaguuacacagcaaaaagacccuuugucaaauuaaacguggagacugauacagcagaaauaagauugaugugcacagauacuuauuuggacacccccagaccagaugauggaagcauaacaggcccuugugaaucuaauggggacaaagggaguggaggcauaaagggaggauuuguucaucaaagaauggcauccaagauuggaaggugguacucucgaacgaugucuaaaacugaaaggauggggaugggacuguaugucaaguaugauggagacccaugggcugacagugaugcccuugcuuuuaguggaguaaugguuucaaugaaagaaccugguugguacuccuuuggcuucgaaauaaaagauaagaaaugcgauguccccuguauugggauagagaugguacaugaugguggaaaagagacuuggcacucagcagcaacagccauuuacuguuuaaugggcucaggacagcugcugugggacacugucacagguguugacauggcucuguaa

SEQ ID NO: 60683 - RNA, 1401 nt, Artificial Sequence
  derived and/or modified CDS sequence (wt) from neuraminidase__InfluenzaB__ABL77248
augcuaccuucaacuauacaaacguuaacccuauuucucacaucagggggaguguuauuaucacuauaugugucagccuuacugucauacuuacuguauucggauauauugcuaaaauuuucaccaacaaaaauaauugcaccaacaaugucauuggacugcgcgaacgcaucaaauguucaggcugcgaaccauucugcaacaaaagagaugacauuucuucucccagaaccggaauggacauacccucguuuaucuugccagggcucaaccuuucagaaagcacuccuaauuagcccucauagauucggagaagccaaaggaaacucagcucccuugauaauaagggaaccuuuuauugcuuguggaccaaaggagugcaaacacuuugcucuaacccauuaugcagcucaaccagggggauacuacaauggaacaagagaggacagaaacaagcugaggcaucugauuucagucaacuuaggcaaaaucccaacuguagaaaacuccauuuuccacauggcagcuuggaguggauccgcaugccaugaugguagagaauggacauauaucggaguugauggcccugacaguaaugcauugaucaaaauaaaauauggagaagcauacacugacacauaccauuccuaugcaaacaacauccuaagaacacaagaaagugccugcaauugcaucgggggagauuguuaucuuaugauaacugauggcucagcuucaggaauuaguaaaugcagauuucuuaagauucgagagggucgaauaauaaaagaaauauuuccaacaggaagaguagagcauacugaagaaugcacaugcggauuugccagcaauaaaaccauagaaugugccuguagagauaacaguuacacagcaaaaagacccuuugucaaauuaaauguggagacugauacagcugaaauaagauugaugugcacagagacuuauuuggacacccccagaccagaugauggaagcauaacagggccuugcgaaucuaauggggaaaaagggcguggagguaucaagggaggauuuguccaucaaagaauggcauccaagauuggaagaugguacucccgaacgaugucuaaaacugaaagaauggggauggaacuguaugucaaguaugauggagacccauggacugacagugacgcccuugcuccuaguggaguaauggucucaaugaaagaaccugguugguauucuuucggcuucgaaauaaaagauaagaaaugugauguccccuguauugggauagagaugguacacgaugguggaaaaaagacuuggcacucagcagcaacagccauuuacuguuuaaugggcucaggacaguugcuaugggacacugucacagguguugauauggcuuuguaa

SEQ ID NO: 60684 - RNA, 1401 nt, Artificial Sequence
  derived and/or modified CDS sequence (wt) from neuraminidase__InfluenzaB__ABL77259
augcuaccuucaacuauacaaacguuaacccuauuucucacaucagggggaguguuauuaucacuauaugugucagcuucacugucauacuuacuguauucggauauauugcuaaaauuuucaccaacagaaauaacugcaccaaaagugccauuggauugugcaaacgcaucaaauguucaggcugugaaccguucugcaacaaaagggaugacacuucuucucucagaaccggaguggacauacccucguuuaucuugccagggcucaaccuuucagaaagcacuccuaauuagcccucauagauucggagaaaccagaggaaacucagcucccuugauaauaagggaaccuuuuauugcuuguggaccaaaggaaugcaaacacuuugcucuaacccauuaugcagcucaaccagggggauacuacaauggaacaagagaggacagaaacaagcugaggcaucugauuucagucaaauugggcaaaaucccaacaguagaaaacuccauuuuccacauggcagcuuggagcggguccgcaugccaugaugguagagaauggacauauaucggaguugauggcccugacaguaaugcauugaucaaaauaaaauauggagaagcauauacugacacauaccauuccuaugcaaacaacauccuaagaacacaagaaagugccugcaauugcaucgggggagauuguuaucuuaugauaacugauggcucagcuucaggaauuaguaaaugcagauuucuuaagauucgagagggucgaauaauaaaagaaauauuuccaacaggaagaguagaacauacugaagaaugcacaugcggauuugccagcaauaaaaccauagaaugugccuguagagauaacaguuacacagcaaaaagacccuuugucaaauuaaauguggagacugauacagcugaaauaagauugaugugcacagagacuuauuuggacacccccagaccagaugauggaagcauaacagggccuugcgaaucuaauggggacaaagggcguggaggcaucaagggaggauuuguucaucaaagaauggcauccaagauuggaagaugguacucucgaacgaugucuaaaacugaaagaauggggauggaacuguaugucaaguaugauggagacccauggacugacagugacgcccuugcuccuaguggaguaaugguuucaaugaaagaaccugguugguauuccuuuggcuucgaaauaaaagauaagaaaugugauguccccuguauugggauagagaugguacaugaugguggaaaaaagacuuggcacucagcagcaacagccauuuacuguuuaaugggcucaggacaauugcuaugggacacugucacagguguugauauggcucuguaa

SEQ ID NO: 60685 - RNA, 1401 nt, Artificial Sequence
  derived and/or modified CDS sequence (wt) from neuraminidase__InfluenzaB__ABL77270
augcuaccuucaacuauacaaacguuaacccuauuucucacaucagggggaguguuauuaucacuauaugugucagcuucacugucauacuuacuguauucggauauauugcuaaaauuuucaccaacagaaauaacugcaccaacaaugccauuggauugugcaaacgcaucaaauguucaggcugugaaccguucugcaacaaaagggaugacacuucuucucccagaaccggaguggacauacccucguuuaucuugcccaggcucaaccuuucagaaagcacuccuaauuagcccucauagauucggagaaaccagaggaaacucagcucccuugauaauaagggaaccuuuuauugcuuguggaccaaaggaaugcaaacacuuugcucuaacccauuaugcagcucaaccagggggauacuacaauggaacaagagaggacagaaacaagcugaggcaucugauuucagucaaauugggcaaaauaccaacaguagaaaacuccauuuuccacauggcagcuuggagcggguccgcaugccaugaugguagagaauggacauauaucggaguugauggcccugacaguaaugcauugaucaaaauaaaauauggagaagcauauacugacacauaccauuccuaugcaaacaacauccuaagaacacaagaaagugccugcaauugcauugggggagauuguuaucuuaugauaacugauggcucagcuucaggaauuaguaaaugcagauuucuuaagauucgagagggucgaauaauaaaagaaauauuuccaacaggaagaguagaacauacugaagaaugcacaugcggauuugccagcaauaaaaccauagaaugugccuguagagauaacaguuacacagcaaaaagacccuuugucaaauuaaauguggagacugauacagcugaaauaagauugaugugcacagagacuuauuuggacacccccagaccagaugauggaagcauaacagggccuugcgaaucuaauggggacaaagggcguggaggcaucaagggaggauuuguucaucaaagaauggcauccaagauuggaagaugguacucucgaacgaugucuaaaacugaaagaauggggauggaacuguaugucaaguaugauggagacccauggacugacagugaagcccuugcuccuaguggaguaaugguuucaauggaagaaccugguugguauucuuuuggcuucgaaauaaaagauaagaaaugugauguccccuguauugggauagagaugguacacgaugguggaaaaaagacuuggcacucagcagcaacagccauuuacuguuuaaugggcucaggacaauugcuaugggacacugucacagguguugauauggcucuguaa

SEQ ID NO: 60686 - RNA, 1401 nt, Artificial Sequence
  derived and/or modified CDS sequence (wt) from neuraminidase__InfluenzaB__ABL77281
augcuaccuucaacuauacaaacguuaacccuauuucucacaucagggggaguguuacuaucacuauaugugucagucucauugucauacuuacuguauucggauauauugcuaagauucucaccaacagaaauaacugcaccaacaaugccauuggauugugcaaacgcaucaaauguucaggcugugaaccguucugcaacaaaagggaugacacuucgucucccagaaccggaguggacauacccucguuuaucuugcccgggcucaaccuuucagaaagcacuucuaauuagcccucauagauucggagaaaccagaggaaacucagcucccuugauaauaagggaaccuuuuauugcuuguggaccaaaggaaugcaaacacuuugcucuaacccauuaugcagcucaaccggggggauacuacaauggaacaagagaggacagaaacaagcugaggcaucugauuucagucaaauugggcaaaauaccaacaguagaaaacuccauuuuccacauggcagcuuggagcggguccgcaugccaugaugguagagaauggacauauaucggaguugauggcccugacaguaaugcauugaucaaaauaaaauauggagaagcauauacugacacauaccauuccuaugcaaacaacauccuaagaacacaggaaagugccugcaauugcauugggggagauuguuaucuuaugauaacugauggcucagcuucagaaauuaguaaaugcagauuucuuaagauucgagagggucgaauaauaaaagagauauuuccaacaggaagaguagaacauacugaagaaugcacaugcggauuugccagcaauaaaaccauagaaugugcuuguagagauaacaguuacacagcaaaaagacccuuugucaaauuaaauguggagacugauacagcugaaauaagauugaugugcacagagacuuauuuggacacccccagaccagaugauggaagcauaacagggccuugcgaaucuaauggggacaaagggcguggaggcaucaagggaggauuuguucaucaaagaauggcauccaagauuggaagaugguacucucgaacgaugucuaaaacugaaagaauggggauggaacuguaugucaaguaugauggagacccauggacugacagugaagcccuugcuccuaguggaguaaugguuucaauggaagaaccugguugguauuccuuuggcuucgaaauaaaagauaagaaaugugauguccccuguauugggauagagaugguacacgaugguggaaaaaagacuuggcacucagcagcaacagccauuuacuguuuaaugggcucaggacaauugcuaugggacacugucacagguguugauauggcucuguaa

SEQ ID NO: 60687 - RNA, 1401 nt, Artificial Sequence
  derived and/or modified CDS sequence (wt) from neuraminidase__InfluenzaB__ABL77292
augcuaccuucaacuauacaaacguuaacccuauuucucacaucagggggaguguuauuaucacuauaugugucagcuucacugucauacuuacuguauucggguguauugcuaaaauuuucaccaacagaaauaacugcaccaacaaugccauuggauugugcaaacgcaucaaauguucaggcugugaaccguucugcaacaaaaggagugacacuucuucucccagaaccggaguggacauacccucguuuaucuugcccgggcucaaccuuucagaaagcacuccuaauuagcccucauagauucggagaaaccagaggaaacucagcucccuugauaauaagggaaccuuuuauugcuuguggaccaaaggagugcaaacacuuugcucuaacccauuaugcagcucaaccagggggauacuacaauggaacaagagaggacagaaacaagaugaggcaucugauuucagucaaauugggcaaaaucccaacaguagaaaacuccauuuuccacauggcagcuuggagcggguccgcaugccaugaugguagagaguggacauauauuggaguugauggcccugacaguaaugcauugaucaaaauaaaauauggagaagcauauacugacacauaccauuccuaugcaaacaacauccuaagaacacaagaaagugccugcaauugcaucgggggagauuguuaucuuaugauaacugauggcucagcuucaggaauuaguaaaugcagauuucuuaagauucgagagggucgaauaauaaaagaaauauuuccuacaggaagaguagaacauacugaagaaugcacaugcggauuugccagcaauaaaaccauagaaugugccuguagagauaacaguuacacagcaaaaagacccuuugucaaauuaaauguggagacugauacagcugaaauaagauugaugugcacagagacuuauuuggacacccccagaccagaugauggaagcauaacagggccuugcgaaucuaauggggauaaagggcuuggaggcaucaagggaggauuuguucaucaaagaauggcauccaagauuggaagaugguacucucgaacgaugucuaaaacugaaagaauggggauggaauuguaugucaaguaugauggagacccauggacugacagugacgcccuugcucuuaguggaguaaugguuucaauggaagaaccugguugguauuccuuuggcuucgaaauaaaagauaagaaaugugauguccccuguauugggauagagaugguacaugaugguggaaaaaagacuuggcacucagcagcaacagccauuuacuguuuaaugggcucaggacaauugcuaugggacacugucacagguguugauauggcucuguaa

SEQ ID NO: 60688 - RNA, 1398 nt, Artificial Sequence
  derived and/or modified CDS sequence (wt) from neuraminidase__InfluenzaB__ABL77303
augcuaccuucaacuauacaaacguuaacccuauuucucacaucagggggaguguuauuaucacuauaugugucagccuuacugucauacuuacuguauucggauauauugcuaaaauuuucaccaaaaauaauugcaccaacaauaucguuggacugcgcgaaugcaucaaauguucaggcugugaaccauucugcaacaaaagagaugacauuucuucucccagaaccggaguggacauacccucguuuaucuugccagggcucaaucuuucagaaagcacuccuaauuagcccucauagauuuggagaagccaaaggaaacucagcucccuuaauaauaagggaaccuuuuauugcuuguggaccaaaggagugcaaacacuuugcucuaacccauuaugcagcucaaccagggggauacuacaauggaacaagagaggacagaaacaagcugaggcaucugauuucagucaacuuaggcaaaaucccaacuguagaaaacuccauuuuccacauggcagcuuggaguggauccgcaugccaugauggcagagaauggacauauaucggaguugauggcccugacaguaaugcauugaucaaaauaaaauauggagaagcauacacugacacauaccauuccuaugcaaacaacauccuaagaacacaagaaagugccugcaauugcaucgggggagauuguuaucuuaugauaacugauggcucagcuucaggaauuaguaaaugcagauuccuuaagauucgagagggucgaauaauaaaagaaauauuuccaacaggaagaguagagcauacugaagaaugcacaugcggauuugccagcaauaaaaccauagaaugugccuguagagauaacaguuacacagcaaaaagacccuuugucaaauuaaauguggaaacugauacagcugaaauaagauugaugugcacagagacuuauuuggacacucccagaccagaugauggaagcauaacagggccuugcgaaucuaauggggacaaagggcguggaggugucaagggaggauuuguucaucaaagaauugcauccaaaauuggaagaugguacucccgaacgaugucuaaaacugaaagaauggggauggaacuguaugucaaguaugauggagacccauggacugacagugacgcccuugcuccuaguggagugauggucucaauggaagaaccugguugguauucuuucggcuucgaaauaaaagauaagaaaugugauguccccuguauugggauagagaugguacaugaugguggaaaaaagacuuggcacucagcagcaacagccauuuacuguuuaaugggcucaggacaguugcuaugggacacugucacagguguugauauggcucuguaa

SEQ ID NO: 60689 - RNA, 1398 nt, Artificial Sequence
  derived and/or modified CDS sequence (wt) from neuraminidase__InfluenzaB__ABL77314
augcuaccuucaacuauacaaacguuaacccuauuucucacaucagggggaguguuauuaucacuauaugugucagccuuacugucauacuuacuguauucggauguauugcuaaaauuuucaccaaaaauaauugcaccaacaaugucguuggacugcgcgaacgcaucaaauguucaggcugugaaccauucugcaacagaagagaugacauuucuucucccagaaccggaguggacauacccucguuuaucuugccagggcucaaccuuucagaaagcacuccuaauuagcccucauagauucggagaagccaaaggaaacucagcucccuugauaauaagggaaccuuuuauugcuuguggaccaaaggagugcaaacacuuugcucuaacccauuaugcagcucaaccagggggauacuacaauggaacaagagaggacagaaacaagcugaggcaucugauuucagucaacuuaggcaaaaucccaacuguagaaaacuccauuuuccacauggcagcuuggaguggauccgcaugccaugaugguagagaauggacauauaucggaguugauggcccugacaguaaugcauugaucaaaauaaaauauggagaagcauacacugacaccuaccauuccuaugcaaacaacauccuaagaacacaagaaagugccugcaauugcaucgggggagauuguuaucuuaugauaacugauggcucagcuucaggaauuaguaaaugcagauuccuuaagauucgagagggucgaauaauaaaagaaauauuuccaacaggaagaguagagcauacugaagaaugcacaugcggauuugccagcaauaaaaccauagaaugugccuguagagauaacaguuacacagcaaaaagacccuuugucaaauuaaauguugagacugauacagcugaaauaagauugaugugcacagagacuuauuuggacacccccagaccagaugauggaagcauaacagggccuugcgaaucuaauggggacaaagggcauggagguaucaaaggaggauuuguccaucaaagaauggcauccaagauuggaagaugguacucccgaacgaugucuaaaacuaaaagaauggggauggaacuguaugucaaguaugauggagacccauggacugacagugacgcccuugcuccuaguggaguaauggucucaauggaagaaccugguugguauucuuucggcuucgaaauaagagauaagaaaugugauguccccuguauugggauagagaugguacaugauggugggaaaaagacuuggcacucagcagcaacagccauuuacuguuuaaugggcucaggacaguugcuaugggacacugucacagguguugauauggcucuguaa

SEQ ID NO: 60690 - RNA, 1401 nt, Artificial Sequence
  derived and/or modified CDS sequence (wt) from neuraminidase__InfluenzaB__ABL77325
augcuaccuucaacuauacaaacguuaacccuauuucucacaucagggggaguguuauuaucacuauaugugucagccuuacugucauacucacuguauucggauauauugcuaaaauuuucaccaacaaaaacaaucgcaccaacaaugucgcuggacugcgcgaacgcaucaaauguucaggcugugaaccauucugcaacaaaagggaugacacuucuucucccagaaccggaguggacauacccucguuuaucuugccagggcucaacuuuccagaaagcacuccuaauuagcccucauagauucggagaaaccaaaggaaacucagcucccuugauaauaagggaacccuuuauugcuuguggaccaaaggagugcaaacacuuugcucuaacccauuaugcagcucaaccagggggauacuacaauggaacaagagaggacagaaacaagcugaggcauuugauuucagucagcuuaggcaaaaucccaacuguagaaaacuccauuuuccacauggcagcuuggaguggauccgcaugccaugaugguagagaauggacauauaucggaguugauggcccugacaguaaugcauugaucaaaauaaaauauggagaagcauacacugacacauaccauuccuaugcaaacaacauccuaagaacacaagaaagugccugcaauugcaucgggggagauuguuaucuuaugauaaccgauggcucagcuucaggaauuaguaaaugcagauuucuuaagauucgagagggucgaauaauaaaagaaauauuuccaacaggaagaguagaucauacugaagaaugcacaugcggauuugccagcaauaaaaccauagaaugugccuguagagauaacaguuacacagcaaaaagacccuuugucaaauuaaauguggagacugauacagcugaaauaagauugaugugcacagagacuuauuuggacacccccagaccagaugauggaagcauaacagggccuugcgaauccaauggggacaaagggcguggagguaucaagggaggauuuguccaucaaagaauggcauccaagauuggaagaugguacucccgaacgaugucuaaaacugaaagacuggggauggaacuguaugucaaguaugauggagacccauggacugacagugacgcccuugcuccuaguggaguaauggucucagcggaagaaccugguugguauucuuucggcuucgaaauaaaagauaagaaaugugauguccccuguauugggauagagaugguacacgaugguggaaaaaagacuuggcacucagcagcaacagccauuuacuguuuaaugggcucaggacaguugcuaugggacacugucacaggcguugauauggcucuguaa

SEQ ID NO: 60691 - RNA, 1401 nt, Artificial Sequence
  derived and/or modified CDS sequence (wt) from neuraminidase__InfluenzaB__ABL77336
augcuaccuucaacuauacaaacguuaacccuauuucucacaucagggggaguguuauuaucacuauaugugucagcuucacugucauacuuacuguauucggauauauugcuaaaauuuucaccaacagaaauaacugcaccaccaaugccauuggauugugcaaacgcaucaaauguucaggcugugaaccguucugcaacaaaaggggugacacuucuucucccagaaccggaguggacauacccucguuuaucuugcccgggcucaacauuucagaaagcacuccuaauuagcccucauagauucggagaaaccagaggaaacucagcucccuugauaauaagggaaccuuuuauugcuuguggaccaaaggaaugcaaacacuuugcuauaacccauuaugcagcucaaccagggggauacuacaauggaacaagagaagacagaaacaagcugaggcaucuaauuucagucaaauugggcaaaaucccaacaguagaaaacuccauuuuccacauggcagcuuggagcggguccgcaugccaugaugguagggaauggacauauaucggaguugauggcccugacaguaaugcauugcucaaaauaaaauauggagaagcauauacugacacauaccauuccuaugcaaacaacauccuaagaacacaagaaagugccugcaauugcaucgggggagauuguuaucuuaugauaacugauggcucagcuucagggauuaguaaaugcagauuucuuaagauucgagagggccgaauaauaaaagaaauauuuccaacaggaagaguagaacauacugaagaaugcacaugcggauuugccagcaauaaaaccauagaaugugccuguagagauaacaguuacacagcaaaaagacccuuugucaaauuaaauguggagacugauacagcggaaauaagauugaugugcacagagacuuauuuggacacccccagaccagaugauggaagcauaacagggccuugcgaaucuaauggggauaaagggcguggaggcaucaagggaggauuuguucaucaaagaauggcauccaagauuggaaggugguacucucgaacgaugucuaaaacugacaggauggggauggaacuguaugucaaguaugauggggacccauggacugacagugacgcccuugcucuuaguggaguaaugguuucaauggaagaaccugguugguauuccuuuggcuucgaaauaaaagauaagaaaugugauguccccuguauugggauagagaugguacaugaugguggaaaaaagacuuggcacucagcagcaacaaccauuuacuguuuaaugggcucaggacaacugcuaugggacacugucacagguguugauauggcucuguaa

SEQ ID NO: 60692 - RNA, 1401 nt, Artificial Sequence
  derived and/or modified CDS sequence (wt) from neuraminidase__InfluenzaB__ABL77347
augcuaccuucaacuauacaaacguuaacccuauuucucacaucagggggaguguuauuaucacuauaugugucagcuucacugucauacuuacuauauucggauauauugcuaaaauuuucaccaacaaaaauaacugcaccaacaaugccauuggauugugcaaacgcaucaaauguucaggcugugaaccauucugcaacaaaaggggugacacuucuucucccagaaccggaguggacauacccucguuuaucuugcccgggcucaaccuuucagaaagcacuccuaauuagcccucauagauucggagaaaccagaggaaauucggcucccuugauaauaagggaaccuuuuauugcuuguggaccaaaggaaugcaaacacuuugcucuaacccauuaugcggcucaaccagggggauacuacaauggaacaagagaagacagaaacaagcugaggcaucuaauuucagucaaauugggcaaaaucccaacaguagaaaacuccauuuuccacauggcagcuuggagcggguccgcaugccaugaugguagagaauggacauauaucggaguugauggcccugacaguaaugcauugcucaaaauaaaauauggagaagcauauacugacacauaccacuccuaugcaaacaacauccuaagaacacaagaaagugccugcaauugcaucgggggagauuguuaucuuaugauaacugauggcucagcuucagggauuagugaaugcagauuucuuaagauucgagagggccgaauaauaaaagaaauauuuccaacaggaagaguagaacauacugaagaaugcacaugcggauuugccagcaauaaaaccauagaaugugccuguagagauaacaguuacacagcaaaaagacccuuugucaaauuaaauguggagacugauacagcggaaauaagauugaugugcacagagacuuauuuggacacccccagaccagaugauggaagcauaacagggccuugcgaaucuaauggggauaaagggaguggagguaucaagggaggauuuguucaucaaagaauggcauccaagauuggaaggugguacucucgaacgaugucuaaaacuaaaaggauggggaugggacuguaugucaaguaugauggagacccauggacugacagugacgcccuugcucuuaguggaguaaugguuucaauggaagaaccugguugguauuccuuuggcuucgaaauaaaagauaagaaaugugauguccccuguauugggauagagaugguacaugaugguggaaaaaagacuuggcacucagcagcaacagccauuuacuguuuaaugggcucaggacaacuacuaugggacacugucacagguguugauauggcucuguaa

SEQ ID NO: 60693 - RNA, 1398 nt, Artificial Sequence
  derived and/or modified CDS sequence (wt) from neuraminidase__InfluenzaB__ABL77380
augcuaccuucaacuauacaaacguuaacccuauuucucacaucagggggaguguuauuaucacuauaugugucagccuuacugucauacuuauuguauucggauauauugcuaaaauuuucaccaaaaauaauugcaccaacaacgucguuggacugcgcgaacgcaucaaauguucaggcugugaaccauucugcaacaaaagagaugaaauuccuucccccagaaccggaguggacauacccccguuuaucuugccaggguucaaccuuccagaaagcacucuuaauuagcccucauagauuuggagaagccaaaggaaacucagcucccuugauaauaagggaaccuuuuauugcuuguggaccaaaggagugcaaacacuuugcucuaacccauuaugcagcucaaccagggggauacuacaauggaacaagagaggacagaaacaagcugaggcaucugauuucagucaacuuaggcaaaaucccaacuguagaaaacuccauuuuccauauggcagcuuggaguggauccgcaugccaugaugguagagaauggacauauaucggaguugaugguccugacaguaaugcauugaucaaaauaaaauauggagaagcauacacugacacauaccauuccuaugcaaacaacauccuaagaacacaagaaagugccugcaauugcaucgggggagauuguuaucuuaugauaacugauggcucagcuucaggaauuaguaaaugcagauuccuuaagauccgagagggucgaauaauaaaagaaauauuuccaacaggaaggguagagcacacugaagaaugcacaugcggauuugccagcaacaaaaccauagaaugugccuguagagauaacaguuacacagcaaaaagacccuuugucaaauuaaauguggagacugauacagcugaaauaagauugaugugcacagagacuuauuuggacacccccagaccagaugauggaagcauaacagggccuugcgaaucuaauggggacaaagggaguggaggugucaagggaggauuuguucaucaaagaauggcauccaagauuggaagaugguacucccgaacgaugucuaaaacuaaaagaauggggauggaacuguaugucaaguaugauggagacccauggacugacagugacgcccuugcuccuaguggaguaauggucucaauggaagaaccugguugguacucuuucggcuucgaaauaaaagauaagaaaugugauguccccuguauugggauagagaugguacaugaugguggaaaaaggacuuggcacucagcagcaacagccauuuacuguuuaaugggcucaggacaguugcuaugggacacugucacagguguuaauauggcucuguaa

SEQ ID NO: 60694 - RNA, 1401 nt, Artificial Sequence
  derived and/or modified CDS sequence (wt) from neuraminidase__InfluenzaB__ABL77391
augcuaccuucaacuauacaaacguuaacccuauuucucacaucagggggaguauuauuaucacuauaugugucagcuucauugucauacuuacuauauucggauauauugcuaaaauucucaccaacagaaauaacugcaccaacaaugccauuggauugugcaaacgcaucaaauguucaggcugugaaccguucugcaacaaaaggggugacacuucuucucccagaaccggaguggacauacccgcguuuaucuugcccgggcucaaccuuucagaaagcacuccuaauuagcccucauagauucggagaaaccaaaggaaacucagcucccuugauaauaagggaaccuuuuauugcuuguggaccaaaggaaugcaaacacuuugcucuaacccauuaugcagcccaaccagggggauacuacaauggaacaagaggagacagaaacaagcugaggcaucuaauuucagucaaauugggcaaaaucccaacaguagaaaacuccauuuuccacauggcagcauggagcggguccgcaugccaugaugguaaggaauggacauauaucggaguugauggcccugacaauaaugcauugcucaaaauaaaauauggagaagcauauacugacacauaccauuccuaugcaaacaacauccuaagaacacaagaaagugccugcaauugcaucgggggaaauuguuaucuuaugauaacugauggcucagcuucagguguuagugaaugcagauuucuuaagauucgagagggccgaauaauaaaagaaauauuuccaacaggaagaguaaaacauacugaagaaugcacaugcggauuugccagcaauaaaaccauagaaugugccuguagagauaacaguuacacagcaaaaagacccuuugucaaauuaaacguggagacugauacagcagaaauaagauugaugugcacagagacuuauuuggacacccccagaccagaugauggaagcauaacagggccuugugaaucuaauggggacaaagggaguggaggcaucaagggaggauuuguucaucaaagaauggcauccaagauuggaaggugguacucucgaacgaugucuaaaacuaaaaggauggggaugggacuguaugucaaguaugauggagacccaugggcugacagugaugcccuugcucuuaguggaguaaugguuucaauggaagaaccugguugguacuccuuuggcuucgaaauaaaagauaagaaaugugauguccccuguauugggauagagaugguacaugaugguggaaaagagacuuggcacucagcagcaacagccauuuacuguuuaaugggcucaggacagcugcugugggacacugucacagguguugauauggcucuguaa

SEQ ID NO: 60695 - RNA, 1401 nt, Artificial Sequence
  derived and/or modified CDS sequence (wt) from neuraminidase__InfluenzaB__ABL84344
augcuaccuucaacuauacaaacguuaacccuauuucucacaucagggggaguguuauuaucacuauaugugucagcuucacugucauacuuacuauauucggauauauuguuaaaauuuucaucaacagaaauaacugcaccaacaaugccauugaauugugcaaacgcaucaaauguucaggcugugaaccauucugcaacaaaaggggugacacuuccucucccagaaccggaguggacauacccucguuuaucuugcccgggcucaaccuuucagaaagcacuccuaaucagcccucauagauucggagaaaccaaaggaaacucagcucccuugauaauaagggaaccuuuuauugcuuguggaccaaaggaaugcaaacacuuugcucuaacccauuaugcagcccaaccagggggauacuacaauggaacaagagaagacagaaacaagcugaggcaccuaauuucagucaaauugggcaaaaucccaacaguagaaaacuccauuuuucacauggcagcuuggagcggguccgcaugccaugaugguagagaauggacauauaucggaguugauggcccugacaguaaugcauugcucaaaauaaaguauggagaagcauauacugacacauaccauuccuaugcaaacaacauccuaagaacacaagaaagugccugcaauugcaucgggggagauuguuaucuuaugauaacugauggcucagcuucagggguuagugaaugcagauuucuuaagauucgagagggccgaauaauaaaagaaauauuuccaacaggaagaguagaacauacugaagaaugcacaugcggauuugccagcaauaaaaccauagaaugugccuguagagauaacaguuacacagcaaaaagacccuuugucaaauuaaauguggagacugauacagcagaaauaagauugaugugcacagagacuuacuuggacacccccaggccagaugauggaagcauaacagggccuugugaaucuaauggggauaaagggaguggaggcaucaagggaggauuuguucaucaaagaauggcauccaagauuggaaggugguacucucgaacgaugucuaaaacuaaaaggauggggaugggacuguaugucaaguaugauggagacccauggauugacagugaugcccuuacucuuagcggaguaaugguuucaauggaagaaccugguugguauuccuuuggcuucgaaauaaaagauaagaaaugugauguccccuguauugggauagagaugguacaugaugguggaaaggagacuuggcacucagcagcaacagccauuuacuguuuaaugggcucaggacaacugcuaugggacacugucacaggcguugauauggcucuguaa

SEQ ID NO: 60696 - RNA, 1401 nt, Artificial Sequence
  derived and/or modified CDS sequence (wt) from neuraminidase__InfluenzaB__ABN50397
augcuaccuucaacuauacaaacguuaacccuauuucucacaucagggggaguguuauuaucacuauaugugucagcuucacugucauacuuacuauauucggauauauugcuaaaauuuucaccaacagaaauaacugcaccaacaaugccauugaauugugcaaacgcaucaaauguucaggcugugaaccguucugcaacaaaaggggugacacuucuucucccagaaccggaguggacauacccucguuuaucuugcccgggcucaaccuuucagaaagcacuccuaauuagcccucauagauucggagaaaccaaaggaaacucagcucccuugauaauaagggaaccuuuuauugcuuguggaccaaaggaaugcaaacacuuugcucuaacccauuaugcagcccaaccagggggauacuacaauggaacaagagaagacagaaacaagcugaggcaucuaauuucagucaaauugggcaaaaucccaacaguagaaaacuccauuuuccacauggcagcuuggagcggguccgcaugccaugaugguagagaauggacauauaucggaguugauggcccugacaguaaugcauugcucaaaauaaaauauggagaagcauauacugacacauaccauuccuaugcaaacaacauccuaagaacacaagaaagugccugcaauugcaucgggggagauuguuaucuuaugauaacugauggcucagcuucagggauuagugaaugcagauuucuuaagauucgagagggccgaauaauaaaagaaauauuuccaacaggaagaguagaacauacugaagaaugcacaugcggauuugccagcaauaaaaccauagaaugugccuguagagauaacaguuacacagcaaaaagacccuuugucaaauuaaauguggagacugauacagcagaaauaagauugaugugcacagagacuuauuuggacacccccagaccagaugauggaagcauaacagggccuugugaaucuaauggggauaaagggaguggaggcaucaagggaggauuuguucaucaaagaauggcauccaagauuggaaggugguacucucgaacgaugucuaaaacuaaaaggauggggaugggacuguaugucaaguaugauggagacccauggauugacagugaugcccuuacucuuagcggaguaaugguuucaauggaagaaccugguugguauuccuuuggcuucgaaauaaaagauaagaaaugugauguccccuguauugggauagagaugguacaugaugguggaaagaagacuuggcacucagcagcaacagccauuuacuguuuaaugggcucaggacaacugcuaugggacacugucacaggcguugauauggaucuguaa

SEQ ID NO: 60697 - RNA, 1401 nt, Artificial Sequence
  derived and/or modified CDS sequence (wt) from neuraminidase__InfluenzaB__ABN50408
augcuaccuucaacuauacaaacguuaacccuauuucucacaucagggggaguguuauuaucacuauaugugucagcuucacugucauacuuacuauauucggauauauugcuaaaauuuucaccaacagaaauaacugcaccaacaaugccauugaauugugcaaacgcaucaaauguucaggcugugaaccguucugcaacaaaaggggugacacuuccucucccagaaccggaguggacauacccucguuuaucuugcccgggcucaaccuuucagaaagcacuccuaauuagcccucauagauucggagaaaccaaaggaaacucagcucccuugauaauaagggaaccuuuuauugcuuguggaccaaaggaaugcaaacacuuugcucuaacccauuaugcagcccaaccagggggauacuacaauggaacaagagaagacagaaacaagcugaggcaucuaauuucagucaaauugggcaaaaucccaacaguagaaaacuccauuuuccacauggcagcuuggagcggguccgcaugccaugaugguagagaauggacauauaucggaguugauggcccugacaguaaugcauugcucaaaauaaaauauggagaagcauauacugacacauaccauuccuaugcaaacaacauccuaagaacacaagaaagugccugcaauugcaucgggggagauuguuaucuuaugauaacugauggcucagcuucagggauuagugaaugcagauuucuuaagauucgagagggccgaauaauaaaagaaauauuuccaacaggaagaguagaacauacugaagaaugcacaugcggauuugccagcaauaaaaccauagaaugugccuguagagauaacaguuacacagcaaaaagacccuuugucaaauuaaauguggagacugauacagcagaaauaagauugaugugcacagagacuuacuuggacacccccagaccagaugauggaagcauaacagggccuugugaaucuaauggggauaaagggaguggaggcaucaagggaggauuuguucaucaaagaauggcauccaagauuggaaggugguacucucgaacgaugucuaaaacuaaaaggauggggaugggacuguaugucaaguaugauggagacccauggauugacagugaugcccuuacucuuagcggaguaaugguuucaauggaagaaccugguugguauuccuuuggcuucgaaauaaaagauaagaaaugugauguccccuguauugggauagagaugguacaugaugguggaaagaagacuuggcacucagcagcaacagccauuuacuguuuaaugggcucaggacaacugcuaugggacacugucacaggcguugauauggcucuguaa

SEQ ID NO: 60698 - RNA, 1401 nt, Artificial Sequence
  derived and/or modified CDS sequence (wt) from neuraminidase__InfluenzaB__ABN50419
augcuaccuucaacuauacaaacguuaacccuauuucucacaucagggggaguguuauuaucacuauaugugucagcuucacugucauacuuacuauauucggauauauugcuaaaauuuucaccaacagaaauaacugcaccaacaaugccauuggauugugcaaacgcaucaaauguucaggcugugaaccguucugcaacaaaaggggugacacuucuucucccagaaccggaguggacauacccgcguuuaucuugcccgggcucaaccuuucagaaagcacuccuaauuagcccucauagauucggagaaaccaaaggaaacucagcucccuugauaauaagggaaccuuuuauugcuuguggaccaaaggaaugcaaacacuuugcucuaacccauuaugcagcccaaccagggggauacuacaauggaacaagaggagacagaaacaagcugaggcaucuaauuucagucaaauugggcaaaaucccaacaguagaaaacuccauuuuccacauggcagcauggagcggguccgcaugccaugaugguaaagaauggacauauaucggaguugauggcccugacaguaaugcauugcucaaaauaaaauauggagaagcauauacugacacauaccauuccuaugcaaacaacauccuaagaacacaagaaagugccugcaauugcaucgggggaaauuguuaucuuaugauaacugauggcucagcuucagguauuagugaaugcagauuucuuaagauucgagagggccgaauaauaaaagaaauauuuccaacaggaagaguaaaacauacugaagaaugcacaugcggauuugccagcaauaaaaccauagaaugugccuguagagauaacaguuacacagcaaaaagacccuuugucaaauuaaauguggagacugauacagcagaaauaagacugaugugcacagagacuuauuuggacacccccagaccagaugauggaagcauaacagggcuuugugaaucuaauggggacaaagggaguggaggcaucaagggaggauuuguucaucaaagaauggcauccaagauuggaaggugguacucucgaacgaugucuaaaacuaaaaggauggggaugggacuguaugucaaguaugauggagacccauggacugacagugaugcccuugcucuuaguggaguaaugguuucaauggaagaaccugguugguacuccuuuggcuucgaaauaaaagauaagaaaugugauguccccuguauugggauagagaugguacaugaugguggaaaggagacuuggcacucagcagcaacagccauuuacuguuuaaugggcucaggacaauugcuaugggacacugucacagguguugauauggcucuguaa

SEQ ID NO: 60699 - RNA, 1401 nt, Artificial Sequence
  derived and/or modified CDS sequence (wt) from neuraminidase__InfluenzaB__ABN50430
augcuaccuucaacuauacaaacguuaacccuauuucucacaucagggggaguguuauuaucacuauaugugucagcuucacugucauacuuacuauauucggauauauugcuaaaauuuucaccaacagaaauaacugcaccaacaaugccauuggauugugcaaacgcaucaaauguucaggcugugaaccguucugcaacaaaaggggugacacuucuucucccagaaccggaguggacauacccgcguuuaucuugcccgggcucaaccuuucagaaagcacuccuaauuagcccucauagauucggagaaaccaaaggaaacucagcucccuugauaauaagggaaccuuuuauugcuuguggaccaaaggaaugcaaacacuuugcucuaacccauuaugcagcccaaccagggggauacuacaauggaacaagaggagacagaaacaagcugaggcaucuaauuucagucaaauugggcaaaaucccaacaguagaaaacuccauuuuccacauggcagcauggagcggguccgcaugccaugaugguaaagaauggacauauaucggaguugauggcccugacaguaaugcauugcucaaaauaaaauauggagaagcauauacugacacauaccauuccuaugcaaacaacauccuaagaacacaagaaagugccugcaauugcaucgggggaaauuguuaucuuaugauaacugauggcucagcuucagguauuagugaaugcagauuucuuaagauucgagagggccgaauaauaaaagaaauauuuccaacaggaagaguaaaacauacugaagaaugcacaugcggauuugccagcaauaaaaccauagaaugugccuguagagauaacaguuacacagcaaaaagacccuuugucaaauuaaauguggagacugauacagcagaaauaagacugaugugcacagagacuuauuuggacacccccagaccagaugauggaagcauaacagggccuugugaaucuaauggggacaaagggaguggaggcaucaagggaggauuuguucaucaaagaauggcauccaagauuggaaggugguacucucgaacgaugucuaaaacuaaaaggauggggaugggacuguaugucaaguaugauggagacccauggacugacagugaugcccuugcucuuaguggaguaaugguuucaauggaagaaccugguugguacuccuuuggcuucgaaauaaaagauaagaaaugugauguccccuguauugggauagagaugguacaugaugguggaaaggagacuuggcacucagcagcaacagccauuuacuguuuaaugggcucaggacaauugcuaugggacacugucacagguguugauauggcucuguaa

SEQ ID NO: 60700 - RNA, 1401 nt, Artificial Sequence
  derived and/or modified CDS sequence (wt) from neuraminidase__InfluenzaB__ABN50463
augcuaccuucaacuauacaaacguuaacccuauuucucacaucagggggaguauuauuaucacuauaugugucagcuucauuaucauacuuacuauauucggauauauugcuaaaauucucaccaacagaaauaacugcaccaacaaugccauuggauugugcaaacgcaucaaauguucaggcugugaaccguucugcaacaaaaggggugacacuucuucucccagaaccggaguggacauacccgcguuuaucuugcccgggcucaaccuuucagaaagcacuccuaauuagcccucauagauucggagaaaccaaaggaaacucagcucccuugauaauaagggaaccuuuuauugcuuguggaccaaaugaaugcaaacacuuugcucuaacccauuaugcagcccaaccagggggauacuacaauggaacaagaggagacagaaacaagcugaggcaucuaauuucagucaaauugggcaaaaucccaacaguagaaaacuccauuuuccacauggcagcauggagcggguccgcaugccaugaugguaaggaauggacauauaucggaguugauggcccugacaauaaugcauugcucaaaauaaaauauggagaagcauauacugacacauaccauuccuaugcaaacaacauccuaagaacacaagaaagugccugcaauugcaucgggggaaauuguuaucuuaugauaacugauggcucagcuucagguguuagugaaugcagauuucuuaagauucgagagggccgaauaauaaaagaaauauuuccaacaggaagaguaaaacauacugaggaaugcacaugcggauuugccagcaauaaaaccauagaaugugccuguagagauaacaguuacacagcaaaaagacccuuugucaaauuaaacguggagacugauacagcagaaauaagauugaugugcacagauacuuauuuggacacccccagaccagaugauggaagcauaacaggcccuugugaaucuaauggggacaaagggaguggaggcaucaagggaggauuuguucaucaaagaauggcauccaagauuggaaggugguacucucgaacgaugucuaaaacugaaaggauggggaugggacuguaugucaaguaugauggagacccaugggcugacagugaugcccuugcuuuuaguggaguaaugguuucaaugaaagaaccugguugguacuccuuuggcuucgaaauaaaagauaagaaaugcgauguccccuguauugggauagagaugguacaugaugguggaaaagagacuuggcacucagcagcaacagccauuuacuguuuaaugggcucaggacagcugcugugggacacugucacagguguugacauggcucuguaa

SEQ ID NO: 60701 - RNA, 1401 nt, Artificial Sequence
  derived and/or modified CDS sequence (wt) from neuraminidase__InfluenzaB__ABN50474
augcuacccucaacuauacaaacguuaacccuauuucucacaucagggggaguguuauuaucacuauaugugucagccuuacugucauacuuacuguauucggauauauugcuaaaauuuucaccaacaaaaauaauugcaccaacaacgucguuggacuccgcgaacgcaucaaauuuucaggccgugaaccauucugcaacaaaagagaugacauuucuucucccagaaccggaguggacauacccucguuuaucuugccaggguucaaccuuucaaaaagcacuccuaauuagcccucauagauucggagaagccaaaggaaacucagcucccuugauaauaagggaaccuuuuauugcuuguggaccaaaggaguguaaacacuuugcucuaacccauuaugcagcucaaccagggggauacuacaauggaacaagagaggacagaaacaagcugaggcaucugauuucagucaacuuaggcaaaauaccaacuguagaaaacuccauuuuccacauggcagcuuggaguggguccgcaugccaugaugguagagaauggacuuauaucggaguugauggcccugacaguaaugcauugaucaaaauaaaauauggagaagcauacacugacacauaccauuccuaugcaaacaacauccuaagaacacaagaaagugccugcaacugcaucggaggagauuguuaucuuaugauaacugauggcucagcuucaggaauuaguaaaugcagauuccuuaagauucgagagggucgaauaauaaaagaaauauuuccaacaggaagaguagagcauacugaagaaugcacaugcggauuugccagcaauaaaaccauagaaugugccuguagagauaacaguuacacagcaaaaagacccuuugucaaauuaaauguggaaacugauacagcagaaauaagauuaaugugcacagagacuuauuuggacacccccagaccagaugauggaagcauaacagggccuugcgaaucuaauggggacaaagggaguggagguaucaagggaggauuuguccaucaaagaauggcauccaagauuggaagaugguacucucgaacgaugucuaaaacuaaaagaauggggauggaacuguaugucaaguaugauggagacccauggacugacagugaugcccuugcuccuaguggaguaauggucucaauagaagaaccugguugguauucuuucggcuucgaaauaaaagauaagaaaugcgauguccccuguauugggauagagaugguacacgaugguggaaaaacaacuuggcacucagcagcaacagccauuuacuguuuaaugggcucaggacaguugcuaugggacacugucacagguguugauauggcucuguaa

SEQ ID NO: 60702 - RNA, 1401 nt, Artificial Sequence
  derived and/or modified CDS sequence (wt) from neuraminidase__InfluenzaB__ABN50485
augcuaccuucaacuauacaaacguuaacccuauuucucacaucagggggaguguuauuaucacuauaugugucagcuucacugucauacuuacuauauucggauauauugcuaaaauuuucaccaacagaaauaacugcaccaacaaugccauuggauugugcaaacgcaucaaauguucaggcugugaaccguucugcaacaaaaggggugacacuucuucucccagaaccggaguggacauacccgcguuuaucuugcccgggcucaaccuuucagaaagcacuccuaauuagcccucauagauucggagaaaccaaaggaaacucagcucccuugauaauaagggaaccuuuuauugcuuguggaccaaaggaaugcaaacacuuugcucuaacccauuaugcagcccaaccagggggauacuacaauggaacaagaggagacagaaacaagcugaggcaucuaauuucagucaaauugggcaaaaucccaacaguagaaaacuccauuuuccacauggcagcauggagcggguccgcaugccaugaugguaaagaauggacauauauuggaguugauggcccugacaguaaugcauugcucaaaauaaaauauggagaagcauauacugacacauaccauuccuaugcaaacaacauccuaagaacacaagaaagugccugcaauugcaucgggggaaauuguuaucuuaugauaacugauggcucagcuucagguauuagugaaugcagauuucuuaagauucgagagggccgaauaauaaaagaaauauuuccaacaggaagaguaaaacauacugaagaaugcacaugcggauuugccagcaauaaaaccauagaaugugccuguagagauaacaguuacacagcaaaaagacccuuugucaaauuaaauguggagacugauacagcagaaauaagauugaugugcacagagacuuauuuggacacccccagaccagaugauggaagcauaacagggccuugugaauuuaauggggacaaagggaguggaggcaucaagggaggauuuguucaucaaagaauggcauccaagauuggaaggugguacucucgaacgaugucuaaaacuaaaaggauggggaugggacuguaugucaaguaugauggagacccauggacugacagugaugcccuugcucuuaguggaguaaugguuucaauggaagaaccugguugguacuccuuuggcuucgaaauaaaagauaagaaaugugauguccccuguauugggauagagaugguacaugaugguggaaaggagacuuggcacucagcagcaacagccauuuacuguuuaaugggcucaggacaauugcuaugggacacugucacagguguugauauggcucuguaa

SEQ ID NO: 60703 - RNA, 1401 nt, Artificial Sequence
  derived and/or modified CDS sequence (wt) from neuraminidase__InfluenzaB__ABN50496
augcuaccuucaacuauacaaacguuaacccuauuucucacaucagggggaguauuauuaucacuauaugugucagcuucauugucauacuuacuauauucggauauauugcuaaaauucccaucaacagaaauuacugcaccaacaaugccauuggauugugcaaacgcaucaaauguucaggcugugaaccguucugcaacaaaaagggugacacuucuucucccagaaccggaguggacauacccgcguuuaucuugcccgggcucaaccuuucagaaagcacuccuaauuagcccucauagauucggagaaaccaaaggaaacucagcucccuugauaauaagggaaccuuuuauugcuuguggaccaaaggaaugcaaacacuuugcucuaacccacuaugcagcccaaccagggggauacuacaauggaacaagaggagacagaaacaagcugaggcaucuaauuucagucaaauugggcaaaaucccaacaguagaaaacuccauuuuccacauggcagcauggagcggguccgcaugccaugaugguaaggaauggacauauaucggaguugauggcccugacaauaaugcauugcucaaaauaaaauauggagaagcauauacugacacauaccauuccuaugcaaacaacauccuaagaacacaagaaagugccugcaauugcaucgggggaaauuguuaucuuaugauaacugauggcucagcuucagguguuagugaaugcagauuucuuaagauucgagagggccgaauaauaaaagaaauauuuccaacaggaagaauaaaacauacugaagaaugcacaugcggauuugcuagcaauaaaaccauagaaugugccuguagagauaacaguuacacagcaaaaagacccuuugucaaauuaaacguggagacugauacagcagaaauaagauugaugugcacagagacuuauuuggacacccccagaccagaugauggaagcauaacagggccuugugaaucuaauggggacaaagggaguggaggcaucaagggaggauuuguccaucaaagaauggcauccaagauuggaaggugguacucucgaacgaugucuaaaacuaaaaggauggggauggggcuguaugucaaguaugauggagacccaugggcugacagugaugcccuugcuuuuaguggaguaaugguuucaauggaagaaccugguugguacuccuuuggcuucgaaauaaaagacaagaaaugugauguccccuguauugggauagagaugguacaugaugguggaaaagagacuuggcacucagcagcuacagccauuuacuguuuaaugggcucaggacagcugcugugggacacugucacagguguuaauauggcucuguga

SEQ ID NO: 60704 - RNA, 1401 nt, Artificial Sequence
  derived and/or modified CDS sequence (wt) from neuraminidase__InfluenzaB__ABN50507
augcuaccuucaacuauacaaacguuaacccuauuucucacaucagggggaguguuauuaucacuauaugugucagcuucacugucauacuuacuauauucggauauauugcuaaaauuuucaccaacagaaauaacugcaccaacaaugccauugaauugugcaaacgcaucaaauguucaggcugugaaccguucugcaacaaaaggggugacacuuccucucccagaaccggaguggacauacccucguuuaucuugcccgggcucaaccuuucagaaagcacuccuaauuagcccucauagauucggagaaaccaaaggaaacucagcucccuugauaauaagggaaccuuuuauugcuuguggaccaaaggaaugcagacacuuugcucuaacccauuaugcagcccaaccagggggauacuacaauggaacaagagaagacagaaacaagcugaggcaucuaauuucagucaaauugggcaaaaucccaacaguagaaaacuccauuuuccacauggcagcuuggagcggguccgcaugccaugaugguagagaauggacauauaucggaguugauggcccugacaguaaugcauugcucaaaauaaaauauggagaagcauauacugacacauaccauuccuaugcaaacaacauccuaagaacacaagaaagugccugcaauugcaucgggggagauuguuaucuuaugauaacugauggcucagcuucagggauuagugaaugcagauuucuuaagauucgagagggccgaauaauaaaagaaauauuuccaacaggaagaguagaacauacugaagaaugcacaugcggauuugccagcaauaaaaccauagaaugugccuguagagauaacaguuacacagcaaaaagacccuuugucaaauuaaauguggagacugauacagcagaaauaagauugaugugcacagagacuuacuuggacacccccagaccagaugauggaagcauaacagggccuugugaaucuaauggggauaaagggaguggaggcaucaagggaggauuuguucaucaaagaauggcauccaagauuggaaggugguacucucgaacgaugucuaaaacuaaaaggauggggaugggacuguaugucaaguaugauggagacccauggauugacagugaugcccuuacucuuagcggaguaaugguuucaauggaagaaccugguugguauuccuuuggcuucgaaauaaaagauaagaaaugugauguccccuguauugggauagagaugguacaugaugguggaaagaagacuuggcacucagcagcaacagccauuuacuguuuaaugggcucaggacaacugcuaugggacacugucacaggcguugauauggcucuguaa

SEQ ID NO: 60705 - RNA, 1401 nt, Artificial Sequence
  derived and/or modified CDS sequence (wt) from neuraminidase__InfluenzaB__ABN50518
augcuaccuucaacuauacaaacguuaacccuauuucucacaucagggggaguguuauuaucacuauaugugucagcuucacugucauacuuacuauauucggauauauugcuaaaauuuucacaaacagaaauaacugcaccaacaaugccauuggauugugcaaacgcaucaaauguucaggcugugaaccguucugcaacaaaaggggugacacuucuucucccagaaccggaguggacguacccucguuuaucuugcccgggcucaaccuuucagaaagcacuccuaauuagcccccauagauucggagaaaccaaaggaaacucagcucccuugauaauaagggaaccuuuuauugcuuguggaccaaaagaaugcaaacacuuugcucuaacccauuaugcagcucaaccagggggauacuacaauggaacaagagaagacagaaacaagcugaggcaucuaauuucagucaaauugggcaaaaucccaacaguagaaaacucuauuuuccacauggcagcuuggagcggguccgcaugccaugaugguagagaauggacauauaucggaguugauggccccgacaguaaugcauugcucaaaauaaaauauggagaagcauauacugacacauaccauuccuaugcaaaaaacauccuaaggacacaagaaagugccugcaauugcaucgggggagauuguuaucuuaugauaacugauggcucagcuucagggauuagugaaugcagauuccuuaagauucgagagggccgaauaauaaaagaaauauuuccaacaggaagaguaaaacauacugaagaaugcacaugcggauuugccagcaacaaaaccauagaaugugccuguagagauaacaguuacacagcaaaaagacccuuugucaaauuaaauguggagacugauacagcggaaauaagauugaugugcacagagacuuauuuggacacccccagaccaaaugauggaagcauaacagggccuugcgaaucuaauggggacaaagggaguggaggcaucaagggaggauuuguucaucaaagaauggcauccaagauuggaaggugguacucucgaacgaugucuaaaacuaaaagaauggggaugggacuguaugucaaguaugauggagacccauggacugacagugaagcccuugcucuuaguggaguaaugguuucaauggaagaaccugguugguauuccuuuggcuucgaaauaaaagauaagaaaugugauguccccuguauugggauagaaaugguacaugauggugggaaaacgacuuggcacucagcagcaacagccauuuacuguuuaaugggcucaggacaacugcugugggacacugucacagguguugauauggcucuguaa

SEQ ID NO: 60706 - RNA, 1401 nt, Artificial Sequence; identical to SEQ ID NO: 60603
  derived and/or modified CDS sequence (wt) from neuraminidase__InfluenzaB__ABN50529

SEQ ID NO: 60707 - RNA, 1401 nt, Artificial Sequence; identical to SEQ ID NO: 60672
  derived and/or modified CDS sequence (wt) from neuraminidase__InfluenzaB__ABN50540

SEQ ID NO: 60708 - RNA, 1401 nt, Artificial Sequence
  derived and/or modified CDS sequence (wt) from neuraminidase__InfluenzaB__ABN50551
augcuaccuucaacuauacaaacauuaacccuauuucucacaucagggggaguauuauuaucacuauaugugucagcuucauugucauacuuacuauauucggauauauugcuaaaauucucaccaacagaaauaacugcaccaacaaugccauuggauugugcaaacgcaucaaauguucaggcugugaaccguucugcaacaaaaggggugacacuucuucucccagaaccggaguggacauacccgcguuuaucuugcccgggcucaaccuuucagaaagcacuccuaauuagcccucauagauucggagaaaccaaaggaaacucagcucccuugauaauaagggaaccuuuuauugcuuguggaccaaaggaaugcaaacacuuugcucuaacccauuaugcagcccaaccagggggauacuacaauggaacaagaggagacagaaacaagcugaggcaucuaauuucagucaaauugggcaaaaucccaacaguagaaaacuccauuuuccacauggcagcauggagcggguccgcaugccaugaugguaaagaauggacauauaucggaguugauggcccugacaauaaugcauugcucaaaauaaaauauggagaagcauauacugacacauaccauuccuaugcaaacaacauccuaagaacacaagaaagugccugcaauugcaucgggggaaauuguuaucuuaugauaacugauggcucagcuucagguauuagugaaugcagauuucuuaagauucgagagggccgaauaauaaaagaaauauuuccaacaggaagaguaaaacauacugaagaaugcacaugcggauuugccagcaauaaaaccauagaaugugccuguagagauaacaguuacacagcaaaaagacccuuugucaaauuaaacguggagacugauacagcagaaauaagauugaugugcacagagacuuauuuggacacccccagaccagaugauggaagcauaacagggccuugugaaucuaauggggacaaagggaguggaggcaucaagggaggauuuguucaucaaagaauggcauccaagauuggaaggugguacucucgaacgaugucuaaaacuaaaaggauggggaugggacuguaugucaaguaugauggagacccaugggcugacagugaugcccuugcucuuaguggaguaaugguuucaauggaagaaccugguugguacuccuuuggcuucgaaauaaaagauaagaaaugugauguccccuguauugggauagagaugguacaugaugguggaaaagagacuuggcacucagcagcaacagccauuuacuguuuaaugggcucaggacagcugcugugggacacugucacagguguugauauggcucuguaa

SEQ ID NO: 60709 - RNA, 1401 nt, Artificial Sequence
  derived and/or modified CDS sequence (wt) from neuraminidase__InfluenzaB__ABN50562
augcuaccuucaacuauacaaacguuaacccuauuucucacaucagggggagcacuguuaucacuauaugugucagccuuacuaucauacuuacuguauucggauauauugcuaaaauuuucaccaacaaaaguaauugcaccaacaaugucauuggacuacacgaacgcaucaaauguucaggcugugaaucauucugcaacagaagagaugacauuucuucucccagaaccggaguggacauacccucguuuaucuugccaggguucaaccuuucagaaagcacucuuaauuagcccucauagauucggagaagccaaaggaaacucagcucccuugauaauaagggaaccuuuuauugcuuguggaccaaaggaguguaaacacuuugcucuaacccauuaugcagcucaaccagggggauauuauaauggaacaagggaggacagaaacaagcugaggcaucugauuucagucaacuuaggcaaaaucccaacuguagaaaacuccauuuuccacauggcagcuuggaguggauccgcaugccaugaugguagagaauggacuuauaucggaguugauggcccugacaguaaugcauugaucaaaauaaaauauggagaagcauacacugacacauaccauuccuaugcaaacaacauccuaagaacacaagaaagugccugcaauugcaucgggggagauuguuaucuuaugauaacugauggcucagcuucaggaauuaguagaugcagauuccuaaagauucgagagggucgaauaauaaaagaaauauuuccaacaggaagaguagagcauacugaagagugcacaugcggauuugccagcaauaaaaccauagaaugugccuguagagauaacaguuacacagcaaaaagacccuuugucaaauuaaauguggaaacugauacagcugaaauaagauugaugugcacagagacuuauuuggacacccccagaccagaugauggaagcauaacagggccuugcgaaucuaauggagacaaagggaauggagguaucaagggaggauuuguccaucaaagaauggcauccaggauuggaagaugguacucucgaacgaugucuaaaacuaaaagaauggggauggaacuguaugucaaguaugauggagacccauggacugacagugacgcccuugcuccuaguggaguaauggucucaauggaagaaccugguugguauucuuucgguuucgaaauaaaagauaagaaaugcgauguccccuguauugggauagagaugguacacgaugguggaaaaaagacuuggcacucagcagcaacagccauuuacuguuuaaugggcucaggacaauugcuaugggacacugucacagguguugauauggcuuuguaa

SEQ ID NO: 60710 - RNA, 1401 nt, Artificial Sequence
  derived and/or modified CDS sequence (wt) from neuraminidase__InfluenzaB__ABN50573
augcuaccuucaacuauacaaacguuaacccuauuucucacaucagggggaguguuauuaucacuauaugugucagcuucacugucauacuuacuauauucggauauauugcuaaaauuuucaccaacagaaauaacugcaccaacaaugccauuggauugugcaaacgcaucaaauguucaggcugugaaccguucugcaacaaaaggggugacacuucuucucccagaaccggaguggacauacccgcguuuaucuugcccgggcucaaccuuucagaaagcacuccuaauuagcccucauagauucggagaaaccaaaggaaacucagcucccuugauaauaagggaaccuuucauugcuuguggaccaaaggaaugcaaacacuuugcucuaacccauuaugcagcccaaccagggggguacuacaauggaacaagaggagacagaaacaagcugaggcaucuaauuucagucaaauugggcaaaaucccaacaguagaaaacuccauuuuccacauggcagcauggagcggguccgcaugccaugaugguaaagaauggacauauaucggaguugauggcccugacaguaaugcauugcucaaaauaaaauauggagaagcauauacugacacauaccauuccuaugcaaacaacauccuaagaacacaagaaagugccugcaauugcaucgggggaaauuguuaucuuaugauaacugauggcucagcuucagguauuagugaaugcagauuucuuaagauucgagagggccgaauaauaaaagaaauauuuccaacaggaagaguaaaacauacugaagaaugcacaugcggauuugccagcaauaaaaccauagaaugugccuguagagauaacaguuacacagcaaaaagacccuuugucaaauuaaauguggagacugauacagcagaaauaagacugaugugcacagagacuuauuuggacacccccagaccagaugauggaagcauaacagggccuugugaaucuaauggggacaaagggaguggaggcaucaagggaggauuuguucaucaaagaauggcauccaagauuggaaggugguacucucgaacgaugucuaaaacuaaaaggauggggaugggacuguaugucaaguaugauggagacccauggacugacagugaugcccuugcucuuaguggaguaaugguuucaauggaagaaccugguugguacuccuuuggcuucgaaauaaaagauaagaaaugugauguccccuguauugggauagagaugguacaugaugguggaaaggagacuuggcacucagcagcaacagccauuuacuguuuaaugggcucaggacaauugcuaugggacacugucacagguguugauauggcucuguaa

SEQ ID NO: 60711 - RNA, 1401 nt, Artificial Sequence
  derived and/or modified CDS sequence (wt) from neuraminidase__InfluenzaB__ABN50584
augcuaccuucaacuauacaaacguuaacccuauuucucacaucagggggaguauuauuaucauuauaugugucagcuucauugucauacuuacuauauucggauauauugcuaaaauucucaccaacagaaauaacugcaucaacaaugccauuggauugugcaaacgcaucaaauguucaggcugugaaccguucugcaacaaaaggggugacacuucuucucccagaaccggaguggacauacccgcguuuaucuugcccgggcucaaccuuucagaaagcacuccuaauuagcccucauagauucggagaaaccaaaggaaacucagcucccuugauaauaagggaaccuuuuauugcuuguggaccaaaugaaugcaaacacuuugcucuaacccauuaugcagcccaaccagggggauacuacaauggaacaagaggagacagaaacaagcugaggcaucuaauuucagucaaauugggcaaaaucccaacaguagaaaacuccauuuuccacauggcagcauggagcggguccgcaugccaugaugguaaggaauggacauauaucggaguugauggcccugacaauaaugcauugcucaaaauaaaauauggagaagcauauacugacacauaccauuccuaugcaaacaacauccuaagaacacaagaaagugccugcaauugcaucgggggaaauuguuaucuuaugauaacugauggcucagcuucagguguuagugaaugcagauuucuuaagauucgagagggccgaauaauaaaagaaauauuuccaacaggaagaguaaaacauacugaagaaugcacaugcggauuugccagcaauaaaaccauagaaugugccuguagagauaacaguuacacagcaaaaagacccuuugucaaauuaaacguggagagugauacagcagaaauaagauugaugugcacagagacuuauuuggacacccccagaccagaugauggaagcauaacagggccuugugaaucuaauggggacaaagggaguggaggcaucaagggaggauuuguucaucaaagaauggcauccaagauuggaaggugguacucucgaacgaugucuaaaacugaaaggauggggaugggacuguaugucaaguaugauggagacccaugggcugacagugaugcccuugcucuuaguggaguaaugguuucaauggaagaaccugguugguacuccuuuggcuucgaaauaaaagauaagaaaugcgauguccccuguauugggauagagaugguacaugaugguggaaaagagacuuggcacucagcagcaacagccauuuacuguuuaaugggcucaggacagcugcugugggacacugucacagguguugauauggcucuguaa

SEQ ID NO: 60712 - RNA, 1401 nt, Artificial Sequence
  derived and/or modified CDS sequence (wt) from neuraminidase__InfluenzaB__ABN50595
augcuacccucaacuauacaaacguuaacccuauuucucacaucagggggaguguuauuaucacuauaugugucagccuuacugucauacuuacuguauucggauauauugcuaaaauuuucaccaacaaaaauaauugcaccaacaacgucguuggacuccgcgaacgcaucaaauuuucaggccgugaaccauucugcaacaaaagagaugacauuucuucucccagaaccggaguggacauacccucguuuaucuugccaggguucaaccuuucaaaaagcacuccuaauuagcccucauagauucggagaagccaaaggaaacucagcucccuugauaauaagggaaccuuuuauugcuuguggaccaaaggaguguaaacacuuugcucuaacccauuaugcagcucaaccagggggauacuacaauggaacaagagaggacagaaacaagcugaggcaucugauuucagucaacuuaggcaaaauaccaacuguagaaaacuccauuuuccacauggcagcuuggaguggguccgcaugccaugaugguagagaauggacuuauaucggaguugauggcccugacaguaaugcauugaucaaaauaaaauauggagaagcauacacugacacauaccauuccuaugcaaacaacauccuaagaacacaagaaagugccugcaacugcaucgggggagauuguuaucuuaugauaacugauggcucagcuucaggaauuaguaaaugcagauuccuuaagauucgagagggucgaauaauaaaagaaauauuuccaacaggaagaguagagcauacugaagaaugcacaugcggauuugccagcaauaaaaccauagaaugugccuguagagauaacaguuacacagcaaaaagacccuuugucaaauuaaauguggaaacugauacagcagaaauaagauuaaugugcacagagacuuauuuggacacccccagaccagaugauggaagcauaacagggccuugcgaaucuaauggggacaaagggaguggagguaucaagggaggauuuguccaucaaagaauggcauccaagauuggaagaugguacucucgaacgaugucuaaaacuaaaagaauggggauggaacuguaugucaaguaugauggagacccauggacugacagugaugcccuugcuccuaguggaguaauggucucaauagaagaaccugguugguauucuuucggcuucgaaauaaaagauaagaaaugcgauguccccuguauugggauagagaugguacacgaugguggaaaaacaacuuggcacucagcagcaacagccauuuacuguuuaaugggcucaggacaguugcuaugggacacugucacagguguugauauggcucuguaa

SEQ ID NO: 60713 - RNA, 1398 nt, Artificial Sequence
  derived and/or modified CDS sequence (wt) from neuraminidase__InfluenzaB__ABN50606
augcuaccuucaacuauacaaacguuaacccuauuucucacaucagggggaguguuauuaucacuauaugugucagcuucacugucauacuuacuguauucggauauauugcuaagauuuucaucaaaaauaacugcaccaacaaugacauuggauugcgcgaacgcaucaaauguucaggcugugaaccguucugcaacaaaagagaugacauuucuucucccagaaccggaguggacauacccucguuuaucuugccagggcucaaccuuucagaaagcacuccuaauuagcccucauagauucggagaagccagaggaaacucagcucccuuaauaauaagggaaccuuuuauugcuuguggaccaaaggaaugcaaacacuuugcucuaacccauuaugcagcucaaccagggggauacuacaauggaacaagagaggacagaaacaagcugaggcaucugauuucagucaaauuaggcaaaaucccaacuguagaaaacuccauuuuccacauggcagcuuggaguggguccgcaugccaugaugguagggaauggacauauaucggaguugauggcccugacaguaaugcauugaucaaaauaaaauauggagaagcauauacugacacauaccauuccuaugcaaacaacauccuaagaacacaagaaagugccugcaauugcaucgggggagauuguuaucuuaugauaacugauggcucagcuucaggaauuagugaaugcagauuucuuaagauucgagagggucgaauaauaaaagaaauauuuccaacaggaagaguagagcacacugaagaaugcacaugcggauuugccagcaauaaaaccauagaaugugccuguagagauaacaguuacacagcaaaaagacccuuugucaaauuaaauguggagacugauacagcugagauaagacugaugugcacagagacuuauuuggacacccccagaccagaugaugggagcauaacagggccuugcgaaucugauggggacaaagggcguggaggcaucaagggaggauuuguucaucaaagaauggcauccaagauuggaagaugguacucccgaacgaugucuaaaacugagagaauggggauggaacuguaugucaaguaugauggagacccauggacugacagugaugcccuugcuccuaguggaguaauggucucaaugaaagaaccugguugguauucuuuuggcuucgaaauaaaagauaagaaaugugauguccccuguauugggauagagaugguacacgaugguggaaaaaagacuuggcacucagcagcaacagccauuuacuguuugaugggcucaggacaauugcuaugggacacugucacagguguugauauggcucuguaa

SEQ ID NO: 60714 - RNA, 1398 nt, Artificial Sequence
  derived and/or modified CDS sequence (wt) from neuraminidase__InfluenzaB__ABN50628
augcuaccuucaacuauacaaacguuaacccuauuucucacaucagggggaguguuauuaucacuauaugugucagccuuacugucauacuuacuguauucggauauauugcuaaaauuuucaccaaaaauaauugcaccaacaaugucguuggacugcgcgaacgcaucaaauguucaggcugugaaccauucugcaacaaaagagaugacauuucuucucccagaaccggaguggacauacccucguuuaucuugccagggcucaaccuuucagaaagcacuccuaauuagcccucauagauuuggagaagccaaaggaaacucagcucccuugauaauaagggaaccuuuuauugcuuguggaccaaaggagugcaaacacuuugcucuaacccauuaugcagcucaaccagggggauacuacaauggaacaagagaggacagaaacaagcugaggcaucugauuucagucaacuuaggcaaaaucccaacuguagaaaacuccauuuuccacauggcagcuuggaguggauccgcaugccaugaugguagagaauggacauauaucggaguugauggcccugacaguaaugcauugaucaaaauaaaauauggagaagcauacacugacacauaccauuccuaugcaaacaacauccuaagaacacaagaaagugccugcaauugcaucgggggagauuguuaucuuaugauaacugauggcucagcuucaggaauuaguaaaugcagauuccuuaagauucgagagggucgaauaauaaaagaaauauuuccaacaggaagaguagagcauacugaagaaugcacaugcggauuugccagcaauaaaaccauagaaugugccuguagagauaacaguuacacagcaaaaagacccuuugucaaauuaaauguggagacugauacagcugaaauaagauugaugugcacagagacuuauuuggacacccccagaccagaugauggaagcauaacagggccuugcgaaucuaauggggacaaagggcguggaggugucaagggaggauuuguucaucaaagaauggcauccaagauuggaagaugguacucccgaacgaugucuaaaacugaaagaauggggauggaacuguaugucaaguaugauggagacccauggacugacagugacgcccuugcuccuaguggaguaauggucucaauggaagaaccugguugguauucuuucggcuucgaaauaaaagauaagaaaugugaugucccuuguauugggauagagaugguacaugaugguggaaaaaagacuuggcacucagcagcaacagccauuuacuguuuaaugggcucaggacaguugcuaugggacacugucacagguguugauauggcucuguaa

SEQ ID NO: 60715 - RNA, 1398 nt, Artificial Sequence
  derived and/or modified CDS sequence (wt) from neuraminidase__InfluenzaB__ABN50639
augcuaccuucaacuauacaaacguuaacccuauuucucacaucagggggaguguuauuaucacuauaugugucagccuuacugucauacuuacuguauucggauauauugcuaaaauuuucaccaaaaauaauugcaccaacaaugucguuggacugcgcgaacgcaucaaauguucaggcugugaaccauucugcaacaaaagagaugacauuucuucucccagaaccggaguggacauacccucguuuaucuugccagggcucaaccuuucagaaagcacuccuaauuagcccucauagauuuggagaagccaaaggaaacucagcucccuugauaauaagggaaccuuuuauugcuuguggaccaaaagagugcaaacacuuugcucuaacccauuaugcagcucaaccagggggauacuacaauggaacaagagaggacagaaacaagcugaggcaucugauuucagucaaguuaggcaaaaucccaacuguagaaaauuccauuuuccacauggcagcuuggaguggauccgcaugccaugauggcagagaauggacauauaucggaguugauggcccugacaguaaugcauuggucaaaauaaaauauggagaagcauacacugacacauaccauuccuaugcaaacaacauccuaagaacacaagaaagugccugcaauugcaucgggggagauuguuaucuuaugauaacugauggcucagcuucaggaauuaguaaaugcagauuccuuaagauucgagagggucgaauaauaaaagaaauauuuccaacaggaagaguagagcauacugaagaaugcacaugcggauuugccagcaauaaaaccauagaaugugccuguagagauaacaguuacacagcaaaaagacccuuugucaaauuaaauguggagacugauacagcugaaauaagauugaugugcacagagacuuauuuggacacccccagaccagaugauggaagcauaacagggccuugcgaaucuaauggggacaaagggcguggaggugucaagggaggauuuguucaucaaagaauggcauccaagauuggaagaugguacucccgaacgaugucuaaaacugaaagaauggggauggaacuguaugucaaguaugauggagacccauggacugacagugacgcccuugcuccuaguggaguaauggucucaauggaagaaccugguugguauucuuucggcuucgaaauaaaagauaagaaaugugauguccccuguauugggauagagaugguacaugaugguggaaaaaagacuuggcacucagcagcaacagccauuuacuguuuaaugggcucaggacaguugcuaugggacacugucacagguguugauauggcucuguaa

SEQ ID NO: 60716 - RNA, 1398 nt, Artificial Sequence
  derived and/or modified CDS sequence (wt) from neuraminidase__InfluenzaB__ABN50650
augcuaccuucaacuauacaaacguuaacccuauuucucacaucagggggaguguuauuaucacuauaugugucagccuuacugucauacuuacuguauucggauguauugcuaaaauuuucaccaaaaauaauugcaccaacaaugucguuggacugcgcgaacgcaucaaauguucaggcugugaaccauucugcaacagaagagaugacauuucuucucccagaaccggaguggacauacccucguuuaucuugccagggcucaaccuuucagaaagcacuccuaauuagcccucauagauucggagaagccaaaggaaacucagcucccuugauaauaagggaaccuuuuauugcuuguggaccaaaggagugcaaacacuuugcucuaacccauuaugcagcucaaccagggggauacuacaauggaacaagagaggacagaaacaagcugaggcaucugauuucagucaacuuaggcaaaaucccaacuguagaaaacuccauuuuccacauggcagcuuggaguggauccgcaugccaugaugguagagaauggacauauaucggaguugauggcccugacaguaaugcauugaucaaaauaaaauauggagaagcauacacugacaccuaccauuccuaugcaaacaacauccuaagaacacaagaaagugccugcaauugcaucgggggagauuguuaucuuaugauaacugauggcucagcuucaggaauuaguaaaugcagauuccuuaagauucgagagggucgaauaauaaaagaaauauuuccaacaggaagaguagagcauacugaagaaugcacaugcggauuugccagcaauaaaaccauagaaugugccuguagagauaacaguuacacagcaaaaagacccuuugucaaauuaaauguugagacugauacagcugaaauaagauugaugugcacagagacuuauuuggacacccccagaccagaugauggaagcauaacagggccuugcgaaucuaauggggacaaagggcauggagguaucaaaggaggauuuguccaucaaagaauggcauccaagauuggaagaugguacucccgaacgaugucuaaaacuaaaagaauggggauggaacuguaugucaaguaugauggagacccauggacugacagugacgcccuugcuccuaguggaguaauggucucaauggaagaaccugguugguauucuuucggcuucgaaauaaaagauaaaaaaugugauguccccuguauugggauagagaugguacaugaugguggaaaaaagacuuggcacucagcagcaacagccauuuacuguuuaaugggcucaggacaguugcuaugggacacugucacagguguugauauggcucuguaa

SEQ ID NO: 60717 - RNA, 1398 nt, Artificial Sequence
  derived and/or modified CDS sequence (wt) from neuraminidase__InfluenzaB__ABN50661
augcuaccuucaacuauacaaacgcuaacccuauuucucacaucagggggaguguuauuaucacuauaugugucagccuuacugucauacuuacuguauucggauguauugcuaaaauuuucaccaaaaaugauugcaccaacaaugucguuggacugugcgaacgcaucaaauguucaggcugugaaccauucugcaacagaagagaugacauuucuucucccagaaccggaguggacauacccucguuuaucuugccagggcucaaccuuucagaaagcacuccuaauuagcccucauagauucggagaagccaaaggaaacucagcucccuugauaauaagggaaccuuuuauugcuuguggaccaaaggagugcaaacacuuugcucuaacccauuaugcagcucaaccagggggauacuacaauggaacaagagaggacagaaacaagcugaggcaucugauuucagucaacuuaggcaaaaucccaacuguagaaaacuccauuuuccacauggcagcuuggaguggauccgcaugccaugaugguagagaauggacauauaucggaguugauggcccugacaguaaugcauugaucaaaauaaaauauggagaagcauacacugacaccuaccauuccuaugcaaacaacauccuaagaacacaagaaagugccugcaauugcaucgggggagauuguuaucuuaugauaacugauggcucagcuucaggaauuaguaaaugcagauuccuuaagauucgagagggucgaauaauaaaagaaauauuuccaacaggaagaguagagcauacugaagaaugcacaugcggauuugccagcaauaaaaccauagaaugugccuguagagauaacaguuacacagcaaaaagacccuuugucaaauuaaauguugagacugauacagcugaaauaagauugaugugcacagagacuuauuuggacacccccagaccagaugauggaagcauaacagggccuugcgaaucuaauggggacaaagggcauggagguaucaaaggaggauuuguccaucaaagaauggcauccaagauuggaagaugguacucccgaacgaugucuaaaacuaaaagaauggggauggaacuguaugucaaguaugauggagacccauggacugacagugacgcccuugcuccuaguggaguaauggucucaauggaagaaccugguugguauucuuucggcuucgaaauaaaagauaagaaaugugauguccccuguauugggauagagaugguacaugaugguggaaaaaagacuuggcacucagcagcaacagccauuuacuguuuaaugggcucaggacaguugcuaugggacacugucacagguguugauauggcucuguaa

SEQ ID NO: 60718 - RNA, 1401 nt, Artificial Sequence
  derived and/or modified CDS sequence (wt) from neuraminidase__InfluenzaB__ABN50683
augcuaccuucaacuauacaaacguuaacccuauuucucacaucagggggaguguuauuaucacuauaugugucagcuucacugucauacuuacuguauucggauauauugcuaaaauuuucaccaacagaaauaacugcaccaacaaugccauuggauugugcaaacgcaucaaauguucaggcugugaaccguucugcaacaaaaggggugacacuucuucucccagaaccggaguggacauacccucguuuaucuugcccgggcucaaccuuucagaaagcacuccuaauuagcccucauagauucggagaaaccagaggaaacucagcucccuugauaauaagggaaccuuuuauugcuuguggaccaaaggaaugcaaacacuuugcucuaacucauuaugcagcucaaccagggggauacuacaauggaacaagagaagacagaaacaagcugaggcaucuaauuucagucaaauuaggcaaaaucccaacaguagaaaacuccauuuuccacauggcagcuuggagcggguccgcaugccaugaugguagggaauggacauauaucggaguugauggcccugacaguaaugcauugcucaaaauaaaauauggagaagcauauacugacacauaccauuccuaugcaaacaacauccuaagaacacaagaaagugccugcaauugcaucgggggagauuguuaucuuaugauaacugauggcucagcuucagggauuaguaaaugcagauuucuuaagauucgagagggccgaauaauaaaagaaauauuuccaacaggaagaguagaacauacugaagaaugcacaugcggauuugccagcaauaaaaccauagaaugugccuguagagauaacaguuacacagcaaaaagacccuuugucaaauuaaauguggagacugauacagcggaaauaagauugaugugcacagagacuuauuuggacacccccagaccagaugauggcagcauaacagggccuugcgaaucuaauggggauaaagggcuuggaggcaucaagggaggauuuguucaucaaagaauggcauccaagauuggaaggugguacucucgaacgaugucuaaaaccaaaaggauggggauggaacuguaugucaaguaugauggagacccauggacugacagugacgcccuugcucuuaguggaguaaugguuccaauggaagaaccugguugguauuccuuuggcuucgaaauaaaagauaagaaaugugauguccccuguauuggaauagagaugguacaugaugguggaaaaaagacuuggcacucagcagcaacagccauuuacuguuuaaugggcucaggacaacugcuaugggacacugucacagguguugacauggcucuguaa

SEQ ID NO: 60719 - RNA, 1401 nt, Artificial Sequence
  derived and/or modified CDS sequence (wt) from neuraminidase__InfluenzaB__ABN50694
augcuaccuucaacuauacaaacguuaacccuauuucucacaucagggggaguguuauuaucacuauaugugucagcuucacugucauacuuacuguauucggauauauugcuaaaauuuucaccaacagaaauaacugcaccaacaaugccauuggauugugcaaacgcaucaaauguucaggcugugaaccguucugcaacaaaaggggugacacuucuucucccagaaccggaguggacauacccucguuuaucuugcccgggcucaaccuuucagaaagcacuccuaauuagcccucauagauucggagaaaccagaggaaacucagcucccuugauaauaagggaaccuuuuauugcuuguggaccaaaggaaugcaaacacuuugcucuaacccauuaugcagcucaaccagggggauacuacaauggaacaagagaagacagaaacaagcugaggcaucuaauuucagucaaauugggcaaaaucccaacaguagaaaacuccauuuuccacauggcagcuuggagcggguccgcaugccaugaugguagagaauggacauauaucggaguugauggcccugacaguaaugcauugcucaaaauaaaauauggagaagcauauacugacacauaccauuccuaugcaaacaacauccuaagaacacaagaaagugccugcaauugcaucgggggagauuguuaucuuaugauaacugauggcucagcuucagggauuaguaaaugcagauuucuuaagauucgagagggccgaauaauaaaagaaauauuuccaacaggaagaguagaacauacugaagaaugcacaugcggauuugccagcaauaaaaccauagaaugugccuguagagauaacaguuacacagcaaaaagacccuuugucaaauuaaauguggagacugauacagcggaaauaagauugaugugcacagagacuuauuuggacacccccagaccagaugauggaagcauaacagggccuugcgaaucuaauggggauaaagggaguggaggcaucaagggaggauuuguucaucaaagaauggcauccaagauuggaaggugguacucucgaacgaugucuaaaacuaaaaggauggggaugggacuguaugucaaguaugauggagacccauggacugacagugacgcccuugcucuuaguggaguaaugguuucaauggaagaaccugguugguauuccuuuggcuucgaaauaaaagauaagaaaugugauguucccuguauugggauagagaugguacaugauggcggaaaaaagacuuggcacucagcagcaacagccauuuacuguuuaaugggcucaggacaacugcuaugggacacugucacagguguugauauggcucuguaa

SEQ ID NO: 60720 - RNA, 1398 nt, Artificial Sequence
  derived and/or modified CDS sequence (wt) from neuraminidase__InfluenzaB__ABN50705
augcuaccuucaacuauacaaacguuaacccuauuucucacauuagggggaguguuauuaucacuauaugugucagccuuacugucauacuuacuguauucggauguauugcuaaaauuuucaccaaaaaugauugcaccaacaaugucguuggacugcgcgaacgcaucaaauguucaggcugugaaccauucugcaacagaagagaugacauuucuucucccagaaccggaguggacauacccucguuuaucuugccagggcucaaccuuucagaaagcacuccuaauuagcccucauagauucggagaagccaaaggaaacucagcucccuugauaauaagggaaccuuuuauugcuuguggaccaaaggagugcaaacacuuugcucuaacccauuaugcagcucaaccagggggauacuacaauggaacaagagaggacagaaacaagcugaggcaucugauuucagucaacuuaggcaaaaucccaacuguagaaaacuccauuuuccacauggcagcuuggaguggauccgcaugccaugaugguagagaauggacauauaucggaguugauggcccugacaguaaugcauugaucaaaauaaaauauggagaagcauacacugacaccuaccauuccuaugcaaacaacauccuaagaacacaagaaagugccugcaauugcaucgggggagauuguuaucuuaugauaacugauggcucagcuucaggaauuaguaaaugcagauuccuuaagauucgagagggucgaauaauaaaagaaauauuuccaacaggaagaguagagcauacugaagaaugcacaugcggauuugccagcaauaaaaccauagaaugugccuguagagauaacaguuacacagcaaaaagacccuuugucaaauuaaauguugagacugauacagcugaaauaagauugaugugcacagagacuuauuuggacacccccagaccagaugauggaagcauaacagggccuugcgaaucuaauggggacaaagggcauggagguaucaaaggaggauuuguccaucaaagaauggcauccaaaauuggaagaugguacucccgaacgaugucuaaaacuaaaagaauggggauggaacuguaugucaaguaugauggagacccauggacugacagugacgcccuugcuccuaguggaguaauggucucaauggaagaaccugguugguauucuuucggcuucgaaauaaaagauaagaaaugugauguccccuguauugggauagagaugguacaugaugguggaaaaaagacuuggcacucagcagcaacagccauuuacuguuuaaugggcucaggacaguugcuaugggacacugucacagguguugauauggcucuguaa

SEQ ID NO: 60721 - RNA, 1401 nt, Artificial Sequence
  derived and/or modified CDS sequence (wt) from neuraminidase__InfluenzaB__ABN50716
augcuaccuucaacuauacaaacguuaacccuauuucucacaucagggggagugcuauuaucacuauaugugucagcuucacugucauacuuacuguauucggguauauugcuaaaauuuucaccaacagaaauaacugcaccaacaaugccauuggauugugcaaacgcaucaaauguucaggcugugaaccguucugcaacaaaaggggugacacuucuucucccagaaccggaguggacauacccucguuuaucuugcccgggcucaaccuuucagaaagcacuccuaauuagcccucauagauucggagaaaccagaggaaacucagcucccuugauaauaagggaaccuuuuauugcuuguggaccaaaggaaugcaaacacuuugcucuaacccauuaugcagcucaaccagggggauacuacaauggaacaagagaagacagaaacaagcugaggcaucuaauuucagucaaauugggcaaaaucccaacaguagaaaacuccauuuuccacauggcagcuuggagcggguccgcaugccaugaugguagagaauggacauauaucggaguugauggcccugacaguaaugcauugcucaaaauaaaauauggagaagcauauacugacacauaccauuccuaugcaaacaacauccuaagaacacaagaaagugccugcaauugcaucgggggagauuguuaucuuaugauaacugauggcucagcuucagggauuaguaaaugcagauuucuuaagauucgagagggccgaauaauaaaagaaauauucccaacaggaagaguagaacauacugaagaaugcacaugcggauuugccagcaauaaaaccauagaaugugccuguagagauaacaguuacacagcaaaaagacccuuugucaaauuaaauguggagacugauacagcggaaauaagauugaugugcacagagacuuauuuggacacccccagaccagaugauggaagcauaacagggccuugcgaaucuaauggggauaaaggaaguggaggcaucaagggaggauuuguucaucaaagaauggcauccaagauuggaaggugguacucucgaacgaugucuaaaacuaaaaggauggggaugggacuguaugucaaguaugauggagacccauggacugacagugacgcccuugcucuuaguggaguaaugguuucaauggaagaaccugguugguauuccuuuggcuucgaaauaaaagauaagaaaugugauguccccuguauugggauagagaugguacaugaugguggaaaaaagacuuggcacucagcagcaacagccauuuacuguuuaaugggcucaggacaacugcuaugggacacugucacagguguugauauggcucuguaa

SEQ ID NO: 60722 - RNA, 1401 nt, Artificial Sequence
  derived and/or modified CDS sequence (wt) from neuraminidase__InfluenzaB__ABN50727
augcuaccuucaacuauacaaacguuaacccuauuucucacaucagggggaguguuauuaucacuauaugugucagcuucacugucauacuuacuauauucggauauauugcuaaaauuuucaccaacagaaauaacugcaccaacaaugccauuggauugugcaaacgcaucaaauguucaggcugugaaccguucugcaacaaaaggggugacacuucuucucccagaaccggaguggacauacccucguuuaucuugcccgggcucaaccuuucagaaagcacuccuaauuagcccucauagauucggagaaaccaaaggaaacucagcucccuugauaauaagggaaccuuuuauugcuuguggaccaaaggaaugcaaacacuuugcucuaacccauuaugcagcucaaccagggggauacuacaauggaacaagagaagacagaaacaagcugaggcaucuaauuucagucaaauugggcaaaaucccaacaguagaaaacuccauuuuccacauggcagcuuggagcggguccgcaugccaugaugguagagaauggacauauaucggaguugauggcccugacaguaaugcauugcucaaaauaaaauauggagaagcauauacugacacauaccauuccuaugcaaacaacauccuaagaacacaagaaagugccugcaauugcaucgggggagauuguuaucuuaugauaacugauggcucagcuucagggauuagugaaugcagauuucuuaagauucgagagggccgaauaauaaaagaaauauuuccaacaggaagaguagaacauacugaagaaugcacaugcggauuugccagcaauaaaaccauagaaugugccuguagagauaacaguuacacagcaaaaagacccuuugucaaauuaaauguggagacugauacagcagaaauaagauugaugugcacagagacuuauuuggacacccccagaccagaugauggaagcauaacagggccuugugaaucuaauggggauaaagggaguggaggcaucaagggaggauuuguucaucaaagaauggcauccaagauuggaaggugguacucucgaacgaugucuaaaacuaaaaggauggggaugggacuguaugucaaguaugauggagacccauggacugacagugaugcccuugcucuuaguggaguaaugguuucaauggaagaaccugguugguauuccuuuggcuucgaaauaaaagauaagaaaugugauguccccuguauugggauagagaugguacaugaugguggaaaaaagacuuggcacucagcagcaacagccauuuacuguuuaaugggcucaggacaacugcuaugggacacugucacagguguugauauggcucuguaa

SEQ ID NO: 60723 - RNA, 1401 nt, Artificial Sequence
  derived and/or modified CDS sequence (wt) from neuraminidase__InfluenzaB__ABN50738
augcuaccuucaacuauacaaacguuaacccuauuccucacaucagggggaguguuauuaucacuauaugugucagcuucacugucauacuuacuauauucggauauauugcuaaaauuuucaccaacagaaauaacugcaccaacaaugccauuggauugugcaaacgcaucaaauguucaggcugugaaccguucugcaacaaaaggggugacacuucuucucccagaaccggaguggacauacccgcguuuaucuugcccgggcucaaccuuucagaaagcacuccuaauuagcccucauagauucggagaaaccaaaggaaacucagcucccuugauaauaagggaaccuuuuauugcuuguggaccaaaggaaugcaaacacuuugcucuaacccauuaugcagcccaaccagggggauacuacaauggaacaagagaagacagaaacaagcugaggcaucuaauuucagucaaauugggcaaaaucccaacaguagaaaacuccauuuuccacauggcagcauggagcggguccgcaugccaugaugguaaagaauggacauauaucggaguugauggcccugacaguaaugcauugcucaaaauaaaauauggagaagcauauacugacacauaccauuccuaugcaaacaacauccuaagaacacaagaaagugccugcaauugcaucgggggaaauuguuaucuuaugauaacugauggcucagcuucagguauuagugaaugcagauuucuuaagauucgagaaggccgaauaauaaaagaaauauuuccaacaggaagaguagaacauacugaagaaugcacaugcggauuugccagcaauaaaaccauagaaugugccuguagagauaacaguuacacagcaaaaagacccuuugucaaauuaaauguggagacugauacagcagaaauaagauugaugugcacagagacuuauuuggacacccccagaccagaugauggaagcauaacagggccuugugaaucuaauggggauaaagggaguggaggcaucaagggaggauuuguucaucaaagaauggcauccaagauuggaaggugguacucucgaacgaugucuaaaacuaaaaggauggggaugggacuguaugucaaguaugauggagacccauggacugacagugaugcccuugcucuuaguggaguaaugguuucaauggaagaaccugguugguacuccuuuggcuucgaaauaaaagauaagaaaugugauguccccuguauugggauagagaugguacaugaugguggaaaggagacuuggcacucagcagcaacagccauuuacuguuuaaugggcucaggacaacugcuaugggacacugucacagguguugauauggcucuguaa

SEQ ID NO: 60724 - RNA, 1401 nt, Artificial Sequence
  derived and/or modified CDS sequence (wt) from neuraminidase__InfluenzaB__ABN50749
augcuaccuucaacuauacaaacauuaacccuauuucucacaucagggggaguauuauuaucacuauaugugucagcuucauugucauacuuacuauauucggauauauugcuaaaauucucaccaacagaaauaacugcaccaacaaugccauuggauugugcaaacgcaucaaauguucaggcugugaaccguucugcaacaaaaggggugacacuucuucucccagaaccggaguggacauacccgcguuuaucuugcccgggcucaaccuuucagaaagcacuccuaauuagcccucauagauucggagaaaccaaaggaaacucagcucccuugauaauaagggaaccuuuuauugcuuguggaccaaaggaaugcaaacacuuugcucuaacccauuaugcagcccaaccagggggauacuacaauggaacaagaggagacagaaacaagcugaggcaucuaauuucagucaaauugggcaaaaucccaacaguagaaaacuccauuuuccacauggcagcauggagcggguccgcaugccaugaugguaaagaauggacauauaucggaguugauggcccugacaguaaugcauugcucaaaauaaaauauggagaagcauauacugacacauaccauuccuaugcaaacaacauccuaagaacacaagaaagugccugcaauugcaucgggggaaauuguuaucuuaugauaacugauggcucagcuucagguauuagugaaugcagauuucuuaagauucgagagggccgaauaauaaaagaaauauuuccaacaggaagaguaaaacauacugaagaaugcacaugcggauuugccagcaauaaaaccauagaaugugccuguagagauaacaguuacacagcaaaaagacccuuugucaaauuaaacguggagacugauacagcagaaauaagauugaugugcacagagacuuauuuggacacccccagaccagaugauggaagcauaacagggccuugugaaucuaauggggacaaagggaguggaggcaucaagggaggauuuguucaucaaagaauggcauccaagauuggaaggugguacucucgaacgaugucuaaaacuaaaaggauggggaugggacuguaugucaaguaugauggagacccaugggcugacagugaugcccuugcucuuaguggaguaaugguuucaauggaagaaccugguugguacuccuuuggcuucgaaauaaaagauaagaaaugugauguccccuguauugggauagagaugguacaugaugguggaaaagagacuuggcacucagcagcaacagccauuuacuguuuaaugggcucaggacagcugcugugggacacugucacagguguugauauggcucuguaa

SEQ ID NO: 60725 - RNA, 1398 nt, Artificial Sequence
  derived and/or modified CDS sequence (wt) from neuraminidase__InfluenzaB__ABN51188
augcuaccuucaacuauacaaacguuaacucuauuucucacaucagggggaguguuauuaucacuauaugugucagccuuacugucauacuuacuguauucggauauauugcuaaaauuuucaccaaaaauaauugcaccaacaauguuguuggacugcgcgaacgcaucaaauguucaggcugugaaccauucugcaacaaaagagaugacauuucuucucccagaaccggaguggacauacccucguuuaucuugccagggcucaaccuuucagaaagcacuccuaauuagcccucauagauuuggagaagccaaaggaaacucagcucccuugauaauaagggaaccuuuuauugcuuguggaccaaaggagugcaaacacuuugcucuaacccauuaugcagcucaaccagggggauacuacaauggaacaagagaggacagaaacaagcugaggcaucugauuucagucaacuuaggcaaaaucccaacuguagaaaacuccauuuuccacauggcagcuuggaguggauccgcaugccaugaugguagagaauggacauauaucggaguugauggcccugacaguaaugcauugaucaaaauaaaauauggagaagcauacacugacacauaccauuccuaugcaaacaacauccuaagaacacaagaaagugccugcaauugcaucgggggagauuguuaucuuaugauaacugauggcucagcuucaggaauuaguaaaugcagauuccuuaagauucgagagggucgaauaauaaaagaaauauuuccaacaggaagaguagagcauacugaagaaugcacaugcggauuugccagcaauaaaaccauagaaugugcuuguagagauaacaguuacacagcaaaaagacccuuugucaaauuaaauguggagacugauacagcugaaauaagauugaugugcacagagacuuauuuggacacccccagaccagaugauggaagcauaacagggccuugcgaaucuaauggggacaaagggcguggaggugucaagggaggauuuguucaucaaagaauggcauccaagauuggaagaugguacucccgaacgaugucuaaaacugaaagaauggggauggaacuguaugucaaguaugauggagacccauggacugacagugacgcccuugcuccuaguggaguaauggucucaauggaagaaccugguugguauucuuucggcuucgaaauaaaagauaagaaaugugauguccccuguauugggauagagaugguacaugaugguggaaaaaagacuuggcacucagcagcaacagccauuuacuguuuaaugggcucaggacaguuacuaugggacacugucacagguguugauauggcucuguaa

SEQ ID NO: 60726 - RNA, 1398 nt, Artificial Sequence
  derived and/or modified CDS sequence (wt) from neuraminidase__InfluenzaB__ABN51199
augcuaccuucaacuauacaaacguuaacucuauuucucacaucagggggaguguuauuaucacuauaugugucagccuuacugucauacuuacuguauucggauauauugcuaaaauuuucaccaaaaauaauugcaccaacaaugucguuggacugcgcgaacgcaucaaauguucaggcugugaaccauucugcaacaaaagagaugacauuucuucucccagaaccggaguggacauacccucguuuaucuugccagggcucaaccuuucagaaagcacuccuaauuagcccucauagauuuggagaagccaaaggaaacucagcucccuugauaauaagggaaccuuuuauugcuuguggaccaaaggagugcaaacacuuugcucuaacccauuaugcagcucaaccagggggauacuacaauggaacaagagaggacagaaacaagcugaggcaucugauuucagucaacuuaggcaaaaucccaacuguagaaaacuccauuuuccacauggcagcuuggaguggauccgcaugccaugaugguagagaauggacauauaucggaguugauggcccugacaguaaugcauugaucaaaauaaaauauggagaagcauacacugacacauaccauuccuaugcaaacaacauccuaagaacacaagaaagugccugcaauugcaucgggggagauuguuaucuuaugauaacugauggcucagcuucaggaauuaguaaaugcagauuccuuaagauucgagagggucgaauaauaaaagaaauauuuccaacaggaagaguagagcauacugaagaaugcacaugcggauuugccagcaauaaaaccauagaaugugcuuguagagauaacaguuacacagcaaaaagacccuuugucaaauuaaauguggagacugauacagcugaaauaagauugaugugcacagagacuuauuuggacacccccagaccagaugauggaagcauaacagggccuugcgaaucuaauggggacaaagggcguggaggugucaagggaggauuuguucaucaaagaauggcauccaagauuggaagaugguacucccgaacgaugucuaaaacugaaagaauggggauggaacuguaugucaaguaugauggagacccauggacugacagugacgcccuugcuccuaguggaguaauggucucaauggaagaaccugguugguauucuuucggcuucgaaauaaaagauaagaaaugugauguccccuguauugggauagagaugguacaugaugguggaaaaaagacuuggcacucagcagcaacagccauuuacuguuuaaugggcucaggacaguugcuaugggacacugucacagguguugauauggcucuguaa

SEQ ID NO: 60727 - RNA, 1401 nt, Artificial Sequence
  derived and/or modified CDS sequence (wt) from neuraminidase__InfluenzaB__ABN58665
augcuaccuucaacuauacaaacguuaacccuauuucucacaucagggggaguguuguuaucacuauaugugucagccuuacugucauacuuacuguauucggauauauugcuaaaauuuucaccaacaaaaauaauugcaccaacaaugucguuggacugcgcgaacgcaucaaauguucaggcugugaaccauucugcaacagaagagaugacauuucuucucccagaaccggaguggacauacccucguuuaucuugccaggguucaaccuuucagaaagcacuccuaauuagcccucauagauucggagaagccaaaggaaacucagcucccuugauaauaagggaaccuuuuauugcuuguggaccaaaggaguguaaacacuuugcucuaacccauuaugcagcucaaccagggggauacuacaauggaacaagagaggacagaaacaagcugaggcaucugauuucagucaacuuaggcaaaaucccaacuguagaaaacuccauuuuccacauggcagcuuggaguggauccgcaugccaugaugguagagaauggacauauaucggaguugauggcccugacaguaaugcauugaucaaaauaaaauauggagaagcauacacugacacauaccauuccuaugcaaacaacauccuaagaacacaagaaagugccugcaauugcaucgggggagauuguuaucuuaugauaacugauggcucagcuucaggaauuaguaaaugcagauuccuuaagauucgagagggucgaauaauaaaagaaauauuuccaacaggaagaguagagcauacugaagaaugcacaugcggauuugccagcaauaaaaccauagaaugugccuguagagauaacaguuacacagcaaaaagacccuuugucaaauuaaauguggagacugauacagcugaaauaagauugaugugcacagagacuuauuuggacacccccagaccagaugauggaagcauaacagggccuugcgaaucuaaugggggcaaagggaguggagguaucaagggaggauuuguccaucaaagaauggcauccaagauuggaagaugguacucccgaacgaugucuaaaacuaaaagaauggggauggaacuguaugucaaguaugauggagacccauggacugacagugacgcccuugcuccuaguggaguaauggucucaauggaagaaccugguugguauucuuucggcuucgaaauaaaggauaagaaaugcgauguccccuguauugggauagagaugguacacgaugguggaaaaaagacuuggcacucagcagcaacagccauuuacuguuuaaugggcucaggacaguugcuaugggacacugucacagguguugauauggcucuguaa

SEQ ID NO: 60728 - RNA, 1401 nt, Artificial Sequence; identical to SEQ ID NO: 60615
  derived and/or modified CDS sequence (wt) from neuraminidase__InfluenzaB__ABN59449

SEQ ID NO: 60729 - RNA, 1398 nt, Artificial Sequence
  derived and/or modified CDS sequence (wt) from neuraminidase__InfluenzaB__ABR15999
augcuaccuucaacuauacaaacguuaacccuauuucucacaucagggggaguguuauuaucacuauaugugucagccuuacugucauacuuauuguauucggauauauugcuaaaauuuucaccaaaaauaauugcaccaacaacgucguuggacugcgcgaacgcaucaaauguucaggcugugaaccauucugcaacaaaagagaugaaauuccuucccccagaaccggaguggacauacccccguuuaucuugccaggguucaaccuuccagaaagcacucuuaauuagcccucauagauuuggagaagccaaaggaaacucagcucccuugauaauaagggaaccuuuuauugcuuguggaccaaaggagugcaaacacuuugcucuaacccauuaugcagcucaaccagggggauacuacaauggaacaagagaggacagaaacaagcugaggcaucugauuucagucaacuuaggcaaaaucccaacuguagaaaacuccauuuuccacauggcagcuuggaguggauccgcaugccaugaugguagagaauggacauauaucggaguugaugguccugacaguaaugcauugaucaaaauaaaauauggagaagcauacacugacacauaccauuccuaugcaaacaacauccuaagaacacaagaaagugccugcaauugcaucgggggagauuguuaucuuaugauaacugauggcucagcuucaggaauuaguaaaugcagauuccuuaagauccgagagggucgaauaauaaaagaaauauuuccaacaggaaggguagagcacacugaagaaugcacaugcggauuugccagcaacaaaaccauagaaugugccuguagagauaacaguuacacagcaaaaagacccuuugucaaauuaaauguggagacugauacagcugaaauaagauugaugugcacagagacuuauuuggacacccccagaccagaugauggaagcauaacagggccuugcgaaucuaauggggacaaagggaguggaggugucaagggaggauuuguucaucaaagaauggcauccaagauuggaagaugguacucccgaacgaugucuaaaacuaaaagaauggggauggaacuguaugucaaguaugauggagacccauggacugacagugacgcccuugcuccuaguggaguaauggucucaauggaagaaccugguugguacucuuucggcuucgaaauaaaagauaagaaaugugauguccccuguauugggauagagaugguacaugaugguggaaaaaggacuuggcacucagcagcaacagccauuuacuguuuaaugggcucaggacaguugcuaugggacacugucacagguguuaauauggcucuguaa

SEQ ID NO: 60730 - RNA, 1401 nt, Artificial Sequence
  derived and/or modified CDS sequence (wt) from neuraminidase__InfluenzaB__ABR16010
augcuaccuucaacuauacaaacguuaacccuauuucucacaucagggggaguguuauuaucacuauaugugucagcuucacugucauacuuacuauauucggauauauugcuaaaauuuucaccaacagaaauaacugcaccaacaaugccauuggauugugcaaacgcaucaaauguucaggcugugaaccguucugcaacaaaaggggugacacuucuucucccagaaccggaguggacauacccucguuuaucuugcccgggcucaaccuuucagaaagcacuccuaauuagcccucauagauucggagaaaccaaaggaaacucagcucccuugauaauaagggaaccuuuuauugcuuguggaccaaaggaaugcaaacacuuugcucuaacccauuaugcagcucaaccagggggauacuacaauggaacaagagaagacagaaacaagcugaggcaucuaauuucagucaaauugggcaaaaucccaacaguagaaaacuccauuuuccacauggcagcuuggagcggguccgcaugccaugaugguagagaauggacauauaucggaguugauggcccugacaguaaugcauugcucaaaauaaaauauggagaagcauauacugacacauaccauuccuaugcaaacaacauccuaagaacacaagaaagugccugcaauugcaucgggggagauuguuaucuuaugauaacugauggcucagcuucagggauuagugaaugcagauuucuuaagauuagagagggccgaauaauaaaagaaauauuuccaacaggaagaguagaacauacugaagaaugcacaugcggguuugccagcaauaaaaccauagaaugugccuguagagauaacaguuacacagcaaaaagacccuuugucaaauuaaauguggagacugauacagcggaaauaagauugaugugcacagaaacuuauuuggacacccccagaccagaugauggaagcauaacagggccuugcgaaucuaauggggauaaagggaguggaggcaucaagggaggauuuguucaucaaagaauggcauccaagauuggaaggugguacucucgaacgaugucuaaaacuaaaaggauggggaugggacuguaugucaaguaugauggagacccauggacugacagugaugcccuugcucuuaguggaguaaugguuucaauggaagaaccugguugguauuccuuuggcuucgaaauaaaagauaagaaaugugauguccccuguauugggauagagaugguacaugaugguggaaaaaagacuuggcacucagcagcaacagccauuuacuguuuaaugggcucaggacaacugcuaugggacacugucacagguguugauauggcucuguaa

SEQ ID NO: 60731 - RNA, 1401 nt, Artificial Sequence
  derived and/or modified CDS sequence (wt) from neuraminidase__InfluenzaB__ABR16021
augcuaccuucaacuauacaaacguuaacccuauuucucacaucagggggaguauuauuaucacuauaugugucagcuucauuaucauacuuacuauauucggauauauugcuaaaauucucaccaacagaaauaacugcaccaacaaugccauuggauugugcaaacgcaucaaauguucaggcugugaaccguucugcaacaaaaggggugacacuucuucucccagaaccggaguggacauacccgcguuuaucuugcccgggcucaaccuuucagaaagcacuccuaauuagcccucauagauucggagaaaccaaaggaaacucagcucccuugauaauaagggaaccuuuuauugcuuguggaccaaaugaaugcaaacacuuugcucuaacccauuaugcagcccaaccagggggauacuacaauggaacaagaggagacagaaacaagcugaggcaucuaauuucagucaaauugggcaaaaucccaacaguagaaaacuccauuuuccacauggcagcauggagcggguccgcaugccaugaugguaaggaauggacauauaucggaguugauggaccugacaauaaugcauugcucaaaauaaaauauggagaagcauauacugacacauaccauuccuaugcaaacaaaauccuaagaacacaagaaagugccugcaauugcaucgggggaaauuguuaucuuaugauaacugauggcucagcuucagguguuagugaaugcagauuucuuaagauucgaaagggccgaauaauaaaagaaauauuuccaacaggaagaguaaaacacacugaggaaugcacaugcggauuugccagcaauaaaaccauagaaugugccuguagagauaacaguuacacagcaaaaagacccuuugucaaauuaaacguggagacugauacagcagaaauaagauugaugugcacagauacuuauuuggacacccccagaccagaugauggaagcauaacaggcccuugugaaucuaauggggacaaagggaguggaggcaucaagggaggauuuguucaucaaagaauggcauccaagauuggaaggugguacucucgaacgaugucuaaaacugaaaggauggggaugggacuguaugucaaguaugauggagacccaugggcugacagugaugcccuagcuuuuaguggaguaaugguuucaaugaaagaaccugguugguacuccuuuggcuucgaaauaaaagauaagaaaugcgauguccccuguauugggauagagaugguacaugaugguggaaaagagacuuggcacucagcagcaacagccauuuacuguuuaaugggcucaggacagcugcugugggacacugucacagguguugacauggcucuguaa

SEQ ID NO: 60732 - RNA, 1401 nt, Artificial Sequence
  derived and/or modified CDS sequence (wt) from neuraminidase__InfluenzaB__ACA64903
augcuaccuucaacuauacaaacguuaacccuauuucucacaucagggggaguauuauuaucacuauaugugucagcuucauuaucauacuuacuauauucggauauauugcuaaaauucucaccaacagaaauaacugcaccaacaaugccauuggauugugcaaacgcaucaaauguucaggcugugaaccguucugcaacaaaaggggugacacuucuucucccagaaccggaguggacauacccgcguuuaucuugcccgggcucaaccuuucagaaagcacuccuaauuagcccucauagauuuggagaaaccaaaggaaacucagcucccuugauaauaagggaaccuuuuauugcuuguggaccaaaugaaugcaaacacuuugcucuaacccauuaugcagcccaaccagggggauacuacaauggaacaagaggagacagaaacaagcugaggcaucuaauuucagucaaauugggcaaaaucccaacaguagaaaacuccauuuuccacauggcagcauggagcggguccgcaugccaugaugguaaggaauggacauauaucggaguugauggaccugacaauaaugcauugcucaaaauaaaauauggagaagcauauacugacacauaccauuccuaugcaaacaaaauccuaagaacacaagaaagugccugcaauugcaucgggggaaauuguuaucuuaugauaacugauggcucagcuucagguguuagugaaugcagauuucuuaagauucgagagggccgaauaauaaaagaaauauuuccaacaggaagaguaaaacacacugaggaaugcacaugcggauuugccagcaauaaaaccauagaaugugccuguagagauaacaguuacacagcaaaaagacccuuugucaaauuaaacguggagacugauacagcagaaauaagauugaugugcacagauacuuauuuggacacccccagaccagaugauggaagcauaacaggcccuugugaaucuaauggggacaaagggaguggaggcaucaagggaggauuuguucaucaaagaauggcauccaagauuggaaggugguacucucgaacgaugucuaaaacugaaaggauggggaugggacuguaugucaaguaugauggagacccaugggcugacagugaugcccuagcuuuuaguggaguaaugguuucaaugaaagaaccugguugguacuccuuuggcuucgaaauaaaagauaagaaaugcgauguccccuguauugggauagagaugguacaugaugguggaaaagagacuuggcacucagcagcaacagccauuuacuguuuaaugggcucaggacagcugcugugggacacugucacagguguugacauggcucuguaa

SEQ ID NO: 60733 - RNA, 1401 nt, Artificial Sequence
  derived and/or modified CDS sequence (wt) from neuraminidase__InfluenzaB__ACA64914
augcuaccuucaacuauacaaacguuaacccuauuucucacaucagggggaguguuauuaucacuauaugugucagcuucauugucauacuuacuauauucggauauauugcuaaaauuuucacaaacagaaauaacugcaccaauaaugccacuggauugugcaaacgcaucaaauguucaggcugugaaccguucugcagcaaaaggggugacacuucuucucccagaaccggaguggacauacccucguuuaucuugcccgggcucaaccuuucagaaagcacuccuaauuagcccccauagauucggagaaaccaaaggaaacucagcucccuugauaauaagggaaccuuuuauugcuuguggaccaacggaaugcaaacacuuugcucuaacccauuaugcagcccaaccagggggauacuacaauggaacaagagaagacagaaacaagcugaggcaucuaauuucagucaaauugggaaaaaucccaacaguagaaaacuccauuuuccacauggcagcuuggagcggguccgcaugccaugaugguaaagaauggacauaugucggaguugauggccccgacaguaaugcauugcucaaaauaaaauauggagaagcauauacugacacauaccauuccuaugcaaaaaacauccuaaggacacaagaaagugccugcaauugcaucgggggagauuguuaucuuaugauaacugauggcccagcuucagggauuagugaaugcagauuccuuaagauucgagagggccgaauaauaaaagaaauauuuccaacaggaagaguaaaacauacugaggaaugcacaugcggauuugccagcaacaaaaccauagaaugugcuuguagagauaacaguuacacagcaaaaagacccuuugucaaauuaaauguggagacugauacagcggaaauaagauugaugugcacagagacuuauuuggacacccccagaccaaaugauggaagcauaacagggccuugcgaaucugauggggacaaagggaguggaggcaucaagggaggauuuguucaucaaagaauggcauccaagauuggaaggugguacucccgaacgaugucuaaaacuaaaagaauggggaugggacuguauguaaaguaugauggagacccauggacugacagugaagcccuugcucuuaguggaguaaugguuucaauggacgaaccugguugguauuccuuuggcuucgaaauaaaagauaagaaaugugauguccccuguauugggauagaaaugguacaugauggugggaaaacgacuuggcacucagcagcaacagccauuuacuguuuaaugggcucaggacaacugcugugggacacugucacagguguugauauggcucuguaa

SEQ ID NO: 60734 - RNA, 1401 nt, Artificial Sequence
  derived and/or modified CDS sequence (wt) from neuraminidase__InfluenzaB__ACA64936
augcuaccuucaacuauacaaacguuaacccuauuucucacaucagggggaguauuauuaucacuauaugugucagcuucauuaucauacuuacuauauucggauauauugcuaaaauucucaccaacagaaauaacugcaccaacaaugccauuggauugugcaaacgcaucaaauguucaggcugugaaccguucugcaacaaaaggggugacacuucuucucccagaaccggaguggacauacccgcguuuaucuugcccgggcucaaccuuucagaaagcacuccuaauuagcccucauagauucggagaaaccaaaggaaacucagcucccuugauaauaagggaaccuuuuauugcuuguggaccaaaugaaugcaaacacuuugcucuaacccauuaugcagcccaaccagggggauacuacaauggaacaagaggagacagaaacaagcugaggcaucuaauuucagucaaauugggcaaaaucccaacaguagaaaacuccauuuuccacauggcagcauggagcggguccgcaugccaugaugguaaggaauggacauauauuggaguugauggcccugacaauaaugcauugcucaaaauaaaauauggagaagcauauacugacacauaccauuccuaugcaaacaaaauccuaagaacacaagaaagugccugcaauugcaucgggggaaauuguuaucuuaugauaacugauggcucagcuucagguguuagugaaugcagauuucuuaagauucgagagggccgaauaauaaaagaaauauuuccaacaggaagaguaaaacacacugaggaaugcacaugcggauuugccagcaauaaaaccauagaaugugccuguagagauaacaguuacacagcaaaaagacccuuugucaaauuaaacguggagacugauacagcagaaauaagauugaugugcacagauacuuauuuggacacccccagaccagaugauggaagcauaacaggcccuugugaaucuaauggggauaaagggaguggaggcaucaagggaggauuuguucaucaaagaauggcauccaagauuggaaggugguacucucgaacgaugucuaaaacugaaaggauggggaugggacuguaugucaaguaugauggagacccaugggcugacagugaugcccuagcuuuuaguggaguaaugguuucaaugaaagaaccugguugguacuccuuuggcuucgaaauaaaagauaagaaaugcgauguccccuguauugggauagagaugguacaugaugguggaaaagagacuuggcacucagcagcaacagccauuuacuguuuaaugggcucaggacagcugcugugggacacugucacagguguugacauggcucuguaa

SEQ ID NO: 60735 - RNA, 1401 nt, Artificial Sequence
  derived and/or modified CDS sequence (wt) from neuraminidase__InfluenzaB__ACA64969
augcuaccuucaacuauacaaacguuaacccuauuucucacaucagggggaguauuauuaucacuauaugugucagcuucauuaucauacuuacuauauucggauauauugcuaaaauucucaccaacagaaauaacugcaccaacaaugccauuggauugugcaaaugcaucaaauguucaggcugugaaccguucugcagcaaaaggggugacacuucuucucccagaaccggaguggacauacccgcguuuaucuugcccgggcucaaccuuucagaaagcacuccuaauuagcccucauagauucggagaaaccaaaggaaacucagcucccuugauaauaagggaaccuuuuauugcuuguggaccaaaugaaugcaaacacuuugcucuaacccauuaugcagcccaaccagggggauacuacaauggaacaagaggagacagaaacaagcugaggcaucuaauuucagucaaauugggcaaaaucccaacaguagaaaacuccauuuuccacauggcagcauggagcggguccgcaugccaugaugguaaggaauggacauauaucggaguugauggcccugacaauaaugcauugcucaaaauaaaauauggagaagcauauacugacacauaccauuccuaugcaaacaaaauccuaagaacacaagaaagugccugcaauugcaucgggggaaauuguuaucuuaugauaacugauggcucagcuucagguguuagugaaugcagauuucuuaagauucgagagggccgaauaauaaaagaaauauuuccaacaggaagaguaaaacacacugaggaaugcacaugcggauuugccagcaauaaaaccauagaaugugccuguagagauaacaguuacacagcaaaaagacccuuugucaaauuaaacguggagacugauacagcagaaauaagauugaugugcacagauacuuauuuggacacccccagaccagaugauggaagcauaacaggcccuugugaaucuaauggggacaaagggaguggaggcaucaagggaggauuuguucaucaaagaauggcauccaagauuggaaggugguacucucgaacgaugucuaaaacugaaaggauggggaugggacuguaugucaaguaugauggagacccaugggcugacagugaugcccuagcuuuuaguggaguaaugguuucaaugaaagaaccugguugguacuccuuuggcuucgaaauaaaagauaagaaaugcgaugucccuuguauugggauagagaugguacaugaugguggaaaagagacuuggcacucagcagcaacagccauuuacuguuuaaugggcucaggacagcugcugugggacacugucacagguguugacauggcucuguaa

SEQ ID NO: 60736 - RNA, 1401 nt, Artificial Sequence
  derived and/or modified CDS sequence (wt) from neuraminidase__InfluenzaB__ACA64980
augcuaccuucaacuauacaaacguuaacccuauuucucacaucagggggaguauuauuaucacuauaugugucagcuucauuaucauacuuacuauauucggauauauugcuaaaauucucaccaacagaaauaacugcaccaacaaugucauuggauugugcaaacgcaucaaauguucaggcugugaaccguucugcaacaaaaggggugacacuucuucucccagaaccggaguggacauacccgcguuuaucuugcccgggcucaaccuuucagaaagcacuccuaauuagcccucauagauucggagaaaccaaaggaaacucagcucccuugauaauaagggaaccuuuuauugcuuguggaccaaaugaaugcaaacacuuugcucuaacccacuaugcagcccaaccagggggauacuacaauggaacaagaggagacagaaacaagcugaggcaucuaauuucagucaaauugggcaaaaucccaacaguagaaaacuccauuuuccacauggcagcauggagcggguccgcaugccaugaugguaaggaauggacauauaucggaguugauggcccugacaauaaugcacugcucaaaauaaaauauggagaagcauauacugacacauaccauuccuaugcaagcaaaauccuaagaacgcaagaaagugccugcaauugcaucgggggaaauuguuaucuuaugauaacugauggcucagcuucagguguuagugaaugcagauuucuuaagauucgagagggccgaauaauaaaagaaauauuuccaacaggaagaguaaaacacacugaggaaugcacaugcggauuugccagcaauaaaaccauagaaugugccuguagagauaacaguuacacagcaaaaagacccuuugucaaauuaaacguggagacugauacagcagaaauaagauugaugugcacagauacuuauuuggacacccccagaccagaugauggaagcauaacaggcccuugugaaucuaauggggacaaagggaguggaggcaucaagggaggauuuguucaucagagaauggcauccaagauuggaaggugguacucucgaacgaugucuaaaacugaaaggauggggaugggacuguaugucaaguaugauggagacccaugggcugacagugaugcccuagcuuuuaguggaguaaugguuucaaugaaagaaccugguugguacuccuuuggcuucgaaauaaaagauaagaaaugcgauguccccuguauugggauagagaugguacaugaugguggaaaagagacuuggcacucagcagcaacagccauuuacuguuuaaugggcucaggacaguugcugugggacacugucacagguguugacauggcucuguaa

SEQ ID NO: 60737 - RNA, 1401 nt, Artificial Sequence
  derived and/or modified CDS sequence (wt) from neuraminidase__InfluenzaB__ACA64991
augcuaccuucaacuauacaaacguuaacccuauuucucacaucagggggaguauuauuaucacuauaugugucagcuucauuaucauacuuacuauauucggauauauugcuaaaauucucaccaacagaaauaacugcaccaacaaugccauuggauugugcaaacgcaucaaauguucaugcugugaaccguucugcaacaaaaggggugacacuucuucucccagaaccggaguggacauacccgcguuuaucuugcccgggcucaaccuuucagaaagcacuccuaauuagcccucauagauucggagaaaccaaaggaaacucagcucccuugauaauaagggaaccuuuuauugcuuguggaccaaaugaaugcaaacacuuugcucuaacccauuaugcagcccaaccagggggauacuacaauggaacaagaggggacagaaacaagcugaggcaucuaauuucagucaaauugggcaaaaucccaacaguagaaaacuccauuuuccacauggcagcauggagcggguccgcaugccaugaugguaaggaauggacauauaucggaguugauggcccugacaauaaugcauugcucaaaauaaaauauggagaagcauauacugacacauaccauuccuaugcaaacaacauccuaagaacacaagaaagugccugcaauugcaucgggggaaauuguuaucuuaugauaacugauggcucagcuucagguguuagugaaugcagauuucuuaagauucgagagggccgaauaauaaaagaaauauuuccaacaggaagaguaaaacauacugaggaaugcacaugcggauuugccagcaauaaaaccauagaaugugccuguagagauaacaguuacacagcaaaaagacccuuugucaaauugaacguggaaacugauacagcagaaauaagauugaugugcacagauacuuauuuggacacccccagaccagaugauggaagcauaacaggcccuugugaaucuaauggggacaaagggaguggaggcaucaagggaggauuuguucaucaaagaauggcauccaagauuggaaggugguacucucgaacgaugucuaaaacugaaaggauggggaugggacuguaugucaaguaugauggagacccaugggcugacagugaugcccuugcuuuugguggaguaaugguuucaaugaaagaaccugguugguacuccuuuggcuucgaaauaaaagauaagaaaugcgauguccccuguauugggauagagaugguacaugaugguggaaaagagacuuggcacucagcagcaacagccauuuacuguuuaaugggcucaggacagcugcugugggacacugucacagguguugacauggcucuguaa

SEQ ID NO: 60738 - RNA, 1401 nt, Artificial Sequence
  derived and/or modified CDS sequence (wt) from neuraminidase__InfluenzaB__ACA65013
augcuaccuucaacuauacaaacguuaacccuauuucuaacaucagggggaguauuauuaucacuauaugugucagcuucauuaucauacuuacuauauucggauauauugcuaaaauucucaccaacagaaauaacugcaccaacaaugccauuggauugugcaaacgcaucaaauguucaggcugugaaccguucugcaacaaaaggggugacacuucuucucccagaaccggaguggacauacccgcguuuaucuugcccgggcucaaccuuucagaaagcacuccuaauuagcccucauagauucggagaaaccaaaggaaacucagcucccuugauaauaagggaaccuuuuauugcuuguggaccaaaugaaugcaaacacuuugcucuaacccauuaugcagcccaaccagggggauacuacaauggaacaagaggagacagaaacaagcugaggcaucuaauuucagucaaauugggcaaaaucccaacaguagaaaacuccauuuuccacauggcagcauggagcggguccgcaugccaugaugguaaggaauggacauauauuggaguugauggcccugacaauaaugcauugcucaaaauaaaauauggagaagcauauacugacacauaccauuccuaugcaaacaaaauccuaagaacacaagaaagugccugcaauugcaucgggggaaauuguuaucuuaugauaacugauggcucagcuucagguguuagugaaugcagauuucuuaagauucgagagggccgaauaauaaaagaaauauuuccaacaggaagaguaaaacacacugaggaaugcacaugcggauuugccagcaauaaaaccauagaaugugccuguagagauaacaguuacacagcaaaaagacccuuugucaaauuaaacguggagacugauacagcagaaauaagauugaugugcacagauacuuauuuggacacccccagaccagaugauggaagcauaacaggcccuugugaaucuaauggggacaaagggaguggaggcaucaagggaggauuuguucaucaaagaauggcauccaagauuggaaggugguacucucgaacgaugucuaaaacugaaaggauggggaugggacuguaugucaaguaugauggagacccaugggcugacagugaugcccuagcuuuuaguggaguaaugguuucaaugaaagaaccugguugguacuccuuuggcuucgaaauaaaagauaagaaaugcgauguccccuguauugggauagagaugguacaugaugguggaaaagagacuuggcacucagcagcaacagccauuuacuguuuaaugggcucaggacagcugcugugggacacugucacagguguugacauggcucuguaa

SEQ ID NO: 60739 - RNA, 1401 nt, Artificial Sequence
  derived and/or modified CDS sequence (wt) from neuraminidase__InfluenzaB__ACA65024
augcuaccuucaacuauacaaacguuaacccuauuucucacaucagggggaguauuauuaucacuauaugugucagcuucauuaucauacuuacuauauucggauauauugcuaaaauucucaccaacagaaauaacugcaccaacaaugccauuggauugugcaaacgcaucaaauguucaggcugugaaccguucugcaacaaaaggggugacacuucuucucccagaaccggaguggacauacccgcguuuaucuugcccgggcucaaccuuucagaaagcacuccuaauuagcccucauagauucggagaaaccaaaggaaacucagcucccuugauaauaagggaaccuuuuauugcuuguggaccaaaugaaugcaaacacuuugcucuaacccauuaugcagcccaaccagggggauacuacaauggaacaagaggagacagaaacaagcugaggcaucuaauuucagucaaauugggcaaaaucccaacaguagaaaacuccauuuuccacauggcagcauggagcggguccgcaugccaugaugguaaggaauggacauauauuggaguugauggcccugacaauaaugcauugcucaaaauaaaauauggagaagcauauacugacacauaccauuccuaugcaaacaaaauccuaagaacacaagaaagugccugcaauugcaucgggggaaauuguuaucuuaugauaacugauggcucagcuucagguguuagugaaugcagauuucuuaagauucgagagggccgaauaauaaaagaaauauuuccaacaggaagaguaaaacacacugaggaaugcacaugcggauuugccagcaauaaaaccauagaaugugccuguagagauaacaguuacacagcaaaaagacccuuugucaaauuaaacguggagacugauacagcagaaauaagauugaugugcacagauacuuauuuggacacccccagaccagaugauggaagcauaacaggcccuugugaaucuaauggggacaaagggaguggaggcaucaagggaggauuuguucaucaaagaauggcauccaagauuggaaggugguacucucgaacgaugucuaaaacugaaaggauggggaugggacuguaugucaaguaugauggagacccaugggcugacagugaugcccuagcuuuuaguggaguaaugguuucaaugaaagaaccugguugguacuccuuuggcuucgaaauaaaagauaagaaaugcgauguccccuguauugggauagagaugguacaugaugguggaaaagagacuuggcacucagcagcaacagccauuuacuguuuaaugggcucaggacagcugcugugggacacugucacagguguugacauggcucuguaa

SEQ ID NO: 60740 - RNA, 1401 nt, Artificial Sequence
  derived and/or modified CDS sequence (wt) from neuraminidase__InfluenzaB__ACA65035
augcuaccuucaacuauacaaacguuaacccuauuucucacaucagggggaguauuauuaucacuauaugugucagcuucauuaucauacuuacuauauucggauauauugcuaaaauucucaccaacagaaauaacugcaccaacaaugccauuggauugugcaaacgcaucaaauguucaggcugugaaccguucugcaacaaaaggggugacacuucuucucccagaaccggaguggacauacccgcguuuaucuugcccgggcucaaccuuucagaaagcacuccuaauuagcccucauagauucggagaaaccaaaggaaacucagcucccuugauaauaagggaaccuuuuauugcuuguggaccaaaugaaugcaaacacuuugcucuaacccacuaugcagcccaaccagggggauacuacaauggaacaagaggagacagaaacaagcugaggcaucuaauuucagucaaauugggcaaaaucccaacaguagaaaacuccauuuuccacauggcagcauggagcggguccgcaugccaugaugguaaggaauggacauauaucggaguugauggcccugacaauaaugcacugcucaaaauaaaauauggagaagcauauacugacacauaccauuccuaugcaagcaaaauccuaagaacgcaagaaagugccugcaauugcaucgggggaaauuguuaucuuaugauaacugauggcucagcuucagguguuagugaaugcagauuucuuaagauucgagagggccgaauaauaaaagaaauauuuccaacaggaagaguaaaacacacugaggaaugcacaugcggauuugccagcaauaaaaccauagaaugugccuguagagauaacaguuacacagcaaaaagacccuuugucaaauuaaacguggagacugauacagcagaaauaagauugaugugcacagauacuuauuuggacacccccagaccagaugauggaagcauaacaggcccuugugaaucuaauggggacaaagggaguggaggcaucaagggaggauuuguucaucagagaauggcauccaagauuggaaggugguacucucgaacgaugucuaaaacugaaaggauggggaugggacuguaugucaaguaugauggagacccaugggcugacagugaugcccuagcuuuuaguggaguaaugguuucaaugaaagaaccugguugguacuccuuuggcuucgaaauaaaagauaagaaaugcgauguccccuguauugggauagagaugguacaugaugguggaaaagagacuuggcacucagcagcaacagccauuuauuguuuaaugggcucaggacaguugcugugggacacugucacagguguugacauggcucuguaa

SEQ ID NO: 60741 - RNA, 1401 nt, Artificial Sequence
  derived and/or modified CDS sequence (wt) from neuraminidase__InfluenzaB__ACA65046
augcuaccuucaacuauacaaacguuaacccuauuucucacaucagggggaguauuauuaucacuauaugugucagcuucauuaucauacuuacuauauucggauauauugcuaaaauucucaccaacagaaauaacugcaccaacaaugccauuggauugugcaaacgcaucaaauguucaggcugugaaccguucugcaacaaaaggggugacacuucuucucccagaaccggaguggacauacccgcguuuaucuugcccgggcucaaccuuucagaaagcacuccuaauuagcccucauagauucggagaaaccaaaggaaauucagcucccuugauaauaagggaaccuuuuauugcuuguggaccaaaugaaugcaaacacuuugcucuaacccauuaugcagcccaaccagggggauacuacaauggaacaagaggagacagaaacaagcugaggcaucuaauuucagucaaauugggcaaaaucccaacaguagaaaacuccauuuuccacauggcagcauggagcggguccgcaugccaugaugguaaggaauggacauauauuggaguugauggcccugacaauaaugcauugcucaaaauaaaauauggagaagcauauacugacacauaccauuccuaugcaaacaaaauccuaagaacacaagaaagugccugcaauugcaucgggggaaauuguuaucuuaugauaacugauggcucagcuucagguguuagugaaugcagauuucuuaagauucgagagggccgaauaauaaaagaaauauuuccaacaggaagaguaaaacacacugaggaaugcacaugcggauuugccagcaauaaaaccauagaaugugccuguagagauaacaguuacacagcaaaaagacccuuugucaaauuaaacguggagacugauacagcagaaauaagauugaugugcacagauacuuauuuggacacccccagaccagaugauggaagcauaacaggcccuugugaaucuaauggggacaaagggaguggaggcaucaagggaggauuuguucaucaaagaauggcauccaagauuggaaggugguacucucgaacgaugucuaaaacugaaaggauggggaugggacuguaugucaaguaugauggagacccaugggcugacagugaugcccuagcuuuuaguggaguaaugguuucaaugaaagaaccugguugguacuccuuuggcuucgaaauaaaagauaagaaaugcgauguccccuguauugggauagagaugguacaugaugguggaaaagagacuuggcacucagcagcaacagccauuuacuguuuaaugggcucaggacagcugcugugggacacugucacagguguugacauggcucuguaa

SEQ ID NO: 60742 - RNA, 1401 nt, Artificial Sequence
  derived and/or modified CDS sequence (wt) from neuraminidase__InfluenzaB__ACA65057
augcuaccuucaacuauacaaacguuaacccuauuucucacaucagggggaguauuauuaucacuauaugugucagcuucauuaucauacuuacuauauucggauauauugcuaaaauucucaccaacagaaauaacugcaccaacaaugccauuggauugugcaaacgcaucaaauguucaggcugugaaccguucugcaacaaaaggggugacacuucuucucccagaaccggaguggacauacccgcguuuaucuugcccgggcucaaccuuucagaaagcacuccuaauuagcccucauagauucggagaaaccaaaggaaacucagcucccuugauaauaagggaaccuuuuauugcuuguggaccaaaugaaugcaaacacuuugcucuaacccauuaugcagcccaaccagggggauacuacaauggaacaagaggagacagaaacaagcugaggcaucuaauuucagucaaauugggcaaaaucccaacaguagaaaacuccauuuuccacauggcagcauggagcggguccgcaugccaugaugguaaggaauggacauauaucggaguugauggcccugacaauaaugcauugcucaaaauaaaauauggagaagcauauacugacacauaccauuccuaugcaaacaaaauccuaagaacacaagaaagugccugcaauugcaucgggggaaauuguuaucuuaugauaacugauggcucagcuucagguguuagugaaugcagauuucuuaagauucgagagggccgaauaauaaaagaaauauuuccaacaggaagaguaaaacacacugaggaaugcacaugcggauuugccagcaauaaaaccauagaaugugccuguagagauaacaguuacacagcaaaaagacccuuugucaaauuaaacguggaggcugauacagcagaaauaagauugaugugcacagauacuuauuuggacacccccagaccagaugauggaagcauaacaggcccuugugaauuuaauggggacaaagggaguggaggcaucaagggaggauuuguucaucaaagaauggcauccaagauuggaaggugguacucucgaacgaugucuaaaacugaaaggauggggaugggacuguaugucaaguaugauggagacccaugggcugacagugaugcccuagcuuuuaguggaguaaugguuucaaugaaagaaccugguugguacuccuuuggcuucgaaauaaaagauaagaaaugcgauguccccuguauugggauagagaugguacaugaugguggaaaagagacuuggcacucagcagcaacagccauuuacuguuuaaugggcucaggacagcugcugugggacacugucacagguguugacauggcucuguaa

SEQ ID NO: 60743 - RNA, 1401 nt, Artificial Sequence; identical to SEQ ID NO: 60739
  derived and/or modified CDS sequence (wt) from neuraminidase__InfluenzaB__ACA65068

SEQ ID NO: 60744 - RNA, 1401 nt, Artificial Sequence; identical to SEQ ID NO: 60739
  derived and/or modified CDS sequence (wt) from neuraminidase__InfluenzaB__ACA65079

SEQ ID NO: 60745 - RNA, 1401 nt, Artificial Sequence
  derived and/or modified CDS sequence (wt) from neuraminidase__InfluenzaB__ACA65090
augcuaccuucaacuauacaaacguuaacccuauuucucacaucagggggaguauuauuaucacuauaugugucagcuucauuaucauacuuacuauauucggauauauugcuaaaauucucaccaacagaaauaacugcaccaacaaugccauuggauugugcaaacgcaucaaauguucaggcugugaaccguucugcaacaaaaggggugacacuucuucucccagaaccggaguggacauacccgcguuuaucuugcccgggcucaaccuuucagaaagcacuccuaauuagcccucauagauucggagaaaccaaaggaaacucagcucccuugauaauaagggaaccuuuuauugcuuguggaccaaaugaaugcaaacacuuugcucuaacccauuaugcagcccaaccagggggauacuacaauggaacaagaggagacagaaacaagcugaggcaucuaauuucagucaaauugggcaaaaucccaacaguagaaaacuccauuuuccacauggcagcauggagcggguccgcaugccaugaugguaaggaauggacauauaucggaguugauggaccugacaauaaugcauugcucaaaauaaaauauggagaagcauauacugacacauaccauuccuaugcaaacaaaauccuaagaacacaagaaagugcaugcaauugcaucgggggaaauuguuaucuuaugauaacugauggcucagcuucagguguuagugaaugcagauuucuuaagauucgagagggccgaauaauaaaagaaauauuuccaacaggaagaguaaaacacacugaggaaugcacaugcggauuugccagcaauaaaaccauagaaugugccuguagagauaacaguuacacagcaaaaagacccuuugucaaauuaaacguggagacugauacagcagaaauaagauugaugugcacagauacuuauuuggacacccccagaccagaugauggaagcauaacaggcccuugugaaucuaauggggacaaagggaguggaggcaucaagggaggauuuguucaucaaagaauggcauccaagauuggaaggugguacucucgaacgaugucuaaaacugaaaggauggggaugggacuguaugucaaguaugauggagacccaugggcugacagugaugcccuagcuuuuaguggaguaaugguuucaaugaaagaaccugguugguacuccuuuggcuucgaaauaaaagauaagaaaugcgauguccccuguauugggauagagaugguacaugaugguggaaaagagacuuggcacucagcagcaacagccauuuacuguuuaaugggcucaggacagcugcugugggacacugucacagguguugacauggcucuguaa

SEQ ID NO: 60746 - RNA, 1401 nt, Artificial Sequence
  derived and/or modified CDS sequence (wt) from neuraminidase__InfluenzaB__ACA65101
augcuaccuucaacuauacaaacguuaacccuauuucucacaucagggggaguauuauuaucacuauaugugucagcuucauuaucauacuuacuauauucggauauauugcuaaaauucucaccaacagaaauaacugcaccaacaaugccauuggauugugcaaaugcaucaaauguucaggcugugaaccguucugcaacaaaaggggugacacuucuucucccagaaccggaguggacauacccgcguuuaucuugcccgggcucaaccuuucagaaagcacuccuaauuagcccucauagauucggagaaaccaaaggaaacucagcucccuugauaauaagggaaccuuuuauugcuuguggaccaaaugaaugcaaacacuuugcucuaacccauuaugcagcccaaccagggggauacuacaauggaacaagaggagacagaaacaagcugaggcaucuaauuucagucaaauugggcaaaaucccaacaguagaaaacuccauuuuccacauggcagcauggagcggguccgcaugccaugaugguaaggaauggacauauaucggaguugauggcccugacaauaaugcauugcucaaaauaaaauauggagaagcauauacugacacauaccauuccuaugcaaacaaaauccuaagaacacaagaaagugccugcaauugcaucgggggaaauuguuaucuuaugauaacugauggcucagcuucagguguuagugaaugcagauuucuuaagauucgagagggccgaauaauaaaagaaauauuuccaacaggaagaguaaaacacacugaggaaugcacaugcggauuugccagcaauaaaaccauagaaugugccuguagagauaacaguuacacagcaaaaagacccuuugucaaauuaaacguggagacugauacagcagaaauaagauugaugugcacagauacuuauuuggacacccccagaccagaugauggaagcauaacaggcccuugugaaucuaauggggacaaagggaguggaggcaucaagggaggauuuguucaucaaagaauggcauccaagauuggaaggugguacucucgaacgaugucuaaaacugaaaggauggggaugggacuguaugucaaguaugauggagacccaugggcugacagugaugcccuagcuuuuaguggaguaaugguuucaaugaaagaaccugguugguacuccuuuggcuucgaaauaaaagauaagaaaugcgauguccccuguauugggauagagaugguacaugaugguggaaaagagacuuggcacucagcagcaacagccauuuacuguuuaaugggcucaggacagcugcugugggacacugucacagguguugacauggcucuguaa

SEQ ID NO: 60747 - RNA, 1401 nt, Artificial Sequence
  derived and/or modified CDS sequence (wt) from neuraminidase__InfluenzaB__ACA96567
augcuaccuucaacuauacaaacguuaacccuauuucucacaucagggggaguauuauuaucacuauaugugucagcuucauuaucauacuuacuauauucggauauauugcuaaaauucucaccaacagaaauaacugcaccaacaaugccauuggauugugcaaacgcaucaaauguucaugcugugaaccguucugcaacaaaaggggugacacuucuucucccagaaccggagugggcauacccgcguuuaucuugcccgggcucaaccuuucagaaagcacuccuaauuagcccucauagauucggagaaaccaaaggaaacucagcucccuugauaauaagggaaccuuuuauugcuuguggaccaaaugaaugcaaacacuuugcucuaacccauuaugcagcccaaccagggggauacuacaauggaacaagaggagauagaaacaagcugaggcaucuaauuucagucaaauugggcaaaaucccaacaguagaaaacuccauuuuccacauggcagcauggagcggguccgcaugccaugaugguaaggaauggacauauaucggaguugauggcccugacaauaaugcauugcucaaaauaaaauauggagaagcauauacugacacauaccauuccuaugcaaacaacauccuaagaacacaagaaagugccugcaauugcaucgggggaaauuguuaucuuaugauaacugauggcucagcuucagguguuagugaaugcagauuucuuaagauucgagagggccgaauaauaaaagaaauauuuccaacaggaagaguaaaacauacugaggaaugcacaugcggauuugccagcaauaaaaccauagaaugugccuguagagauaacaguuacacagcaaaaagacccuuugucaaauuaaacguggaaacugauacagcagaaauaagauugaugugcacagauacuuauuuggacacccccagaccagaugauggaagcauaacaggcccuugugaaucuaauggggacaaagggaguggaggcaucaagggaggauuuguucaucaaagaauggcauccaagauuggaaggugguacucucgaacgaugucuaaaacugaaaggauggggaugggacuguaugucaaguaugauggagacccaugggcugacagugaugcccuugcuuuuaguggaauaaugguuucaaugaaagaaccugguugguacuccuuuggcuucgaaauaaaagauaagaaaugcgauguccccuguauugggauagagaugguacaugaugguggaaaagagacuuggcacucagcagcaacagccauuuacuguuuaaugggcucaggacagcugcugugggacacugucacagguguugacauggcucuguaa

SEQ ID NO: 60748 - RNA, 1401 nt, Artificial Sequence
  derived and/or modified CDS sequence (wt) from neuraminidase__InfluenzaB__ACA96578
augcuaccuucaacuauacaaacguuaacccuauuucucacaucagggggaguauuauuaucacuauaugugucagcuucauuaucauacuuacuauauucggauauauugcuaaaauucucaccaacagaaauaacugcaccaacaaugccauuggauugugcaaacgcaucaaauguucaggcugugaaccguucugcaacaaaaggggugacacuucuucucccagaaccggaguggacauacccgcguuuaucuugcccgggcucaaccuuucagaaagcacuccuaauuagcccucauagauucggagaaaccaaaggaaacucagcucccuugauaauaagggaaccuuuuauugcuuguggaccaaaugaaugcaaacacuuugcucuaacccauuaugcagcccaaccagggggauacuacaauggaacaagaggagacagaaacaagcugaggcaucuaauuucagucaaauugggcaaaaucccaacaguagaaaacuccauuuuccacauggcagcauggagcggguccgcaugccaugaugguaaggaauggacauauaucggaguugauggcccugacaauaaugcauugcucaaaauaaaauauggagaagcauauacugacacauaccauuccuaugcaaacaaaauccuaagaacacaagaaagugccugcaauugcaucgggggaaauuguuaucuuaugauaacugauggcucagcuucagguguuagugaaugcagauuucuuaagauucgagagggccgaauaauaaaagaaauauuuccaacaggaagaguaaaacacacugaggaaugcacaugcggauuugccagcaauaaaaccauagaaugugccuguagagauaacaguuacacagcaaaaagacccuuugucaaauuaaacguggagacugauacagcagaaauaagauugaugugcacagauacuuauuuggacacccccagaccagaugauggaagcauaacaggcccuugugaaucuaauggggacaaagggaguggaggcaucaagggaggauuuguucaucaaagaauggcauccaagauuggaaggugguacucucgaacgaugucuaaaacugaaaggauggggaugggacuguaugucaaguaugauggagacccaugggcugacagugaugcccuagcuuuuaguggaguaaugguuucaaugaaagaaccugguugguacuccuuuggcuucgaaauaaaagauaagaaaugcgauguccccuguauugggauagagaugguacaugaugguggaaaagagacuuggcacucagcagcaacagccauuuacuguuuaaugggcucaggacagcugcugugggacacugucacagguguugacauggcucuguaa

SEQ ID NO: 60749 - RNA, 1401 nt, Artificial Sequence; identical to SEQ ID NO: 60735
  derived and/or modified CDS sequence (wt) from neuraminidase__InfluenzaB__ACA96589

SEQ ID NO: 60750 - RNA, 1401 nt, Artificial Sequence; identical to SEQ ID NO: 60746
  derived and/or modified CDS sequence (wt) from neuraminidase__InfluenzaB__ACA96600

SEQ ID NO: 60751 - RNA, 1401 nt, Artificial Sequence
  derived and/or modified CDS sequence (wt) from neuraminidase__InfluenzaB__ACA96611
augcuaccuucaacuauacaaacguuaacccuauuucucacaucagggggaguauuauuaucacuauaugugucagcuucauuaucauacuuauuauauucggauauauugcuaaaauucucaccaacagaaauaacugcaccaacaaugccauuggauuaugcaaacgcaucaaauguucaugcugugaaccauucugcaacaaaaggggugacacuucuucucccagaaccggaguggacauacccgcguuuaucuugcccgggcucaaccuuucagaaagcacuccuaauuagcccucauagauucggagaaaccaaaggaaacucagcucccuugauaauaagggaaccuuuuauugcuuguggaccaaaugaaugcaaacacuuugcucuaacccauuaugcagcccaaccagggggauacuacaauggaacaagaggagacagaaacaagcugaggcaucuaauuucagucaaauugggcaaaaucccaacaguagaaaacuccauuuuccacauggcagcauggagcggguccgcaugccaugaugguaaggaauggacauauaucggaguugauggcccugacaauaaugcauugcucaaaauaaaauauggagaagcauauacugacacauaccauuccuaugcaaacaacauccuaagaacacaagaaagugccugcaauugcaucgggggaaauuguuaucuuaugauaacugauggcucagcuucagguguuagugaaugcagauuucuuaagauucgagagggccgaauaauaaaagaaauauuuccaacaggaagaguaaaacauacugaggaaugcacaugcggauuugccagcaauaaaaccauagaaugugccuguagagauaacaguuacacagcaaaaagacccuuugucaaauuaaacguggaaacugauacagcagaaauaagauugaugugcacagauacuuauuuggacacccccagaccagaugauggaagcauaacaggcccuugugaaucuaauggggacaaagggaguggaggcaucaagggaggauuuguacaucaaagaauggcauccaagauuggaaggugguacucucgaacgaugucuaaaacugaaaggauggggaugggacuguaugucaaguaugauggagacccaugggcugacagugaugcccuugcuuuuaguggaguaaugguuucaaugaaagaaccugguugguacuccuuuggcuucgaaauaaaagauaagaaaugcgauguccccuguauugggauagagaugguacaugaugguggaaaagagacuuggcacucagcagcaacagccauuuacuguuuaaugggcucaggacggcugcugugggacacugucacagguguugacauggcucuguaa

SEQ ID NO: 60752 - RNA, 1401 nt, Artificial Sequence
  derived and/or modified CDS sequence (wt) from neuraminidase__InfluenzaB__ACA96622
augcuaccaucaaccauacaaacguuaacccuauuucucacaucagggggaguauuauuaucacuauaugugucagcuucauuaucauacuuacuauauucggauauauugcuaaaauucucaccaacagaaauaacugcaccaacaaugccauuggauugugcaaacgcaucaaauguucaugcugugaaccguucugcaacaaaaggggugacacuucuucucccagaaccggaguggacauacccgcguuuaucuugcccgggcucaaccuuucagaaagcacuccuaauuagcccucauagauucggagaaaccaaaggaaacucagcucccuugauaauaagggaaccuuuuauugcuuguggaccaaaugaaugcaaacacuuugcucuaacccauuaugcagcccaaccagggggauacuacaauggaacaagaggagacagaaacaagcugaggcaucuaauuucagucaaauugggcaaaaucccaacaguagaaaacuccauuuuccacauggcagcauggagcggguccgcaugccaugaugguaaggaguggacauauaucggaguugauggcccugacaauaaugcauugcucaaaauaaaauauggagaagcauauacugacacauaccauuccuaugcaaacaacauccuaagaacacaagaaagugccugcaauugcaucgggggaaauuguuaucuuaugauaacugauggcucagcuucagguguuagugaaugcagauuucuuaagauucgagagggccgaauaauaaaagaaauauuuccaacaggaagaguaaaacauacugaggaaugcacaugcggauuugccagcaauaaaaccauagaaugugccuguagagauaacaguuacacagcaaaaagacccuuugucaaauuaaacguggaaacugauacagcagaaauaagauugaugugcacagauacuuauuuggacacccccagaccagaugauggaagcauaauaggcccuugugaaucuaauggggacaaagggaguggaggcaucaagggaggauuuguucaucaaagaauggcauccaagauuggaaggugguacucucgaacgaugucuaaaacugaaaggauggggaugggacuguaugucaaguaugauggagacccaugggcugacagugaugcccuugcuuuuaguggaguaaugguuucaaugaaagaaccugguugguacuccuuuggcuucgaaauaaaagauaagaaaugcgauguccccuguauugggauagagaugguacaugaugguggaaaagagacuuggcacucagcagcaacagccauuuacuguuuaaugggcucaggacagcugcugugggacacugucacagguguugacauggcucuguaa

SEQ ID NO: 60753 - RNA, 1401 nt, Artificial Sequence; identical to SEQ ID NO: 60735
  derived and/or modified CDS sequence (wt) from neuraminidase__InfluenzaB__ACA96633

SEQ ID NO: 60754 - RNA, 1401 nt, Artificial Sequence
  derived and/or modified CDS sequence (wt) from neuraminidase__InfluenzaB__ACA96644
augcuaccuucaacuauacaaacguuaacccuauuucucacaucagggggaguauuauuaucacuauaugugucagcuucauuaucauacuuacuauauucggauauauugcuaaaauucucaccaacagaaauaacugcaccaacaaugccauuggauugugcaaacgcaucaaauguucaggcugugaaccguucugcaacaaaaggggugacacuucuucucccagaaccggaguggacauacccgcguuuaucuugcccgggcucaaccuuucagaaagcacuccuaauuagcccucauagauucggagaaaccaaaggaaacucagcucccuugauaauaagggaaccuuuuauugcuuguggaccaaaugaaugcaaacacuuugcucuaacccacuaugcagcccaaccagggggauacuacaauggaacaagaggagacagaaacaagcugaggcaucuaauuucaaucaaauugggcaaaaucccaacaguagaaaacuccauuuuccacauggcagcauggagcggguccgcaugccaugaugguaaggaauggacauauaucggaguugauggcccugacaauaaugcacugcucaaaauaaaauauggagaagcauauacugacacauaccauuccuaugcaaacaaaauccuaagaacgcaagaaagugccugcaauugcaucgggggaaauuguuaucuuaugauaacugauggcucagcuucagguguuagugaaugcagauuucuuaagauucgagagggccgaauaauaaaagaaauauuuccaacaggaagaguaaaacacacugaggaaugcacaugcggauuugccagcaauaaaaccauagaaugugccuguagagauaacaguuacacagcaaaaagacccuuugucaaauuaaacguggagacugauacagcagaaauaagauugaugugcacagauacuuauuuggacacccccagaccagaugauggaagcauaacaggcccuugugaaucuaauggggacaaagggaguggaggcaucaagggaggauuuguucaucaaagaauggcauccaagauuggaaggugguacucucgaacgaugucuaaaacugaaaggauggggaugggacuguaugucaaguaugauggagacccaugggcugacagugaugcccuagcuuuuaguggaguaaugauuucaaugaaagaaccugguugguacuccuuuggcuucgaaauaaaagauaagaaaugcgauguccccuguauugggauagagaugguacaugaugguggaaaagagacuuggcacucagcagcaacagccauuuacuguuuaaugggcucaggacaguugcugugggacacugucacagguguugacauggcucuguaa

SEQ ID NO: 60755 - RNA, 1401 nt, Artificial Sequence
  derived and/or modified CDS sequence (wt) from neuraminidase__InfluenzaB__ACA96655
augcuaccuucaacuauacaaacguuaacccuauuucucacaucagggggaguguuauuaucacuauaugugucagcuucauugucauacuuacuauauucggauauauugcuaaaauuuucacaaacagaaauaacugcaccaauaaugccauuggauugugcaaacgcaucaaauguucaggcugugaaccguucugcaacaaaaggggugacacuucuucucccagaaccggaguggacguacccucguuuaucuugcccgggcucaaccuuucagaaagcacuccuaauuagcccccauagauucggagaaaccaaaggaaacucagcucccuugauaauaagggaaccuuuuauugcuuguggaccaaaggaaugcaaacacuuugcucuaacccauuaugcagcucaaccagggggauacuacaauggaacaagagaagacagaaacaagcugaggcaucuaauuucagucaaauugggcaaaaucccaacaguagaaaacucuauuuuccacauggcagcuuggagcggguccgcaugccaugaugguagagaauggacauauaucggaguugauggccccgacaguaaugcauugcucaaaauaaaauauggagaagcauauacugacacauaccauuccuaugcaaaaaacauccuaaggacacaagaaagugccugcaauugcaucgggggagauuguuaucuuaugauaacugauggcccagcuucagggauuagugaaugcagauuccuuaagauucgagagggccgaauaauaaaagaaauauuuccaacgggaagaguaaaacauacugaggaaugcacaugcggauuugccagcaacaaaaccauagaaugugccuguagagauaacaguuacacagcaaaaagacccuuugucaaauuaaauguggagacugauacagcagaaauaagauugaugugcacagagacuuauuuggacacccccagaccaaaugauggaagcauaacagggccuugcgaaucuaauggggacaaagggaguggaggcaucaagggaggauuuguucaucaaagaauggcauccaagauuggaaggugguacucucgaacgaugucuaaaacuaaaagaauggggaugggacuguauguaaaguaugauggagacccauggacugacagugaagcccuugcucuuaguggaguaaugguuucaauggaagaaccugguugguauuccuuuggcuucgaaauaaaagauaagaaaugugauguccccuguauugggauagaaaugguacaugauggugggaaaacgacuuggcacucagcagcaacagccauuuacuguuuaaugggcucaggacaacugcugugggacacugucacagguguugauauggcucuguaa

SEQ ID NO: 60756 - RNA, 1401 nt, Artificial Sequence
  derived and/or modified CDS sequence (wt) from neuraminidase__InfluenzaB__ACA96666
augcuaccuucaacuauacaaacguuaacccuauuucucacaucagggggaguauuauuaucacuauaugugucagcuucauuaucauacuuacuauauucggauauauugcuaaaauucucaccaacagaaauaacugcaccaacaaugccauuggauugugcaaacgcaucaaauguucaggcugugaaccguucugcaacaaaagggguaacacuucuucucccagaaccggaguggacauacccgcguuuaucuugcccgggcucaaccuuucagaaagcacuccuaauuagcccucauagauucggagaaaccaaaggaaacucagcucccuugauaauaagggaaccuuuuauugcuuguggaccaaaugaaugcaaacacuuugcucuaacccauuaugcagcccaaccagggggauacuacaauggaacaagagaagacagaaacaagcugaggcaucuaauuucagucaaauugggcaaaaucccaacaguagaaaacuccauuuuccacauggcagcauggagcggguccgcaugccaugaugguaaggaauggacauauaucggaguugauggcccugacaauaaugcauugcucaaaauaaaauauggagaagcauauacugacacauaccauuccuaugcaaacaaaauccuaagaacacaagaaagugccugcaauugcaucgggggaaauuguuaucuuaugauaacugauggcucagcuucagguguuagugaaugcagauuucuuaagauucgagagggccgaauaauaaaagaaauauuuccaacaggaagaguaaaacacacugaggaaugcacaugcggauuugccagcaauaaaaccauagaaugugccuguagagauaacaguuacacagcaaaaagacccuuugucaaauugaacguggagacugauacagcagaaauaagauugaugugcacagauacuuauuuggacacccccagaccagaugauggaagcauaacaggcccuugugaaucuaauggggacagagggaguggaggcaucaagggaggauuuguucaucaaagaauggcauccaagauuggaaggugguacucucgaacgaugucuaaaacugaaaggauggguaugggacuguaugucaaguaugauggagacccaugggcugacagugaugcccuagcuuuuaguggaguaaugguuucaaugaaagaaccugguugguacuccuuuggcuucgaaauaaaagauaagaaaugcgauguccccuguauugggauagagaugguacaugaugauggaaaagagacuuggcacucagcagcaacagccauuuacuguuuaaugggcucaggacagcugcugugggacacugucacagguguugacauggcucuguaa

SEQ ID NO: 60757 - RNA, 1401 nt, Artificial Sequence
  derived and/or modified CDS sequence (wt) from neuraminidase__InfluenzaB__ACD56581
augcuacccucaacuauacaaacguuaacccuauuccucacaucagggggaguguuauuaucacuauaugugucagcuucacugucauacuuacuauauucggauauauugcuaaaauuuucaacaacagaaauaacugcaccaacaaugccauuggauugugcaaacgcaucaaauguucaggcugugaaccguucugcaacaaaaggggugacacuucuucucccagaaccggaguggacauacccgcguuuaucuugcccgggcucaaccuuucagaaagcacuccuaauuagcccucauagauucggagaaaccaaaggaaacucagcucccuugauaauaagggaaccuuuuauugcuuguggaccaaaggaaugcaaacacuuugcucuaacccauuaugcagcccaaccagggggauacuacaauggaacaagagaagacagaaacaagcugaggcaucuaauuucagucaaauugggcaaaaucccaacaguagaaaacuccauuuuccacauggcagcauggagcggguccgcaugccaugaugguaaagaauggacauauaucggaguugauggcccugacaguaaugcauugcucaaaauaaaauauggagaagcauauacugacacauaccauuccuaugcaaacaacauccuaagaacacaagaaagugccugcaauugcaucgggggaaauuguuaucuuaugauaacugauggcucagcuucagguauuagugagugcagauuucuuaagauucgagagggccgaauaauaaaagaaauauuuccaacaggaagaguaaaacauacugaagaaugcacaugcggauuugccagcaauaaaaccauagaaugugccuguagagauaacaguuacacagcaaaaagacccuuugucaaauuaaauguggagacugauacagcagaaauaagguugaugugcacagagacuuauuuggacacccccagaccagaugauggaagcauaacagggccuugugagucuaaugggaauaaagggaguggaggcaucaagggaggauuuguucaucaaagaauggcauccaaaauuggaaggugguacucucgaacaaugucuaaaaccaaaaggaugggaaugggacuguaugucaaguaugauggagacccauggacugacagugaugcccuugcucuuaguggaguaaugguuucaauggaagaaccugguugguacucauuuggcuucgaaauaaaagauaagaaaugugauguccccuguauugggauagagaugguacaugaugguggaaaggagacuuggcacucagcagcaacagccauuuacuguuuaaugggcucaggacaacuguugugggacacugucacagguguugauauggcucuguaa

SEQ ID NO: 60758 - RNA, 1401 nt, Artificial Sequence
  derived and/or modified CDS sequence (wt) from neuraminidase__InfluenzaB__ACF33793
augcuaccuucaacuauacaaacguuaacccuauuucucacaucagggggaguauuauuaucacuauaugugucagcuucauuaucauacuuacuauauucggauauauugcuaaaauucucaccaacagaaauaacugcaccaacaaugccauuggauugugcaaacgcaucaaauguucaggcugugaaccguucugcaacaaaaggggugacacuucuucucccagaaccggaguggacauacccgcguuuaucuugcccgggcucaaccuuucagaaagcacuccuaauuagcccucauagauucggagaaaccaaaggaaacucagcucccuugauaauaagggaaccuuuuauugcuuguggaccaaaugaaugcaaacacuuugcucuaacccauuaugcagcccaaccagggggauacuacaauggaacaagaggagacagaaacaagcugaggcaucuaauuucagucaaauugggcaaaaucccaacaguagaaaacuccauuuuccacauggcagcauggagcggguccgcaugccaugaugguaaggaauggacauauaucggaguugauggcccugacaauaaugcauugcucaaaauaaaauauggagaagcauauacugacacauaccauuccuaugcaaacaacauccuaagaacacaagaaagugccugcaauugcaucgggggaaauuguuaucuuaugauaacugauggcucagcuucagguguuagugaaugcagauuucuuaagauucgagagggccgaauaauaaaagaaauauuuccaacaggaagaguaaaacauacugaggaaugcacaugcggauuugccagcaauaaaaccauagaaugugccuguagagauaacaguuacacagcaaaaagacccuuugucaaauuaaacguggagacugauacagcagaaauaagauugaugugcacagauacuuauuuggacauccccagaccagaugauggaagcauaacaggcccuugugaaucuaauggggacaaagggaguggaggcaucaagggaggauuuguucaucaaagaauggcauccaagauuggaaggugguacucucgaacgaugucuaaaacugaaaggauggggaugggacuguaugucaaguaugauggagacccaugggcugacagugaugcccuugcuuuuaguggaguaaugguuucaaugaaagaaccugguugguacuccuuuggcuucgaaauaaaagauaagaaaugcgauguccccuguauugggauagagaugguacaugaugguggaaaagagacuuggcacucagcagcaacagccauuuacuguuuaaugggcucaggacagcugcugugggacacugucacagguguugacauggcucuguaa

SEQ ID NO: 60759 - RNA, 1401 nt, Artificial Sequence
  derived and/or modified CDS sequence (wt) from neuraminidase__InfluenzaB__ACF33795
augcuaccuucaacuauacaaacguuaacccuauuucucacaucagggggaguauuauuaucacuauaugugucagcuucauugucauacuuacuauauucggauauauugcuaaaauucccaucaacagaaauuacugcaccaacaaugccauuggauugugcaaacgcaucaaauguucaggcugugaaccguucugcaacaaaaggggugacacuucuucucccagaaccggaguggacauacccgcguuuaucuugcccgggcucaaccuuucagaaagcacuccuaauuagcccucauagauucggagaaaccaaaggaaacucagcucccuugauaauaagggaaccuuuuauugcuuguggaccaaaggaaugcaaacacuuugcucuaacccacuaugcagcccaaccagggggauacuacaauggaacaagaggagacagaaacaagcugaggcaucuaauuucagucaaauugggcaaaaucccaacaguagaaaacuccauuuuccacauggcagcauggagcggguccgcaugccaugaugguaaggaauggacauauaucggaguugauggcccugacaauaaugcauugcucaaaauaaaauauggagaagcauauacugacacauaccauuccuaugcaaacaacauccuaagaacacaagaaagugccugcaauugcaucgggggaaauuguuaucuuaugauaacugauggcucagcuucagguguuagugaaugcagauuucuuaagauucgagagggccgaauaauaaaagaaauauuuccaacaggaagaauaaaacauacugaagaaugcacaugcggauuugcuagcaauaaaaccauagaaugugccuguagagauaacaguuacacagcaaaaagacccuuugucaaauuaaacguggagacugauacagcagaaauaagauugaugugcacagagacuuauuuggacacccccagaccagaugauggaagcauaacagggccuugugaaucuaauggggacaaagggaguggaggcaucaagggaggauuuguccaucaaagaauggcauccaagauuggaaggugguacucucgaacgaugucuaaaacugaaaagauggggauggggcuguaugucaaguaugauggagaaccaugggcugacagugaugcccuuacuuuuaguggaguaaugguuucaauggaagaaccugguugguacuccuuuggcuucgaaauaaaagacaagaaaugugauguccccuguauugggauagagaugguacaugaugguggaaaagagacuuggcacucagcagcuacagccauuuacuguuuaaugggcucaggacagcugcugugggacacugucacagguguuaauauggcucuguaa

SEQ ID NO: 60760 - RNA, 1401 nt, Artificial Sequence
  derived and/or modified CDS sequence (wt) from neuraminidase__InfluenzaB__ACF33797
augcuaccuucaacuauacaaacguuaacccuauuucucacaucagggggaguauuauuaucacuauaugugucagcuucauugucauacuuacuauauucggauauauugcuaaaauuuucaccaacagaaauaacugcaccaacaaugccauuggauugugcaaacgcaucaaauguucaggcugugaaccguucugcaacaaaaggggugacacuucuucucccagaaccggaguggacauacccgcguuuaucuugcccgggcucaaccuuucagaaagcacuccuaauuagcccucauagauucggagaaaccaaaggaaacucagcucccuugauaauaagggaaccuuuuauugcuuguggaccaaaugaaugcaaacacuuugcucuaacccauuaugcagcccaaccagggggauacuacaauggaacaagaggagacagaaacaagcugaggcaucuaauuucagucaaauugggcaaaaucccaacaguagaaaacuccauuuuucacauggcagcauggagcggguccgcaugccaugaugguaaggaauggacauauaucggaguugauggcccugacaauaaugcauugcucaaaauaaaauauggagaagcauauacugacacauaccauuccuaugcaaacaacacccuaagaacacaagaaagugccugcaacugcaucgggggaaauuguuaucuuaugauaacugauggcucagcuucagguguuagugaaugcagauuucuuaagauucgagagggccgaauaauaaaagaaauauuuccaacaggaagaguaaaacauacugaagaaugcacaugcggauuugccagcaauaaaaccauagaaugugcuuguagagauaacaguuacacagcaaaaagacccuuugucaaauuaaacguggagacugauacagcagaaauaagauugaugugcacagagacuuauuuggacacccccagaccagaugauggaagcauaacagggccuugugaaucuaauggggacaaagggaguggaggcaucaagggaggauuuguucaccaaagaauggcauccaagauuggaaggugguacucucgaacgaugucuaaaacugaaaggauggggaugggacuguaugucaaguaugauggagacccaugggcugacagugaugcccuugcucuuauuggaguaaugguuucaauggaagaaccugguugguacuccuuuggcuucgaaauaaaagauaaaaaaugcgauguccccuguauugggauagagaugguacaugaugguggaaaagagacuuggcacucagcagcaacagccauuuacuguuuaaugggcucaggacagcugcugugggacacugucacagguguuaauauggcucuguaa

SEQ ID NO: 60761 - RNA, 1401 nt, Artificial Sequence; identical to SEQ ID NO: 60740
  derived and/or modified CDS sequence (wt) from neuraminidase__InfluenzaB__ACF41662

SEQ ID NO: 60762 - RNA, 1401 nt, Artificial Sequence
  derived and/or modified CDS sequence (wt) from neuraminidase__InfluenzaB__ACF54140
augcuaccuucaacuauacaaacguuaacccuauuucucacaucagggggaguauuauuaucacuauaugugucagcuucauuaucauacuuacuauauucggauauauugcuaaaauucucaccaacagaaauaacugcaccaacaaugccauuggauugugcaaacgcaucaaauguucaggcugugaaccguucugcaacaaaaggggugacacuucuucucccagaaccggaguggacauacccgcguuuaucuugcccgggcucaaccuuucagaaagcacuccuaauuagcccucauagauucggagaaaccaaaggaaacucagcucccuugauaauaagggaaccuuuuauugcuuguggaccaaaugaaugcaaacacuuugcucuaacccauuaugcagcccaaccagggggauacuacaauggaacaaaaggagacagaaacaagcugaggcaucuaauuucagucaaauugggcaaaaucccaacaguagaaaacuccauuuuccacauggcagcauggagcggguccgcaugccaugaugguaaggaauggacauauaucggaguugauggcccugacaauaaugcauugcucaaaauaaaauauggagaagcauauacugacacauaccauuccuaugcaaacaaaauccuaagaacacaagaaagugccugcaauugcaucgggggaaauuguuaucuuaugauaacugauggcucagcuucagguguuagugaaugcagauuucuuaagauucgagagggccgaauaauaaaagaaauauuuccaacaggaagaguaaaacacacugaggaaugcacaugcggauuugccagcaauaaaaccauagaaugugccuguagagauaacaguuacacagcaaaaagacccuuugucaaauugaacguggagacugauacagcagaaauaagauugaugugcacagauacuuauuuggacacccccagaccagaugauggaagcauaacaggcccuugugaaucuaauggggacagagggaguggaggcaucaagggaggauuuguucaucaaagaauggcauccaagauuggaaggugguacucucgaacgaugucuaaaacugaaaggauggggaugggacuguaugucaaguaugauggagacccaugggcugacagugaugcccuagcuuuuaguggaguaaugguuucaaugaaagaaccugguugguacuccuuuggcuucgaaauaaaagauaagaaaugcgauguccccuguauugggauagagaugguacaugaugguggaaaagagacuuggcacucagcagcaacagccauuuacuguuuaaugggcucaggacagcugcugugggacacugucacagguguugacauggcucuguaa

SEQ ID NO: 60763 - RNA, 1401 nt, Artificial Sequence
  derived and/or modified CDS sequence (wt) from neuraminidase__InfluenzaB__ACF54151
augcuaccuucaacuauacaaacguuaacccuauuucucacaucagggggaguauuauuaucacuauaugugucagcuucauugucauacuuacuauauucggauauauugcuaaaauucccaucaacagaaauuacugcaccaacaaugccauuggauugugcaaacgcaucaaauguucaggcugugaaccguucugcaacaaaaggggugacacuucuucucccagaaccggaguggacauauccgcguuuaucuugcccgggcucaaccuuucagaaagcacuccuaauuagcccucauagauucggagaaaccaaaggaaacucagcucccuugauaauaagggaaccuuuuauugcuuguggaccaaaggaaugcaaacacuuugcucuaacccacuaugcagcccaaccagggggauacuacaauggaacaaggggaaacagaaacaagcugaggcaucuaauuucagucaaauugggcaaaaucccaacaguagaaaacuccauuuuccacauggcagcauggagcggguccgcaugccaugaugguaaggaauggacauauaucggaguugauggcccugacaauaaugcauugcucaaaauaaaauauggagaagcauauacugacacauaccauuccuaugcaaacaacauccuaagaacacaagaaagugccugcaauugcaucgggggaaauuguuaucuuaugauaacugauggcucagcuucagguguuagugaaugcagauuucuuaagauucgagagggccgaauaauaaaagaaauauuuccaacaggaagaauaaaacauacugaagaaugcacaugcggauuugcuagcaauaaaaccauagaaugugccuguagagauaacaguuacacagcaaaaagacccuuugucaaauuaaacguggagacugauacagcagaaauaagauugaugugcacagagacuuauuuggacacccccagaccagaugauggaagcauaacagggccuugugaaucuaauggggacaaagggaguggaggcaucaagggaggauuuguccaucaaagaauggcauccaagauuggaaggugguacucucgaacgaugucuaaaacuaaaaggauggggauggggcuguaugucaaguaugauggagacccaugggcugacagugaugcccuugcuuuuaguggaguaaugguuucaauggaagaaccugguugguacuccuuuggcuucgaaauaaaagacaagaaaugugauguccccuguauugggauagagaugguacaugaugguggaaaagagacuuggcacucagcagcuacagccauuuacuguuuaaugggcucaggacagcugcugugggacacugucacagguguuaauauggcucuguaa

SEQ ID NO: 60764 - RNA, 1401 nt, Artificial Sequence
  derived and/or modified CDS sequence (wt) from neuraminidase__InfluenzaB__ACF54162
augcuaccuucaacuauacaaacguuaacccuauuucucacaucagggggaguguuauuaucacuauaugugucagcuucauugucauacuuacuauauucggauauauugcuaaaauuuucacaaacagaaauaacugcaccaauaaugccauuggauugugcaaacgcaucaaauguucaggcugugaaccguucugcaacaaaaggggugacacuucuucucccagaaccggaguggacguacccucguuuaucuugcccgggcucaaccuuucagaaagcacuccuaauuagcccccauagauucggagaaaccaaaggaaacucagcucccuugauaauaagggaaccuuuuauugcuuguggaccaaaggaaugcaaacacuuugcucuaacccauuaugcagcucaaccagggggauacuacaauggaacaagagaagacagaaacaagcugaggcaucuaauuucagucaaauugggcaaaaucccaacaguagaaaacuccauuuuccacauggcagcuuggagcggguccgcaugccaugaugguaaagaauggacauauaucggaguugauggccccgacaguaaugcauugcucaaaauaaaauauggagaagcauauacugacacauaccauuccuaugcaaaaaacauccuaaggacacaagaaagugccugcaauugcaucgggggggauuguuaucuuaugauaacugauggcccagcuucagggauuagugaaugcagauuccuuaagauucgagagggccgaauaauaaaagaaauauuuccaacaggaagaguaaaacauacugaggaaugcacaugcggauuugccagcaacaaaaccauagaaugugccuguagagauaacaauuacacagcaaaaagacccuuugucaaauuaaauguggagacugauacagcggaaauaagauugaugugcacagagacuuauuuggacacccccagaccaaaugauggaagcauaacagggccuugcgaaucugauggggacaaagggaguggaggcaucaagggaggguuuguucaucaaagaauggcauccaagauuggaaggugguacucucgaacgaugucuaaaacuaaaagaauggggauggaacuguauguaaaguaugauggagacccauggacugacagugaagcccuugcucuuaguggaguaaugguuucaauggaagaaccugguugguauuccuuuggcuucgaaauaaaagauaagaaaugugauguccccuguauugggauagaaaugguacaugauggugggaaaacgacuuggcacucagcagcaacagccauuuacuguuuaaugggcucaggacaacugcugugggacacugucacagguguugauauggcucuguaa

SEQ ID NO: 60765 - RNA, 1401 nt, Artificial Sequence
  derived and/or modified CDS sequence (wt) from neuraminidase__InfluenzaB__ACF54184
augcuacccucaacuauacaaacguuaacccuauuccucacaucagggggaguguuauuaucacuauaugugucagcuucacugucauacuuacuauauucggauauauugcuaaaauuuucaacaacagaaauaacugcaccaacaaugccauuggauugugcaaacgcaucaaauguucaggcugugaaccguucugcaacaaaaggggugacacuucuucucccagaaccggaguggacauacccgcguuuaucuugcccgggcucaaccuuucagaaagcacuccuaauuagcccucauagauucggagaaaccaaaggaaacucagcucccuugauaauaagggaaccuuuuauugcuuguggaccaaaggaaugcaaacacuuugcucuaacccauuaugcagcccaaccagggggauacuacaauggaacaaaagaagacagaaacaagcugaggcaucuaauuucagucaaauugggcaaaaucccaacaguagaaaacuccauuuuccacauggcagcauggagcggguccgcaugccaugaugguaaagaauggacauauaucggaguugauggcccugacaguaaugcauugcucaaaauaaaauauggagaagcauauacugacacauaccauuccuaugcaaacaacauccuaagaacacaagaaagugccugcaauugcaucgggggaaauuguuaucuuaugauaacugauggcucagcuucagguauuagugagugcagauuucuuaagauucgagagggccgaauaauaaaagaaauauuuccaacaggaagaguaaaacauacugaagaaugcacaugcggauuugccagcaauaaaaccauagaaugugccuguagagauaacaguuacacagcaaaaagacccuuugucaaauuaaauguggagacugauacagcagaaauaagauugaugugcacagagacuuauuuggacacccccagaccagaugauggaagcauaacagggccuugugaaucuaaugggaauaaagggaguggaggcaucaagggaggauuuguucaucaaagaauggcauccaaaauuggaaggugguacucucgaacaaugucuaaaaccaaaaggaugggaaugggacuguaugucaaguaugauggagacccauggacugacagugaugcccuugcucuuaguggaguaaugguuucaauggaagaaccugguugguacucauuuggcuucgaaauaaaagauaagaaaugugauguccccuguauugggauagagaugguacaugaugguggaaaggagacuuggcacucagcagcaacagccauuuacuguuuaaugggcucaggacaacuguugugggacacugucacagguguugauauggcucuguaa

SEQ ID NO: 60766 - RNA, 1401 nt, Artificial Sequence
  derived and/or modified CDS sequence (wt) from neuraminidase__InfluenzaB__ACF54206
augcuacccucaacuauacaaacguuaacccuauuccucacaucagggggaguguuauuaucacuauaugugucagcuucacugucauacuuacuauauucggauauauugcuaaaauuuucaacaacagaaacaacugcaccaacaaugccauuggauugugcaaacgcaucaaauguucaggcugugaaccguucugcaacaaaaggggugacacuucuucucccagaaccggaguggacauacccgcguuuaucuugcccgggcucaaccuuucagaaagcacuccuaauuagcccucauagauucggagaaaccaaaggaaacucagcucccuugauaauaagggaaccuuuuauugcuuguggaccaaaggaaugcaaacacuuugcucuaacccauuaugcagcccaaccagggggauacuacaauggaacaagagaagacagaaacaagcugaggcaucuaauuucagucaaauugggcaaaaucccaacaguagaaaacuccauuuuccacauggcagcauggagcggguccgcaugccaugaugguaaagaauggacauauaucggaguugauggcccugacaguaaugcauugcucaaaauaaaauauggagaagcauauacugacacauaccauuccuaugcaaacaacauccuaagaacacaagaaagugccugcaauugcaucgggggaaauuguuaucuuaugauaacugauggcucagcuucagguauuagugagugcagauuucuuaagauucgagagggccgaauaauaaaagaaauauuuccaacaggaagaguaaaacauacugaagaaugcacaugcggauuugccagcaauaaaaccauagaaugugccuguagagauaacaguuacacagcaaaaagacccuuugucaaauuaaauguggagacugauacagcagaaauaagauugaugugcacagagacuuauuuggacacccccagaccagaugauggaaguauaacagggccuugugaaucuaaugggaauaaagggaguggaggcaucaagggaggauuuguucaucaaagaauggcauccaaaauuggaaggugguacucucgaacaaugucuaaaaccaaaaggaugggaaugggacuguaugucaaguaugauggagacccauggacugacagugaugcccuugcucuuaguggaguaaugguuucaauggaagaaccugguugguacucauuuggcuucgaaauaaaagauaagaaaugugauguccccuguauugggauagagaugguacaugaugguggaaaggagacuuggcacucagcagcaacagccauuuacuguuuaaugggcucaggacaacuguugugggacacugucacagguguugauauggcucuguaa

SEQ ID NO: 60767 - RNA, 1401 nt, Artificial Sequence
  derived and/or modified CDS sequence (wt) from neuraminidase__InfluenzaB__ACF54217
augcuaccuucaacuauacaaacguuaacccuauuucucacaucagggggaguguuauuaucacuauaugugucagcuucauugucauacuuacuauauucggauauauugcuaaaauuuucacaaacagaaauaacugcaccaauaaugccauuggauugugcaaacgcaucaaauguucaggcugugaaccauucugcaacaaaaggggugacacuucuucucccagaaccggaguggacguacccucguuuaucuugcccgggcucaaccuuucagaaagcacuccuaauuagcccccauagauucggagaaaccaaaggaaacucagcucccuugauaauaagggaaccuuuuauugcuuguggaccaaaggaaugcaaacacuuugcucuaacccauuaugcagcucaaccagggggauacuacaauggaacaagagaagacagaaacaagcugaggcaucuaauuucagucaaauugggcaaaaucccaacaguagaaaacucuauuuuccacauggcagcuuggagcggguccgcaugccaugaugguagagaauggacauauaucggaguugauggccccgacaguaaugcauugcucaaaauaaaauauggagaagcauauacugacacauaccauuccuaugcaaaaaacauccuaaggacacaagaaagugccugcaauugcaucgggggagauuguuaucuuaugauaacugauggcccagcuucagggauuagugaaugcagauuccuuaagauucgagagggccgaauaauaaaagaaauauuuccaacaggaagaguaaaacauacugaggaaugcacaugcggauuugccagcaacaaaaccauagaaugugccuguagagauaacaguuacacagcaaaaagacccuuugucaaauuaaauguggagacugauacagcagaaauaagauugaugugcacagagacuuauuuggacacccccagaccaaaugauggaagcauaacagggccuugcgaaucuaauggggacaaagggaguggaggcaucaagggaggauuuguucaucaaagaauggcauccaagauuggaaggugguacucucgaacgaugucuaaaacuaaaagaauggggaugggacuguauguaaaguaugauggagacccauggacugacagugaagcccuugcucuuaguggaguaaugguuucaauggaagaaccugguugguauuccuuuggcuucgaaauaaaagauaagaaaugugauguccccuguauugggauagaaaugguacaugauggugggaaaacgacuuggcacucagcagcaacagccauuuacuguuuaaugggcucaggacaacugcugugggacacugucacagguguugauauggcucuguaa

SEQ ID NO: 60768 - RNA, 1401 nt, Artificial Sequence
  derived and/or modified CDS sequence (wt) from neuraminidase__InfluenzaB__ACF54228
augcuaccuucaacuauacaaacguuaacccuauuucucacaucagggggaguauuauuaucacuauaugugucagcuucauugucauacuuacuauauucggauauauugcuaaaauuuucaccaacagaaauaacugcaccaacaaugccauuggauugugcaaacgcaucaaauguucaggcugugaaccguucugcaacaaaaggggugacacuucuucucccagaaccggaguggacauacccgcguuuaucuugcccgggcucaaccuuucagaaagcacuccuaauuagcccucauagauucggagaaaccaaaggaaacucagcccccuugauaauaagggaaccuuuuauugcuuguggaccaaaugaaugcaaacacuuugcucuaacccauuaugcagcccaaccagggggauacuacaauggaacaagaggagacagaaacaagcugaggcaucuaauuucagucaaauugggcaaaaucccaacaguagaaaacuccauuuuucacauggcagcauggagcggguccgcaugccaugaugguaaggaauggacauauaucggaguugauggcccugacaauaaugcauugcucaaaauaaaauauggagaagcauauacugacacauaccauuccuaugcaaacaacauccuaagaacacaagaaagugccugcaacugcaucgggggaaauuguuaucuuaugauaacugauggcucagcuucagguguuagugaaugcagauuucuuaagauucgagagggccgaauaauaaaagaaauauuuccaacaggaagaguaaaacauacugaagaaugcacaugcggauuugccagcaauaaaaccauagaaugugcuuguagagauaacaguuacacagcaaaaagacccuuugucaaauuaaacguggagacugauacagcagaaauaagauugaugugcacagagacuuauuuggacacccccagaccagaugauggaagcauaacagggccuugugaaucuaauggggacaaagggaguggaggcaucaagggaggauuuguucaccaaagaauggcauccaagauuggaaggugguacucucgaacgaugucuaaaacugaaaggauggggaugggacuguaugucaaguaugauggagacccaugggcugacagugaugcccuugcucuuauuggaguaaugguuucaauggaagaaccugguugguacuccuuuggcuucgaaauaaaagauaaaaaaugcgauguccccuguauugggauagagaugguacaugaugguggaaaagagacuuggcacucagcagcaacagccauuuacuguuuaaugggcucaggacagcugcugugggacacugucacagguguuaauauggcucuguaa

SEQ ID NO: 60769 - RNA, 1401 nt, Artificial Sequence; identical to SEQ ID NO: 60680
  derived and/or modified CDS sequence (wt) from neuraminidase__InfluenzaB__ACF54239

SEQ ID NO: 60770 - RNA, 1401 nt, Artificial Sequence
  derived and/or modified CDS sequence (wt) from neuraminidase__InfluenzaB__ACF54261
augcuacccucaacuauacaaacguuaacccuauuccucacaucagggggaguguuauuaucacuauaugugucagcuucacugucauacuuacuauauucggauauauugcuaaaauuuucaccaacagaaauaacugcaccaacaaugccauuggauugugcaaacgcaucaaauguucaggcugugaaccguucugcaacaaaaggggugacacuucuucucccagaaccggaguggacauacccgcguuuaucuugcccgggcucaaccuuucagaaagcacuccuaauuagcccucauagauucggagaaaccaaaggaaacucagcucccuugauaauaagggaaccuuuuauugcuuguggaccaaaggaaugcaaacacuuugcucuaacccauuaugcagcccaaccagggggauacuacaauggaacaagagaagacagaaacaagcugaggcaucuaguuucagucaaauugggaaaaaucccaacaguagaaaacuccauuuuccacauggcagcauggagcggguccgcaugccaugaugguaaagaauggacauauaucggaguugauggcccugacaguaaugcauugcucaaaauaaaauauggagaagcauauacugacacauaccauuccuaugcaaacaacauccuaagaacacaagaaagugccugcaauugcaucgggggaaauuguuaucuuaugauaacugauggcucagcuucagguauuagugagugcagauuucuuaagauucgagaaggccgaauaauaaaagaaauauuuccaacaggaagaguaaaacauacugaagaaugcacaugcggauuugccagcaauaaaaccauagaaugugccuguagagauaacaguuacacagcaaaaagacccuuugucaaauuaaauguggagacugauacagcagaaauaagauugaugugcacagagacuuaucuggacacccccagaccagaugauggaagcauuacagggccuugugaaucuaauggggauaaagggaguggaggcaucaagggaggauuuguucaucaaagaauggcauccaaaauuggaaggugguacucucgaacaaugucuaaaaccaaaaggaugggaaugggacuguaugucaaguaugauggagacccauggacugacagugaugcccuugcucuuaguggaguaaugguuucaauggaagaaccugguugguacucauuuggcuucgaaauaaaagauaagaaaugugauguccccuguauugggauagagaugguacaugaugguggaaaggagacuuggcacucagcagcaacagccauuuacuguuuaaugggcucaggacaacugcuaugggacacugucacagguguugauauggcucuguaa

SEQ ID NO: 60771 - RNA, 1401 nt, Artificial Sequence
  derived and/or modified CDS sequence (wt) from neuraminidase__InfluenzaB__ACF54272
augcuacccucaacuauacaaacguuaacccuauuccucacaucagggggaguguuauuaucacuauaugugucagcuucacugucauacuuacuauauucggauauauugcuaaaauuuucaacaacagaaauaacugcaccaacaaugccauuggauugugcaaacgcaucaaauguucaagcugugaaccguucugcaacaaaaggggugacacuucuucucccagaaccggaguggacauacccgcguuuaucuugcccgggcucaaccuuucagaaagcacuccuaauuagcccucauagauucggagaaaccaaaggaaacucagcucccuugauaauaagggaaccuuuuauugcuuguggaccaaaggaaugcaaacacuuugcucuaacccauuaugcagcccaaccagggggauacuacaauggaacaagagaagacagaaacaagcugaggcaucuaauuucagucaaauugggaaaaaucccaacaguagaaaacuccauuuuccacauggcagcauggagcggguccgcaugccaugaugguaaagaauggacauauaucggaguugauggcccugacaguaaugcauugcucaaaauaaaauauggagaagcauauacugacacauaccauuccuaugcaaacaacauccuaagaacacaagaaagugccugcaauugcaucgggggaaauuguuaucuuaugauaacugauggcucagcuucagguauuagugagugcagauuucuuaagauucgagaaggccgaauaauaaaagaaauauuuccaacaggaagaguaaaacauacugaagaaugcacaugcggauuugccagcaauaaaaccauagaaugugccuguagagauaacaguuacacagcaaaaagacccuuugucaaauuaaauguggagacugauacagcagaaauaagauugaugugcacagagacuuauuuggacacccccagaccagaugauggaagcauuacagggccuugugaaucuaauggggauaaagggaguggaggcaucaagggaggauuuguucaucaaagaauggcauccaaaauuggaaggugguacucucgaacaaugucuaaaaccaaaaggaugggaaugggacuguaugucaaguaugauggagacccauggacugacagugaugcccuugcucuuaguggaguaaugguuucaauggaagaaccugguugguacucauuuggcuucgaaauaaaagauaagaaaugugauguccccuguauugggauagagaugguacaugaugguggaaaggagacuuggcacucagcagcaacagccauuuacuguuuaaugggcucaggacaacugcuaugggacacugucacagguguugauauggcucuguaa

SEQ ID NO: 60772 - RNA, 1401 nt, Artificial Sequence
  derived and/or modified CDS sequence (wt) from neuraminidase__InfluenzaB__ACF54283
augcuacccucaacuauacaaacguuaacccuauuccucacaucagggggaguguuauuaucacuauaugugucagcuucacugucauacuuacuauauucggauauauugcuaaaauuuucaacaacagaaauaacugcaccaacaaugccauuggauugugcaaacgcaucaaauguucaggcugugaaccguucugcaacaaaaggggugacacuucuucucccagaaccggaguggacauacccgcguuuaucuugcccgggcucaaccuuucagaaagcacuccuaauuagcccucauagauucggagaaaccaaaggaaacucagcucccuugauaauaagggaaccuuuuauugcuuguggaccaaaggaaugcaaacacuuugcucuaacccauuaugcagcccaaccagggggauacuacaauggaacaagagaagacagaaacaagcugaggcaucuaguuucagucaaauugggaaaaaucccaacaguagaaaacuccauuuuccacauggcagcauggagcggguccgcaugccaugaugguaaagaauggacauauaucggaguugauggcccugacaguaaugcauugcucaaaauaaaauauggagaagcauauacugacacauaccauuccuaugcaaacaacauccuaagaacacaagaaagugccugcaauugcaucgggggaaauuguuaucuuaugauaacugauggcucagcuucagguauuagugagugcagauuucuuaagauucgagaaggccgaauaauaaaagaaauauuuccaacaggaagaguaaaacauacugaagaaugcacaugcggauuugccagcaauaaaaccauagaaugugccuguagagauaacaguuacacagcaaaaagacccuuugucaaauuaaauguggagacugauacagcagaaauaagauugaugugcacagagacuuauuuggacacccccagaccagaugauggaagcauuacagggccuugugaaucuaauggggauaaagggaguggaggcaucaagggaggauuuguucaucaaagaauggcauccaaaauuggaaggugguacucucgaacaaugucuaaaaccaaaaggaugggaaugggacuguaugucaaguaugauggagacccauggacugacagugaugcccuugcucuuaguggaguaaugguuucaauggaagaaccugguugguacucauuuggcuucgaaauaaaagauaagaaaugugauguccccuguauugggauagagaugguacaugaugguggaaaggagacuuggcacucagcagcaacagccauuuacuguuuaaugggcucaggacaacugcuaugggacacugucacagguguugauauggcucuguaa

SEQ ID NO: 60773 - RNA, 1401 nt, Artificial Sequence
  derived and/or modified CDS sequence (wt) from neuraminidase__InfluenzaB__ACF54294
augcuacccucaacuauacaaacguuaacccuauuccucacaucagggggaguguuauuaucacuauaugugucagcuucacugucauacuuacuauauucggauauauugcuaaaauuuucaacaacagaaauaacugcaccaacaauaccauuggauugugcaaacgcaucaaauguucaggcugugaaccguucugcaacaaaaggggugacauuucuucucccagaaccggaguggacauacccgcguuuaucuugcccgggcucaaccuuucagaaagcacuccuaauuagcccucauagauucggagaaaccaaaggaaacucagcucccuugauaauaagggaaccuuuuauugcuuguggaccaaaggaaugcaaacacuuugcucuaacccauuaugcagcccaaccagggggauacuacaauggaacaagagaagacagaaacaagcugaggcaucuaauuucagucaaauugggcaaaaucccaacaguagaaaacuccauuuuucacauggcagcauggagcggguccgcaugccaugaugguaaagaauggacauauaucggaguugauggcccugacaguaaugcauugcucaaaauaaaauauggagaagcauauacugacacauaccauuccuaugcaaacaacauccuaagaacacaagaaagugccugcaauugcaucgggggaaauuguuaucuuaugauaacugauggcucagcuucagguauuagugagugcagauuucuuaagauucgagagggccgaauaauaaaagaaauauuuccaacaggaagaguaaaacauacugaagaaugcacaugcggauuugccagcaauaaaaccauagaaugugccuguagagauaacaguuacacagcaaaaagacccuuugucaaauuaaauguggagacugauacagcagaaauaagauugaugugcacagagacuuauuuggacacccccagaccagaugauggaagcauaacagggccuugugaaucuaaugggaauaaagggaguggaggcaucaagggaggauuuguucaucaaagaauggcauccaaaauuggaaggugguacucucgaacaaugucuaaaaccaaaaggaugggaaugggauuguaugucaaguaugauggagacccauggacugacagugaugcccuugcucuuaguggaguaaugguuucaauggaagaaccugguugguacucauuuggcuucgaaauaaaagauaagaaaugugauguccccuguauugggauagagaugguacaugaugguggaaaggagacuuggcacucagcagcuacagccauuuacuguuuaaugggcucaggacaacuguugugggacacugucacagguguugauauggcucuguaa

SEQ ID NO: 60774 - RNA, 1401 nt, Artificial Sequence
  derived and/or modified CDS sequence (wt) from neuraminidase__InfluenzaB__ACF54305
augcuacccucaacuauacaaacguuaacccuauuccucacaucagggggaguguuauuaucacuauaugugucagcuucacugucauacuuacuauauucggauauauugcuaaaauuuucaacaacggaaauaacugcaccaacaaugccauuggauugugcaaacgcaucaaauguucaggcugugaaccguucugcaacaaaaggggugacauuucuucucccagaaccggaguggacauacccgcguuuaucuugcccgggcucaaccuuucagaaagcacuccuaauuagcccucauagauucggagaaaccaaaggaaacucagcucccuugauaauaagggaaccuuuuauugcuuguggaccaaaggaaugcaaacacuuugcucuaacccauuaugcagcccaaccagggggauacuacaauggaacaagagaagacagaaacaagcugaggcaucuaauuucagucgaauugggcaaaaucccaacaguagaaaacuccauuuuccacauggcagcauggagcgggucugcaugccaugaugguaaagaauggacauauauuggaguugauggcccugacaguaaugcauugcucaaaauaaaauauggagaagcauauacugacacauaccauuccuaugcaaacaacauccuaagaacacaagaaagugccugcaauugcaucgggggaaauuguuaucuuaugauaacugauggcucagcuucagguauuagugagugcagauuucuuaagauucgagagggccgaauaauaaaagaaauauuuccaacaggaagaguaaaacauacugaagaaugcacaugcggauuugccagcaauaaaaccauagaaugugccuguagagauaacaguuacacagcaaaaagacccuuugucaaauuaaauguggagacugauacagcagaaauaagauugaugugcacagagacuuauuuggacacccccagaccagaugauggaagcauaacagggccuugugaaucuaaugggaacaaagggaguggaggcaucaagggaggauuuguucaucaaagaauggcauccaaaauuggaaggugguacucucgaacaaugucuaaaaccaaaaggaugggaaugggacuguaugucaaguaugauggagacccauggacugacagugaugcccuugcucuuaguggaguaaugguuucaauggaagaaccugguugguacucauuuggcuucgaaauaaaagauaagaaaugugauguccccuguauugggauagagaugguacaugaugguggaaaggagacuuggcacucagcagcaacagccauuuacuguuuaaugggcucaggacaacuguugugggacacugucacagguguugauauggcucuguaa

SEQ ID NO: 60775 - RNA, 1401 nt, Artificial Sequence
  derived and/or modified CDS sequence (wt) from neuraminidase__InfluenzaB__ACF54316
augcuaccuucaacuauacaaacguuaacccuauuucucacaucagggggaguauuauuaucacuauaugugucagcuucauugucauacuuacuauauucggauauauugcuaaaauuuucaccaacagaaauaacugcaccaacuaugccauuggauugugcaaacgcaucaaauguucaggcugugaaccguucugcaacaaaaggggugacacuucuucucccagaaccggaguggacauacccgcguuuaucuugcccgggcucaaccuuucagaaagcacuccuaauuagcccucauagauucggagaaaccaaaggaaacucagcucccuugauaauaagggaaccuuuuauugcuuguggaccaaaugaaugcaaacacuuugcucuaacccauuaugcagcccaaccagggggauacuacaauggaacaagaggagacagaaacaagcugaggcaucuaauuucagucaaauugggcaaaaucccaacaguagaaaacuccauuuuccacauggcagcauggagcggguccgcaugccaugaugguaaggaauggacauauaucggaguugauggcccugacaauaaugcauugcucaaaauaaaauauggagaagcauauacugacacauaccauuccuaugcaaacaacauccuaagaacacaagaaagugccugcaacugcaucgggggaaauuguuaucuuaugauaacugauggcucagcuucagguguuagugaaugcagauuucuuaagauucgagagggccgaauaauaaaagaaauauuuccaacaggaagaguaaaacauacugaagaaugcacaugcggauuugccagcaauaaaaccauagaaugugcuuguagagauaacaguuacacagcaaaaagacccuuugucaaauuaaacguggagacugauacagcagaaauaagauugaugugcacagagacuuauuuggacacccccagaccagaugauggaagcauaacagggccuugugaaucuaauggggacaaagggaguggaggcaucaagggaggauuuguucaucaaagaauggcauccaagauuggaaggugguacucucgaacgaugucuaaaacugaaaggauggggauggggcuguaugucaaguaugauggagacccaugggcugacagugaugcccuugcucuuauuggaguaaugguuucaauggaagaaccugguugguacuccuuuggcuucgaaauaaaagauaaaaauugcgauguccccugcauugggauagagaugguacaugaugguggaaaagagacuuggcacucagcagcaacagccauuuacuguuuaaugggcucaggacagcugcugugggacacugucacagguguuaauauggcucuguaa

SEQ ID NO: 60776 - RNA, 1404 nt, Artificial Sequence
  derived and/or modified CDS sequence (wt) from neuraminidase__InfluenzaB__ACF54338
augcuaccuucaacuauacaaacguuaacccuauuucucacaucagggggaguauuauuaucacuauaugugucagcuucauugucauacuuacuauauucggauauauugcuaaaauucccaucaacagaaauuacugcaccaacaaugccauuggauugugcaaacgcaucaaauguucaggcugugaaccguucugcaacaaaaggggugacacuucuucuucucccagaaccggaguggacauacccgcguuuaucuugcccgggcucaaccuuucagaaagcacuccuaauuagcccucauagauucggagaaaccaaaggaaacucagcucccuugauaauaagggaaccuuuuauugcuuguggaccaaaggaaugcaaacacuuugcucuaacccacuaugcagcccaaccagggggauacuacaauggaacaagaggagacagaaacaagcugaggcaucuaauuucagucaaauugggcaaaaucccaacaguagaaaacuccauuuuccacauggcagcauggagcggguccgcaugccaugaugguaaggaauggacauauaucggaguugauggcccugacaauaaugcauugcucaaaauaaaauauggagaagcauauacugacacauaccauuccuaugcaaacaacauccuaagaacacaagaaagugccugcaauugcaucgggggaaauuguuaucuuaugauaacugauggcucagcuucagguguuagugaaugcagauuucuuaagauucgagagggccgaauaauaaaagaaauauuuccaacaggaagaauaaaacauacugaagaaugcacaugcggauuugcuagcaauaaaaccauagaaugugccuguagagauaacaguuacacagcaaaaagacccuuugucaaauuaaacguggagacugauacagcagaaauaagauugaugugcacagagacuuauuuggacacccccagaccagaugauggaagcauaacagggccuugugaaucuaaugggggcaaagggaguggaggcaucaagggaggauuuguccaucaaagaauggcauccaagauuggaaggugguacucucgaacgaugucuaaaacugaaaggaaggggauggggcuguaugucaaguaugauggagacccaugggcugacagugaugcccuuguuuuuaguggaguaaugguuucaauggaagaaccugguugguacuccuuuggcuucgaaauaaaagacaagaaaugugauguccccuguauugggauagagaugguacaugaugguggaaaagagacuuggcacucagcagcuacagccauuuacuguuuaaugggcucaggacagcugcugugggacacugucacagguguuaauauggcucuguaa

SEQ ID NO: 60777 - RNA, 1401 nt, Artificial Sequence
  derived and/or modified CDS sequence (wt) from neuraminidase__InfluenzaB__ACF54349
augcuaccuucaacuauacaaacguuaacccuauuucucacaucagggggaguguuauuaucacuauaugugucagcuucauugucauacuuacuauauucggauauauugcuaaaauuuucacaaacagaaauaacugcaccaauaaugccauuggauugugcaaacgcaucaaauguucaagcugugaaccguucugcagcaaaaggggugacacuucuucucccagaaccggaguggacauacccucguuuaucuugcccgggcucaaccuuucagaaagcacuccuaauuaacccccauagauucggagaaaccaaaggaaacucagcucccuugauaauaagggaaccuuuuauugcuuguggaccaacggaaugcaaacacuuugcucuaacccauuaugcagcucaaccagggggauacuacaauggaacaagagaagacagaaacaagcugaggcaucuaauuucagucaaauugggcaaaaucccaacaguagaaaacuccauuuuccacauggcagcuuggagcggguccgcaugccaugaugguaaagaauggacauauaucggaguugauggccccgacaguaaugcauugcucaaaauaaaauauggagaagcauauacugacacauaccauuccuaugcaaaaaacauccuaaggacacaagaaagugccuguaauugcaucgggggagauuguuaucuuaugauaacugauggcucagcuucagggauuagugaaugcagauuucuuaagauucgagagggccgaauaauaaaagaaauauuuccaacaggaagaguaaaacauacugaggaaugcacaugcggauuugccagcaacaaaaccauagaaugugcuuguagagauaacaguuacacagcaaaaagacccuuugucaaauuaaauguggagacugauacagcggaaauaagauugaugugcacagagacuuauuuggacacccccagaccaaaugauggaagcauaacagggccuugcgaaucugauggggacaaagggaguggaggcaucaagggaggauuuguucaucaaagaauggcauccaagauuggaaggugguacucucgaacgaugucuaaaacuaaaagaauggggaugggacuguauguaaaguaugauggagacccauggacugacagugaagcccuugcucuuaguggaguaaugguuucaauggaagaaccugguugguauuccuuuggcuucgaaauaaaagauaagaaaugugauguccccuguauugggauagaaaugguacaugauggugggaaaacgacuuggcacucagcagcaacagccauuuacuguuuaaugggcucaggacaacugcugugggacacugucacagguguugauauggcucuguaa

SEQ ID NO: 60778 - RNA, 1401 nt, Artificial Sequence
  derived and/or modified CDS sequence (wt) from neuraminidase__InfluenzaB__ACF54371
augcuaccuucaacuauacaaacguuaacccuauuucucacaucagggggaguguuauuaucacuauaugugucagcuucauugucauacuuacuauauucggauauauugcuaaaauuuucacaaacagaaauaacugcaccaauaaugccauuggauugugcaaacgcaucaaauguucaggcugugaaccguucugcagcaaaaggggugacacuucuucucccagaaccggaguggacauacccucguuuaucuugcccgggcucaaccuuucagaaagcacuccuaauuagcccccauagauucggagaaaccaaaggaaacucagcucccuugauaauaagggaaccuuuuauugcuuguggaccaacggaaugcaaacacuuugcucuaacccauuaugcagcucaaccagggggauacuacaauggaacaagagaagacagaaacaagcugaggcaucuaauuucagucaaauugggcaaaaucccaacaguagaaaacuccauuuuccauauggcagcuuggagcggguccgcaugccaugaugguaaagaauggacauauaucggaguugauggccccgacaguaaugcauugcucaaaauaaaauauggagaagcauauacugacacauaccauuccuaugcaaaaaacauccuaaggacacaagaaagugccugcaauugcauugggggagauuguuaucuuaugauaacugauggcccagcuucagggauuagugaaugcagauuccuuaagauucgagagggccgaauaauaaaagaaauauuuccaacaggaagaguaaaacauacugaggaaugcacaugcggauuugccagcaacaaaaccauagaaugugcuugcagagauaacaguuacacagcaaaaagacccuuugucaaauuaaauguggagacugauacagcggaaauaagauugaugugcacagagacuuauuuggacacccccagaccaaaugauggaagcauaacagggccuugcgaaucugauggggacaaagggaguggaggcaucaagggaggauuuguucaucaaagaauggcauccaagauuggaaggugguacucucgaacgaugucuaaaacuaaaagaauggggaugggacuguauguaaaguaugauggagauccauggacugacagugaagcccuugcucuuaguggaguaaugguuucaauggaagaaccugguugguauuccuuuggcuucgaaauaaaagauaagaaaugugauguccccuguauugggauagaaaugguacaugauggugggaaaacgacuuggcacucagcagcaacagccauuuacuguuuaacgggcucaggacaacugcugugggacacugucacagguguugauauggcucuguaa

SEQ ID NO: 60779 - RNA, 1401 nt, Artificial Sequence
  derived and/or modified CDS sequence (wt) from neuraminidase__InfluenzaB__ACI22549
augcuaccuucaacuauacaaacguuaacccuauuucucacaucagggggaguauuauuaucacuauaugugucagcuucauugucauacuuacuauauucggauauauugcuaaaauuuucaccaacagaaauaacugcacgaacuaugccauuggauugugcaaacgcaucaaauguucaggcugugaaccguucugcaacaaaaggagugacacuucuucucccagaaccggaguggacauacccgcguuuaucuugcccgggcucaaccuuucagaaagcacuccuaauuagcccucauagauucggagaaaccaaaggaaacucagcucccuugauaauaagggaaccuuuuauugcuuguggaccaaaugaaugcaaacacuuugcucuaacccauuaugcagcccaaccggggggauacuacaauggaacaagaggagacagaaacaagcugaggcaucuaauuucagucaaauugggcaaaaucccaacgguagaagacuccauuuuccacauggcagcauggagcggguccgcaugccaugaugguaaggaauggacauauaucggaguugauggcccugacaauaaugcauugcucaaaauaaaauauggagaagcauauacugacacauaccauuccuaugcaaacaacauccuaagaacacaagaaagugccugcaacugcaucgggggaaauuguuaucuuaugauaacugauggcucagcuucagguguuagugaaugcagauuucuuaagauucgagagggccgaauaauaaaagaaauauuuccaacaggaagaguaaaacauacugaagaaugcacaugcggauuugccagcaauaaaaccauagaaugugcuuguagagauaacaguuacacagcaaaaagacccuuugucaaauuaaacguggagacugauacagcagaaauaagauugaugugcacagagacuuauuuggacacccccagaccagaugauggaagcauaacagggccuugugaaucuaauggggacaaagggaguggaggcaucaagggaggauuuguucaucaaagaauggcauccaagauuggaaggugguacucucgaacgaugucuaaaacugaaaggauggggauggggcuguaugucaaguaugauggagacccaugggcugacagugaugcccuugcucuuauuggaguaaugguuucaauggaagaaccugguugguacuccuuuggcuucgaaauaaaagauaaaaauugcgauguccccuguauugggauagagaugguacaugaugguggaaaagagacuuggcacucagcagcaacagccauuuacuguuuaaugggcucaggacagcugcugugggacacugucacagguguuaauauggcucuguaa

SEQ ID NO: 60780 - RNA, 1401 nt, Artificial Sequence
  derived and/or modified CDS sequence (wt) from neuraminidase__InfluenzaB__ACI22551
augcuaccuucaacuauacaaacguuaacccuauuucucacaucagggggaguauuauuaucacuauaugugucagcuucauugucauacuuacuauauucggauauauugcuaaaauuuucaccaacagaaauaacugcacuaacuaugccauuggauugugcaaacgcaucaaauguucaggcugugaaccguucugcaacaaaaggagugacacuucuucucccagaaccggaguggacauacccgcguuuaucuugcccgggcucaaccuuucagaaagcacuccuaauuagcccucauagauucggagaaaccaaaggaaacucagcucccuugauaauaagggaaccuuuuauugcuuguggaccaaaugaaugcaaacacuuugcucuaacccauuaugcagcccaaccagggggauacuacaauggaacaagaggagacagaaacaagcugaggcaucuaauuucagucaaauugggcaaaaucccaacaguagaaaacuccauuuuccacauggcagcauggagcggguccgcaugccaugaugguaaggaauggacauauaucggaguugauggcccugacaauaaugcauugcucaaaauaaaauauggagaagcauauacugacacauaccauuccuaugcaaacaacauccuaagaacacaagaaagugccugcaacugcaucgggggaaauuguuaucuuaugauaacugauggcucagcuucagguguuagugaaugcagauuucuuaagauucgagagggccgaauaauaaaagaaauauuuccaacaggaagaguaaaacauacugaagaaugcacaugcggauuugccagcaauaaaaccauagaaugugcuuguagagauaacaguuacacagcaaaaagacccuuugucaaauuaaacguggagacugauacagcagaaauaagauugaugugcacagagacuuauuuggacacccccagaccagaugauggaagcauaacagggccuugugaaucuaauggggacaaagggaguggaggcaucaagggaggauuuguucaucaaagaauggcauccaagauuggaaggugguacucucgaacgaugucuaaaacugaaaggauggggauggggcuguaugucaaguaugauggagacccaugggcugacagugaugcccuugcucuuauuggaguaaugguuucaauggaagaaccugguugguacuccuuuggcuucgaaauaaaagauaaaaauugcgauguccccuguauugggauagagaugguacaugaugguggaaaagagacuuggcacucagcagcaacagccauuuacuguuuaaugggcucaggacagcugcugugggacacugucacagguguuaauauggcucuguaa

SEQ ID NO: 60781 - RNA, 1401 nt, Artificial Sequence; identical to SEQ ID NO: 60780
  derived and/or modified CDS sequence (wt) from neuraminidase__InfluenzaB__ACI22555

SEQ ID NO: 60782 - RNA, 1401 nt, Artificial Sequence
  derived and/or modified CDS sequence (wt) from neuraminidase__InfluenzaB__ACI22557
augcuaccuucaacuauacaaacguuaacccuauuucucacaucagggggaguauuauuaucacuauaugugucagcuucauuaucauacuuacuauauucggauauauugcuaaaauucucaccaacagaaauaacugcaccaacaaugccauuggauugugcaaacgcaucaaauguucaggcugugaaccguucugcaacaaaaggggugacacuucuucucccagaaccggaguggacauacccgcguuuaucuugcccgggcucaaccuuucagaaagcacuccuaauuagcccucauagauucggagaaaccaaaggaaacucagcucccuugauaauaagggaaccuuuuauugcuuguggaccaaaugaaugcaaacacuuugcucuaacccauuaugcagcccaaccagggggauacuacaauggaacaagaggagacagaaacaagcugaggcaucuaauuucagucaaauugggcaaaaucccaacaguagaaaacuccauuuuccacauggcagcauggagcggguccgcaugccaugaugguaaggaauggacauauaucggaguugauggcccugacaauaaugcauugcucaaaauaaaauauggagaagcauauacugacacauaccauuccuaugcaaacaaaauccuaagaacacaagaaagugccugcaauugcaucgggggaaauuguuaucuuaugauaacugauggcucagcuucagguguuagugaaugcagauuucuuaagauucgagagggccgaauaauaaaagaaauauuuccaacaggaagaguaaaacacacugaggaaugcacaugcggauuugccagcaauaaaaccauagaaugugccuguagagacaacaguuacacagcaaaaagacccuuugucaaauuaaacguggagacugauacagcagaaauaagauugaugugcacagauacuuauuuggacacccccagaccagaugauggaagcauaacaggcccuugugaaucuaauggggacaaagggaguggaggcaucaagggaggauuuguucaucaaagaauggcauccaagauuggaaggugguacucucgaacgaugucuaaaacugaaaggauggggaugggacuguaugucaaguaugauggagacccaugggcugacagugaugcccuagcuuuuaguggaguaaugguuucaaugaaagaaccugguugguacuccuuuggcuucgaaauaaaagauaagaaaugcgauguccccuguauugggauagagaugguacaugaugguggaaaagagacuuggcacucagcagcaacagccauuuacuguuuaaugggcucaggacagcugcugugggacacugucacagguguugacauggcucuguaa

SEQ ID NO: 60783 - RNA, 1401 nt, Artificial Sequence
  derived and/or modified CDS sequence (wt) from neuraminidase__InfluenzaB__ACI22559
augcuaccuucaacuauacaaacguuaacccuauuucucacaucagggggaguauuauuaucacuauaugugucagcuucauugucauacuuacuauacucggauauauugcuaaaauucccaucaacagaaauuacugcaccaacaaugccauuggauugugcaaacgcaucaaauguucaggcugugaaccuuucugcaacaaaaggggugacacuucuucucccagaaccggaguggacauacccgcguuuaucuugcccgggcucaaccuuucagaaagcacuccuaauuagcccucauagauucggagaaaccaaaggaaacucagcucccuugauaauaagggaaccuuuuauugcuuguggaccaaaggaaugcaaacacuuugcucuaacccacuaugcagcccaaccagggggauacuacaauggaacaagaggagacagaaacaagcugaggcaucuaauuucagucaaauugggcaaaaucccaacaguagaaaacuccauuuuccacauggcagcauggagcggguccgcaugccaugaugguaaggaauggacauauaucggaguugauggcccugacaauaaugcauugcucaaaauaaaauauggagaagcauauacugacacauaccauuccuaugcaaacaacauccuaagaacacaagaaagugccugcaauugcaucgggggaaauuguuaucuuaugauaacugauggcucagcuucagguguuagugaaugcagauuucuuaagauucgagagggccgaauaauaaaagaaauauuuccaacaggaagaauaaaacauacugaagaaugcacaugcggauuugcuagcaauaaaaccauagaaugugccuguagagauaacaguuacacagcaaaaagacccuuugucaaauuaaacguggagacugauacagcagaaauaagauugaugugcacagagacuuauuuggacacccccagaccagaugauggaagcauaacagggccuugugaaucuaaugggggcaaagggaguggaggcaucaagggaggauuuguccaucaaagaauggcauccaagauuggaaggugguacucucgaacgaugucuaaaacugaaagaaaggggauggggcuguaugucaaguaugauggagacccaugggcugacagugaugcccuugcuuuuaguggaguaaugguuucaauggaagaaccugguugguacuccuuuggcuucgaaauaaaagacaagaaaugugauguccccuguauugggauagagaugguacaugaugguggaaaagagacuuggcacucagcagcuacagccauuuacuguuuaaugggcucaggacagcugcugugggacacugucacagguguuaauauggcucuguaa

SEQ ID NO: 60784 - RNA, 1401 nt, Artificial Sequence
  derived and/or modified CDS sequence (wt) from neuraminidase__InfluenzaB__ACI22561
augcuaccuucaacuauacaaacguuaacccuauuucucacaucagggggaguauuauuaucacuauaugugucagcuucauuaucauacuuacuauauucggauauauugcuaaaauucucaccaacagaaauaacugcaccaacaaugccauuggauugugcaaacgcaucaaauguucaggcugugaaccguucugcaacaaaaggggggacacuucuucucccagaaccggaguggacauacccgcguuuaucuugcccgggcucaaccuuucagaaagcacuccuaauuagcccucauagauucggagaaaccaaaggaaacucagcucccuugauaauaagggaaccuuuuauugcuuguggaccaaaugaaugcaaacacuuugcucuaacccauuaugcagcccaaccagggggauacuacaauggaacaagaggagacagaaacaagcugaggcaucuaauuucagucaaauugggcaaaaucccaacaguagaaaacuccauuuuccacauggcagcauggagcggguccgcaugccaugaugguaaggaauggacauauaucggaguugauggcccugacaauaaugcauugcucaaaauaaaauauggagaagcauauacugacacauaccauuccuaugcaaacaaaauccuaagaacacaagaaagugccugcaauugcaucgggggaaauuguuaucuuaugauaacugauggcucagcuucagguguuagugaaugcagauuucuuaagauucgagagggccgaauaauaaaagaaauauucccaacaggaagaguaaaacacacugaggaaugcacaugcggauuugccagcaauaaaaccauagaaugugccuguagagacaacaguuacacagcaaaaagacccuuugucaaauuaaacguggagacugauacagcagaaauaagauugaugugcacagauacuuauuuggacacccccagaccagaugauggaagcauaacaggcccuugugaaucuaauggggacaaagggaguggaggcaucaagggaggauuuguucaucaaagaauggcauccaagauuggaaggugguacucucgaacgaugucuaaaacugaaaggauggggaugggacuguaugucaaguaugauggagacccaugggcugacagugaugcccuagcuuuuaguggaguaaugguuucaaugaaagaaccugguugguacuccuuuggcuucgaaauaaaagauaagaaaugcgauguccccuguauugggauagagaugguacaugaugguggaaaagagacuuggcacucagcagcaacagccauuuacuguuuaaugggcucaggacagcugcugugggacacugucacagguguugacauggcucuguaa

SEQ ID NO: 60785 - RNA, 1401 nt, Artificial Sequence
  derived and/or modified CDS sequence (wt) from neuraminidase__InfluenzaB__ACI22563
augcuaccuucaacuauacaaacguuaacccuauuucucacaucagggggaguauuauuaucacuauaugugucagcuucauuaucauacuuacuauauucggauauauugcuaaaauucucaccaacagaaauaacugcaccaacaaugccauuggauugugcaaacgcaucaaauguucaggcugugaaccguucugcaacaaaaggggugacacuucuucucccagaaccggaguggacauacccgcguuuaucuugcccgggcucaaccuuucagaaagcacuccuaauuagcccucauagauucggagaaaccaaaggaaacucagcucccuugauaauaagggaaccuuuuauugcuuguggaccaaaugaaugcaaacacuuugcucuaacccauuaugcagcccaaccagggggauacuacaauggaacaagaggagacagaaacaagcugaggcaucuaauuucagucaaauugggcaaaaucccaacaguagaaaacuccauuuuccacauggcagcauggagcggguccgcaugccaugaugguaaggaauggacauauaucggaguugauggcccugacaauaaugcauugcucaaaauaaaauauggagaagcauauacugacacauaccauuccuaugcaaacaaaauccuaagaacacaagaaagugccugcaauugcaucgggggaaauuguuaucuuaugauaacugauggcucagcuucagguguuagugaaugcagauuucuuaagauucgagagggccgaauaauaaaagaaauauuuccaacaggaagaguaaaacacacugaggaaugcacaugcggauuugccagcaauaaaaccauagaaugugccuguagagacaacaguuacacagcaaaaagacccuuugucaaauuaaacguggagacugauacagcagaaauaagauugaugugcacagauacuuauuuggacacccccagaccagaugauggaagcauaacaggcccuugugaaucuaauggggacaaagggaguggaggcaucaagggaggauuuguucaucaaagaauggcauccaagauuggaaggugguacucucgaacgaugucuaaaacugaaaggauggggaugggacuguaugucaaguaugauggagacccaugggcugacagugaugcccuagcuuuuaguggaguaaugguuucaaugaaagaaccugguugguacuccuuuggcuucgaaauaaaagauaagaaaugcgaugugcccuguauugggauagagaugguacaugaugguggaaaagagacuuggcacucagcagcaacagccauuuacuguuuaaugggcucaggacagcugcugugggacacugucacagguguugacauggcucuguaa

SEQ ID NO: 60786 - RNA, 1401 nt, Artificial Sequence
  derived and/or modified CDS sequence (wt) from neuraminidase__InfluenzaB__ACI22565
augcuaccuucaacuauacaaacguuaacccuauuucucacaucagggggaguauuauuaucacuauaugugucagcuucauugucauacuuacuauacucggauauauugcuaaaauucccaucaacagaaauuacugcaccaacaaugccauuggauugugcaaacgcaucaaauguucaggcugugaaccauucugcaacaaaaggggugacacuucuucucccagaaccggaguggacauacccgcguuuaucuugcccgggcucaaccuuucagaaagcacuccuaauuagcccucauagauucggagaaaccaaaggaaacucagcucccuugauaauaagggaaccuuuuauugcuuguggaccaaaggaaugcaaacacuuugcucuaacccacuaugcagcccaaccagggggauacuacaauggaacaagaggagacagaaacaagcugaggcaucuaauuucagucaaauugggcaaaaucccaacaguagaaaacuccauuuuccacauggcagcauggagcggguccgcaugccaugaugguaaggaauggacauauaucggaguugauggcccugacaauaaugcauugcucaaaauaaaauauggagaagcauauacugacacauaccauuccuaugcaaacaacauccuaagaacacaagaaagugccugcaauugcaucgggggaaauuguuaucuuaugauaacugauggcucagcuucagguguuagugaaugcagauuucuuaagauucgagagggccgaauaauaaaagaaauauuuccaacaggaagaauaaaacauacugaagaaugcacaugcggauuugcuagcaauaaaaccauagaaugugccuguagagauaacaguuacacagcaaaaagacccuuugucaaauuaaacguggagacugauacagcagaaauaagauugaugugcacagagacuuauuuggacacccccagaccagaugauggaagcauaacagggccuugugaaucuaaugggggcaaagggaguggaggcaucaagggaggauuuguccaucaaagaauggcauccaagauuggaagaugguacucucgaacgaugucuaaaauugaaagaaaggggauggggcuguaugucaaguaugauggagacccaugggcugacagugaugcccuugcuuuuaguggaguaaugguuucaauggaagaaccugguugguacuccuuuggcuucgaaauaagagacaagaaaugugauguccccuguauugggauagagaugguacaugaugguggaaaagagacuuggcacucagcagcuacagccauuuacuguuuaaugggcucaggacagcugcugugggacacugucacagguguuaauauggcucuguaa

SEQ ID NO: 60787 - RNA, 1401 nt, Artificial Sequence
  derived and/or modified CDS sequence (wt) from neuraminidase__InfluenzaB__ACI22567
augcuaccuucaacuauacaaacguuaacccuauuucucacaucagggggaguauuauuaucacuauaugugucagcuucauuaucauacuuacuauauucggauauauugcuaaaauucucaccaacagaaauaacugcaccaacaaugccauuggauugugcaaacgcaucaaauguucaggcugugaaccguucugcaacaaaaggggugacacuucuucucccagaaccggaguggacauacccgcguuuaucuugcccgggcucaaccuuucagaaagcacuccuaauuagcccucauagauucggagaaaccaaaggaaacucagcucccuugauaauaagggaaccuuuuauugcuuguggaccaaaugaaugcaaacacuuugcucugacccauuaugcagcccaaccagggggauacuacaauggaacaagaggagacagaaacaagcugaggcaucuaauuucagucaaauugggcaaaaucccaacaguagaaaacuccauuuuccacauggcagcauggagcggguccgcaugccaugaugguaaggaauggacauauaucggaguugauggcccugacaauaaugcauugcucaaaauaaaauauggagaagcauauacugacacauaccauuccuaugcaaacaaaauccuaagaacacaagaaagugccugcaauugcaucgggggaaauuguuaucuuaugauaacugauggcucagcuucagguguuagugaaugcagauuucuuaagauucgagagggccgaauaauaaaagaaauauuuccaacaggaagaguaaaacacacugaggaaugcacaugcggauuugccagcaauaaaaccauagaaugugccuguagagacaacaguuacacagcaaaaagacccuuugucaaauuaaacguggagacugauacagcagaaauaagauugaugugcacagauacuuauuuggacacccccagaccagaugauggaagcauaacaggcccuugugaaucuaauggggacaaagggaguggaggcaucaagggaggauuuguucaucaaagaauggcauccaagauuggaaggugguacucucgaacgaugucuaaaacugaaaggauggggaugggacuguaugucaaguaugauggagacccaugggcugacagugaugcccuagcuuuuaguggaguaaugguuucaaugaaagaaccugguugguacuccuuuggcuucgaaauaaaagauaagaaaugcgauguccccuguauugggauagagaugguacaugaugguggaaaagagacuuggcacucagcagcaacagccauuuacuguuuaaugggcucaggacagcugcugugggacacugucacagguguugacauggcucuguaa

SEQ ID NO: 60788 - RNA, 1401 nt, Artificial Sequence; identical to SEQ ID NO: 60782
  derived and/or modified CDS sequence (wt) from neuraminidase__InfluenzaB__ACI22569

SEQ ID NO: 60789 - RNA, 1401 nt, Artificial Sequence
  derived and/or modified CDS sequence (wt) from neuraminidase__InfluenzaB__ACJ53908
augcuacauucaacuauacaaacguuaacccuauuucucacaucagggggaguguuauuaucacuauaugugucagcuucauugucauacuuacuguauucggauauauugcuaaaauuuucacaaacagaaauaacugcaccaauaaugccauuggauugugcaaacgcaucaaguguucaggcugugaaccguucugcagcaaaaggggugacacuucuucucccagaaccggaguggacauacccucguuuaucuugcccgggcucaaccuuucagaaagcacuccuaauuagcccccauagauucggagaaaccaaaggaaacucagcucccuugauaauaagggaaccuuuuauugcuuguggaccaacggaaugcaaacacuuugcucuaacccauuaugcagcucaaccagggggauacuacaauggaacaagagaagacagaaacaagcugaggcaucuaauuucagucaaauugggcaaaaucccaacaguagaaaacuccauuuuccauauggcagcuuggagcggguccgcaugccaugaugguaaagaauggacauauaucggaguugauggccccgacaguaaugcauugcucaaaauaaaauauggagaagcauauacugacacauaccauuccuaugcaaaaaacauccuaaggacacaagaaagugccugcaauugcaucgggggagauuguuaucuuaugauaacugauggcccagcuucagggauuagugaaugcagauuccuuaagauucgagagggccgaauaauaaaagaaauauuuccaacaggaagaguaaaacauacugaggaaugcacaugcggauuugccagcaacaaaaccauagaaugugcuuguagagauaacaguuacacagcaaaaagacccuuugucaaauuaaauguggagacugauacagcggagauaagauugaugugcacagagacuuauuuggacacccccagaccaaaugauggaagcauaacagggccuugcgaaucugauggggacaaagggaguggaggcaucaagggaggauuuguucaucaaagaauggcauccaagauuggaaggugguacucucgaacgaugucuaaaacuaaaagaauggggaugggacuguauguaaaguaugauggagacccauggacugacagugaagcccuugcucuuaguggaguaaugguuucgauggaagaaccugguugguauuccuuuggcuucgaaauaaaagauaagaaaugugauguccccuguauugggauagaaaugguacaugauggugggaaaacgacuuggcacucagcagcaacagccauuuacuguuuaaugggcucaggacaacugcugugggacacugucacagguguugauauggcucuguaa

SEQ ID NO: 60790 - RNA, 1401 nt, Artificial Sequence
  derived and/or modified CDS sequence (wt) from neuraminidase__InfluenzaB__ACN32560
augcuaccuucaacuauacaaacguuaacccuauuccucacaucagggggaguguuauuaucacuauaugugucagcuucacugucauacuuacuauauucggauauauugcuaaaauuuucaccaacagaaauaacugcaccaacaaugccauuggauugugcaaacgcaucaaauguucaggcugugaaccguucugcaacaaaaggggugacacuucuucucccagaaccggaguggacauacccgcguuuaucuugcccgggcucaaccuuucagaaagcacuccuaauuagcccucauagauucggagaaaccaaaggaaacucagcuccauugauaauaagggaaccuuuuauugcuuguggaccaaaggaaugcaaacacuuugcucuaacccauuaugcagcccaaccagggggauacuacaauggaacaagagaagacagaaacaagcugaggcaucuaauuucagucaaauugggcaaaaucccaacaguagaaaacuccauuuuccacauggcagcguggagcggguccgcaugccaugaugguaaagaauggacauauaucggaguugauggcccugacaguaaugcauugcucaaaauaaaauauggagaagcauauacugacacauaccauuccuaugcaaacaacauccuaagaacacaagaaagugccugcaauugcaucgggggaaauuguuaucuuaugauaacugauggcucagcuucagguauuagugaaugcagauuucuuaagauucgagagggccgaauaauaaaagaaauauuuccaacaggaagaguagaacauacugaagaaugcacaugcggauuugccagcaauaaaaccauagaaugugccuguagagauaacaguuacacagcaaaaagacccuuugucaaauuaaauguggagacugauacagcagaaauaagacugaugugcacagagacuuauuuggacacccccagaccagaugauggaagcauaacagggccuugugaaucuaauggggauaaagggaguggaggcaucaagggaggauuuguucaucaaagaauggcauccaagauuggaaggugguacucucgaacaaugucuaaaacuaaaaggauggggaugggacuguaugucaaguaugauggagacccauggacugacagugaugcccuugcucuuaguggaguaaugguuucaauggaagaacccgguugguacuccuuuggcuucgaaauaaaagauaagaaaugugauguccccuguauugggauagagaugguacaugaugguggaaaggagacuuggcacucagcagcaacagccauuuacuguuuaaugggcucaggacaacugcuaugggacacugucacagguguugauauggcucuguaa

SEQ ID NO: 60791 - RNA, 1401 nt, Artificial Sequence; identical to SEQ ID NO: 60735
  derived and/or modified CDS sequence (wt) from neuraminidase__InfluenzaB__ACN32582

SEQ ID NO: 60792 - RNA, 1401 nt, Artificial Sequence; identical to SEQ ID NO: 60739
  derived and/or modified CDS sequence (wt) from neuraminidase__InfluenzaB__ACN32593

SEQ ID NO: 60793 - RNA, 1401 nt, Artificial Sequence
  derived and/or modified CDS sequence (wt) from neuraminidase__InfluenzaB__ACN32604
augcuaccuucaacuauacaaacguuaacccuauuucucacaucagggggaguauuauuaucacuauaugugucagcuucauuaucauacuuacuauauucggauauauugcuaaaauucucaccaacagaaauaacugcaccaacaaugccauuggauugugcaaacgcaucaaauguucaugcugugaaccguucugcaacaaaaggggugacacuucuucucccagaaccggaguggacauacccgcguuuaucuugcccgggcucaaccuuucagaaagcacuccuaauuagcccucauagauucggagaaaccaaaggaaacucagcucccuugauaauaagggaaccuuuuauugcuuguggaccaaaugaaugcaaacacuuugcucuaacccauuaugcagcccaaccagggggauacuacaauggaacaagaggggacagaaacaagcugaggcaucuaauuucagucaaauugggcaaaaucccaacaguagaaaacuccauuuuccacauggcagcauggagcggguccgcaugccaugaugguaaggaauggacauauaucggaguugauggcccugacaauaaugcauugcucaaaauaaaauauggagaagcauauacugacacauaccauuccuaugcaaacaacauccuaagaacacaagaaagugccugcaauugcaucgggggaaauuguuaucuuaugauaacugauggcucagcuucagguguuagugaaugcagauuucuuaagauucgagagggccgaauaauaaaagaaauauuuccaacaggaagaguaaaacauacugaggaaugcacaugcggauuugccagcaauaaaaccauagaaugugccuguagagauaacaguuacacagcaaaaagacccuuugucaaauugaacguggaaacugauacagcagaaauaagauugaugugcacagauacuuauuuggacacccccagaccagaugauggaagcauaacaggcccuugugaauuuaauggggacaaagggaguggaggcaucaagggaggauuuguucaucaaagaauggcauccaagauuggaaggugguacucucgaacgaugucuaaaacugaaaggauggggaugggacuguaugucaaguaugauggagacccaugggcugacagugaugcccuugcuuuuaguggaguaaugguuucaaugaaagaaccugguugguacuccuuuggcuucgaaauaaaagauaagaaaugcgauguccccuguauugggauagagaugguacaugaugguggaaaagagacuuggcacucagcagcaacagccauuuacuguuuaaugggcucaggacagcugcugugggacacugucacagguguugacauggcucuguaa

SEQ ID NO: 60794 - RNA, 1401 nt, Artificial Sequence; identical to SEQ ID NO: 60739
  derived and/or modified CDS sequence (wt) from neuraminidase__InfluenzaB__ACN32615

SEQ ID NO: 60795 - RNA, 1401 nt, Artificial Sequence
  derived and/or modified CDS sequence (wt) from neuraminidase__InfluenzaB__ACN32775
augcuaccuucaacuauacaaacguuaacccuauuucucacaucagggggaguauuauuaucacuauaugugucagcuucauuaucauacuuacuauauucggauauauugcuaaaauucucaccaacagagauaaaugcaccaacaaugccauuggauugugcaaacgcaucaaauguucaugcugugaaccguucugcaacaaaaggggugacacuucuucucccagaaccggaguggacauacccgcguuuaucuugcccgggcucaaccuuucagaaagcacuccuaauuagcccucauagauucggagaaaccaaaggaaauucagcucccuugauaauaagggaaccuuuuauugcuuguggaccaaaugaaugcaaacacuuugcucuaacccauuaugcagcccaaccagggggauacuacaauggaacaagaggagacagaaacaagcugaggcaucuaauuucagucaaauugggcaaaaucccaacaguagaaaacuccauuuuccacauggcagcauggagcggguccgcaugccaugaugguaaggaauggacauauaucggaguugauggcccugacaauaaugcauugcucaaaauaaaauauggagaagcauauacugacacauaccauuccuaugcaaacaacauccuaagaacacaagaaagugccugcaauugcaucgggggaaauuguuaucuuaugauaacugauggcucagcuucagguauuagugaaugcagauuucuuaagauucgagagggccgaauaauaaaagaaauauuuccaacaggaagaguaaaacauacugaggaaugcacaugcggauuugccagcaauaaauccauagaaugugccuguagagauaacaguuacacagcaaaaagacccuuugucaaauuaaacguggaaacugauacagcagaaauaagauugaugugcacagauacuuauuuggacacccccagaccagaugauggaagcauaacaggcccuugugaaucuaauggggacaaagggaguggaggcaucaagggaggauuuguucaucaaagaauggcauccaagauuggaaggugguacucucgaacgaugucuaaaacugaaaggauggggaugggacuguaugucaaguaugauggagacccaugggcugacagugaugcccuugcuuuuaguggaguaaugguuucaaugaaagaaccugguugguacuccuuuggcuucgaaauaaaagauaagaaaugcgauguccccuguauugggauagagaugguacaugaugguggaaaagagacuuggcacucagcagcaacagccauuuacuguuuaaugggcucaggacagcugcugugggacacugucacagguguugacauggcucuguaa

SEQ ID NO: 60796 - RNA, 1401 nt, Artificial Sequence
  derived and/or modified CDS sequence (wt) from neuraminidase__InfluenzaB__ACN32786
augcuaccuucaacuauacaaacguuaacccuauuucucacaucagggggaguauuauuaucacuauaugugucagcuucauuaucauacuuacuauauucggauauauugcuaaaauucucaccaacagaaauaacugcaccaacaaugccauuggauugugcaaacgcaucaaauguucaggcugugaaccguucugcaacaaaaggggugacacuucuucucccagaaccggaguggacauacccgcguuuaucuugcccgggcucaaccuuucagaaagcacuccuaauuagcccucauagauucggagaaaccaaaggaaacucagcucccuugauaauaagggaaccuuuuauugcuuguggaccaaaugaaugcaaacacuuugcucuaacccacuaugcagcccaaccagggggauacuacaauggaacaagaggagacagaaacaagcugaggcaucuaauuucagucaaauugggcaaaaucccaacaguagaaaacuccauuuuccacauggcagcauggagcggguccgcaugccaugaugguaaggaauggacauauaucggaguugauggcccugacaauaaugcacugcucaaaauaaaauauggagaagcauauacugacacauaccauuccuaugcaaacaaaauccuaagaacgcaagaaagugccugcaauugcaucgggggaaauuguuaucuuaugauaacugauggcucagcuucagguguuagugaaugcagauuucuuaagauucgagagggccgaauaauaaaagaaauauuuccaacaggaagaguaaaacacacugaggaaugcacaugcggauuugccagcaauaaaaccauagaaugugccuguagagauaacaguuacacagcaaaaagacccuuugucaaauuaaacguggagacugauacagcagaaauaagauugaugugcacagauacuuauuuggacacccccagaccagaugauggaagcauaacaggcccuugugaaucuaauggggacaaagggaguggaggcaucaagggaggauuuguucaucaaagaauggcauccaagauuggaaggugguacucucgaacgaugucuaaaacugaaaggauggggaugggacuguaugucaaguaugauggagacccaugggcugacagugaugcccuagcuuuuaguggaguaaugguuucaaugaaagaaccugguugguacuccuuuggcuucgaaauaaaagauaagaaaugcgauguccccuguauugggauagagaugguacaugaugguggaaaagagacuuggcacucagcagcaacagccauuuacuguuuaaugggcucaggacaguugcugugggacacugucacagguguugacauggcucuguaa

SEQ ID NO: 60797 - RNA, 1401 nt, Artificial Sequence
  derived and/or modified CDS sequence (wt) from neuraminidase__InfluenzaB__ACO05928
augcuaccuucaacuauacaaacguuaacccuauuucucacaucagggggaguauuauuaucacuauaugugucagcuucauugucauacuuacuauauucggauauauugcuaaaauucccaucaacagaaauuacugcaccaacaaugccauuggauugugcaaacgcaucaaauguucaggcugugaaccguucugcaacaaaaggggugacacuucuucucccagaaccggaguggacauauccgcguuuaucuugcccgggcucaaccuuucagaaagcacuccuaauuagcccucauagauucggagaaaccaaaggaaacucagcucccuugauaauaagggaaccuuuuauugcuuguggaccaaaggaaugcaaacacuuugcucuaacccacuaugcagcccaaccagggggauacuacaauggaacaaggggagacagaaacaagcugaggcaucuaauuucagucaaauugggcaaaaucccaacaguagaaaacuccauuuuccacauggcagcauggagcggguccgcaugccaugaugguaaggaauggacauauaucggaguugauggcccugacaauaaugcauugcucaaaauaaaauauggagaagcauauacugacacauaccauuccuaugcaaacaacauccuaagaacacaagaaagugccugcaauugcaucgggggaaauuguuaucuuaugauaacugauggcucagcuucagguguuagugaaugcagauuucuuaagauucgagagggccgaauaauaaaagaaauauuuccaacaggaagaauaaaacauacugaagaaugcacaugcggauuugcuagcaauaaaaccauagaaugugccuguagagauaacaguuacacagcaaaaagacccuuugucaaauuaaacguggagacugauacagcagaaauaagauugaugugcacagagacuuauuuggacacccccagaccagaugauggaagcauaacagggccuugugaaucuaauggggacaaagggaguggaggcaucaagggaggauuuguccaucaaagaauggcauccaagauuggaaggugguacucucgaacgaugucuaaaacuaaaaggauggggauggggcuguaugucaaguaugauggagacccaugggcugacagugaugcccuugcuuuuaguggaguaaugguuccaauggaagaaccugguugguacuccuuuggcuucgaaauaaaagacaagaaaugugauguccccuguauugggauagagaugguacaugaugguggaaaagagacuuggcacucagcagcuacagccauuuacuguuuaaugggcucaggacagcugcugugggacaccgucacagguguuaauauggcucuguaa

SEQ ID NO: 60798 - RNA, 1401 nt, Artificial Sequence; identical to SEQ ID NO: 60768
  derived and/or modified CDS sequence (wt) from neuraminidase__InfluenzaB__ACO05950

SEQ ID NO: 60799 - RNA, 1401 nt, Artificial Sequence
  derived and/or modified CDS sequence (wt) from neuraminidase__InfluenzaB__ACO05961
augcuaccuucaacuauacaaacguuaacccuauuucucacaucagggggaguauuauuaucacuauaugugucagcuucauugucauacuuaccauauucggauauauugcuaaaauucccaucaacagaaauuacugcaccaacaaugccauuggauugugcaaacgcaucaaauguucaggcugugaaccguucugcaacaaaaggggugacacuucuucucccagaaccggaguggacauacccgcguuuaucuugcccgggcucaaccuuucagaaagcacuccuaauuagcccucauagauucggagaaaccaaaggaaacucagcucccuugauaauaagggaaccuuuuauugcuuguggaccaaaggaaugcaaacacuuugcucuaacccacuaugcagcccaaccagggggauacuacaauggaacaagaggagacagaaacaagcugaggcaucuaauuucagucaaauugggcaaaaucccaacaguagaaaacuccauuuuccacauggcagcauggagcggguccgcaugccaugaugguaaggaauggacauauaucggaguugauggcccugacaauaaugcauugcucaaaauaaaauauggagaagcauauacugacacauaccauuccuaugcaaacaacauccuaagaacacaagaaagugccugcaauugcaucgggggaaauuguuaucuuaugauaacugauggcucagcuucagguguuagugaaugcagauuucuuaagauucgagagggccgaauaauaaaagaaauauuuccaacaggaagaauaaaacauacugaagaaugcacaugcggauuugcuagcaauaaaaccauagaaugugccuguagagauaacaguuacacagcaaaaagacccuuugucaaauuaaacguggagacugauacagcagaaauaagauugaugugcacagagacuuauuuggacacccccagaccagaugauggaagcauaacagggccuugugaaucuaauggggacaaagggaguggaggcaucaagggaggauuuguccaucaaagaauggcauccaagauuggaaggugguacucucgaacgaugucuaaaacuaaaaggauggggauggggcuguaugucaaguaugauggagacccaugggcugacagugaugcccuugcuuuuaguggaguaaugguuucaauggaagaaccugguugguacuccuuuggcuucgaaauaaaagacaagaaaugugauguccccuguauugggauagagaugguacaugaugguggaaaagagacuuggcacucagcagcuacagccauuuacuguuuaaugggcucaggacagcugcugugggacacugucacagguguuaauauggcucuguaa

SEQ ID NO: 60800 - RNA, 1401 nt, Artificial Sequence
  derived and/or modified CDS sequence (wt) from neuraminidase__InfluenzaB__ACO05972
augcuaccuucaacuauacaaacguuaacccuauuucucacaucagggggaguguuauuaucacuauaugugucagcuucauugucauacuuacuauauucggauauauugcuaaaauuuucacaaacagaaauaacugcaccaauaaugccauuggauugugcaaacgcaucaaauguucaggcugugaaccguucugcagcaaaaggggugacacuucuucucccagaaccggaguggacauacccucguuuaucuugcccgggcucaaccuuucagaaagcacuccuaauuagcccccauagauucggagaaaccaaaggaaacucagcucccuugauaauaagggaaccuuuuauugcuuguggaccaacggaaugcaaacacuuugcucuaacccauuaugcagcucaaccagggggauacuacaauggaacaagagaagacagaaacaagcugaggcaucuaauuucagucaaauugggcaaaaucccaacaguagaaaacuccauuuuccauauggcagcuuggagcggguccgcaugccaugaugguaaagaauggacauauaucggaguugauggccccgacaguaaugcauuacucaaaauaaaauauggagaagcauauacugacacauaccauuccuaugcaaaaaacauccuaaggacacaagaaagugccugcaauugcaucgggggagauuguuaucuuaugauaacugauggcccagcuucagggauuagugaaugcagauuccuuaagauucgagagggccgaauaauaaaagaaauauuuccaacaggaagaguaaaacauacugaggaaugcacaugcggauuugccagcaacaaaaccauagaaugugcuuguagagauaacaguuacacagcaaaaagacccuuugucaaauuaaauguggagacugauacagcggaaauaagauugaugugcacagagacuuauuuggacacccccagaccaaaugauggaagcauaacagggccuugcgaaucugauggggacaaagggaguggaggcaucaagggaggauuuguucaucaaagaauggcauccaagauuggaaggugguacucucgaacgaugucuaaaacuaaaagaauggggaugggacuguauguaaaguaugauggagacccauggacugacagugaagcccuugcucuuaguggaguaaugguuucgauggaagaaccugguugguauuccuuuggcuucgaaauaaaagauaagaaaugugauguccccuguauugggauagaaaugguacaugauggugggaaaacgacuuggcauucagcagcaacagccauuuacuguuuaaugggcucaggacaacugcugugggacacugucacagguguugauauggcucuguaa

SEQ ID NO: 60801 - RNA, 1401 nt, Artificial Sequence; identical to SEQ ID NO: 60800
  derived and/or modified CDS sequence (wt) from neuraminidase__InfluenzaB__ACO05983

SEQ ID NO: 60802 - RNA, 1401 nt, Artificial Sequence; identical to SEQ ID NO: 60800
  derived and/or modified CDS sequence (wt) from neuraminidase__InfluenzaB__ACO05994

SEQ ID NO: 60803 - RNA, 1401 nt, Artificial Sequence
  derived and/or modified CDS sequence (wt) from neuraminidase__InfluenzaB__ACO06005
augcuaccuucgacuauacaaacguuaacccuauuucucacaucagggggaguauuauuaucacuauaugugucagcuucauuaucauacuuacuauauucggauauauugcuaaaauucucaccaacagaaauaacugcaccaacaaugccauuggauugugcaaacgcaucaaauguucaggcugugaaccguucugcaacaaaaggggugacacuucuucucccagaaccggaguggacauacccgcguuuaucuugcccgggcucaaccuuucagaaagcacuccuaauuagcccucauagauucggagaaaccaaaggaaacucagcucccuugauaauaagggaaccuuuuauugcuuguggaccaaaugaaugcaaacacuuugcucuaacccauuaugcagcccaaccagggggauacuacaauggaacaagaggagacagaaacaagcugaggcaucuaauuucagucaaauugggcaaaaucccaacaguagaaaacuccauuuuccacauggcagcauggagcggguccgcaugccaugaugguaaggaauggacauauaucggaguugauggcccugacaauaaugcauugcucaaaauaaaauauggagaagcauauacugacacauaccauuccuaugcaaacaaaauccuaagaacacaagaaagugccugcaauugcaucgggggaaauuguuaucuuaugauaacugauggcucagcuucagguguuagugaaugcagauuucuuaagauucgagagggccgaauaauaaaagaaauauuuccaacaggaagaguaaaacacacugaggaaugcacaugcggauuugccagcaauaaaaccauagaaugugccuguagagauaacaguuacacagcaaaaagacccuuugucaaauugaacguggagacugauacagcagaaauaagauugaugugcacagauacuuauuuggacacccccagaccagaugauggaagcauaacaggcccuugugaaucuaauggggacagagggaguggaggcaucaagggaggauuuguucaucaaagaauggcauccaagauuggaaggugguacucucgaacgaugucuaaaacugaaaggauggguaugggacuguaugucaaguaugauggagacccaugggcugacagugaugcccuagcuuuuaguggaguaaugguuucaaugaaagaaccugguugguacuccuuuggcuucgaaauaaaagauaagaaaugcgauguccccuguauugggauagagaugguacaugaugguggaaaagagacuuggcacucagcagcaacagccauuuacuguuuaaugggcucaggacagcugcugugggacacugucacagguguugacauggcucuguaa

SEQ ID NO: 60804 - RNA, 1401 nt, Artificial Sequence
  derived and/or modified CDS sequence (wt) from neuraminidase__InfluenzaB__ACO06027
augcuaccuucaacuauacaaacguuaacccuauuucucacaucagggggaguguuauuaucacuauaugugucagcuucauugucauacuuacuauauucggauauauugcuaaaauuuucacaaacagaaauaacugcaccaauaaugccauuggauugugcaaacgcaucaaauguucaggcugugaaccguucugcagcaaaaggggugacacuucuucucccagaaccggaguggacauacccucguuuaucuugcccgggcucaaccuuucagaaagcacuccuaauuagcccccauagauucggagaaaccaaaggaaacucagcucccuugauaauaagggaaccuuuuauugcuuguggaccaacggaaugcaaacacuuugcucuaacccauuaugcagcucaaccagggggauacuacaauggaacaagagaagacagaaacaagcugaggcaucuaauuucagucaaauugggcaaaaucccaacaguagaaaacuccauuuuccauauggcagcuuggagcggguccgcaugccaugaugguaaagaauggacauauaucggaguugauggccccgacaguaaugcauuacucaaaauaaaauauggagaagcauauacugacacauaccauuccuaugcaaaaaacauccuaaggacacaagaaagugccugcaauugcaucgggggagauuguuaucuuaugauaacugauggcccagcuucagggauuagugaaugcagauuccuuaagauucgagagggccgaauaauaaaagaaauauuuccaacaggaagaguaaaacauacugaggaaugcacaugcggauuugccagcaacaaaaccauagaaugugcuuguagagauaacaguuacacagcaaaaagacccuuugucaaauuaaauguggagacugauacagcggaaauaagauugaugugcacagagacuuauuuggacacccccagaccaaaugauggaagcauaacagggccuugcgaaucugauggggacaaagggaguggaggcaucaagggaggauuuguccaucaaagaauggcauccaagauuggaaggugguacucucgaacgaugucuaaaacuaaaagaauggggaugggacuguauguaaaguaugauggagacccauggacugacagugaagcccuugcucuuaguggaguaaugguuucgauggaagaaccugguugguauuccuuuggcuucgaaauaaaagauaagaaaugugauguccccuguauugggauagaaaugguacaugauggugggaaaacgacuuggcacucagcagcaacagccauuuacuguuuaaugggcucaggacaacugcugugggacacugucacagguguugauaugacucuguaa

SEQ ID NO: 60805 - RNA, 1401 nt, Artificial Sequence
  derived and/or modified CDS sequence (wt) from neuraminidase__InfluenzaB__ACO06066
augcuaccuucaacuauacaaacguuaacccuauuucucacaucagggggaguguuauuaucacuauaugugucagcuucauugucauacuuacuauauucggauauauugcuaaaauuuucacaaacagaaauaacugcaccaauaaugccauuggauugugcaaacgcaucaaauguucaggcugugaaccguucuguagcaaaaggggugacacuucuucucccagaaccggaguggacauacccucguuuaucuugcccgggcucaaccuuucagaaagcacuccuaauuagcccccauagauucggagaaaccaaaggaaacucagcucccuugauaauaagggaaccuuuuauugcuuguggaccaacggaaugcaaacacuuugcucuaacccauuaugcagcucaaccagggggauacuacaauggaacaagagaagacagaaacaagcugaggcaucuaauuucagucaaauugggcaaaaucccaacaguagaaaacuccauuuuccauauggcagcuuggagcggguccgcaugccaugaugguaaagaauggacauauaucggaguugauggccccgacaguaaugcauuacucaaaauaaaauauggagaagcauauacugacacauaccauuccuaugcaaaaaacauccuaaggacacaagaaagugccugcaauugcaucgggggagauuguuaucuuaugauaacugauggcccagcuucagggauuagugaaugcagauuccuuaagauucgagagggccgaauaauaaaagaaauauuuccaacaggaagaguaaaacauacugaggaaugcacaugcggauuugccagcaacaaaaccauagaaugugcuuguagagauaacaguuacacagcaaaaagacccuuugucaaauuaaauguggagacugauacagcggaaauaagauugaugugcacagagacuuauuuggacacccccagaccaaaugauggaagcauaacagggccuugcgaaucugauggggacaaagggaguggaggcaucaagggaggauuuguccaucaaagaauggcauccaagauuggaaggugguacucucgaacgaugucuaaaacuaaaagaauggggaugggacuguauguaaaguaugauggagacccauggacugacagugaagcccuugcucuuaguggaguaaugguuucgauggaagaaccugguugguauuccuuuggcuucgaaauaaaagauaagaaaugugauguccccuguauugggauagaaaugguacaugauggugggaaaacgacuuggcacucagcagcaacagccauuuacuguuuaaugggcucaggacaacugcugugggacacugucacagguguugauaugacucuguaa

SEQ ID NO: 60806 - RNA, 1401 nt, Artificial Sequence
  derived and/or modified CDS sequence (wt) from neuraminidase__InfluenzaB__ACO94665
augcuaccuucaacuauacaaacguuaacccuauuucucacaucagggggaguauuauuaucacuauaugugucagcuucauuaucauacuuacuauauucggauauauugcuaaaauucucaccaacagaaauaacugcaucaacaaugccauuggauugugcaaacgcaucaaauguucaggcugugaaccguucugcaacaaaaggggugacacuucuucucccagaaccggaguggacauacccgcguuuaucuugcccgggcucaaccuuucagaaagcacuccuaauuagcccucauagauucggagaaaccaaaggaaacucagcucccuugauaauaagggaaccuuuuauugcuuguggaccaaaugaaugcaaacacuuugcucuaacccauuaugcagcccaaccagggggauacuacaauggaacaagaggagacagaaacaagcugaggcaucuaauuucagucaaauugggcaaaaucccaacaguagaaaacuccauuuuccacauggcagcauggagcggguccgcaugccaugaugguaaggaauggacauauaucggaguugauggcccugacaauaaugcauugcucaaaauaaaauauggagaagcauauacugacacauaccauuccuaugcaaacaaaauccuaagaacacaagaaagugccugcaauugcaucgggggaaauuguuaucuuaugauaacugauggcucagcuucagguguuagugaaugcagauuucuuaagauucgagagggccgaauaauaaaagaaauauuuccaacaggaagaguaaaacacacugaggaaugcacaugcggauuugccagcaauaaaaccauagaaugugccuguagagauaacaguuacacagcaaaaagacccuuugucaaauuaaacguggagacugauacagcagaaauaagauugaugugcacagauacuuauuuggacacccccagacccgaugauggaagcauaacaggcccuugugaaucuaauggggacaaagggaguggaggcaucaagggaggauuuguucaucaaagaauggcauccaagauuggaaggugguacucucgaacgaugucuaaaacugaaaggauggggaugggacuguaugucaaguaugauggagacccaugggcugacagugaugcccuagcuuuuaguggaguaaugguuucaaugaaagaaccugguugguacuccuuuggcuucgaaauaaaagauaagaaaugcgauguccccuguauugggauagagaugguacaugaugguggaaaagagacuuggcacucagcagcaacagccauuuacuguuuaaugggcucaggacagcugcugugggacacugucacagguguugacauggcucuguaa

SEQ ID NO: 60807 - RNA, 1401 nt, Artificial Sequence; identical to SEQ ID NO: 60782
  derived and/or modified CDS sequence (wt) from neuraminidase__InfluenzaB__ACQ45607

SEQ ID NO: 60808 - RNA, 1401 nt, Artificial Sequence
  derived and/or modified CDS sequence (wt) from neuraminidase__InfluenzaB__ACQ45610
augcuaccuucaacuauacaaacguuaacccuauuucucacaucagggggaguauuauuaucacuauaugugucagcuucauuaucauacuuacuauauucggauauauugcuaaaauucucaccaacagaaauaacugcaccaacagugccauuggauugugcaaacgcaucaaauguucaggcugugaaccguucugcaacaaaaggggugacacuucuucucccagaaccggaguggacauacccgcguuuaucuugcccgggcucaaccuuucagaaagcacuccuaauuagcccucauagauucggagaaaccaaaggaaacucagcucccuugauaauaagggaaccuuuuauugcuuguggaccaaaugaaugcaaacacuuugcucuaacccauuaugcagcccaaccagggggauacuacaauggaacaagaggagacagaaacaagcugaggcaucuaauuucagucaaauugggcaaaauaccaacaguagaaaacuccauuuuccacauggcagcauggagcggguccgcaugccaugaugguaaggaauggacauauaucggaguugauggcccugacaauaaugcauugcucaaaauaaaauauggagaagcauauacugacacauaccauuccuaugcaaacaaaauccuaagaacacaagaaagugccugcaauugcaucgggggaaauuguuaucuuaugauaacugauggcucagcuucagguguuagugaaugcagauuucuuaagauucgagagggccgaauaauaaaagaaauauuuccaacaggaagaguaaaauacacugaggaaugcacaugcggauuugccagcaauaaaaccauagaaugugccuguagagacaacaguuacacagcaaaaagacccuuugucaaauuaaacguggagacugauacagcagaaauaagauugaugugcacagauacuuauuuggacacccccagaccagaugauggaagcauaacaggcccuugugaaucuaauggggacaaagggaguggaggcaucaagggaggauuuguucaucaaagaauggcauccaagauuggaaggugguacucucgaacgaugucuaaaacugaaaggauggggaugggacuguaugucaaguaugauggagacccaugggcugacagugaugcccuagcuuuuaguggaguaaugguuucaaugaaagaaccugguugguacuccuuuggcuucgaaauaaaagacaagaaaugcgauguccccuguauugggauagagaugguacaugaugguggaaaagagacuuggcacucagcagcaacagccauuuacuguuuaaugggcucaggacagcugcugugggacacugucacagguguugacauggcucuguaa

SEQ ID NO: 60809 - RNA, 1401 nt, Artificial Sequence; identical to SEQ ID NO: 60782
  derived and/or modified CDS sequence (wt) from neuraminidase__InfluenzaB__ACQ45613

SEQ ID NO: 60810 - RNA, 1401 nt, Artificial Sequence
  derived and/or modified CDS sequence (wt) from neuraminidase__InfluenzaB__ACR15626
augcuaccuucaacuauacaaacguuaacccuauuucucacaucagggggaguauuauuaucacuauaugugucagcuucauuaucauacuuacuauauucggauauauugcuaaaauucucaccaacagaaauaacugcaccaacaaugccauuggauugugcaaacgcaucaaauguucaggcugugaaccguucugcaacaaaaggggugacacuucuucucccagaaccggaguggacauacccgcguuuaucuugcccgggcucaaccuuucagaaagcacuccuaauuagcccucauagauucggagaaaccaaaggaaacucagcucccuugauaauaagggaaccuuuuauugcuuguggaccaaaugaaugcaaacacuuugcucuaacccauuaugcagcccaaccagggggauacuacaauggaacaagaggagacagaaacaagcugaggcaucuaauuucagucaaauugggcaaaaucccaacaguagaaaacuccauuuuccacauggcagcauggagcggguccgcaugccaugaugguaaggaauggacauauaucggaguugauggcccugacaauaaugcauugcucaaaauaaaauauggagaagcauauacugacacauaccauuccuaugcaaacaaaauccuaagaacacaagaaagugccugcaauugcaucgggggaaauuguuaucuuaugauaacugauggcucagcuucagguguuagugaaugcagauuucuuaagauucgagagggccgaauaauaaaagaaauauuuccaacaggaagaguaaaacacacugaggaaugcacaugcggauuugccagcaauaaaaccauagaaugugccuguagagauaacaguuacacagcaaaaagacccuuugucaaauugaacguggagacugauacagcagaaauaagauugaugugcacagauacuuauuuggacacccccagaccagaugauggaagcauaacaggcccuugugaaucuaauggggacagagggaguggaggcaucaagggaggauuuguucaucaaagaauggcauccaagauuggaaggugguacucucgaacgaugucuaaaacugaaaggauggggaugggacuguaugucaaguaugauggagacccaugggcugacagugaugcccuagcuuuuaguggaguaaugguuucaaugaaagaaccugguugguacuccuuuggcuucgaaauaaaagauaagaaaugcgauguccccuguauugggauagagaugguacaugaugguggaaaagagacuuggcacucagcagcaacagccauuuacuguuuaaugggcucaggacagcugcugugggacacugucacagguguugacauggcucuguaa

SEQ ID NO: 60811 - RNA, 1401 nt, Artificial Sequence
  derived and/or modified CDS sequence (wt) from neuraminidase__InfluenzaB__ACR15637
augcuaccuucaacuauacaaacguuaacccuauuucucacaucagggggaguauuauuaucacuauaugugucagcuucauuaucauacuuacuauauucggauauauugcuaaaauucucaccaacagaaauaacugcaccaacaaugccauuggauugugcaaacgcaucaaauguucaggcugugaaccguucugcaacaaaaggggugacacuucuucucccagaaccggaguggacauacccgcguuuaucuugcccgggcucaaccuuucagaaagcacuccuaauuaguccucauagauucggagaaaccaaaggaaacucagcucccuugauaauaagggaaccuuuuauugcuuguggaccaaaugaaugcaaacacuuugcucuaacccauuaugcagcccaaccagggggauacuacaauggaacaagaggagacagaaacaagcugaggcaucuaauuucagucaaauugggcaaaaucccaacaguagaaaacuccauuuuccacauggcagcauggagcggguccgcaugccaugaugguaaggaauggacauauaucggaguugauggcccugacaauaaugcauugcucaaaauaaaauauggagaagcauauacugacacauaccauuccuaugcaaacaaaauccuaagaacacaagaaagugccugcaauugcaucgggggaaauuguuaucuuaugauaacugauggcucagcuucagguguuagugaaugcagauuucuuaagauucgagagggccgaauaauaaaagaaauauucccaacaggaagaguaaaacacacugaggaaugcacaugcggauuugccagcaauaaaaccauagaaugugccuguagagauaacaguuacacagcaaaaagacccuuugucaaauugaacguggagacugauacagcagaaauaagauugaugugcacagauacuuauuuggacacccccagaccagaugauggaagcauaacaggcccuugugaaucuaauggggacagagggaguggaggcaucaagggaggauuuguucaucaaagaauggcauccaagauuggaaggugguacucucgaacgaugucuaaaacugaaaggauggggaugggacuguaugucaaguaugauggagacccaugggcugacagugaugcccuagcuuuuaguggaguaaugguuucaaugaaagaaccugguugguacuccuuuggcuucgaaauaaaagauaagaaaugcgauguccccuguauugggauagagaugguacaugaugguggaaaagagacuuggcacucagcagcaacagccauuuacuguuuaaugggcucaggacagcugcugugggacacugucacagguguugacauggcucuguaa

SEQ ID NO: 60812 - RNA, 1401 nt, Artificial Sequence
  derived and/or modified CDS sequence (wt) from neuraminidase__InfluenzaB__ACR15648
augcuacccucaacuauacaaacguuaacccuauuccucacaucagggggaguguuauuaucacuauaugugucagcuucacugucauacuuacuauauucggauauauugcuaaaauuuucaacaacggaaauaacugcaccaacaaugccauuggauugugcaaacgcaucaaauguucaggcugugaaccguucugcaacaaaaggggugacauuucuucucccagaaccggaguggacauacccgcguuuaucuugcccgggcucaaccuuucagaaagcacuccuaauuagcccucauagauucggagaaaccaaaggaaacucagcucccuugauaauaagggaaccuuuuauugcuuguggaccaaaggaaugcaaacacuuugcucuaacccauuaugcagcccaaccagggggauacuacaauggaacaagagaagacagaaacaagcugaggcaucuaauuucagucgaauugggcaaaaucccaacaguagaaaacuccauuuuccacauggcagcauggagcgggucugcaugccaugaugguaaagaauggacauauaucggaguugauggcccugacaguaaugcauugcucaaaauaaaauauggagaagcauauacugacacauaccauuccuaugcaaacaacauccuaagaacacaagaaagugccugcaauugcaucgggggaaauuguuaucuuaugauaacugauggcucagcuucagguauuagugagugcagauuucuuaagauucgagagggccgaauaauaaaagaaauauuuccaacaggaagaguaaaacauacugaagaaugcacaugcggauuugccagcaauaaaaccauagaaugugccuguagagauaacaguuacacagcaaaaagacccuuugucaaauuaaauguggagacugauacagcagaaauaagauugaugugcacagagacuuauuuggacacccccagaccagaugauggaagcauaacagggccuugugaaucuaaugggaacaaagggaguggaggcaucaagggaggauuuguucaucaaagaauggcauccaaaauuggaaggugguacucucgaacaaugucuaaaaccaaaaggaugggaaugggacuguaugucaaguaugauggagacccauggacugacagugaugcccuugcucuuaguggaguaaugguuucaauggaagaaccugguugguacucauuuggcuucgaaauaaaagauaagaaaugugauguccccuguauugggauagagaugguacaugaugguggaaaggagacuuggcacucagcagcaacagccauuuacuguuuaaugggcucaggacaacuguugugggacacugucacagguguugauauggcucuguaa

SEQ ID NO: 60813 - RNA, 1401 nt, Artificial Sequence; identical to SEQ ID NO: 60810
  derived and/or modified CDS sequence (wt) from neuraminidase__InfluenzaB__ACR15659

SEQ ID NO: 60814 - RNA, 1401 nt, Artificial Sequence; identical to SEQ ID NO: 60810
  derived and/or modified CDS sequence (wt) from neuraminidase__InfluenzaB__ACR15670

SEQ ID NO: 60815 - RNA, 1401 nt, Artificial Sequence
  derived and/or modified CDS sequence (wt) from neuraminidase__InfluenzaB__ACR15681
augcuaccuucaacuauacaaacguuaacccuauuucucacaucagggggaguauuauuaucacuauaugugucagcuucauugucauacuuacuauauucggauauauugcuaaaauucucaccaacagaaauaacugcaccaacaaugccauuggauugugcaaacgcaucaaauguucaggcugugaaccguucugcaacaaaaggggugacacuucuucucccagaaccggaguggacauacccgcguuuaucuugcccgggcucaaccuuucagaaagcacuccuaauuagcccucauagauucggagaaaccaaaggaaacucagcucccuugauaauaagggaacccuuuauugcuuguggaccaaaggaaugcaaacacuuugcucuaacccauuaugcagcccaaccagggggauacuacaauggaacaagaggagacagaaacaagcugaggcaucuaauuucagucaaauugggcaaaaucccaacaguagaaaacuccauuuuccacauggcagcauggagcggguccgcaugccaugaugguaaagaauggacauauaucggaguugauggcccugacaauaaugcauugcucaaaauaaaauauggagaagcauauacugacacauaccauuccuaugcaaacaacauccuaagaacacaagaaagugccugcaauugcaucgggggaaauuguuaucuuaugauaacugauggcucagcuucagguauuagugaaugcagauuucuuaagauucgagagggccgaauaauaaaagaaauauuuccaacaggaagaguaaaacauacugaagaaugcacaugcggauuugccagcaauaaaaccauagaaugugccuguagagauaacaguuacacagcaaaaagacccuuugucaaauuaaacguggagacugauacagcagaaauaagauugaugugcacagagacuuauuuggacacccccagaccagaugacggaagcauaacagggccuugugaaucuaauggggacaaagggaguggaggcaucaagggaggauuuguucaucaaagaauggcauccaagauuggaaggugguacucucgaacgaugucuaaaacuaaaaggauggggaugggacuguaugucaaguaugauggagacccaugggcugacagugaugcccuugcucuuaguggaguaaugguuucaauggaagaaccugguugguacuccuuuggcuucgaaauaaaagauaagaaaugugauguccccuguauugggauagagaugguacaugaugguggaaaagagacuuggcacucagcagcaacagccauuuacuguuuaaugggcucaggacagcugcugugggacacugucacagguguugauauggcucuguaa

SEQ ID NO: 60816 - RNA, 1401 nt, Artificial Sequence
  derived and/or modified CDS sequence (wt) from neuraminidase__InfluenzaB__ACR15692
augcuaccuucaacuauacaaacguuaacccuauuucucacaucagggggaguauuauuaucacuauaugugucagcuucauugucauacuuacuauauucggauauauugcuaaaauucucaccaacagaaauaacugcaccaacaaugccauuggguugugcaaacgcaucaaauguucaggcugugaaccguucugcaacaaaaggggugacacuucuucucccagaaccggaguggacauacccgcguuuaucuugcccgggcucaaccuuucagaaagcacuccuaauuagcccucauagauucggagaaaccaaaggaaacucagcucccuugauaauaagggaaccuuuuauugcuuguggaccaaaggaaugcaaacacuuugcucuaacccauuaugcagcccaaccagggggauacuacaauggaacaagaggagacagaaacaagcugaggcaucuaauuucagucaaauugggcaaaaucccaacaguagaaaacuccauuuuccacauggcagcauggagcggguccgcaugccaugaugguaaagaauggacauauaucggaguugauggcccugacaauaaugcauugcucaaaauaaaauauggagaagcauauacugacacauaccauuccuaugcaaacaacauccuaagaacacaagaaagugccugcaauugcaucgggggaaauuguuaucuuaugauaacugauggcucagcuucagguauuagugaaugcagauuucuuaagauucgagagggccgaauaauaaaagaaauauuuccaacaggaagaguaaaacacacugaagaaugcacaugcggauuugccagcaauaaaaccauagaaugugccuguagagauaacaguuacacagcaaaaagacccuuugucaaauuaaacguggagacugauacagcagaaauaagauugaugugcacagagacuuauuuggacacccccagaccagaugauggaagcauaacagggccuugugaaucuaauggggacaaagggaguggaggcaucaagggaggauuuguucaucaaagaauggcauccaagauuggaaggugguacucucgaacgaugucuaaaacuaaaaggauggggaugggacuguaugucaaguaugauggagacccaugggcugacaaugaugcccuugcucuuaguggaguaaugguuucaauggaagaaccugguugguacuccuuuggcuucgaaauaaaagauaagaaaugugauguccccuguauuggaauagagaugguacaugaugguggaaaagagacuuggcacucagcagcaacagccauuuacuguuuaaugggcucaggacagcugcugugggacacugucacagguguugauauggcucuguaa

SEQ ID NO: 60817 - RNA, 1401 nt, Artificial Sequence; identical to SEQ ID NO: 60804
  derived and/or modified CDS sequence (wt) from neuraminidase__InfluenzaB__ACR15703

SEQ ID NO: 60818 - RNA, 1401 nt, Artificial Sequence; identical to SEQ ID NO: 60804
  derived and/or modified CDS sequence (wt) from neuraminidase__InfluenzaB__ACR15714

SEQ ID NO: 60819 - RNA, 1401 nt, Artificial Sequence
  derived and/or modified CDS sequence (wt) from neuraminidase__InfluenzaB__ACR15725
augcuaccuucaacuauacaaacguuaacccuauuucucacaucagggggaguguuauuaucacuauaugugucagcuucacugucauacuuacuguauucggauauauugcuaaaauuuucaccaacagaaauaacugcaccaacaaugccauuggauugugcaaacgcaucaaauguucaggcugugaaccguucugcaacaaaaggggugacacuucuucucccagaaccggaguggacauacccucguuuaucuugcccgggcucaaccuuucagaaagcacuccuaauuagcccucauagauucggagaaaccagaggaaacucagcucccuugauaauaagggaaccuuuuauugcuuguggaccaaaggaaugcaaacacuuugcucuaacccauuaugcagcucaaccagggggauacuacaauggaacaagagaagacagaaacaagcugaggcaucuaauuucagucaaauugggcaaaaucccaacaguagaaaacuccauuuuccacauggcagcuuggagcggguccgcaugccaugaugguagagaauggacauauaucggaguugauggcccugacaguaaugcauugcucaaaauaaaauauggagaagcauauacugacacauaccauuccuaugcaaacaacauccuaagaacacaagaaagugccugcaauugcaucgggggagauuguuaucuuaugauaacugauggcucagcuucagggauuaguaaaugcagauuucuuaagauucgagagggccgaauaauaaaagaaauauuuccaacaggaagaguagaacauacugaagaaugcacaugcggauuugccagcaauaaaaccauagaaugugccuguagagauaacaguuacacagcaaaaagacccuuugucaaauuaaauguggagacugauacagcggaaauaagauugaugugcacagagacuuauuuggacacccccagaccagaugauggaagcauaacagggccuugcgaaucuaauggggauaaagggaguggaggcaucaagggaggauuuguucaucaaagaauggcauccaagauuggaaggugguacucucgaacgaugucuaaaacuaaaaggauggggaugggacuguaugucaaguaugauggagacccauggacugacagugacgcccuugcucuuaguggaguaaugguuucaauggaagaaccugguugguauuccuuuggcuucgaaauaaaagauaagaaaugugauguccccuguauugggauagagaugguacaugaugguggaaaaaagacuuggcacucagcagcaacagccauuuacuguuuaaugggcucaggacaacugcuaugggacacugucacagguguugauauggcucuguaa

SEQ ID NO: 60820 - RNA, 1401 nt, Artificial Sequence; identical to SEQ ID NO: 60680
  derived and/or modified CDS sequence (wt) from neuraminidase__InfluenzaB__ACR15736

SEQ ID NO: 60821 - RNA, 1401 nt, Artificial Sequence; identical to SEQ ID NO: 60810
  derived and/or modified CDS sequence (wt) from neuraminidase__InfluenzaB__ACR39340

SEQ ID NO: 60822 - RNA, 1401 nt, Artificial Sequence
  derived and/or modified CDS sequence (wt) from neuraminidase__InfluenzaB__ADL28399
augcuaccuucaacuauacaaacguuaacccuauuucucacaucagggggaguauuauuaucacuauaugugucagcuucauugucauacuuacuauauucggauauauugcuaaaauucucaccaacagaaauaacugcaccaacaaugccauuggauugugcaaacgcaucaaauguucaggcugugaaccguucugcaacaaaaggggugacacuucuucucccagaaccggaguggacauacccgcguuuaucuugcccgggcucaaccuuucagaaagcacuccuaauuagcccucauagauucggagaaaccaaaggaaacucagcucccuugauaauaagggaaccuuuuauugcuuguggaccaaaugaaugcaaacacuuugcucuaacccauuaugcagcccaaccagggggauacuacaauggaacaagaggagacagaaacaagcugaggcaucuaauuucagucaaauugggcaaaaucccaacaguagaaaacuccauuuuccacauggcagcauggagcggguccgcaugccaugaugguaaggaauggacauauaucggaguugauggcccugacaauaaugcauugcucaaaauaaaauauggagaagcauauacugacacauaccauuccuaugcaaacaacauccuaagaacacaagaaagugccugcaauugcaucgggggaaauuguuaucuuaugauaacugauggcucagcuucagguguuagugaaugcagauuucuuaagauucgagagggccgaauaauaaaagaaauauucccaacaggaagaguaaaacauacugaagaaugcacaugcggauuugccagcaauaaaaucauagaaugugccuguagagauagcaguuacacagcaaaaagacccuuugucaaauuaaacguggagacugauacagcagaaauaagauugaugugcacagagacuuauuuggacacccccagaccaaaugauggaagcauaacagggccuugugaaucuaauggggacaaagggaguggaggcaucaagggaggauuuguucaucaaagaauggcauccaagauuggaaggugguacucucgaacgaugucuaaaacugaaaggauggggaugggacuguaugucaaguaugauggagacccaugggcugacagugaugcccuugcucuuaguggaguaaugguuucaauggaagaaccugguugguacuccuuuggcuucgaaauaaaagauaagaaaugcgauguccccuguauugggauagagaugguacaugaugguggaaaagagacuuggcacucagcagcaacagccauuuacuguuuaaugggcucaggacagcugcugugggacacugucacagguguugauauggcucuguaa

SEQ ID NO: 60823 - RNA, 1401 nt, Artificial Sequence
  derived and/or modified CDS sequence (wt) from neuraminidase__InfluenzaB__ADN32822
augcuaccuucaacuauacaaacguuaacccuauuucucacaucagggggaguguuauuaucacuauaugugucagcuucauugucauacuuacuauauucggauauauugcuaaaauuuucacaaacagaaauaacugcaccaauaaugccauuggauugugcaaacgcaucaaauguucaggcugugaaccguucugcagcaaaaggggugacacuucuucucccagaaccggaguggacauacccucguuuaucuugcccgggcucaaccuuucagaaagcacuccuaauuagcccccauagauucggagaaaccaaaggaaacucagcucccuugauaauaagggaaccuuuuauugcuuguggaccaacggaaugcaaacacuuugcucuaacccauuaugcagcucaaccagggggauacuacaauggaacaagagaagacagaaacaagcugaggcaucuaauuucagucaaauugggcaaaaucccaacaguagaaaacuccauuuuccauauggcagcuuggagcggguccgcaugccaugaugguaaagaauggacauauaucggaguugauggccccgacaguaaugcauuacucaaaauaaaauauggagaagcauauacugacacauaccauuccuaugcaaaaaacauccuaaggacacaagaaagugccugcaauugcaucgggggagauuguuaucuuaugauaacugauggcccagcuucagggauuagugaaugcagauuccuuaagauucgagagggccgaauaauaaaagaaauauuuccaacaggaagaguaaaacauacugaggaaugcacaugcggauuugccagcaacaaaaccauagaaugugcuuguagagauaacaguuacacagcaaaaagacccuuugucaaauuaaauguggagacugauacagcggaaauaagauugaugugcacagagacuuauuuggacacccccagaccaaaugauggaagcauaacagggccuugcgaaucugauggggacaaagggaguggaggcaucaagggaggauuuguucaucaaagaauggcauccaagauuggaaggugguacucucgaacgaugucuaaaacuaaaagaauggggaugggacuguauguaaaguaugauggagacccauggacugacagugaagcccuugcucuuaguggaguaaugguuucgauggaagaaccugguugguauuccuuuggcuucgaaauaaaagauaagaaaugugauguccccuguauugggauagaaaugguacaugauggugggaaaacgacuuggcacucagcagcaacagccauuuacuguuuaaugggcucaggacaacugcugugggacacugucacagguguugauauggcucuguaa

SEQ ID NO: 60824 - RNA, 1401 nt, Artificial Sequence
  derived and/or modified CDS sequence (wt) from neuraminidase__InfluenzaB__ADR02756
augcuaccuucaacuauacaaacguuaacccuauuucucacaucagggggaguguuauuaucacuauaugugucagcuucauugucauacuuacuauauucggauauauugcuaaaauuuucacaaacagaaauaacugcaccaauaauaccauuggauugugcaaacgcaucaaauguucaggcugugaaccguucugcagcaaaaggggugacacuucuucucccagaaccggaguggacauacccucguuuaucuugcccgggcucaaccuuucagaaagcacuccuaauuagcccccauagauucggagaaaccaaaggaaacucagcucccuugauaauaagggaaccuuuuauugcuuguggaccaacggaaugcaaacacuuugcucuaacccauuaugcagcucaaccagggggauacuacaauggaacaagagaagacagaaacaagcugaggcaucuaauuucagucaaauugggcaaaaucccaacaguagaaaacuccauuuuccacauggcagcuuggagcggguccgcaugccaugaugguaaagaauggacauauaucggaguugauggccccgacaguaaugcauugcucaaaauaaaauauggagaagcauauacugacacauaccauuccuaugcaaaaaacauccuaaggacacaagaaagugccugcaauugcaucgggggagauuguuaucuuaugauaacugauggcccagcuucagggauuagugaaugcagauuccuuaagauucgagagggcagaauaauaaaagaaauauuuccaacaggaagaguaaaacauacugaggaaugcacaugcggauuugccagcaacaaaaccauagaaugugcuuguagagauaacaguuacacagcaaaaagacccuuugucaaauuaaauguggagacugauacagcagaaauaagauugaugugcacagagacuuauuuggacacccccagaccaaaugauggaagcauaacagggccuugcgaaucugauggggacaaagggaguggaggcaucaagggaggauuuguucaucaaagaauggcauccaagauuggaaggugguacucucgaacaaugucuaaaacuaaaagaaugggaaugggacuguauguaaaguaugauggagacccauggacugacagugaagcccuugcucuuaguggaguaaugguuucaauggaagaaccugguugguauuccuuuggcuucgaaauaaaagauaagaaaugugauguccccuguauugggauagaaaugguacaugauggugggaaaacgacuuggcacucagcagcaacagccauuuacuguuuaaugggcucaggacaacugcugugggacacugucacagguguugauauggcucuguaa

SEQ ID NO: 60825 - RNA, 1401 nt, Artificial Sequence
  derived and/or modified CDS sequence (wt) from neuraminidase__InfluenzaB__AEA51353
augcuaccuucaacuauacaaacguuaaccuuauuucucacaucagggggaguguuauuaucacuauaugugucagcuucauugucauacuuacuauauucggauauauugcuaaaauuuucacgaacagaaauaacugcaccaauaaugccauuggauugugcaaacgcaucaaauguucaggcugugaaccguucugcaacaaaaggggugacacuucuucucccagaaccggaguggacguacccucguuuaucuugcccgggcucaaccuuucagaaagcacuccuaauuagcccccauagauucggagaaaccaaaggaaacucagcucccuugauaauaagggaaccuuuuauugcuuguggaccaaaggaaugcaaacauuuugcucuaacccauuaugcagcucaaccagggggauacuacaauggaacaagagaagacagaaacaagcugaggcaucuaauuucagucaaauugggcaaaaucccaacaguagaaaacucuauuuuccacauggcagcuuggagcggguccgcaugccaugaugguagagaauggacuuauaucggaguugauggccccgacaguaaugcauugcucaaaauaaaauauggaggagcauuuacugacacuuaccauuccuaugcaaaaaacauccuaagcccacaagaaagugccugcaauugcaucgggggagauuguuaucuuaugauaacugauggcccagcuucagggauuagugaaugcagauuccuuaagauucgagagggccgaauaauaaaagaaauauuuccaacaggaagaguaaaacauacugaggaaugcacaugcggauuugccagcaacaaaaccauagaaugugccuguagagauaacaguuacacagcaaaaagacccuuugucaaauuaaauguggagacugauacagcggaaauaagauugaugugcacagagacuuauuuggacacccccagaccaaaugauggaagcauaacagggccuugcgaaucuaauggggacaaagggaguggaggcaucaagggaggauuuguucaccaaagaauggcauccaagauuggaaggugguacucucgaacgaugucuaaaacuaaaagaauggggaugggacuguauguaaaguaugauggagacccauggacugacagugaagcccuugcucuuaguggaguaaugguuucaauggaagaaccugguugguauuccuuuggcuucgaaauaaaagauaagaaaugugauguccccuguauugggauagaaaugguacaugauggugggaaaacgacuuggcacucagcagcaacagccauuuacuguuuaaugggcucaggacaauugcugugggacacugucacagguguuaauaugacucuguaa

SEQ ID NO: 60826 - RNA, 1401 nt, Artificial Sequence
  derived and/or modified CDS sequence (wt) from neuraminidase__InfluenzaB__AEA51355
augcuaccuucaacuauacaaacguuaacccuauuucucacaucagggggaguauuauuaucacuauaugugucagcuucauuaucauacuuacuauauucggauauauugcuaaaauucucaccaacagaaauaacugcaccaacaaugccauuggauugugcaaacacaucaaauguucaggcugugaaccguucugcaacaaaaggggugacacuucuucucccagaaccggaguggacauacccgcguuuaucuugcccgggcucaaccuuucagaaagcacuccuaauuagcccucauagauucggagaaaccaaaggaaacucagcucccuugauaauaagggaaccuuuuauugcuuguggaccaaaugaaugcaaacacuuugcucuaacccauuaugcagcccaaccagggggauacuacaauggaacaagaggagacagaaacaagcugaggcaucuaauuucagucaaauugggcaaaaucccaacaguagaaaacuccauuuuccacauggcagcauggagcggguccgcaugccaugaugguaaggaauggacauauaucggaguugauggcccugacaauaaugcauugcucaaaauaacuuauggagaagcauaucccggcacauaccauuccuaugcaaucaaaaacccaagaacacaagaaagugcccccaauugcuucgggggacauucuuuucccauuauaacucaugccccaccuucagggguuugggaacccagauuucuuaagauucgcgagggccgaauaauaaacgaaauuuuuccaacaggaagagucaaaccccccgaggaaugcacaugcggauuugccagcaauaacaccauagaaugugccuguagagauaacaauugcacagcaaaacgcccuuuugucaaauuccacguggagucugauccagcagaaauaagagcgaugugcacagauacuuauuuggacucccccagaccagaugauggaagcauaacaggcccuugugacucuaauggggacaaagggaguggaggcaucaagggaggauuuguucaucaaagaauggaauccaagauuggaaggugguacucucgaacgaugucuaaaacugaaaggauggggaugggccuguaugucaaguaugauggagacccaugggcugacagugaugcccuagcuaauaguggaguaauggucucaaugaacgaaccggguucguccuccuuuggcuucgaaauaaaagauaagaaaugcgauguccccuguauugggauagagaugguacaugaugguggaaaagagacuuggcacucagcagcaacagccauuuacuguuuaaugggcucaggacagcugcugugggacacugucacagguguugacauggcucuguaa

SEQ ID NO: 60827 - RNA, 1401 nt, Artificial Sequence
  derived and/or modified CDS sequence (wt) from neuraminidase__InfluenzaB__AEA51357
augcuaccuucaacuauacaaacguuaaccuuauuucucacaucagggggaguguuauuaucacuauaugugucagcuucauugucauacuuacuauauucggauauauugcuaaaauuuucacgaacagaaauaacugcaccaauaaugccauuggauugugcaaacgcaucaaauguucaggcugugaaccguucugcaacaaaaggggugacacuucuucucccagaaccggaguggacguacccucguuuaucuugcccgggcucaaccuuucagaaagcacuccuaauuagcccccauagauucggagaaaccaaaggaaacucagcucccuugauaauaagggaaccuuuuauugcuuguggaccaaaggaaugcaaacauuuugcucuaacccauuaugcagcucaaccagggggauacuacaauggaacaagagaagacagaaacaagcugaggcaucuaauuucagucaaauugggcaaaaucccaacaguagaaaacucuauuuuccacauggcagcuuggagcggguccgcaugccaugaugguagagaauggacauauaucggaguugauggccccgacaguaaugcauugcucaaaauaaaauuuggagaagcauauacugacacauaccauuccuaugcaaaaaacauccuagggacacaagaaagugccugcaauugcaucgggggagauuguaaucuuaugauaacugauggcccagcuucagggauuagugaauccagauuccuuaagauuggagagggccgaauaauaaaagaaauauuuccaacaggaagaguaaaacauacugaggaaugcacaugcggauuugccagcaacaaaaccauagaaugugccuguagagauaacaguuacacagcaaaaagacccuuugucaaauuaaauguggagacugauacagcagaaauaagauugaugugcacagagacuuauuuggacacccccagaccaaaugauggaagcauaacagggccuugugaaucuaauggggacaaagggaguggaggcaucaagggaggauuuguucaucaaagaauggcauccaagauuggaaggugguacucucgaacgaugucuaaaacugaaaggauggggaugggacuguaugucaaguaugauggagacccaugggcugacagugaugcccuagcuuuuaguggaguaaugguuucaaugaaagaaccugguugguacuccuuuggcuucgaaauaaaagauaagaaaugcgauguccccuguauugggauagagaugguacaugaugguggaaaagagacuuggcacucagcagcaacagccauuuacuguuuaaugggcucaggacagcugcugugggacacugucacagguguuaauauggcucuguaa

SEQ ID NO: 60828 - RNA, 1401 nt, Artificial Sequence
  derived and/or modified CDS sequence (wt) from neuraminidase__InfluenzaB__AEA51359
augcuaccuucaacuauacaaacguuaaccuuauuucucacaucagggggaguguuauuaucacuauaugugucagcuucauugucauacuuacuauauucggauauauugcuaaaauuuucacgaacagaaauaacugcaccaauaaugccauuggauugugcaaacgcaucaaauguucaggcugugaaccguucugcaacaaaaggggugacacuucuucucccagaaccggaguggacguacccucguuuaucuugcccgggcucaaccuuucagaaagcacuccuaauuagcccccauagauucggagaaaccaaaggaaacucagcucccuugauaauaagggaaccuuuuauugcuuguggaccaaaggaaugcaaacauuuugcucuaacccauuaugcagcucaaccagggggauacuacaauggaacaagagaagacagaaacaagcugaggcaucuaauuucagucaaauugggcaaaaucccaacaguagaaaacucuauuuuccacauggcagcuuggagcggguccgcaugccaugaugguagagaauggacauauaucggaguugauggccccgacaguaaugcauugcucaaaauaaaauauggagaagcauauacugacacauaccauuccuaugcaaaaaacauccuaaggacacaagaaagugccugcaauugcaucgggggggauuguuaucuuaugauaacugauggcccagcuucagggauuagugaaugcagauuccuuaagauucgagagggccgaauaauaaaagaaauauuuccaacaggaagaguaaaacauacugaggaaugcacaugcggauuugccagcaacaaaaccauagaaugugccuguagagauaacaguuacacagcaaaaagacccuuugucaaauuaaauguggagacugauacagcagaaauaagauugaugugcacagagacuuauuuggacacccccagaccaaaugauggaagcauaacagggccuugcgaaucugauggggacaaagggaguggaggcaucaagggaggauuuguucaucaaagaauggcauccaagauuggaaggugguacucucgaacgaugucuaaaacuaaaagaauggggaugggacuguauguaaaguaugauggagacccauggacugacagugaagcccuugcucuuaguggaguaaugguuucaauggaagaaccugguugguauuccuuuggcuucgaaauaaaagauaagaaaugugauguccccuguauugggauagaaaugguacaugauggugggaaaacgacuuggcacucagcagcaacagccauuuacuguuuaaugggcucaggacaacugcugugggacacugucacagguguugauauggcucuguaa

SEQ ID NO: 60829 - RNA, 1401 nt, Artificial Sequence
  derived and/or modified CDS sequence (wt) from neuraminidase__InfluenzaB__AEA51365
augcuaccuucaacuauacaaacguuaaccuuauuucucacaucagggggaguguuauuaucacuauaugugucagcuucauugucauacuuacuauauucggauauauugcuaaaauuuucacgaacagaaauaacugcaccaauaaugccauuggauugugcaaacgcaucaaauguucaggcugugaaccguucugcaacaaaaggggugacacuucuucucccagaaccggaguggacguacccucguuuaucuugcccgggcucaaccuuucagaaagcacuccuaauuagcccccauagauucggagaaaccaaaggaaacucagcucccuugauaauaagggaaccuuuuauugcuuguggaccaaaggaaugcaaacauuuugcucuaacccauuaugcagcucaaccagggggauacuacaauggaacaagagaagacagaaacaagcugaggcaucuaauuucagucaaauugggcaaaaucccaacaguagaaaacucuauuuuccacauggcagcuuggagcggguccgcaugccaugaugguagagaauggacuuauaucggaguugauggccccgacaguaaugcauugcucaaaauaaaauauggagaagcauauacugacacauaccauuccuaugcaaaaaacauccuaaggacacaagaaagugccugcaauugcaucgggggagauuguuaucuuaugauaacugauggcccagcuucagggauuagugaaugcagauuccuuaagauucgagagggccgaauaauaaaagaaauauuuccaacaggaagaguaaaacauacugaggaaugcacaugcggauuugccagcaacaaaaccauagaaugugccuguagagauaacaguuacacagcaaaaagacccuuugucaaauuaaauguggagacugauacagcggaaauaagauugaugugcacagagacuuauuuggacacccccagaccaaaugauggaagcauaacagggccuugcgaaucuaauggggacaaagggaguggaggcaucaagggaggauuuguucaccaaagaauggcauccaagauuggaaggugguacucucgaacgaugucuaaaacuaaaagaauggggaugggacuguauguaaaguaugauggagacccauggacugacagugaagcccuugcucuuaguggaguaaugguuucaauggaagaaccugguugguauuccuuuggcuucgaaauaaaagauaagaaaugugauguccccuguauugggauagaaaugguacaugauggugggaaaacgacuuggcacucagcagcaacagccauuuacuguuuaaugggcucaggacaacugcugugggacacugucacagguguuaauaugacucuguaa

SEQ ID NO: 60830 - RNA, 1401 nt, Artificial Sequence
  derived and/or modified CDS sequence (wt) from neuraminidase__InfluenzaB__AEA51367
augcuaccuucaacuauacaaacguuaaccuuauuucucacaucagggggaguguuauuaucacuauaugugucagcuucauugucauacuuacuauauucggauauauugcuaaaauuuucacgaacagaaauaacugcaccaauaaugccauuggauugugcaaacgcaucaaauguucaggcugugaaccguucugcaacaaaaggggugacacuucuucucccagaaccggaguggacguacccucguuuaucuugcccgggcucaaccuuucagaaagcacuccuaauuagcccccauagauucggagaaaccaaaggaaacucagcucccuugauaauaagggaaccuuuuauugcuuguggaccaaaggaaugcaaacauuuugcucuaacccauuaugcagcucaaccagggggauacuacaauggaacaagagaagacagaaacaagcugaggcaucuaauuucagucaaauugggcaaaaucccaacaguagaaaacucuauuuuccacauggcagcuuggagcggguccgcaugccaugaugguagagaauggacuuauaucggaguugauggccccgacaguaaugcauugcucaaaauaaaauauggagaagcauauacugacacauaccauuccuaugcaaaaaacauccuaaggacacaagaaagugccugcaauugcaucgggggugauuguuaucuuaugauaacugauggcccagcuucagggauuagugaaugcagauuccuuaagauucgagagggccgaauaauaaaagaaauauuuccaacaggaagaguaaaacauacugaggaaugcacaugcggauuugccagcaacaaaaccauagaaugugccuguagagauaacaguuacacagcaaaaagacccuuugucaaauuaaauguggagacugauacagcggaaauaagauugaugugcacagagacuuauuuggacacccccagaccaaaugauggaagcauaacagggccuugcgaaucuaauggggacaaagggaguggaggcaucaagggaggauuuguucaccaaagaauggcauccaagauuggaaggugguacucucgaacgaugucuaaaacuaaaagaauggggaugggacuguauguaaaguaugauggagacccauggacugacagugaagcccuugcucuuaguggaguaaugguuucaauggaagaaccugguugguauuccuuuggcuucgaaauaaaagauaagaaaugugauguccccuguauugggauagaaaugguacaugauggugggaaaacgacuuggcacucagcagcaacagccauuuacuguuuaaugggcucaggacaacugcugugggacacugucacagguguuaauaugacucuguaa

SEQ ID NO: 60831 - RNA, 1401 nt, Artificial Sequence; identical to SEQ ID NO: 60830
  derived and/or modified CDS sequence (wt) from neuraminidase__InfluenzaB__AEA51371

SEQ ID NO: 60832 - RNA, 1401 nt, Artificial Sequence
  derived and/or modified CDS sequence (wt) from neuraminidase__InfluenzaB__AEA51373
augcuaccuucaacuauacaaacguuaacccuauuucucacaucagggggaguauuauuaucacuauaugugucagcuucauuaucauacuuacuauauucggauauauugcuaaaauucucaccaacagaaauaacugcaccaacaaugccauuggauugugcaaacgcaucaaauguucaggcugugaaccguucugcaacaaaaggggugacacuucuucucccagaaccggaguggacauacccgcguuuaucuugcccgggcucaaccuuucagaaagcacuccuaauuagcccucauagauucggagaaaccaaaggaaacucagcucccuugauaauaagggaaccuuuuauugcuuguggaccaaaugaaugcaaacacuuugcucuaacccauuaugcagcccaaccagggggauacuacaauggaacaagaggagacagaaacaagcugaggcaucuaauuucagucaaauugggcaaaaucccaacaguagaaaacuccauuuuccacauggcagcauggagcggguccgcgugccaugaugguaaggaauggacauauaucggaguugauggcccugacaauaaugcauugcucaaaguaaaauauggagaagcauauacugacacauaccauuccuaugcaaacaaaauccuaagaacacaagaaagugccugcaauugcaucgggggaaauuguuaucuuaugauaacugauggcucagcuucagguguuagugaaugcagauuucuuaagauucgagagggccgaauaauaaaagaaauauuuccaacaggaagaguaaaacacacugaggaaugcacaugcggauuugccagcaauaaaaccauagaaugugccuguagagauaacaguuacacagcaaaaagaccuuuugucaaauuaaacguggagacugauacagcagaaauaagauugaugugcacagauacuuauuuggacacccccagaccagaugauggaagcauaacagggccuugcgaaucuaauggggacaaagggaguggaggcaucaagggaggauuuguucaccaaagaauggcauccaagauuggaaggugguacucucgaacgaugucuaaaacuaaaagaauggggaugggacuguauguaaaguaugauggagacccauggacugacagugaagcccuugcucuuaguggaguaaugguuucaauggaagaaccugguugguauuccuuuggcuucgaaauaaaagauaagaaaugugauguccccuguauugggauagaaaugguacaugauggugggaaagagacuuggcacucagcagcaacagccauuuacuguuuaaugggcucaggacaacugcugugggacacugucacagguguuaauaugacucuguaa

SEQ ID NO: 60833 - RNA, 1401 nt, Artificial Sequence
  derived and/or modified CDS sequence (wt) from neuraminidase__InfluenzaB__AEA51377
augcuaccuucaacuauacaaacguuaacccuauuucucacaucagggggaguauuauuaucacuauaugugucagcuucauuaucauacuuacuauauucggauauauugcuaaaauucucaccaacagaaauaacugcaccaacaaugccauuggauugugcaaacgcaucaaauguucaggcugugaaccguucugcaacaaaaggggugacacuucuucucccagaaccggaguggacauacccgcguuuaucuugcccgggcucaaccuuucagaaagcacuccuaauuagcccucauagauucggagaaaccaaaggaaacucagcucccuugauaauaagggaaccuuuuauugcuuguggaccaaaugaaugcaaacacuuugcucuaacccauuaugcagcccaaccagggggauacuacaauggaacaagaggagacagaaacaagcugaggcaucuaauuucagucaaauugggcaaaaucccaacaguagaaaacuccauuuuccacauggcagcauggagcggguccgcgugccaugaugguaaggaauggacauauaucggaguugauggcccugacaauaaugcauugcucaaaguaaaauauggagaagcauauacugacacauaccauuccuaugcaaacaaaauccuaagaacacaagaaagugccugcaauugcaucgggggaaauuguuaucuuaugauaacugauggcucagcuucagguguuagugaaugcagauuucuuaagauucgagagggccgaauaauaaaagaaauauuuccaacaggaagaguaaaacacacugaggaaugcacaugcggauuugccagcaauaaaaccauagaaugugccuguagagauaacaguuacacagcaaaaagaccuuuugucaaauugaacguggagacugauacagcagaaauaagauugaugugcacagauacuuauuuggacacccccagaccagaugauggaagcauaacaggcccuugugaaucuaauggggacaaagggaguggaggcaucaagggaggauuuguucaucaaagaauggaauccaagauuggaaggugguacucucgaacgaugucuaaaacugaaaggauggggaugggacuguaugucaaguaugauggagacccaugggcugacagugaugcccuagcuuuuaguggaguaaugguuucaaugaaagaaccugguugguacuccuuuggcuucgaaauaaaagauaagaaaugcgauguccccuguauugggauagagaugguacaugaugguggaaaagagacuuggcacucagcagcaacagccauuuacuguuuaaugggcucaggacagcugcugugggacacugucacagguguugacauggcucuguaa

SEQ ID NO: 60834 - RNA, 1401 nt, Artificial Sequence
  derived and/or modified CDS sequence (wt) from neuraminidase__InfluenzaB__AEA51379
augcuaccuucaacuauacaaacguuaacccuauuucucacaucagggggaguauuauuaucacuauaugugucagcuucauuaucauacuuacuauauucggauauauugcuaaaauucucaccaacagaaauaacugcaccaacaaugccauuggauugugcaaacgcaucaaauguucaggcugugaaccguucugcaacaaaaggggugacacuucuucucccagaaccggaguggacauacccgcguuuaucuugcccgggcucaaccuuucagaaagcacuccuaauuagcccucauagauucggagaaaccaaaggaaacucagcucccuugauaauaagggaaccuuuuauugcuuguggaccaaaugaaugcaaacacuuugcucuaacccauuaugcagcccaaccagggggauacuacaauggaacaagaggagacagaaacaagcugaggcaucuaauuucagucaaauugggcaaaaucccaacaguagaaaacuccauuuuccacauggcagcauggagcggguccgcgugccaugaugguaaggaauggacauauaucggaguugauggcccugacaauaaugcauugcucaaaguaaaauauggagaagcauauacugacacauaccauuccuaugcaaacaaaauccuaagaacacaagaaagugccugcaauugcaucgggggaaauuguuaucuuaugauaacugauggcucagcuucagguguuagugaaugcagauuucuuaagauucgagagggccgaauaauaaaagaaauauuuccaacaggaagaguaaaacacacugaggaaugcacaugcggauuugccagcaauaaaaccauagaaugugccuguagagauaacaguuacacagcaaaaagaccuuuugucaaauugaacguggagacugauacagcagaaauaagauugaugugcacagauacuuauuuggacacccccagaccagaugauggaagcauaacaggcccuugugaaucuaauggggacaaagggaguggaggcaucaagggaggauuuguucaucaaagaauggaauccaagauuggaaggugguacucucgaacgaugucuaaaacugaaaggaugggaaugggacuguaugucaaguaugauggagacccaugggcugacagugaugcccuagcuuuuaguggaguaaugguuucaaugaaagaaccugguugguacuccuuuggcuucgaaauaaaagauaagaaaugcgauguccccuguauugggauagagaugguacaugaugguggaaaagagacuuggcacucagcagcaacagccauuuacuguuuaaugggcucaggacagcugcugugggacacugucacagguguugacauggcucuguaa

SEQ ID NO: 60835 - RNA, 1401 nt, Artificial Sequence
  derived and/or modified CDS sequence (wt) from neuraminidase__InfluenzaB__AEA51381
augcuaccuucaacuauacaaacguuaacccuauuccucacaucagggggaguguuauuaucacuauaugugucagcuucauuaucauacuuacuauauucggauauauugcuaaaauucucaccaacagaaauaacugcaccaacaaugccauuggauugugcaaacgcaucaaauguucaggcugugaaccguucugcaacaaaaggggugacacuucuucucccagaaccggaguggacauacccgcguuuaucuugcccgggcucaaccuuucagaaagcacuccuaauuagcccucauagauucggagaaaccaaaggaaacucagcucccuugauaauaagggaaccuuuuauugcuuguggaccaaaugaaugcaaacacuuugcucuaacccauuaugcagcccaaccagggggauacuacaauggaacaagaggagacagaaacaagcugaggcaucuaauuucagucaaauugggcaaaaucccaacaguagaaaacuccauuuuccacauggcagcauggagcggguccgcgugccaugaugguaaggaauggacguauaucggaguugauggcccugacaauaaugcauugcucaaaguaaaauauggagaagcauauacugacacauaccauuccuaugcaaacaaaauccuaagaacacaagaaagugccugcaauugcaucgggggaaauuguuaucuuaugauaacugauggcucagcuucagguguuagugaaugcagauuucuuaagauucgagagggccgaauaauaaaagaaauauuuccaacaggaagaguaaaacacacugaggaaugcacaugcggauuugccagcaauaaaaccauagaaugugccuguagagauaacaguuacacagcaaaaagaccuuuugucaaauuaaacguggagacugauacagcagaaauaagauugaugugcacagauacuuauuuggacacccccagaccaaaugauggaagcauaacaggcccuugugaaucugauggggacaaagggaguggaggcaucaagggaggauuuguucaucaaagaaugaaauccaagauuggaaggugguacucucgaacgaugucuaaaacugaaaggauggggaugggacuguaugucaaguaugauggagacccaugggcugacagugaugcccuagcuuuuaguggaguaaugguuucagugaaagaaccugguugguacuccuuuggcuucgaaauaaaagauaagaaaugcgauguccccuguauugggauagagaugguacaugaugguggaaaagagacuuggcacucagcagcaacagccauuuacuguuuaaugggcucaggacagcugcugugggacacugucacagguguugacauggcucuguaa

SEQ ID NO: 60836 - RNA, 1401 nt, Artificial Sequence; identical to SEQ ID NO: 60834
  derived and/or modified CDS sequence (wt) from neuraminidase__InfluenzaB__AEA51383

SEQ ID NO: 60837 - RNA, 1401 nt, Artificial Sequence
  derived and/or modified CDS sequence (wt) from neuraminidase__InfluenzaB__AEG20998
augcuaccuucaacuauacaaacguuaaccuuauuucucacaucagggggaguguuauuaucacuauaugugucagcuucauugucauacuuacuauauucggauauauugcuaaaauuuucacgaacagaaauaacugcaccaauacugcgauuggcuugugcaaacgcaucaaauguucaggcugugaaccguucugcaacaaaaggggugacacuucuucucccagaaccggaguggacguacccucguuuaucuugcccgggcucaaccuuucagaaagcacuccuaauuagcccccauagauucggagaaaccaaaggaaacucagcucccuugauaauaagggaaccuuuuauugcuuguggaccaaaggaaugcaaacauuuugcucuaacccauuaugcagcucaaccagggggauacuacaauggaacaagagaagacagaaacaagcugaggcaucuaauuucagucaaauugggcaaaaucccaacaguagaaaacucuauuuuccacauggcagcuuggagcggguccgcaugccaugaugguagagaauggacuuauaucggaguugauggccccgacaguaaugcauugcucaaaauaaaauauggaggagcauuuacugacacuuaccauuccuaugcaaaaaacauccuaagcccacaagaaagugccugcaauugcaucgggggagauuguuaucuuaugauaacugauggcccagcuucagggauuagugaaugcagauuccuuaagauucgagagggccgaauaauaaaagaaauauuuccaacaggaagaguaaaacauacugaggaaugcacaugcggauuugccagcaacaaaaccauagaaugugccuguagagauaacaguuacacagcaaaaagacccuuugucaaauuaaauguggagacugauacagcggaaauaagauugaugugcacagagacuuauuuggacacccccagaccaaaugauggaagcauaacagggccuugcgaaucuaauggggacaaagggaguggaggcaucaagggaggauuuguucaccaaagaauggcauccaagauuggaaggugguacucucgaacgaugucuaaaacuaaaagaauggggaugggacuguauguaaaguaugauggagacccauggacugacagugaagcccuugcucuuaguggaguaaugguuucaauggaagaaccugguugguauuccuuuggcuucgaaauaaaagauaagaaaugugauguccccuguauugggauagaaaugguacaugauggugggaaaacgacuuggcacucagcagcaacagccauuuacuguuuaaugggcucaggacaauugcugugggacacugucacagguguuaauaugacucuguaa

SEQ ID NO: 60838 - RNA, 1401 nt, Artificial Sequence
  derived and/or modified CDS sequence (wt) from neuraminidase__InfluenzaB__AEG20999
augcuaccuucaacuauacaaacguuaaccuuauuucucacaucagggggaguguuauuaucacuuucggugucagcuucauugucauacuuacuauauucggauauauugcuaaaauuuucacgaacagaaauaacugcaccaauaaugccauuggauugugcaaacgcaucaaauguucaggcugugaaccguucugcaacaaaaggggugacacuucuucucccagaaccggaguggacguacccucguuuaucuugcccgggcucaaccuuucagaaagcacuccuaauuagcccccauagauucggagaaaccaaaggaaacucagcucccuugauaauaagggaaccuuuuauugcuuguggaccaaaggaaugcaaacauuuugcucuaacccauuaugcagcucaaccagggggauacuacaauggaacaagagaagacagaaacaagcugaggcaucuaauuucagucaaauugggcaaaaucccaacaguagaaaacucuauuuuccacauggcagcuuggagcggguccgcaugccaugaugguagagaauggacuuauaucggaguugauggccccgacaguaaugcauugcucaaaauaaaauauggaggagcauuuacugacacuuaccauuccuaugcaaaaaacauccuaagcccacaagaaagugccugcaauugcaucgggggagauuguuaucuuaugauaacugauggcccagcuucagggauuagugaaugcagauuccuuaagauucgagagggccgaauaauaaaagaaauauuuccaacaggaagaguaaaacauacugaggaaugcacaugcggauuugccagcaacaaaaccauagaaugugccuguagagauaacaguuacacagcaaaaagacccuuugucaaauuaaauguggagacugauacagcggaaauaagauugaugugcacagagacuuauuuggacacccccagaccaaaugauggaagcauaacagggccuugcgaaucuaauggggacaaagggaguggaggcaucaagggaggauuuguucaccaaagaauggcauccaagauuggaaggugguacucucgaacgaugucuaaaacuaaaagaauggggaugggacuguauguaaaguaugauggagacccauggacugacagugaagcccuugcucuuaguggaguaaugguuucaauggaagaaccugguugguauuccuuuggcuucgaaauaaaagauaagaaaugugauguccccuguauugggauagaaaugguacaugauggugggaaaacgacuuggcacucagcagcaacagccauuuacuguuuaaugggcucaggacaauugcugugggacacugucacagguguuaauaugacucuguaa

SEQ ID NO: 60839 - RNA, 1401 nt, Artificial Sequence
  derived and/or modified CDS sequence (wt) from neuraminidase__InfluenzaB__AEG21000
augcuaccuucaacuauacaaacguuaaccuuauuucucacaucagggggaguguuauuaucacuauaugugucagcuucauugucauacuuacuauauucggauauauugcuaaaauuuucacgaacagaaauaacugcagcaauacugauauuggauugugcaaacgcaucaaauguucaggcugugaaccguucugcaacaaaaggggugacacuucuucucccagaaccggaguggacguacccucguuuaucuugcccgggcucaaccuuucagaaagcacuccuaauuagcccccauagauucggagaaaccaaaggaaacucagcucccuugauaauaagggaaccuuuuauugcuuguggaccaaaggaaugcaaacauuuugcucuaacccauuaugcagcucaaccagggggauacuacaauggaacaagagaagacagaaacaagcugaggcaucuaauuucagucaaauugggcaaaaucccaacaguagaaaacucuauuuuccacauggcagcuuggagcggguccgcaugccaugaugguagagaauggacuuauaucggaguugauggccccgacaguaaugcauugcucaaaauaaaauauggaggagcauuuacugacacuuaccauuccuaugcaaaaaacauccuaagcccacaagaaagugccugcaauugcaucgggggagauuguuaucuuaugauaacugauggcccagcuucagggauuagugaaugcagauuccuuaagauucgagagggccgaauaauaaaagaaauauuuccaacaggaagaguaaaacauacugaggaaugcacaugcggauuugccagcaacaaaaccauagaaugugccuguagagauaacaguuacacagcaaaaagacccuuugucaaauuaaauguggagacugauacagcggaaauaagauugaugugcacagagacuuauuuggacacccccagaccaaaugauggaagcauaacagggccuugcgaaucuaauggggacaaagggaguggaggcaucaagggaggauuuguucaccaaagaauggcauccaagauuggaaggugguacucucgaacgaugucuaaaacuaaaagaauggggaugggacuguauguaaaguaugauggagacccauggacugacagugaagcccuugcucuuaguggaguaaugguuucaauggaagaaccugguugguauuccuuuggcuucgaaauaaaagauaagaaaugugauguccccuguauugggauagaaaugguacaugauggugggaaaacgacuuggcacucagcagcaacagccauuuacuguuuaaugggcucaggacaauugcugugggacacugucacagguguuaauaugacucuguaa

SEQ ID NO: 60840 - RNA, 1401 nt, Artificial Sequence
  derived and/or modified CDS sequence (wt) from neuraminidase__InfluenzaB__AEG21002
augcuaccuucaacuauacaaacguuaaccuuauuucucacaucagggggaguguuauuaucacuauaugugucagcuucauugucauacuuacuauauucggauauauugcuaaaauuuucacgaacagaaauaacugcaccaauaaugccauuggauugugcaaacgcaucaaauguucaggcugugaaccguucugcaacaaaaggggugacacuucuucucccagaaccggaguggacguacccucguuuaucuugcccgggcucaaccuuucagaaagcacuccuaauuagcccccauagauucggagaaaccaaaggaaacucagcucccuugauaauaagggaaccuuuuauugcuuguggaccaaaggaaugcaaacauuuugcucuaacccauuaugcagcucaaccagggggauacuacaauggaacaagagaagacagaaacaagcugaggcaucuaauuucagucaaauugggcaaaaucccaacaguagaaaacucuauuuuccacauggcagcuuggagcggguccgcaugccaugaugguagagaauggacuuauaucggaguugauggccccgacaguaaugcauugcucaaaauaaaauauggagaagcauauacugacacauaccauuccuaugcaaaaaacauccuaaggacacaagaaagugccugcaauugcaucgggggugauuguuaucuuaugauaacugauggcccagcuucagggauuagugaaugcagauuccuuaagauucgagagggccgaauaauaaaagaaauauuuccaacaggaagaguaagacauacugaggaaugcacaugcggauuugccagcaacaaaaccauagaaugugccuguagagauaacaguuacacagcaaaaagacccuuugucaaauuaaauguggagacugauacagcggaaauaagauugaugugcacagagacuuauuuggacacccccagaccaaaugauggaagcauaacagggccuugcgaaucuaauggggacaaagggaguggaggcaucaagggaggauuuguucaccaaagaauggcauccaagauuggaaggugguacucucgaacgaugucuaaaacuaaaagaauggggaugggacuguauguaaaguaugauggagacccauggacugacagugaagcccuugcucuuaguggaguaaugguuucaauggaagaaccugguugguauuccuuuggcuucgaaauaaaagauaagaaaugugauguccccuguauugggauagaaaugguacaugauggugggaaaacgacuuggcacucagcagcaacagccauuuacuguuuaaugggcucaggacaacugcugugggacacugucacagguguuaauaugacucuguaa

SEQ ID NO: 60841 - RNA, 1401 nt, Artificial Sequence
  derived and/or modified CDS sequence (wt) from neuraminidase__InfluenzaB__AEG21003
augcuaccuucaacuauacaaacguuaaccuuauuucucacaucagggggaguguuauuaucacuauaugugucagcuucauugucauacuuacuauauucggauauauugcuaaaauuuucacgaacagaaauaacugcaccaauaaugccauuggauugugcaaacgcaucaaauguucaggcugugaaccguucugcaacaaaaggggugacacuucuucucccagaaccggaguggacguacccucguuuaucuugcccgggcucaaccuuucagaaagcacuccuaauuagcccccauagauucggagaaaccaaaggaaacucagcucccuugauaauaagggaaccuuuuauugcuuguggaccaaaggaaugcaaacauuuugcucuaacccauuaugcagcucaaccagggggauacuacaauggaacaagagaagacagaaacaagcugaggcaucuaauuucagucaaauugggcaaaaucccaacaguagaaaacucuauuuuccacauggcagcuuggagcggguccgcaugccaugaugguagagaauggacauauaucggaguugauggccccgacaguaaugcauugcucaaaauaaaauauggagaagcauauacugacacauaccauuccuaugcaaaaaacauccuaaggacacaagaaagugccugcaauugcaucgggggggauuguuaucuuaugauaacugauggcccagcuucagggauuagugaaugcagauuccuuaagauucgagagggccgaauaauaaaagaaauauuuccaacaggaagaguaaaacauacugaggaaugcacaugcggauuugccagcaacaaaaccauagaaugugccuguagagauaacaguuacacagcaaaaagacccuuugucaaauuaaauguggagacugauacagcggaaauaagauugaugugcacagagacuuauuuggacacccccagaccaaaugauggaagcauaacagggccuugcgaaucugauggggacaaagggaguggaggcaucaagggaggauuuguucaccaaagaauggcauccaagauuggaaggugguacucucgaacgaugucuaaaacuaaaagaauggggaugggacuguauguaaaguaugauggagacccauggacugacagugaagcccuugcucuuaguggaguaaugguuucaauggaagaaccugguugguauuccuuuggcuucgaaauaaaagauaagaaaugugauguccccuguauugggauagaaaugguacaugauggugggaaaacgacuuggcacucagcagcaacagccauuuacuguuuaaugggcucaggacaacugcugugggacacugucacagguguuaauaugacucuguaa

SEQ ID NO: 60842 - RNA, 1401 nt, Artificial Sequence
  derived and/or modified CDS sequence (wt) from neuraminidase__InfluenzaB__AEG21004
augcuaccuucaacuauacaaacguuaaccuuauuucucacaucagggggaguguuauuaucacuauaugugucagcuucauugucauacuuacuauauucggauauauugcuaaaauuuucaccaacagaaauaacugcaccaacaaugccauuggauugugcaaacgcaucaaauguucaggcugugaaccguucugcaacaaaaggggugacacuucuucucccagaaccggaguggacauacccgcguuuaucuugcccgggcucaaccuuucagaaagcacuccuaauuagcccucauagauucggagaaaccaaaggaaacucagcucccuugauaauaagggaaccuuuuauugcuuguggaccaaaugaaugcaaacacuuugcucuaacccauuaugcagcccaaccagggggauacuacaauggaacaagaggagacagaaacaagcugaggcaucuaauuucagucaaauugggcaaaaucccaacaguagaaaacuccauuuuccacauggcagcauggagcggguccgcgugccaugaugguaaggaauggacauauaucggaguugauggcccugacaauaaugcauugcucaaaguaaaauauggagaagcauauacugacacauaccauuccuaugcaaacaaaauccuaagaacacaagaaagugccugcaauugcaucgggggaaauuguuaucuuaugauaacugauggcucagcuucagguguuagugaaugcagauuucuuaagauucgagagggccgaauaauaaaagaaauauuuccaacaggaagaguaaaacacacugaggaaugcacaugcggauuugccagcaauaaaaccauagaaugugccuguagagauaacaguuacacagcaaaaagaccuuuugucaaauugaacguggagacugauacagcagaaauaagauugaugugcacagauacuuauuuggacacccccagaccagaugauggaagcauaacaggcccuugugaaucuaauggggacaaaggggguggaggcaucaagggaggauuuguucaucaaagaauggaauccaagauuggaaggugguacucucgaacgaugucuaaaacugaaaggaugggaaugggacuguaugucaaguaugauggagacccaugggcugacagugaugcccuagcuuuuaguggaguaaugguuucaaugaaagaaccugguugguacuccuuuggcuucgaaauaaaagauaagaaaugcgauguccccuguauugggauagagaugguacaugaugguggaaaagagacuuggcacucagcagcaacagccauuuacuguuuaaugggcucaggacagcugcugugggacacugucacagguguugacauggcucuguaa

SEQ ID NO: 60843 - RNA, 1401 nt, Artificial Sequence
  derived and/or modified CDS sequence (wt) from neuraminidase__InfluenzaB__AEG21005
augcuaccuucaacuauacaaacguuaacccuauuucucacaucagggggaguauuauuaucacuauaugugucagcuucauuaucauacuuacuauauucggauauauugcuaaaauucucaccaacagaaauaacugcaccaacaaugccauuggauugugcaaacgcaucaaauguucaggcugugaaccguucugcaacaaaaggggugacacuucuucucccagaaccggaguggacguacccucguuuaucuugcccgggcucaaccuuucagaaagcacuccuaauuagcccccauagauucggagaaaccaaaggaaacucagcucccuugauaauaagggaaccuuuuauugcuuguggaccaaaugaaugcaaacacuuugcucuaacccauuaugcagcccaaccagggggauacuacaauggaacaagaggagacagaaacaagcugaggcaucuaauuucagucaaauugggcaaaaucccaacaguagaaaacuccauuuuccacauggcagcauggagcggguccgcgugccaugaugguaaggaauggacauauaucggaguugauggcccugacaauaaugcauugcucaaaguaaaauauggagaagcauauacugacacauaccauuccuaugcaaacaaaauccuaagaacacaagaaagugccugcaauugcaucgggggaaauuguuaucuuaugauaacugauggcucagcuucagguguuagugaaugcagauuucuuaagauucgagagggccgaauaauaaaagaaauauuuccaacaggaagaguaaaacauacugaggaaugcacaugcggauuugccagcaauaaaaccauagaaugugccuguagagauaacaguuacacagcaaaaagaccuuuugucaaauugaacguggagacugauacagcagaaauaagauugaugugcacagauacuuauuuggacacccccagaccagaugauggaagcauaacaggcccuugugaaucuaauggggacaaaggggguggaggcaucaagggaggauuuguucaucaaagaauggaauccaagauuggaaggugguacucucgaacgaugucuaaaacugaaaggaugggaaugggacuguaugucaaguaugauggagacccaugggcugacagugaugcccuagcuuuuaguggaguaaugguuucaaugaaagaaccugguugguacuccuuuggcuucgaaauaaaagauaagaaaugcgauguccccuguauugggauagagaugguacaugaugguggaaaagagacuuggcacucagcagcaacagccauuuacuguuuaaugggcucaggacagcugcugugggacacugucacagguguuaauaugacucuguaa

SEQ ID NO: 60844 - RNA, 1401 nt, Artificial Sequence; identical to SEQ ID NO: 60830
  derived and/or modified CDS sequence (wt) from neuraminidase__InfluenzaB__AEG21006

SEQ ID NO: 60845 - RNA, 1401 nt, Artificial Sequence
  derived and/or modified CDS sequence (wt) from neuraminidase__InfluenzaB__AEG21007
augcuaccuucaacuauacaaacguuaacccuauuucucacaucagggggaguauuauuaucacuauaugugucagcuucauuaucauacuuacuauauucggauauauugcuaaaauucucaccaacagaaauaacugcaccaacaaugccauuggauugugcaaacgcaucaaauguucaggcugugaaccguucugcaacaaaaggggugacacuucuucucccagaaccggaguggacauacccgcguuuaucuugcccgggcucaaccuuucagaaagcacuccuaauuagcccucauagauucggagaaaccaaaggaaacucagcucccuugauaauaagggaaccuuuuauugcuuguggaccaaaugaaugcaaacacuuugcucuaacccauuaugcagcccaaccagggggauacuacaauggaacaagaggagacagaaacaagcugaggcaucuaauuucagucaaauugggcaaaaucccaacaguagaaaacuccauuuuccacauggcagcauggagcggguccgcgugccaugaugguaaggaauggacauauaucggaguugauggcccugacaauaaugcauugcucaaaguaaaauauggagaagcauauacugacacauaccauuccuaugcaaacaaaauccuaagaacacaagaaagugccugcaauugcaucgggggaaauuguuaucuuaugauaacugauggcucagcuucagguguuagugaaugcagauuucuuaagauucgagagggccgaauaauaaaagaaauauuuccaacaggaagaguaaaacacacugaggaaugcacaugcggauuugccagcaauaaaaccauagaaugugccuguagagauaacaguuacacagcaaaaagaccuuuugucaaauuaaacguggagacugauacagcagaaauaagauugaugugcacagauacuuauuuggacacccccagaccagaugauggaagcauaacagggccuugcgaaucuaauggggacaaagggaguggaggcaucaagggaggauuuguucaucaaagaauggaauccaagauuggaaggugguacucucgaacgaugucuaaaacugaaaggauggggaugggacuguaugucaaguaugauggagacccaugggcugacagugaugcccuagcuuuuaguggaguaaugguuucaaugaaagaaccugguugguacuccuuuggcuucgaaauaaaagauaagaaaugcgauguccccuguauugggauagagaugguacaugaugguggaaaagagacuuggcacucagcagcaacagccauuuacuguuuaaugggcucaggacagcugcugugggacacugucacagguguugacauggcucuguaa

SEQ ID NO: 60846 - RNA, 1401 nt, Artificial Sequence
  derived and/or modified CDS sequence (wt) from neuraminidase__InfluenzaB__AEG21008
augcuaccuucaacuauacaaacguuaacccuauuucucacaucagggggaguauuauuaucacuauaugugucagcuucauuaucauacuuacuauauucggauauauugcuaaaauucucaccaacagaaauaacugcaccaacaaugccauuggauugugcaaacgcaucaaauguucaggcugugaaccguucugcaacaaaaggggugacacuucuucucccagaaccggaguggacauacccgcguuuaucuugcccgggcucaaccuuucagaaagcacuccuaauuagcccucauagauucggagaaaccaaaggaaacucagcucccuugauaauaagggaaccuuuuauugcuuguggaccaaaugaaugcaaacacuuugcucuaacccauuaugcagcccaaccagggggauacuacaauggaacaagaggagacagaaacaagcugaggcaucuaauuucagucaaauugggcaaaaucccaacaguagaaaacuccauuuuccacauggcagcauggagcggguccgcgugccaugaugguaaggaauggacauauaucggaguugauggcccugacaauaaugcauugcucaaaguaaaauauggagaagcauauacugacacauaccauuccuaugcaaacaaaauccuaagaacacaagaaagugccugcaauugcaucgggggaaauuguuaucuuaugauaacugauggcucagcuucagguguuagugaaugcagauuucuuaagauucgagagggccgaauaauaaaagaaauauuuccaacaggaagaguaaaacacacugaggaaugcacaugcggauuugccagcaauaaaaccauagaaugugccuguagagauaacaguuacacagcaaaaagaccuuuugucaaauugaacguggagacugauacagcagaaauaagauugaugugcacagauacuuauuuggacacccccagaccagaugauggaagcauaacaggcccuugugaaucuaauggggacaaagggaguggaggcaucaagggaggauuuguucaccaaagaauggcauccaagauuggaaggugguacucucgaacgaugucuaaaacuaaaagaauggggaugggacuguaugucaaguaugauggagacccaugggcugacagugaugcccuagcuuuuaguggaguaaugguuucaaugaaagaaccugguugguacuccuuuggcuucgaaauaaaagauaagaaaugcgauguccccuguauugggauagagaugguacaugaugguggaaaagagacuuggcacucagcagcaacagccauuuacuguuuaaugggcucaggacagcugcugugggacacugucacagguguugacauggcucuguaa

SEQ ID NO: 60847 - RNA, 1401 nt, Artificial Sequence; identical to SEQ ID NO: 60833
  derived and/or modified CDS sequence (wt) from neuraminidase__InfluenzaB__AEG21009

SEQ ID NO: 60848 - RNA, 1401 nt, Artificial Sequence; identical to SEQ ID NO: 60834
  derived and/or modified CDS sequence (wt) from neuraminidase__InfluenzaB__AEG21010

SEQ ID NO: 60849 - RNA, 1401 nt, Artificial Sequence; identical to SEQ ID NO: 60834
  derived and/or modified CDS sequence (wt) from neuraminidase__InfluenzaB__AEG21011

SEQ ID NO: 60850 - RNA, 1401 nt, Artificial Sequence; identical to SEQ ID NO: 60834
  derived and/or modified CDS sequence (wt) from neuraminidase__InfluenzaB__AEG21012

SEQ ID NO: 60851 - RNA, 1401 nt, Artificial Sequence
  derived and/or modified CDS sequence (wt) from neuraminidase__InfluenzaB__AEG21013
augcuaccuucaacuauacaaacguuaacccuauuccucacaucagggggaguguuauuaucacuauaugugucagcuucauuaucauacuuacuauauucggauauauugcuaaaauucucaccaacagaaauaacugcaccaacaaugccauuggauugugcaaacgcaucaaauguucaggcugugaaccguucugcaacaaaaggggugacacuucuucucccagaaccggaguggacauacccgcguuuaucuugcccgggcucaaccuuucagaaagcacuccuaauuagcccucauagauucggagaaaccaaaggaaacucagcucccuugauaauaagggaaccuuuuauugcuuguggaccaaaugaaugcaaacacuuugcucuaacccauuaugcagcccaaccagggggauacuacaauggaacaagaggagacagaaacaagcugaggcaucuaauuucagucaaauugggcaaaaucccaacaguagaaaacuccauuuuccacauggcagcauggagcggguccgcgugccaugaugguaaggaauggacguauaucggaguugauggcccugacaauaaugcauugcucaaaguaaaauauggagaagcauauacugacacauaccauuccuaugcaaacaaaauccuaagaacacaagaaagugccugcaauugcaucgggggaaauuguuaucuuaugauaacugauggcucagcuucagguguuagugaaugcagauuucuuaagauucgagagggccgaauaauaaaagaaauauuuccaacaggaagaguaaaacacacugaggaaugcacaugcggauuugccagcaauaaaaccauagaaugugccuguagagauaacaguuacacagcaaaaagaccuuuugucaaauuaaacguggagacugauacagcagaaauaagauugaugugcacagauacuuauuuggacacccccagaccaaaugauggaagcauaacaggcccuugugaaucugauggggacaaagggaguggaggcaucaagggaggauuuguucaucaaagaaugaaauccaagauuggaaggugguacucucgaacgaugucuaaaacugaaaggauggggaugggacuguaugucaaguaugauggagacccaugggcugacagugaugcccuagcuuuuaguggaguaaugguuucaaugaaagaaccugguugguacuccuuuggcuucgaaauaaaagauaagaaaugcgauguccccuguauugggauagagaugguacaugaugguggaaaagagacuuggcacucagcagcaacagccauuuacuguuuaaugggcucaggacagcugcugugggacacugucacagguguugacauggcucuguaa

SEQ ID NO: 60852 - RNA, 1401 nt, Artificial Sequence
  derived and/or modified CDS sequence (wt) from neuraminidase__InfluenzaB__AEN68957
augcuaccuucaacuauacaaacguuaaccuuauuucucacaucagggggaguguuauuaucacuauaugugucagcuucauugucauacuuacuauauucggauauauugcuaaaauuuucacgaacagaaauaccugcaccaauaaugccauuggauugugcaaacgcaucaaauguucaggcugugaaccguucugcaacaaaaggggugacacuucuucucccagaaccggaguggacguacccucguuuaucuugcccgggcucaaccuuucagaaagcacuccuaauuagcccucauagauucggagaaaccaaaggaaacucagcucccuugauaauaagggaaccuuuuauugcuuguggaccaaaggaaugcaaacauuuugcucuaacccauuaugcagcucaaccagggggauacuacaauggaacaagagaagacagaaacaagaugaggcaucuaauuucagucaaauugggcaaaaucccaacaguagaaaacucuauuuuccacauggcagcuuggagcggguccgcaugccaugaugguagagaauggacuuauaucggaguugauggccccgacaguaaugcauugcucaaaauaaaauauggagaagcauauacugacacauaccauuccuaugcaaagaacauccuaaggacacaagaaagugccugcaauugcaucgggggagauuguuaucuuaugauaacugauggcccagcuucagggauuagugagugcagauuccuuaagauucgagagggccgaauaauaaaagaaauauuuccaacaggaagaguaaaauauacugaggaaugcacaugcggauuugccagcaacaaaaccauaggaugugccuguagagauaacaguuacacagcaaaaagacccuuugucaaauuaaauguggagacugauacagcagaaauaagauugaugugcacagagacuuauuuggacacacccagaccaaaugauggaagcauaacagggccuugcgaaucuaauggggacaaagggaguggaggcaucaagggaggauuuguucaccaaagaauggcauccaagauuggaaggugguacucucgaacgaugucuaaaacuaaaagaauggggaugggacuguauguaaaguaugauggagacccauggacugacagugaagcccuugcucuuaguggaguaaugguuucaauggaagaaccugguugguauuccuuuggcuucgaaauaaaagauaagaaaugugauguccccuguauugggauagaaaugguacaugauggugggaaaacgacuuggcacucagcagcaacagccauuuacugcuuaaugggcucaggacaacugaugugggacacugucacagguguuaauaugacucuguaa

SEQ ID NO: 60853 - RNA, 1401 nt, Artificial Sequence
  derived and/or modified CDS sequence (wt) from neuraminidase__InfluenzaB__AEO80071
augcuaccuucaacuauacaaacguuaacccuauuucucacaucagggggaguauuauuaucacuauaugugucagcuucauuaucauacuuacuauauucggauauauugcuaaaauucucaccaacagaaauaacugcaccaacaaugccauuggauugugcaaacgcaucaaauguucaugcugugaaccguucugcaacaaaaggggugacacuucuucucccagaaccggaguggacauauccgcguuuaucuugcccgggcucaaccuuucagaaagcacuccuaauuagcccucauagauucggagaaaccaaaggaaacucagcucccuugauaauaagggaaccuuuuauugcuuguggaccaaaugaaugcaaacacuuugcucuaacccauuaugcagcccaaccagggggauacuacaauggaacaagaggagacagaaacaagcugaggcaucuaauuucagucaaauugggcaaaaucccaacaguagaaaacuccauuuuccacauggcagcauggagcggguccgcaugccaugaugguaaggaauggacauauaucggaguugauggcccugacaauaaugcauugcucaaaauaaaauauggagaagcauauacugacacauaccauuccuaugcaaacaacauccuaagaacacaagaaagugccugcaauugcaucgggggaaauuguuaucuuaugauaacugauggcucagcuucagguguuagugaaugcagauuucuuaagauucgagagggccgaauaauaaaagaaauauuuccaacaggaagaguaaaacauacugaggaaugcacaugcggauuugccagcaauaaaaccauagaaugugccuguagagauaacaguuacacagcaaaaagacccuuugucaaauuaaacguggaaacugauacagcagaaauaagauugaugugcacagauacuuauuuggacacccccagaccagaugauggaagcauaacaggcccuugugaaucuaauggggacaaagggaguggaggcaucaagggaggauuuguucaucaaagaauggcauccaagauuggaaggugguacucucgaacgaugucuaaaacugaaaggauggggaugggacuguaugucaaguaugauggagacccaugggcugacagugaugcccuugcuuuuaguggaguaaugguuucaaugaaagaaccugguugguacuccuuuggcuucgaaauaaaagauaagaaaugcgauguccccuguauugggauagagaugguacaugaugguggaaaagagacuuggcacucagcagcaacagccauuuacuguuuaaugggcucaggacagcugcugugggacacugucacagguguugacauggcucuguaa

SEQ ID NO: 60854 - RNA, 1401 nt, Artificial Sequence
  derived and/or modified CDS sequence (wt) from neuraminidase__InfluenzaB__AEO80082
augcuaccuucaacuauacaaacguuaacccuauuucucacaucagggggaguguuauuaucacuauaugugucagcuucauugucauacuuacuauauucggauauauugcuaaaauuuucacaaacaggaauaacugcaccaauaaugccauuggauugugcaaacgcaucaaauguucaggcugugaaccguucugcaacaaaaggggugacacuucuucucccagaaccggaguggacauacccucguuuaucuugcccgggcucaaccuuucagaaagcacuccuaauuagcccccauagauucggagaaaccaaaggaaacucagcucccuugauaauaagggaaccuuuuauugcuuguggaccaacggaaugcaaauacuuugcucuaacccauuaugcagcucaaccagggggauacuacaauggaacaagagaagacagaaacaagcugaggcaucuaauuucagucaaauugggcaaaaucccaacaguagaaaacuccauuuuccacauggcagcuuggagcggguccgcaugccaugaugguaaagaauggacauauaucggaguugauggccccgacaguaaugcauugcucaaaauaaaauauggagaagcauauacugacacauaccauuccuaugcaaaaaacauccuaaggacacaagaaagugccugcaauugcaucgggggagauuguuaucuuaugauaacugauggcccagcuucagggauuagugaaugcagauuccuuaagauucgagagggccgaauaauaaaagaaauauuuccaacaggaagaguaaaacauacugaggaaugcacaugcggauuugccagcaacaaaaccauagaaugugcuuguagagauaacaguuacacagcaaaaagacccuuugucaaauuaaauguggagacugauacagcggaaauaagauugaugugcacagagacuuauuuggacacccccagaccaaaugauggaagcauaacagggccuugcgaaucugauggggacaaagggaguggaggcaucaagggaggauuuguucaucaaagaauggcauccaagauuggaaggugguacucucgaacgaugucuaaaacuaaaagaauggggaugggacuguauguaaaguaugauggagacccauggacugacagugaagcccuugcucuuaguggaguaaugguuucaauggaagaaccugguugguauuccuuuggcuucgaaauaaaagauaagaaaugugauguccccuguauugggauagaaaugguacaugauggugggaaaacgacuuggcacucagcagcaacagccauuuacuguuuaaugggcucaggacaacugcugugggacacugucacagguguugauauggcucuguaa

SEQ ID NO: 60855 - RNA, 1401 nt, Artificial Sequence
  derived and/or modified CDS sequence (wt) from neuraminidase__InfluenzaB__AEO80090
augcuaccuucaacuauacaaacguuaacccuauuucucacaucagggggaguauuauuaucacuauaugugucagcuucauugucauacuuacuauauucggauauauugcuaaaauucucaccaacagaaauaacugcaccaacaaugccauuggauugugcaaacgcaucaaauguucaggcugugaaccguucugcaacaaaaggggugacacuucuucucccagaaccggaguggacauacccgcguuuaucuugcccgggcucaaccuuucagaaagcacuccuaauuagcccucauagauucggagaaaccaaaggaaacucagcucccuugauaauaagggaaccuuuuauugcuuguggaccaaaggaaugcaaacacuuugcucuaacccauuaugcagcccaaccagggggauacuacaauggaacaagaggagacagaaacaagcugaggcaucuaauuucagucaaauugggcaaaaucccaacaguagaaaacuccauuuuccacauggcagcauggagcggguccgcaugccaugaugguaaggaauggacauauaucggaguugauggcccugacaauaaugcauugcucaaaauaaaauauggagaagcauauacugacacauaccauuccuaugcaaacaacauccuaagaacacaagaaagugccugcaauugcaucgggggaaauuguuaucuuaugauaacugauggcucagcuucagguguuagugaaugcagauuucuuaagauucgagagggccgaauaauaaaagaaauauuuccaacaggaagaguaaaacauacugaagaaugcacaugcggauuugccagcaauaaaaccauagaaugugccuguagagauaacaguuacacagcaaaaagacccuuugucaaauuaaacguugagacugauacagcagaaauaagauugaugugcacagagacuuauuuggacacccccagaccagaugauggaagcauaacagggccuugugaaucuaauggggacaaagggaguggaggcaucaagggaggauuuguucaucaaagaauggcauccaagauuggaaggugguacucucgaacgaugucuaaaacuaaaaggauggggaugggacuguaugucaaguaugauggagacccaugggcugacagugaugcccuugcucuuaguggaguaaugguuucaauggaagaaccugguugguacuccuuuggcuucgaaauaaaagauaagaaaugugauguccccuguauugggauagagaugguacaugaugguggaaaagagacuuggcacucagcagcaacagccauuuacuguuuaaugggcucaggacagcugcugugggacacugucacagguguugauauggcucuguaa

SEQ ID NO: 60856 - RNA, 1401 nt, Artificial Sequence; identical to SEQ ID NO: 60639
  derived and/or modified CDS sequence (wt) from neuraminidase__InfluenzaB__AEO80101

SEQ ID NO: 60857 - RNA, 1401 nt, Artificial Sequence; identical to SEQ ID NO: 60735
  derived and/or modified CDS sequence (wt) from neuraminidase__InfluenzaB__AEO80149

SEQ ID NO: 60858 - RNA, 1401 nt, Artificial Sequence
  derived and/or modified CDS sequence (wt) from neuraminidase__InfluenzaB__AEO80158
augcuaccuucaacuauacaaacguuaacccuauuucucacaucagggggaguauuauuaucacuauaugugucagcuucauuaucauacuuacuauauucggauauauugcuaaaauucucaccaacagaaauaacugcaccaacaaugccauuggauugugcaaacgcaucaaauguucaggcugugaaccguucugcaacaaaaggggugacacuucuucucccagaaccggaguggacauacccgcguuuaucuugcccgggcucaaccuuucagaaagcacuccuaauuagcccucauagauucggagaaaccaaaggaaacucagcucccuugauaauaagggaaccuuuuauugcuuguggaccaaaugaaugcaaacacuuugcucuaacccauuaugcagcccaaccagggggauacuacaauggaacaagaggagacagaaacaagcugaggcaucuaauuucagucaaauugggcaaaaucccaacaguagaaaacuccauuuuccacauggcagcauggagcggguccgcaugccaugaugguaaggaauggacauauaucggaguugauggcccugacaauaaugcauugcucaaaauaaaauauggagaagcauauacugacacauaccauuccuaugcaaacaaaauccuaagaacacaagaaagugccugcaauugcaucgggggaaauuguuaucuuaugauaacugauggcucagcuucagguguuagugaaugcagauuucuuaagauucgagagggccgaauaauaaaagaaauauuuccaacaggaagaguaaaacacacugaggaaugcacaugcggauuugccagcaauaaaaccauagaaugugccuguagagauaacaguuacacagcaaaaagacccuuugucaaauuaaacguggagacugauacagcagaaauaagauugaugugcacagauacuuauuuggacacccccagacccgaugauggaagcauaacaggcccuugugaaucuaauggggacaaagggaguggaggcaucaagggaggauuuguucaucaaagaauggcauccaagauuggaaggugguacucucgaacgaugucuaaaacugaaaggauggggaugggacuguaugucaaguaugauggagacccaugggcugacagugaugcccuagcuuuuaguggaguaaugguuucaaugaaagaaccugguugguacuccuuuggcuucgaaauaaaagauaagaaaugcgauguccccuguauugggauagagaugguacaugaugguggaaaagagacuuggcacucagcagcaacagccauuuacuguuuaaugggcucaggacagcugcugugggacacugucacagguguugacauggcucuguaa

SEQ ID NO: 60859 - RNA, 1401 nt, Artificial Sequence
  derived and/or modified CDS sequence (wt) from neuraminidase__InfluenzaB__AEO80167
augcuaccuucaacuauacaaacguuaacccuauuucucacaucagggggaguauuauuaucacuauaugugucagcuucauuaucauacuuacuauauucggauauauugcuaaaauucucaccaacagaaauaacugcaccaacaaugccauuggauugugcaaacgcaucaaauguucaggcugugaaccguucugcaacaaaaggggugacacuucuucucccagaaccggaguggacauacccgcguuuaucuugcccgggcucaaccuuucagaaagcacuccuaauuagcccucauagauucggagaaaccaaaggaaacucagcucccuugauaauaagggaaccuuuuauugcuuguggaccaaaugaaugcaaacacuuugcucuaacccauuaugcagcccaaccagggggauacuacaauggaacaagaggagacagaaacaagcugaggcaucuaauuucagucaaauugggcaaaaucccaacaguagaaaacuccauuuuccacauggcagcauggagcggguccgcaugccaugaugguaaggaauggacauauaucggaguugauggcccugacaauaaugcauugcucaaaauaaaauauggagaagcauauacugacacauaccauuccuaugcaaacaaaauccuaagaacacaagaaagugccugcaauugcaucgggggaaauuguuaucuuaugauaacugauggcucagcuucagguguuagugaaugcagauuucuuaagauucgagagggccgaauaauaaaagaaauauuuccaacaggaagaguaaaacacacugaggaaugcacaugcggauuugccagcaauaaaaccauagaaugugccuguagagauaacaguuacacagcaaaaagacccuuugucaaauuaaacguggagacugauacagcagaaauaagauugaugugcacagauacuuauuuggacacucccagaccagaugauggaagcauaacaggcccuugugaaucuaauggggacaaagggaguggaggcaucaagggaggauuuguucaucaaagaauggcauccaagauuggaaggugguacucucgaacgaugucuaaaacugaaaggauggggaugggacuguaugucaaguaugauggagacccaugggcugacagugaugcccuagcuuuuaguggaguaaugguuucaaugaaagaaccugguugguacuccuuuggcuucgaaauaaaagauaagaaaugcgauguccccuguauugggauagagaugguacaugaugguggaaaagagacuuggcacucagcagcaacagccauuuacuguuuaaugggcucaggacagcugcugugggacacugucacagguguugacauggcucuguaa

SEQ ID NO: 60860 - RNA, 1401 nt, Artificial Sequence; identical to SEQ ID NO: 60735
  derived and/or modified CDS sequence (wt) from neuraminidase__InfluenzaB__AEO80176

SEQ ID NO: 60861 - RNA, 1401 nt, Artificial Sequence
  derived and/or modified CDS sequence (wt) from neuraminidase__InfluenzaB__AEO80187
augcuaccuucaacuauacaaacguuaacccuauuucucacaucagggggaguauuauuaucacuauaugugucagcuucauuaucauacuuacuauauucggauauauugcuaaaauucucaccaacagaaauaacugcaccaacaaugccauuggguugugcaaacgcaucaaauguucaggcugugaaccguucugcaacaaaaggggugacacuucuucucccagaaccggaguggacauacccgcguuuaucuugcccgggcucaaccuuucagaaagcacuccuaauuagcccucauagauucggagaaaccaaaggaaacucagcucccuugauaauaagggaaccuuuuauugcuuguggaccaaaugaaugcaaacacuuugcucuaacccauuaugcagcccaaccagggggauacuacaauggaacaagaggagacagaaacaagcugaggcaucuaauuucagucaaauugggcaaaaucccaacaguagaaaacuccauuuuccacauggcagcauggagcggguccgcaugccaugaugguaaggaauggacauauaucggaguugauggcccugacaauaaugcauugcucaaaauaaaauauggagaagcauauacugacacauaccauuccuaugcaaacaaaauccuaagaacacaagaaagugccugcaauugcaucgggggaaauuguuaucuuaugauaacugauggcucagcuucagguguuagugaaugcagauuucuuaagauucgagagggccgaauaauaaaagaaauauuuccaacaggaagaguaaaacacacugaggaaugcacaugcggauuugccagcaauaaaaccauagaaugugccuguagagauaacaguuacacagcaaaaagacccuuugucaaauugaacguggagacugauacagcagaaauaagauugaugugcacagauacuuauuuggacacccccagaccagaugauggaagcauaacaggcccuugugaaucuaauggggacagagggaguggaggcaucaagggaggauuuguucaucaaagaauggcauccaagauuggaaggugguacucucgaacgaugucuaaaacugaaaggauggggaugggacuguaugucaaguaugauggagacccaugggcugacagugaugcccuagcuuuuaguggaguaaugguuucaaugaaagaaccugguugguacuccuuuggcuucgaaauaaaagauaagaaaugcgauguccccuguauugggauagagaugguacaugaugguggaaaagagacuuggcacucagcagcaacagccauuuacuguuuaaugggcucaggacagcugcugugggacacugucacagguguugacauggcucuguaa

SEQ ID NO: 60862 - RNA, 1401 nt, Artificial Sequence
  derived and/or modified CDS sequence (wt) from neuraminidase__InfluenzaB__AEO80198
augcuaccuucaacuauacaaacguuaacccuauuucucacaucagggggaguauuauuaucacuauaugugucagcuucauuaucauacuuacuauauucggauauauugcuaaaauucucaccaacagaaauaacugcaccaacaaugccauuggauugugcaaacgcaucaaauguucaggcugugaaccguucugcaacaaaaggggugacacuucuucucccagaaccggaguggacauacccgcguuuaucuugcccgggcucaaccuuucagaaagcacuccuaauuagcccucauagauucggagaaaccaaaggaaacucagcucccuugauaauaagggaaccuuuuauugcuuguggaccaaaugaaugcaaacacuuugcucuaacccauuaugcagcccaaccagggggauacuacaauggaacaagaggagacagaaacaagcugaggcaucuaauuucagucaaauugggcaaaaucccaacaguagaaaacuccauuuuccacauggcagcauggagcggguccgcaugccaugaugguaaggaauggacauauaucggaguugauggcccugacaauaaugcauugcucaaaauaaaauauggagaagcauauacugacacauaccauuccuaugcaaacaaaauccuaagaacacaagaaagugccugcaauugcaucgggggaaauuguuaucuuaugauaacugauggcucagcuucagguguuagugaaugcagauuucuuaagauucgagagggccgaauaauaaaagaaauauuuccaacaggaagaguaaaacacacugaggaaugcacaugcggauuugccagcaauaaaaccauagaaugugccuguagagauaacaguuacacagcaaaaagacccuuugucaaauugaacguggagacugauacagcagaaauaagauugaugugcacagauacuuauuuggacacccccagaccagaugauggaagcauaacaggcccuugugaaucuaauggggacagagggaguggaggcaucaagggaggauuuguucaucaaagaauggcauccaagauuggaaggugguacucucgaacgaugucuaaaacugaaaggauggguaugggacuguaugucaaguaugauggagacccaugggcugacagugaugcccuagcuuuuaggggaguaaugguuucaaugaaagaaccugguugguacuccuuuggcuucgaaauaaaagauaagaaaugcgauguccccuguauugggauagagaugguacaugaugguggaaaagagacuuggcacucagcagcaacagccauuuacuguuuaaugggcucaggacagcugcugugggacacugucacagguguugacauggcucuguaa

SEQ ID NO: 60863 - RNA, 1401 nt, Artificial Sequence; identical to SEQ ID NO: 60810
  derived and/or modified CDS sequence (wt) from neuraminidase__InfluenzaB__AEO80209

SEQ ID NO: 60864 - RNA, 1401 nt, Artificial Sequence
  derived and/or modified CDS sequence (wt) from neuraminidase__InfluenzaB__AEO80220
augcuaccuucaacuauacaaacguuaacccuauuucucacaucagggggaguauuauuaucacuauaugugucagcuucauuaucauacuuacuauauucggauauauugcuaaaauucucaccaacagaaauaacugcaccaacaaugccauuggauugugcaaacgcaucaaauguucaggcugugaaccguucugcaacaaaaggguugacacuucuucucccagaaccggaguggacauacccgcguuuaucuugcccgggcucaaccuuucagaaagcacuccuaauuagcccucauagauucggagaaaccaaaggaaacucagcucccuugauaauaagggaaccuuuuauugcuuguggaccaaaugaaugcaaacacuuugcucuaacccauuaugcagcccaaccagggggauacuacaauggaacaagaggagacagaaacaagcugaggcaucuaauuucagucaaauugggcaaaaucccaacaguagaaaccuccauuuuccacauggcagcauggagcggguccgcaugccaugaugguaaggaauggacauauaucggaguugauggcccugacaauaaugcauugcucaaaauaaaauauggagaagcauauacugacacauaccauuccuaugcaaacaaaauccuaagaacacaagaaagugccugcaauugcaucgggggaaauuguuaucuuaugauaacugauggcucagcuucagguguuagugaaugcagauuucuuaagauucgagagggccgaauaauaaaagaaauauuuccaacaggaagaguaaaacacacugaggaaugcacaugcggauuugccagcaauaaaaccauagaaugugccuguagagauaacaguuacacagcaaaaagacccuuugucaaauugaacguggagacugauacagcagaaauaagauugaugugcacagauacuuauuuggacacccccagaccagaugauggaagcauaacaggcccuugugaaucuaauggggacagagggaguggaggcaucaagggaggauuuguucaucaaagaauggcauccaagauuggaaggugguacucucgaacgaugucuaaaacugaaaggauggggauggggcuguaugucaaguaugauggagacccaugggcugacagugaugcccuagcuuuuaguggaguaaugguuucaaugaaagaaccugguugguacuccuuuggcuucgaaauaaaagauaagaaaugcgauguccccuguauugggauagagaugguacaugaugguggaaaagagacuuggcacucagcagcaacagccauuuacuguuuaaugggcucaggacagcugcugugggacacugucacagguguugacauggcucuguaa

SEQ ID NO: 60865 - RNA, 1401 nt, Artificial Sequence
  derived and/or modified CDS sequence (wt) from neuraminidase__InfluenzaB__AEO80231
augcuaccuucaacuauacaaacguuaacccuauuucucacaucagggggaguguuauuaucacuauaugugucagcuucauugucauacuuacuauauucggauauauugcuaaaauuuucacaaacagaaauaacugcaccaauaaugccauuggauugugcaaacgcaucaaauguucaggcugugaaccguucugcagcaaaaggggugacacuucuucucccagaaccggaguggacauacccucguuuaucuugcccgggcucaaccuuucagaaagcacuccuaauuagcccccauagauucggagaaaccaaaggaaacucagcucccuugauaauaagggaaccuuuuauugcuuguggaccaacggaaugcaaacacuuugcucuaacccauuaugcagcucaaccagggggauacuacaauggaacaagagaagacagaaacaagcugaggcaucuaauuucagucaaauugggcaaaaucccaacaguagaaaacuccauuuuccacauggcagcuuggagcggguccgcaugccaugaugguaaagaauggacauauaucggaguugauggccccgacaguaaugcauugcucaaaauaaaauauggagaagcauauacugacacauaccauuccuaugcaaaaaacauccuaaggacacaagaaagugccugcaauugcaucgggggagauuguuaucuuaugauaacugauggcccagcuucagggauuagugaaugcagauuccuuaagauucgagagggccgaauaauaaaagaaauauuuccaacaggaagaguaaaacauacugaggaaugcacaugcggauuugccagcaacaaaaccauagaaugugcuuguagagauaacaguuacacagcaaaaagacccuuugucaaauuaaauguggagacugauacagcggaaauaagauugaugugcacagagacuuauuuggacacccccagaccaaaugauggaagcauaacagggccuugcgaaucugauggggacaaagggaguggaggcaucaagggaggauuuguucaucaaagaauggcauccaagauuggaaggugguacucucgaacgaugucuaaaacuaaaagaauggggaugggacuguauguaaaguaugauggagacccauggacugacagugaagcccuugcucuuaguggaguaaugguuucaauggaagaaccugguugguauuccuuuggcuucgaaauaaaagauaagaaaugugauguccccuguauugggauagaaaugguacaugauggugggaaaacgacuuggcacucagcagcaacagccauuuacuguuuaaugggcucaggacaacugcugugggacacugucacagguguugauauggcucuguaa

SEQ ID NO: 60866 - RNA, 1401 nt, Artificial Sequence; identical to SEQ ID NO: 60810
  derived and/or modified CDS sequence (wt) from neuraminidase__InfluenzaB__AEO80242

SEQ ID NO: 60867 - RNA, 1401 nt, Artificial Sequence; identical to SEQ ID NO: 60748
  derived and/or modified CDS sequence (wt) from neuraminidase__InfluenzaB__AEP20182

SEQ ID NO: 60868 - RNA, 1401 nt, Artificial Sequence
  derived and/or modified CDS sequence (wt) from neuraminidase__InfluenzaB__AEP20193
augcuaccuucaacuauacaaacguuaacccuauuucucacaucagggggaguauuauuaucacuauaugugucagcuucauuaucauacuuacuauauucggauauauugcuaaaauucucaccaacagaaauaacugcaccaacaaugccauuggauugugcaaacgcaucaaauguucaugcugugaaccguucugcaacaaaaggggugacacuucuucucccagaaccggaguggacauauccgcguuuaucuugcccgggcucaaccuuucagaaagcacuccuaauuagcccucauagauucggagaaaccaaaggaaacucagcucccuugauaauaagggaaccuuuuauugcuuguggaccaaaugaaugcaaacacuuugcucuaacccauuaugcagcccaaccagggggauacuacaauggaacaagaggagacagaaacaagcugaggcaucuaauuucagucaaauugggcaaaaucccaacaguagaaaacuccauuuuccacauggcagcauggagcggguccgcaugccaugaugguaaggaauggacauauaucggaguugauggcccugacaauaaugcauugcucaaaauaaaauauggagaagcauauacugacacauaccauuccuaugcaaacaacauccuaagaacacaagaaagugccugcaauugcaucgggggaaauuguuaucuuaugauaacugauggcucagcuucagguguuagugaaugcagauuucuuaagauucgagagggccgaauaauaaaagaaauauuuccaacaggaagaguaaaacauacugaggaaugcacaugcggauuugccagcaauaaaaccauagaaugugccuguagagauaacaguuacacagcaaaaagacccuuugucaaauuaaacguggaaacugauacagcagaaauaagauugaugugcacagauacuuauuuggacacucccagaccagaugauggaagcauaacaggcccuugugaaucuaauggggacaaagggaguggaggcaucaagggaggauuuguucaucaaagaauggcauccaagauuggaaggugguacucucgaacgaugucuaaaacugaaaggauggggaugggacuguaugucaaguaugauggagacccaugggcugacagugaugcccuugcuuuuaguggaguaaugguuucagugaaagaaccugguugguacuccuuuggcuucgaaauaaaagauaagaaaugcgauguccccuguauugggauagagaugguacaugaugguggaaaagagacuuggcacucagcagcaacagccauuuacuguuuaaugggcucaggacagcugcugugggacacugucacagguguugacauggcucuguaa

SEQ ID NO: 60869 - RNA, 1401 nt, Artificial Sequence
  derived and/or modified CDS sequence (wt) from neuraminidase__InfluenzaB__AEP20204
augcuaccuucaacuauacaaacguuaacccuauuucucacaucagggggaguauuauuaucacuauaugugucagcuucauuaucauacuuacuauauucggauauauugcuaaaauucucaccaacagaaauaacugcaccaacaaugccauuggauugugcaaacgcaucaaauguucaggcugugaaccguucugcaacaaaaggggugacacuucuucucccagaaccggaguggacauacccgcguuuaucuugcccgggcucaaccuuucagaaagcacuccuaauuagcccucauagauucggagaaaccaaaggaaacucagcucccuugauaauaagggaaccuuuuauugcuuguggaccaaaugaaugcaaacacuuugcucuaacccauuaugcagcccaaccagggggauacuacaauggaacaagaggagacagaaacaagcugaggcaucuaauuucagucaaauugggcaaaaucccaacaguagaaaacuccauuuuccacauggcagcauggagcggguccgcaugccaugaugguaaggaauggacauauaucggaguugauggcccugacaauaaugcauugcucaaaauaaaauauggagaagcauauacugacacauaccauuccuaugcaaacaaaauccuaagaacacaagaaagugccugcaauugcaucgggggaaauuguuaucuuaugauaacugauggcucagcuucagguguuagugaaugcagauuucuuaagauucgagagggccgaauaauaaaagaaauauuuccaacaggaagaguaaaacacacugaggaaugcacaugcggauuugccagcaauaaaaccauagaaugugccuguagagauaacaguuacacagcaaaaagacccuuugucaaauuaaacguggagacugauacagcagaaauaagauugaugugcacagauacuuauuuggacacccccagaccagaugauggaagcauaacaggcccuugugaaucuaauggggacaaagggaguggaggcaucaagggaggguuuguucaucaaagaauggcauccaagauuggaaggugguacucucgaacgaugucuaaaacugaaaggauggggaugggacuguaugucaaguaugauggagacccaugggcugacagugaugcccuagcuuuuaguggaguaaugguuucaauaaaagaaccugguugguacuccuuuggcuucgaaauaaaagauaagaaaugcgauguccccuguauugggauagagaugguacaugaugguggaaaagagacuuggcacucagcagcaacagccauuuacuguuuaaugggcucaggacagcugcugugggacacugucacagguguugacauggcucuguaa

SEQ ID NO: 60870 - RNA, 1401 nt, Artificial Sequence
  derived and/or modified CDS sequence (wt) from neuraminidase__InfluenzaB__AEP20215
augcuaccuucaacuauacaaacguuaacccuauuucucacaucagggggaguguuauuaucacuauaugugucagcuucacugucauacuuacuauauucggauauauugcuaaaauuuucaccaacagaaauaacugcaccaacaaugccauuggauugugcaaacgcaucaaauguucaggcugugaaccguucugcaacaaaaggggugacacuucuucucccagaaccggaguggacauacccgcguuuaucuugcccgggcucaaccuuucagaaagcacuccuaauuagcccucauagauucggagaaaccaaaggaaacucagcucccuugauaauaagggaaccuuuuauugcuuguggaccaaaggaaugcaaacacuuugcucuaacccauuaugcagcccaaccagggggauacuacaauggaacaagaggagacagaaacaagcugaggcaucuaauuucagucaaauugggcaaaaucccaacaguagaaaacuccauuuuccacauggcagcauggagcggguccgcaugccaugaugguaaagaauggacauauaucggaguugauggcccugacaguaaugcauugcucaaaauaaaauauggagaagcauauacugacacauaccauuccuaugcaaacaacauccuaagaacacaagaaagugccugcaauugcaucgggggaaauuguuaucuuaugauaacugauggcucagcuucagguauuagugaaugcagauuucuuaagauucgagagggccgaauaauaaaagaaauauuuccaacaggaagaguaaaacauacugaagaaugcacaugcggauuugccagcaauaaaaccauagaaugugccuguagagauaacaguuacacagcaaaaagacccuuugucaaauuaaauguggagacugauacagcagaaauaagauugaugugcacagagacuuauuuggacacccccagaccagaugauggaagcauaacagggccuugugaaucuaauggggacaaagggaguggaggcaucaagggaggauuuguucaucaaagaauggcauccaagauuggaaggugguacucucgaacgaugucuaaaacuaaaaggauggggaugggacuuuaugucaaguaugauggagacccauggacugacagugaugcccuugcucuuaguggaguaaugguuucaauggaagaaccugguugguacuccuuuggcuucgaaauaaaagauaagaaaugugauguccccuguauugggauagagaugguacaugaugguggaaaggagacuuggcacucagcagcaacagccauuuacuguuuaaugggcucaggacaacugcuaugggacacugucacagguguugauauggcucuguaa

SEQ ID NO: 60871 - RNA, 1401 nt, Artificial Sequence
  derived and/or modified CDS sequence (wt) from neuraminidase__InfluenzaB__AEP20237
augcuaccuucaacuauacaaacguuaacccuauuucucacaucagggggaguguuauuaucacuauaugugucagcuucacugucauacuuacuauauucggauauauugcuaaaauuuucaccaacagaaauaacugcaccaacaaugccauuggauugugcaaacgcaucaaauguucaggcugugaaccguucugcaacaaaaggggugacacuucuucucccagaaccggaguggacauacccgcguuuaucuugcccgggcucaaccuuucagaaagcacuccuaauuagcccucauagauucggagaaaccaaaggaaacucagcucccuugauaauaagggaaccuuuuauugcuuguggaccaaaggaaugcaaacacuuugcucuaacccauuaugcagcccaaccagggggauacuacaauggaacaagaggagacagaaacaagcugaggcaucuaauuucagucaaauugggcaaaaucccaacaguagaaaacuccauuuuccacauggcagcauggagcggguccgcaugccaugaugguaaagaauggacauauaucggaguugauggcccugacaguaaugcauugcucaaaauaaaauauggagaagcauauacugacacauaccauuccuaugcaaacaacauccuaagaacacaagaaagugccugcaauugcaucgggggaaauuguuaucuuaugauaacugauggcucagcuucagguauuagugaaugcagauuucuuaagauucgagagggccgaauaauaaaagaaauauuuccaacaggaagaguaaaacauacugaagaaugcacaugcggauuugccagcaauaaaaccauagaaugugccuguagagauaacaguuacacagcaaaaagacccuuugucaaauuaaauguggagacugaugcagcagaaauaagauugaugugcacagagacuuauuuggacacccccagaccagaugauggaagcauaacagggccuugugaaucuaauggggacaaagggaguggaggcaucaagggaggauuuguucaucaaagaauggcauccaagauuggaaggugguacucucgaacgaugucuaaaacuaaaaggauggggaugggacuguaugucaaguaugauggagacccauggacugacagugaugcccuugcucuuaguggaguaaugguuucaauggaagaaccugguugguacuccuuuggcuucgaaauaaaagauaagaaaugugauguccccuguauugggauagagaugguacaugaugguggaaaggagacuuggcacucagcagcaacagccauuuacuguuuaaugggcucaggacaauugcuaugggacacugucacagguguugauauggcucuguaa

SEQ ID NO: 60872 - RNA, 1401 nt, Artificial Sequence; identical to SEQ ID NO: 60699
  derived and/or modified CDS sequence (wt) from neuraminidase__InfluenzaB__AEP20248

SEQ ID NO: 60873 - RNA, 1401 nt, Artificial Sequence
  derived and/or modified CDS sequence (wt) from neuraminidase__InfluenzaB__AEP20259
augcuaccuucaacuauacaaacguuaacccuauuucucacaucagggggaguauuauuaucacuauaugugucagcuucauugucauacuuacuauauucggauauauugcuaaaauucucaccaacagaaauaacugcaccaacaaugccauuggauugugcaaacgcaucaaauguucaggcugugaaccguucugcaacaaaaggggugacacuucuucucccagaaccggaguggacauacccgcguuuaucuugcccgggcucaaccuuucagaaagcacuccuaauuagcccucauagauucggagaaaccaaaggaaacucagcucccuugauaauaagggaaccuuuuauugcuuguggaccaaaugaaugcaaacacuuugcucuaacccauuaugcagcccaaccagggggauacuacaauggaacaagaggagacagaaacaagcugaggcaucuaauuucagucaaauugggcaaaaucccaacaguagaaaacuccauuuuccacauggcagcauggagcggguccgcaugccaugaugguaaggaauggacauauaucggaguugauggcccugacaauaaugcauugcucaaaauaaaauauggagaagcauauacugacacauaccauuccuaugcaaacaacauccuaagaacacaagaaagugccugcaauugcaucgggggaaauuguuaucuuaugauaacugauggcucagcuucagguguuagugaaugcagauuucuuaagauucgagagggccgaauaauaaaagaaauauuuccaacaggaagaguaaaacauacugaagaaugcacaugcggauuugccagcaauaaaaucauagaaugugccuguagagauaacaguuacacagcaaaaagacccuuugucaaauuaaacguggagacugauacagcagaaauaagauugaugugcacagagacuuauuuggacacccccagaccagaugauggaagcauaacagggccuugugaaucuaauggggacaaagggaguggaggcaucaagggaggauuuguucaucaaagaauggcauccaagauuggaaggugguacucucgaacgaugucuaaaacugaaaggauggggaugggacuguaugucaaguaugauggagacccaugggcugacagugaugcccuugcucuuaguggaguaaugguuucaauggaagaaccugguugguacuccuuuggcuucgaaauaaaagauaagaaaugcgauguccccuguauugggauagagaugguacaugaugguggaaaagagacuuggcacucagcagcaacagccauuuacuguuuaaugggcucaggacagcugcugugggacacugucacagguguugauauggcucuguaa

SEQ ID NO: 60874 - RNA, 1401 nt, Artificial Sequence
  derived and/or modified CDS sequence (wt) from neuraminidase__InfluenzaB__AEP20281
augcuaccuucaacuauacaaacguuaacccuauuucucacaucagggggaguauuauuaucacuauaugugucagcuucauugucauacuuacuauauucggauauauugcuaaaauucucaccaacagaaauaacugcaccaacaaugccauuggauugugcaaacgcaucaaauguucaggcugugaaccguucuacaacaaaaggggugacacuucuucucccagaaccggaguggacauauccgcguuuaucuugcccgggcucaaccuuucagaaagcacuccuaauuagcccucauagauucggagaaaccaaaggaaacucagcucccuugauaauaagggaaccuuuuauugcuuguggaccaaaugaaugcaaacacuuugcucuaacccauuaugcagcccaaccagggggauacuacaauggaacaagaggagacagaaacaagcugaggcaucuaauuucagucaaauugggcaaaaucccaacaguagaaaacuccauuuuccacauggcagcauggagcggguccgcaugccaugaugguaaggaauggacauauaucggaguugauggcccugacaauaaugcauugcucaaaauaaaauauggagaagcauauacugacacauaccauuccuaugcaaacaacauccuaagaacacaagaaagugccugcaauugcaucgggggaaauuguuaucuuaugauaacugauggcucagcuucagguguuagugaaugcagauuucuuaagauucgagagggccgaauaauaaaagaaauauuuccaacaggaagaguaaaacauacugaagaaugcacaugcggauuugccagcaauaaaaccauagaaugugccuguagagauaacaguuacacagcaaaaagacccuuugucaaauuaaacguggagacugauacagcagaaauaagauugaugugcacagagacuuauuuggacacccccagaccagaugauggaagcauaacagggccuugugaaucuaauggggacaaagggaguggaggcaucaagggaggauuuguucaucaaagaauggcauccaagauuggaaggugguacucucgaacgaugucuaaaacugaaaggauggggaugggacuguaugucaaguaugauggagacccaugggcugacagugaugcccuugcucuuaguggaguaaugguuucaauggaagaaccugguugguacuccuuuggcuucgaaauaaaagauaagaaaugcgauguccccuguauugggauagagaugguacaugaugguggaaaagagacuuggcacucagcagcaacagccauuuacuguuuaaugggcucaggacagcugcugugggacacugucacagguguugauauggcucuguaa

SEQ ID NO: 60875 - RNA, 1401 nt, Artificial Sequence
  derived and/or modified CDS sequence (wt) from neuraminidase__InfluenzaB__AEP20292
augcuaccuucaacuauacaaacguuaacccuauuucucacaucagggggaguauuauuaucacuauaugugucagcuucauuaucauacuuacuauauucggauauauugcuaaaauucucaccaacagaaauaacugcaccaacaaugccauuggauugugcaaacgcaucaaauguucaggcugugaaccguucugcaacaaaaggggugacacuucuucucccagaaccggaguggacauacccgcguuuaucuugcccgggcucaaccuuucagaaagcacuccuaauuagcccucauagauucggagaaaccaaaggaaacucagcucccuugauaauaagggaaccuuuuauugcuuguggaccaaaugaaugcaaacacuuugcucuaacccauuaugcagcccaaccagggggauacuacaauggaacaagaggagacagaaacaagcugaggcaucuaauuucagucaaauugggcaaaaucccaacaguagaaaacuccauuuuccacauggcagcauggagcggguccgcaugccaugaugguaaggaauggacauauaucggaguugauggcccugacaauaaugcauugcucaaaauaaaauauggagaagcauauacugacacauaccauuccuaugcaaacaaaauccuaagaacacaagaaagugccugcaauugcaucgggggaaauuguuaucuuaugauaacugauggcucagcuucagguguuagugaaugcagauuucuuaagauucgagagggccgaauaauaaaagaaauauuuccaacaggaagaguaaaacauacugaggaaugcacaugcggauuugccagcaauaaaaccauagaaugugccuguagagauaacaguuacacagcaaaaagacccuuugucaaauuaaacguggagacugauacagcagaaauaagauugaugugcacagauacuuauuuggacacccccagaccagaugauggaagcauaacaggcccuugugaaucuaauggggacaaagggaguggaggcaucaagggaggauuuguucaucaaagaauggcauccaagauuggaaggugguacucucgaacgaugucuaaaacugaaaggauggggaugggacuguaugucaaguaugauggagacccaugggcugacagugaugcccuugcuuuuaguggaguaaugguuucaaugaaagaaccugguugguacuccuuuggcuucgaaauaaaagauaagaaaugcgauguccccuguauugggauagagaugguacaugaugguggaaaagagacuuggcacucagcagcaacagccauuuacuguuuaaugggcucaggacagcugcugugggacacugucacagguguugacauggcucuguaa

SEQ ID NO: 60876 - RNA, 1401 nt, Artificial Sequence
  derived and/or modified CDS sequence (wt) from neuraminidase__InfluenzaB__AEP20303
augcuaccuucaacuauacaaacguuaacccuauuucucacaucagggggaguguuauuaucacuauaugugucagcuucauugucauacuuacuauauucggauauauugcuaaaauuuucacaaacagaaauaacugcaccaauaaugccauuggauugugcaaacgcaucaaauguucaggcugugaaccguucugcaacaaaaggggugacacuucuucucccagaaccggaguggacauacccucguuuaucuugcccgggcucaaccuuucagaaagcacuccuaauuaguccccauagauucggagaaaccaaaggaaacucagcucccuugauaauaagggaaccuuuuauugcuuguggaccaacggaaugcaaacacuuugcucuaacccauuaugcagcucaaccagggggauacuacaaugggacaagagaagacagaaacaagcugaggcaucuaauuucagucaaauugggcaaaaucccaacaguagaaaacuccauuuuccacauggcagcuuggagcggguccgcaugccaugaugguaaagaauggacauauaucggaguugauggccccgacaguaaugcauugcucaaaauaaaauauggagaagcauauacugacacauaccauuccuaugcaaaaaacauccuaaggacacaagaaagugccugcaacugcaucgggggagauuguuaucuuaugauaacugauggcccagcuucagggauuagugaaugcagauuccuuaagauucgagagggccgaauaauaaaagaaauauuuccaacaggaagaguaaaacauacugaggaaugcacaugcggauuugccagcaacaaaaccauagaaugugcuuguagagauaacaguuacacagcaaaaagacccuuugucaaauuaaauguggagacugauacagcggaaauaagauugaugugcacagagacuuauuuggacacccccagaccaaaugauggaagcauaacagggccuugcgaaucugauggggacaaagggaguggaggcaucaagggaggauuuguucaucaaagaauggcauccaagauuggaaggugguacucucgaacgaugucuaaaacuaaaagaauggggaugggacuguauguaaaguaugauggagacccauggacugacagugaagcccuugcucuuaguggaguaaugguuucaauggaagaaccugguugguauuccuuuggcuucgaaauaaaagauaagaaaugugauguccccuguauugggauagaaaugguacaugauggugggaaaacgacuuggcacucagcagcaacagccauuuacuguuuaaugggcucaggacaacugcugugggacacugucacagguguugauauggcucuguaa

SEQ ID NO: 60877 - RNA, 1401 nt, Artificial Sequence
  derived and/or modified CDS sequence (wt) from neuraminidase__InfluenzaB__AEP20314
augcuaccuucaacuauacaaacguuaacccuauuucucacaucagggggaguguuauuaucacuauaugugucagcuucauugucauacuuacuauauucggauauauugcuaaaauuuucacaaacaggaauaacugcaccaauaaugccauuggauugugcaaacgcaucaaauguucaggcugugaaccguucugcaacaaaaggggugacacuucuucucccagaaccggaguggacguacccucguuuaucuugcccgggcucaaccuuucagaaagcacuccuaauuagcccccauagauucggagaaaccaaaggaaacucagcucccuugauaauaagagaaccuuuuauugcuuguggaccaaaggaaugcaaacacuuugcucuaacccauuaugcagcucagccagggggauacuacaauggaacaagagaagacagaaacaagcugaggcaucuaauuucagucaaauugggcaaaaucccaacaguagaaaacucuauuuuccacauggcagcuuggagcggguccgcaugccaugaugguagagaauggacauauaucggaguugauggccccgacaguaaugcauugcucaaaauaaaauauggagaagcauauacugacacauaccauuccuaugcaaaaaacauccuaaggacacaagaaagugccugcaauugcaucgggggagauuguuaucuuaugauaacugauggcccagcuucagggauuagugaaugcagauuccuuaagauucgagagggccgaauaauaaaagaaauauuuccaacaggaagaguaaaacauacugaggaaugcacaugcggauuugccagcaacaaaaccauagaaugugccuguagagauaacaguuacacagcaaaaagacccuuugucaaauuaaauguggagacugauacagcggaaauaagauugaugugcacagagacuuauuuggacacccccagaccaaaugauggaagcauaacagggccuugcgaaucuaauggggacaaagggaguggaggcaucaagggaggauuuguucaucaaagaauggcauccaagauuggaaggugguacucucgaacgaugucuaaaacuaaaagaauggggaugggacuguauguaaaguaugauggagacccauggacugacagugaagcccuugcucuuaguggaguaaugauuucaauggaagaaccugguugguauuccuuuggcuucgaaauaaaagauaagaaaugugauguccccuguauugggauagaaaugguacaugauggugggaaaacgacuuggcacucagcagcaacagccauuuacuguuuaaugggcucagggcaacugcugugggacacugucacagguguugauauggcucuguaa

SEQ ID NO: 60878 - RNA, 1401 nt, Artificial Sequence
  derived and/or modified CDS sequence (wt) from neuraminidase__InfluenzaB__AEP20336
augcuaccuucaacuauacaaacguuaacccuauuucucacaucagggggaguauuauuaucacuauaugugucagcuucauugucauacuuacuauauucggauauauugcuaaaauucucaccaacagaaauaacugcaccaacaaugccauuggauugugcaaacgcaucaaauguucaggcugugaaccguucugcaacaaaaggggugacacuucuucucccagaaccggaguggacauacccgcguuuaucuugcccgggcucaaccuuucagaaagcacuccuaauuagcccucauagauucggagaaaccaaaggaaacucagcucccuugauaauaagggaaccuuuuauugcuuguggaccaaaugaaugcaaacacuuugcucuaacccauuaugcagcccaaccagggggauacuacaauggaacaagaggagacagaaacaagcugaggcaucuaauuucagucaaauugggcaaaaucccaacaguagaaaacuccauuuuccacauggcagcauggagcggguccgcaugccaugaugguaaggaauggacauauaucggaguugauggcccugacaauaaugcauugcucaaaauaaaauauggagaagcauauacugacacauaccauuccuaugcaaacaacauccuaagaacacaagaaagugccugcaauugcaucgggggaaauuguuaucuuaugauaacugauggcucagcuucagguguuagugaaugcagauuucuuaagauucgagagggccgaauaauaaaagaaauauuuccaacaggaagaguaaaacauacugaggaaugcacaugcggauuugccagcaauaaaaccauagaaugugccuguagagauaacaguuacacagcaaaaagacccuuugucaaauuaaacguggagacugauacagcagaaauaagauugaugugcacagagacuuauuuggacacccccagaccagaugauggaagcauaacagggccuugugaaucuaauggggacaaagggaguggaggcaucaagggaggauuuguucaucaaagaauggcauccaagauuggaaggugguacucucgaacgaugucuaaaacugaaaggauggggaugggacuguaugucaaguaugauggagacccaugggcugacagugaugcccuuacucuuaguggaguaaugguuucaauggaagaaccugguugguacuccuuuggcuucgaaauaaaagauaagaaaugcgauguccccuguauugggauagagaugguacaugaugguggaaaagagacuuggcacucagcagcaacauccauuuacuguuuaaugggcucaggacagcugcugugggacacugucacagguguugauauggcucuguaa

SEQ ID NO: 60879 - RNA, 1401 nt, Artificial Sequence
  derived and/or modified CDS sequence (wt) from neuraminidase__InfluenzaB__AEP20347
augcuaccuucaacuauacaaacguuaacccuauuucucacaucagggggaguguuauuaucacuauaugugucagcuucauugucauacuuacuauauucggauauauugcuaaaauuuucacaaacagaaauaacugcaccaauaaugccauuggauugugcaaacgcaucaaauguucaggcugugaaccguucugcaacaaaaggggugacacuucuucucccagaaccggaguggacauacccucguuuaucuugcccgggcucaaccuuucagaaagcacuccuaauuagcccccauagauucggagaaaccaaaggaaacucagcucccuugauaauaagggaaccuuuuauugcuuguggaccaacggaaugcaaacacuuugcucuaacccauuaugcagcucaaccagggggauacuacaauggaacaagagaagacagaaacaagcugaggcaucuaauuucagucaaauugggcaaaaucccaacaguagaaaacuccauuuuccacauggcagcuuggagcggguccgcaugccaugaugguaaagaauggacauauaucgggguugauggccccgacaguaaugcauugcucaaaauaaaauauggagaagcauauacugacacauaccauuccuaugcaaaaaacauccuaaggacacaagaaagugccugcaauugcaucgggggagauuguuaucuuaugauaacugauggcccagcuucagggauuagugaaugcagauuccuuaagauucgagagggccgaauaauaaaagaaauauuuccaacaggaagaguaaaacauacugaggaaugcacaugcggauuugccagcaacaaaaccauagaaugugcuuguagagauaacaguuacacagcaaaaagacccuuugucaaauuaaauguggagacugauacagcggaaauaagauugaugugcacagagacuuauuuggacacccccagaccaaaugaugggagcauaacagggccuugcgaaucugauggggacaaagggaguggaggcaucaagggaggauuuguucaucaaagaauggcauccaagauuggaaggugguacucucgaacgaugucuaaaacuaaaagaauggggaugggacuguauguaaaguaugauggagacccauggacugacagugaagcccuugcucuuaguggaguaaugguuccaauggaagaaccugguugguauuccuuuggcuucgaaauaaaagauaagaaaugugauguccccuguauugggauagaaaugguacaugauggugggaaaacgacuuggcacucagcagcaacagccauuuacuguuuaaugggcucaggacaacugcugugggacacugucacagguguugauauggcucuguaa

SEQ ID NO: 60880 - RNA, 1401 nt, Artificial Sequence; identical to SEQ ID NO: 60879
  derived and/or modified CDS sequence (wt) from neuraminidase__InfluenzaB__AEP20358

SEQ ID NO: 60881 - RNA, 1401 nt, Artificial Sequence; identical to SEQ ID NO: 60879
  derived and/or modified CDS sequence (wt) from neuraminidase__InfluenzaB__AEP20369

SEQ ID NO: 60882 - RNA, 1401 nt, Artificial Sequence; identical to SEQ ID NO: 60879
  derived and/or modified CDS sequence (wt) from neuraminidase__InfluenzaB__AEP20380

SEQ ID NO: 60883 - RNA, 1401 nt, Artificial Sequence
  derived and/or modified CDS sequence (wt) from neuraminidase__InfluenzaB__AEP20391
augcuaccuucaacuauacaaacguuaacccuauuucucacaucagggggaguauuauuaucacuauaugugucagcuucauuaucauacuuacuauauucggauauauugcuaaaauucucaccaacagagauaacugcaccaacaaugccauuggauugugcaaacgcaucaaauguucaggcugugaaccguucugcaacaaaaggggugacacuucuucucccagaaccggaguggacauacccgcguuuaucuugcccgggcucaaccuuucagaaagcacuccuaauuagcccucauagauucggagaaaccaaaggaaacucagcucccuugauaauaagggaaccuuuuauugcuuguggaccaaaugaaugcaaacacuuugcucuaacccauuaugcagcccaaccagggggauacuacaauggaacaagaggagacagaaacaggcugaggcaucuaauuucagucaaauugggcaaaaucccaacaguagaaaacuccauuuuccacauggcagcauggagcggguccgcaugccaugaugguaaggaauggacauauaucggaguugauggcccugacaauaaugcauugcucaaaauaaaauauggagaagcauauacugacacauaccauuccuaugcaaacaacauccuaagaacacaagaaagugccugcaauugcaucgggggaaauuguuaucuuaugauaacugauggcucagcuucagguguuagugaaugcagauuucuuaagauucgagagggccgaauaauaaaagaaauauuuccaacaggaagaguaaaacauacugaggaaugcacaugcggauuugccagcaauaaaaccauagaaugugccuguagagauaacaguuacacagcaaaaagacccuuugucaaauuaaacguggaaacugauacagcagaaauaagauugaugugcacagauacuuauuuggacacccccagaccagaugauggaagcauaacaggcccuugugaaucuaauggggacaaagggaguggaggcaucaagggaggauuuguucaucaaagaauggcauccaagguuggaaggugguacucucgaacgaugucuaaaacugaaaggauggggaugggacuguaugucaaguaugauggagacccaugggcugacagugaugcccuugcuuuuaguggaguaaugguuucaaugaaagaaccugguugguacuccuuuggcuucgaaauaaaagauaagaaaugcgauguccccuguauugggauagagaugguacaugaugguggaaaagagacuuggcacucagcagcaacagccaucuacuguuuaaugggcucaggacaguugcugugggacacugucacagguguugacauggcucuguaa

SEQ ID NO: 60884 - RNA, 1401 nt, Artificial Sequence
  derived and/or modified CDS sequence (wt) from neuraminidase__InfluenzaB__AEP20413
augcuaccuucaacuauacaaacguuaacccuauuucucacaucagggggaguauuauuaucacuauaugugucagcuuuauuaucauacuuacuauauucggauauauugcuaaaauucucaccaacagaaauaauugcaccaacaaugucauuggauugugcaaacgcaucaaauguucaggcugugaaccguucugcaacaaaaggggugacauuucuucucccagaaccggaguggacauacccgcguuuaucuugcccgggcucaaccuuucagaaagcacuccuaauuagcccucauagauucggagaaaccaaaggaaacucagcucccuugauaauaagggaaccuuuuauugcuuguggaccaaaugaaugcaaacacuuugcucuaacccauuaugcagcccaaccagggggauacuacaauggaacaagaggagacagaaacaagcugaggcaucuaauuucagucaaauuggguaaaaucccaacaguagaaaacuccauuuuccacauggcagcauggagcggguccgcgugccaugaugguaaggaauggacauauaucggaguugauggcccugacaaugaugcauugcucaaaguaaaauauggagaagcauauacugacacauaccauuccuaugcaaacaaaauacuaagaacacaagaaagugccugcaauugcaucgggggaaauuguuaucuuaugauaacugauggcucagcuucagguguuagugaaugcagauuucuuaagauucgagagggccgaauaauaaaagaaauauuuccaacaggaagaguaaaacacacugaggaaugcacaugcggauuugccagcaauaaaaccauagaaugugcauguagagauaacaguuacacagcaaaaagaccuuuugucaaauuaaacguggagacugauacagcagaaauaagauugaugugcacagauacuuauuuggacacccccagaccagaugauggaagcauaacaggcccuugugaaucuaauggggacaaagggaguggaggcaucaagggaggauuuguucaucaaagaauggaauccaagauuggaaggugguacucucgaacgaugucuaagacugaaaggauggggaugggacuguaugucaaguauaauggagacccaugggcugacagugaugcccuagcuuuuaguggaguaaugguuucaaugaaagaaccugguugguacuccuuuggcuucgaaauaaaagauaagaaaugcgauguccccuguauugggauagagaugguacaugaugguggaaaagagacuuggcacucagcagcaacagccauuuacuguuuaaugggcucaggacagcugcugugggacacugucacaggcguugacauggcucuguaa

SEQ ID NO: 60885 - RNA, 1401 nt, Artificial Sequence; identical to SEQ ID NO: 60884
  derived and/or modified CDS sequence (wt) from neuraminidase__InfluenzaB__AEP20435

SEQ ID NO: 60886 - RNA, 1401 nt, Artificial Sequence
  derived and/or modified CDS sequence (wt) from neuraminidase__InfluenzaB__AEQ39031
augcuaccuucaacuauacaaacguuaacccuauuucucacaucagggggaguguuauuaucacuauaugugucagcuucauugucauacuuacuauauucggauauauugcuaaaauuuucacaaacagaaauaacugcaccaauaaugccauuggauugugcaaacgcaucaaauguucaggcugugaaccguucugcaacaaaaggggugacacuucuucucccagaaccggaguggacauacccucguuuaucuugcccgggcucaaccuuucagaaagcacuccuaauuagcccccauagauucggagaaaccaaaggaaacucagcucccuugauaauaagggaaccuuuuauugcuuguggaccaacggaaugcaaacacuuugcucuaacccauuaugcagcccaaccagggggauacuacaauggaacaagagaagacagaaacaagcugaggcaucuaauuucagucaaauugggcaaaaucccaacaguagaaaacuccauuuuccacauggcagcuuggagcggguccgcaugccaugaugguaaagaauggacauauaucgggguugauggccccgacaguaaugcauugcucaaaauaaaauauggagaagcauauacugacacauaccauuccuaugcaaaaaacauccuaaggacacaagaaagugccugcaauugcaucgggggagauuguuaucuuaugauaacugauggcccagcuucagggauuagugaaugcagauuccuuaagauucgagagggccgaauaauaaaagaaauauuuccaacaggaagaguaaaacauacugaggaaugcacaugcggauuugccagcaacaaaaccauagaaugugcuuguagagauaacaguuacacagcaaaaagacccuuugucaaauuaaauguggagacugauacagcggaaauaagauugaugugcacagagacuuauuuggacacccccagaccaaaugaugggagcauaacagggccuugcgaaucugauggggacaaagggaguggaggcaucaagggaggauuuguucaucaaagaauggcauccaagauuggaaggugguacucucgaacgaugucuaaaacuaaaagaauggggaugggacuguauguaaaguaugauggagacccauggacugacagugaagcccuugcucuuaguggaguaaugguuccaauggaagaaccugguugguauuccuuuggcuucgaaauaaaagauaagaaaugugauguccccuguauugggauagaaaugguacaugauggugggaaaacgacuuggcacucagcagcaacagccauuuacuguuuaaugggcucaggacaacugcugugggacacugucacagguguugauauggcucuguaa

SEQ ID NO: 60887 - RNA, 1401 nt, Artificial Sequence
  derived and/or modified CDS sequence (wt) from neuraminidase__InfluenzaB__AEQ39275
augcuaccuucaacuauacaaacguuaacccuauuucucacaucagggggaguauuauuaucacuauaugugucagcuucauuaucauacuuacuauauucggauauauugcuaaaauucucaccaaaagaaauaacugcaccaacaaugccauuggauugugcaaacgcaucaaauguucaggcugugaaccauucugcaacaaaaggggugacacuucuucucccagaaccggaguggacauacccgcguuuaucuugcccgggcucaaccuuucagaaagcacuccuaauuagcccucauagauucggagaaaccaaaggaaacucagcucccuugauaauaagggaaccuuuuauugcuugcggaccaaaugaaugcaaacacuuugcucuaacccacuaugcagcccaaccagggggauacuacaauggaacaagaggagacagaaacaagcugaggcaucuaauuucagucaaauugggcaaaaucccaacaguagaaaacuccauuuuccacauggcagcauggagcggguccgcgugccaugaugguaaggaauggacauauaucggaguugauggcccugacaauaaugcauugcucaaaguaaaauauggagaagcauauacugacacauaccauuccuaugcaaacaaaauccuaagaacacaagaaagugccugcaauugcaucgggggaaauuguuaucuuaugauaacugauggcucagcuucagguguuagugaaugcagauuucuuaagauucgagagggccgaauaauaaaagaaauauuuccaacgggaagaguaaaacacacugaggaaugcacaugcggauuugccagcaauaaaaccauagaaugugccuguagagauaacaguuacacagcaaaaagaccuuuugucaaauuaaacguggagacugauacagcagaaauaagacugaugugcaccgauacuuauuuggacacccccagaccagaugauggaagcauaacaggcccuugugaaucuaauggggacaaagggaguggaggcaucaagggaggauuuguucaucaaagaauggaauccaagauuggaaggugguacucucgaacgaugucuaaaacugaaaggauggggaugggacuguaugucaaguaugauggagacccaugggcugacagugaugcccuagcuuuuaguggaguaaugguuucaaugaaagaaccugguugguacuccuuuggcuucgaaauaaaagauaagaaaugcgauguccccuguauugggauagagauggugcaugaugguggaaaagagacuuggcacucagcagcaacagccauuuacuguuuaaugggcucaggacagcugcugugggacacugucacagguguugacauggcucuguaa

SEQ ID NO: 60888 - RNA, 1401 nt, Artificial Sequence
  derived and/or modified CDS sequence (wt) from neuraminidase__InfluenzaB__AEQ39286
augcuaccuucaacuauacaaacguuaacccuauuucucacaucagggggaguauuauuaucacuauaugugucagcuucauuaucauacuuacuauauucggauauauugcuaaaauucucaccaaaagaaauaacugcaccaacaaugccauuggauugugcaaacgcaucaaauguucaggcugugaaccauucugcaacaaaaggggugacacuucuucucccagaaccggaguggacauacccgcguuuaucuugcccgggcucaaccuuucagaaagcacuccuaauuagcccucauagauucggagaaaccaaaggaaacucagcucccuugauaauaagggaaccuuuuauugcuugcggaccaaaugaaugcaaacacuuugcucuaacccacuaugcagcccaaccagggggauacuacaauggaacaagaggagacagaaacaagcugaggcaucuaauuucagucaaauugggcaaaaucccaacaguagaaaacuccauuuuccacauggcagcauggagcggguccgcgugccaugaugguaaggaauggacauauaucggaguugauggcccugacaauaaugcauugcucaaaguaaaauauggagaagcauauacugacacauaccauuccuaugcaaacaaaauccuaagaacacaagaaagugccugcaauugcaucgggggaaauuguuaucuuaugauaacugauggcucagcuucagguguuagugaaugcagauuucuuaagauucgagagggccgaauaauaaaagaaauauuuccaacgggaagaguaaaacacacugaggaaugcacaugcggauuugccagcaauaaaaccauagaaugugccuguagagauaacaguuacacagcaaaaagaccuuuugucaaauuaaacguggagacugauacagcagaaauaagacugaugugcacagauacuuauuuggacacccccagaccagaugauggaagcauaacaggcccuugugaaucuaauggggacaaagggaguggaggcaucaagggaggauuuguucaucaaagaauggaauccaagauuggaaggugguacucucgaacgaugucuaaaacugaaaggauggggaugggacuguaugucaaguaugauggagacccaugggcugacagugaugcccuagcuuuuaguggaguaaugguuucaaugaaagaaccugguugguacuccuuuggcuucgaaauaaaagauaagaaaugcgauguccccuguauugggauagagauggugcaugaugguggaaaagagacuuggcacucagcagcaacagccauuuacuguuuaaugggcucaggacagcugcugugggacacugucacagguguugacauggcucuguaa

SEQ ID NO: 60889 - RNA, 1401 nt, Artificial Sequence
  derived and/or modified CDS sequence (wt) from neuraminidase__InfluenzaB__AEQ39297
augcuaccuucaacuauacaaacguuaacccuauuucucacaucagggggaguauuauuaucacuauaugugucagcuucauuaucauacuuacuauauucggauauauugcuaaaauucucaccaaaagaaauaacugcaccaacaaugccauuggauugugcaaacgcaucaaauguucaggcugugaaccauucugcaacaaaaggggugacacuucuucucccagaaccggaguggacauacccgcguuuaucuugcccgggcucaaccuuucagaaagcacuccuaauuagcccucauagauucggagaaaccaaaggaaacucagcucccuugauaauaagggaaccuuuuauugcuugcggaccaaaugaaugcaaacacuuugcucuaacccauuaugcagcccaaccagggggauacuacaauggaacaagaggagacagaaacaagcugaggcaucuaauuucagucaaauugggcaaaaucccaacaguagaaaacuccauuuuccacauggcagcauggagcggguccgcgugccaugaugguaaggaauggacauauaucggaguugauggcccugacaauaaugcauugcucaaaguaaaauauggagaagcauauacugacacauaccauuccuaugcaaacaaaauccuaagaacacaagaaagugccugcaauugcaucgggggaaauuguuaucuuaugauaacugauggcucagcuucagguguuagugaaugcagauuucuuaagauucgagagggccgaauaauaaaagaaauauuuccaacgggaagaguaaaacacacugaggaaugcacaugcggauuugccagcaauaaaaccauagaaugugccuguagagauaacaguuacacagcaaaaagaccuuuugucaaauuaaacguggagacugauacagcagaaauaagacugaugugcacagauacuuauuuggacacccccagaccagaugauggaagcauaacaggcccuugugaaucuaauggggacaaagggaguggaggcaucaagggaggauuuguucaucaaagaauggaauccaagauuggaaggugguacucucgaacgaugucuaaaacugaaaggauggggaugggacuguaugucaaguaugauggagacccaugggcugacagugaugcccuagcuuuuaguggaguaaugguuucaaugaaagaaccugguugguacuccuuuggcuucgaaauaaaagauaagaaaugcgauguccccuguauugggauagagauggugcaugaugguggaaaagagacuuggcacucagcagcaacagccauuuacuguuuaaugggcucaggacagcugcugugggacacugucacagguguugacauggcucuguaa

SEQ ID NO: 60890 - RNA, 1401 nt, Artificial Sequence; identical to SEQ ID NO: 60888
  derived and/or modified CDS sequence (wt) from neuraminidase__InfluenzaB__AEQ39308

SEQ ID NO: 60891 - RNA, 1401 nt, Artificial Sequence
  derived and/or modified CDS sequence (wt) from neuraminidase__InfluenzaB__AEQ39319
augcuaccuucaacuauacaaacguuaacccuauuucucacaucagggggaguauuauuaucacuauaugugucagcuucauuaucauacuuacuauauucggauauauugcuaaaauucucaccaaaagaaauaacugcaccaacaaugccauuggauugugcaaacgcaucaaauguucaggcugugaaccauucugcaacaaaaggggugacacuucuucucccagaaccagaguggacauacccgcguuuaucuugcccgggcucaaccuuucagaaagcacuccuaauuagcccucauagauucggagaaaccaaaggaaacucagcucccuugauaauaagggaaccuuuuauugcuugcggaccaaaugaaugcaaacacuuugcucuaacccacuaugcagcccaaccagggggauacuacaauggaacaagaggagacagaaacaagcugaggcaucuaauuucagucaaauugggcaaaaucccaacaguagaaaacuccauuuuccacauggcagcauggagcggguccgcgugccaugaugguaaggaauggacauauaucggaguugauggcccugacaauaaugcauugcucaaaguaaaauauggagaagcauauacugacacauaccauuccuaugcaaacaaaauccuaagaacacaagaaagugccugcaauugcaucgggggaaauuguuaucuuaugauaacugauggcucagcuucagguguuagugaaugcagauuucuuaagauucgagagggccgaauaauaaaagaaauauuuccaacgggaagaguaaaacacacugaggaaugcacaugcggauuugccagcaauaaaaccauagaaugugccuguagagauaacaguuacacagcaaaaagaccuuuugucaaauuaaacguggagacugauacagcagaaauaagacugaugugcacagauacuuauuuggacacccccagaccagaugauggaagcauaacaggcccuugugaaucuaauggggacaaagggaguggaggcaucaagggaggauuuguucaucaaagaauggaauccaagauuggaaggugguacucucgaacgaugucuaaaacugaaaggauggggaugggacuguaugucaaguaugauggagacccaugggcugacagugaugcccuagcuuuuaguggaguaaugguuucaaugaaagaaccugguugguacuccuuuggcuucgaaauaaaagauaagaaaugcgauguccccuguauugggauagagauggugcaugaugguggaaaagagacuuggcacucagcagcaacagccauuuacuguuuaaugggcucaggacagcugcugugggacacugucacagguguugacauggcucuguaa

SEQ ID NO: 60892 - RNA, 1401 nt, Artificial Sequence
  derived and/or modified CDS sequence (wt) from neuraminidase__InfluenzaB__AEQ39330
augcuaccuucaacuauacaaacguuaacccuauuucucacaucagggggaguauuauuaucacuauaugugucagcuucauuaucauacuuacuauauucggauauauugcuaaaauucucaccaaaagaaauaacugcaccaacaaugccauuggauugugcaaacgcaucaaauguucaggcugugaaccauucugcaacaaaaggggugacacuucuucucccagaaccggaguggacauacccgcguuuaucuugcccgggcucaaccuuucagaaagcacuccuaauuagcccucauagauucggagaaaccaaaggaaacucagcucccuugauaauaagggaaccuuuuauugcuugcggaccaaaugaaugcaaacacuuugcucuaacccacuaugcagcccaaccagggggauacuacaauggaacaagaggagacagaaacaagcugaggcaucuaauuucagucaaauugggcaaaaucccaacaguagaaaacuccauuuuccacauggcagcauggagcggguccgcgugccaugaugguaaggaauggacauauaucggaguugauggcccugacaauaaugcauugcucaaaguaaaauauggagaagcauauacugacacauaccauuccuaugcaaacaaaauccuaagaacacaagaaagugccugcaauugcaucgggggaaauuguuaucuuaugauaacugauggcucagcuucagguguuagugaaugcagauuucuuaagauucgagagggccgaauaauaaaagaaauauuuccaacgggaagaguaaaacacacugaggaaugcacaugcggauuugccagcaauaaaaccauagaaugugccuguagagauaacaguuacacagcaaaaagaccuuuugucaaauuaaacguggagacugauacagcagaaauaagacugaugugcacagauacuuauuuggacacccccagaccagaugauggaagcauaacaggcccuugugaaucuaauggggacaaagggaguggaggcaucaagggaggauuuguucaucaaagaauggaauccaagauuggaaggugguacucucgaacgaugucuaaaacugaaaggauggggaugggacuguaugucaaguaugauggagacccaugggcugacagugaugcccuagcuuuuaguggaguaaugguuucaaugaaagaaccugguugguacuccuuuggcuucgaaauaaaagauaagaaaugcgauguccccuguauugggauagagauggugcaugaugguggaaaagagacuuggcacucagcagcaacagccauuuacuguuuaaugggcucaggacagcugcugugggacacugucacagguguugacauagcucuguaa

SEQ ID NO: 60893 - RNA, 1401 nt, Artificial Sequence
  derived and/or modified CDS sequence (wt) from neuraminidase__InfluenzaB__AEQ39341
augcuaccuucaacuauacaaacguuaacccuauuucucacaucagggggaguauuauuaucacuauaugugucagcuucauuaucauacuuacuauauucggauauauugcuaaaauucucaccaaaagaaauaacugcaccaacaaugccauuggauugugcaaacgcaucaaauguucaggcugugaaccauucugcaacaaaaggggugacacuucuucucccagaaccggaguggacauacccgcguuuaucuugcccgggcucaaccuuucagaaagcacuccuaauuagcccucauagauucggagaaaccaaaggaaacucagcucccuugauaauaagggaaccuuuuauugcuugcggaccaaaugaaugcaaacacuuugcucuaacccauuaugcagcccaaccagggggauacuacaauggaacaagaggagacagaaacaagcugaggcaucuaauuucagucaaauugggcaaaaucccaacaguagaaaacuccauuuuccacauggcagcauggagcggguccgcgugccaugaugguaaggaauggacauauaucggaguugauggcccugacaauaaugcauugcucaaaguaaaauauggagaagcauauacugacacauaccauuccuaugcaaacaaaauccuaagaacacaagaaagugccugcaauugcaucgggggaaauuguuaucuuaugauaacugauggcucagcuucagguguuagugaaugcagauuucuuaagauucgagagggccgaauaauaaaagaaauauuuccaacgggaagaguaaaacacacugaggaaugcacaugcggauuugccagcaauaaaaccauagaaugugccuguagagauaauaguuacacagcaaaaagaccuuuugucaaauuaaacguggagacugauacagcagaaauaagacugaugugcacagauacuuauuuggacacccccagaccagaugauggaagcauaacaggcccuugugaaucuaauggggacaaagggaguggaggcaucaagggaggauuuguucaucaaagaauggaauccaagauuggaaggugguacucucgaacgaugucuaaaacugaaaggauggggaugggacuguaugucaaguaugauggagacccaugggcugacagugaugcccuagcuuuuaguggaguaaugguuucaaugaaagaaccugguugguacuccuuuggcuucgaaauaaaagauaagaaaugcgauguccccuguauugggauagagauggugcaugaugguggaaaagagacuuggcacucagcagcaacagccauuuacuguuuaaugggcucaggacagcugcugugggacacugucacagguguugacauggcucuguaa

SEQ ID NO: 60894 - RNA, 1401 nt, Artificial Sequence
  derived and/or modified CDS sequence (wt) from neuraminidase__InfluenzaB__AEQ39352
augcuaccuucaaccauacaaacguuaacccuauuucucacaucagggggaguauuauuaucacuauaugugucagcuucauuaucauacuuacuauauucggauauauugcuaaaauucucaccaaaagaaauaacugcaccaacaaugccauuggauugugcaaacgcaucaaauguucaggcugugaaccauucugcaacaaaaggggugacacuucuucucccagaaccggaguggacauacccgcguuuaucuugcccgggcucaaccuuucagaaagcacuccuaauuagcccucauagauucggagaaaccaaaggaaacucagcucccuugauaauaagggaaccuuuuauugcuugcggaccaaaugaaugcaaacacuuugcucuaacccauuaugcagcccaaccagggggauacuacaauggaacaagaggagacagaaacaagcugaggcaucuaauuucagucaaauugggcaaaaucccaacaguagaaaacuccauuuuccacauggcagcauggagcggguccgcgugccaugaugguaaggaauggacauauaucggaguugauggcccugacaauaaugcauugcucaaaguaaaauauggagaagcauauacugacacauaccauuccuaugcaaacaaaauccuaagaacacaagaaagugccugcaauugcaucgggggaaauuguuaucuuaugauaacugauggcucagcuucagguguuagugaaugcagauuucuuaagauucgagagggccgaauaauaaaagaaauauuuccaacgggaagaguaaaacacacugaggaaugcacaugcggauuugccagcaauaaaaccauagaaugugccuguagagauaacaguuacacagcaaaaagaccuuuugucaaauuaaacguggagacugauacagcagaaauaagacugaugugcacagauacuuauuuggacacccccagaccagaugauggaagcauaacaggcccuugugaaucuaauggggacaaagggaguggaggcaucaagggaggauuuguucaucaaagaauggaauccaagauuggaaggugguacucucgaacgaugucuaaaacugaaaggauggggaugggacuguaugucaaguaugauggagacccaugggcugacagugaugcccuagcuuuuaguggaguaaugguuucaaugaaagaaccugguugguacuccuuuggcuucgaaauaaaagauaagaaaugcgauguccccuguauugggauagagauggugcaugaugguggaaaagagacuuggcacucagcagcaacagccauuuacuguuuaaugggcucaggacagcugcugugggacacugucacagguguugacauggcucuguaa

SEQ ID NO: 60895 - RNA, 1401 nt, Artificial Sequence; identical to SEQ ID NO: 60888
  derived and/or modified CDS sequence (wt) from neuraminidase__InfluenzaB__AEQ39363

SEQ ID NO: 60896 - RNA, 1401 nt, Artificial Sequence
  derived and/or modified CDS sequence (wt) from neuraminidase__InfluenzaB__AEQ39374
augcuaccuucaacuauacaaacguuaacccuauuucucacaucagggggaguauuauuaucacuauaugugucagcuucauuaucauacuuacuauauucggauauauugcuaaaauucucaccaacagaaauaacugcaccaacaaugccauuggauugugcaaacgcaucaaauguucaugcugugaaccguucugcaacaaaaggggugacacuucuucucccagaaccggaguggacauacccgcguuuaucuugcccgggcucaaccuuucagaaagcgcuccuaauuagcccucauagauucggagaaaccaaaggaaacucagcucccuugauaauaagggaaccuuuuauugcuuguggaccaaaugaaugcaaacacuuugcucuaacccauuaugcagcccaaccagggggauacuacaauggaacaagaggagacagaaacaagcugaggcaucuaauuucagucaaauugggcaaaaucccaacaguagaaaacuccauuuuccacauggcagcauggagcggguccgcaugccaugaugguaaggaauggacauauaucggaguugauggcccugacaauaaugcauugcucaaaauaaaauauggagaagcauauacugacacauaccauuccuaugcaaacaacauccuaagaacacaagaaagugccugcaauugcaucgggggaaauuguuaucuuaugauaacugauggcucagcuucagguguuagugaaugcagauuucuuaagauucgagagggccgaauaauaaaagaaauauuuccaacaggaagaguaaaacauacugaggaaugcacaugcggauuugccagcaauaaaaccauagaaugugccuguagagauaacaguuacacagcaaaaagacccuuugucaaauuaaacguggaaaccgauacagcagaaauaagauugaugugcacagauacuuauuuggacacccccagaccagaugauggaagcauaacaggcccuugugaaucuaauggggacaaagggaguggaggcaucaagggaggauuuguucaucaaagaauggcauccaagauuggaaggugguacucucgaacgaugucuaaaacugaaaggauggggaugggacuguaugucaaguaugauggagacccaugggcugacagugaugcccuugcuuuuagugggguaaugguuucaaugaaagaaccugguugguacuccuuuggcuucgaaauaaaagauaagaaaugcgauguccccuguauugggauagagaugguacaugaugguggaaaagagacuuggcacucagcagcaacagccauuuacuguuuaaugggcucaggacagcugcugugggacacugucacagguguugacauggcucuguaa

SEQ ID NO: 60897 - RNA, 1401 nt, Artificial Sequence
  derived and/or modified CDS sequence (wt) from neuraminidase__InfluenzaB__AEQ39385
augcuaccuucaacuauacaaacguuaacccuauuucucacaucagggggaguguuauuaucacuauaugugucagcuucacugucauacuuacuauauucggauauauugcuaaaauuuucaccaacagaaauaacugcaccaacaaugccauuggauugugcaaacgcaucaaauguucaggcugugaaccguucugcaacaaaaggggugacacuucuucucccagaaccggaguggacauacccgcguuuaucuugcccgggcucaaccuuucagaaagcacuccuaauuagcccucauagauucggagaaaccaaaggaaacucagcucccuugauaauaagggaaccuuuuauugcuuguggaccaaaggaaugcaaacacuuugcucuaacccauuaugcagcccaaccagggggauacuacaauggaacaagaggagacagaaacaagcugaggcaucuaauuucagucaaauugggcaaaaucccaacaguagaaaacuccauuuuccacauggcagcauggagcggguccgcaugccaugaugguaaagaauggacauauaucggaguugauggcccugacaguaaugcauugcucaaaauaaaauauggagaagcauauacugacacauaccauuccuaugcaaacaacauccuaagaacacaagaaagugccugcaauugcaucgggggaaauuguuaucuuaugauaacugauggcucagcuucagguauuagugaaugcagauuucuuaagauucgagagggccgaauaauaaaagaaauauuuccaacaggaagaguaaaacauacugaagaaugcacaugcggauuugccagcaauaaaaccauagaaugugccuguagagauaacaguuacacagcaaaaagacccuuugucaaauuaaauguggagacugauacagcagaaauaagauugaugugcacagagacuuauuuggacacccccagaccagaugauggaagcauaacagggccuugugaaucuaauggggacaaagggaguggaggcaucaagggaggauuuguucaucaaagaaugacauccaagauuggaaggugguacucucgaacgaugucuaaaacuaaaaggauggggaugggacuguaugucaaguaugauggagacccauggacugacagugaugcccuugcucuuaguggaguaaugguuucaauggaagaaccugguugguacuccuuuggcuucgaaauaaaagauaagaaaugugauguccccuguauugggauagagaugguacaugaugguggaaaggagacuuggcacucagcagcaacagccauuuacuguuuaaugggcucaggacaauugcuaugggacacugucacagguguugauauggcucuguaa

SEQ ID NO: 60898 - RNA, 1401 nt, Artificial Sequence
  derived and/or modified CDS sequence (wt) from neuraminidase__InfluenzaB__AEQ39444
augcuaccuucaacuauacaaacguuaacccuauuucucacaucagggggaguguuauuaucacuauaugugucagcuucauugucauacuuacuauauucggauauauugcuaaaauuuucacaaacagaaauaauugcaccaauaaugccauuggauugugcaaacgcaucaaauguucaggcugugaaccguucugcaacaaaaggggugacacuucuucucccagaaccggaguggacauacccucguuuaucuugcccgggcucaaccuuucagaaagcacuccuaauuagcccccauagauucggagaaaccaaaggaaacucagcucccuugauaauaagggaaccuuuuauugcuuguggaccaacggaaugcaaacacuuugcucuaacccauuaugcagcucaaccagggggauacuacaauggaacaagagaagacagaaacaagcugaggcaucuaauuucagucaaauugggcaaaaucccaacaguagaaaacuccauuuuccacauggcagcuuggagcggguccgcaugccaugaugguaaagaauggacauauaucggaguugauggccccgacaguaaugcauugcucaaaauaaaauauggagaagcauauacugacacauaccauuccuaugcaaaaaacauccuaaggacacaagaaagugccugcaauugcaucgggggagauuguuaucuuaugauaacugauggcccagcuucagggauuagugaaugcagauuccuuaagauucgagagggccgaauaauaaaagaaauauuuccaacaggaagaguaaaacauacugaggaaugcacaugcggauuugccagcaacaaaaccauagaaugugcuuguagagauaacaguuacacagcaaaaagacccuuugucaaauuaaauguggagacugauacagcggaaauaagauugaugugcacagagacuuauuuggacacccccagaccaaaugauggaagcauaacagggccuugcgaaucugauggggacaaagggaguggaggcaucaagggaggauuuguucaucaaagaauggcauccaagauuggaaggugguacucucgaacgaugucuaaaacuaaaagaauggggaugggacuguauguaaaguaugauggagacccauggacugacagugaagcccuugcucuuaguggaguaaugguuucaauggaagaaccugguugguauuccuuuggcuucgaaauaaaagauaagaaaugugauguccccuguauugggauagaaaugguacaugauggugggaaaacgacuuggcacucagcagcaacagccauuuacuguuuaaugggcucaggacaacugcugugggacacugucacagguguugauauggcucuguaa

SEQ ID NO: 60899 - RNA, 1401 nt, Artificial Sequence
  derived and/or modified CDS sequence (wt) from neuraminidase__InfluenzaB__AEQ39455
augcuaccuucaacuauacaaacguuaacccuauuucucacaucagggggaguguuauuaucacuauaugugucagcuucauugucauacuuacuauauucggauauauugcuaaaauuuucacaaacagaaauaacugcaccaauaaugccauuggauugugcaaacgcaucaaauguucaggcugugaaccguucugcagcaaaaggggugacacuucuucucccagaaccggaauggacauacccucguuuaucuugcccgggcucaaccuuucagaaagcacuccuaauuagcccccauagauucggagaaaccaaaggaaacucagcucccuugauaauaagggaaccuuuuauugcuuguggaccaacggaaugcaaacacuuugcucuaacccauuaugcagcucaaccagggggauacuacaauggaacaagagaagacagaaacaagcugaggcaucuaauuucagucaaauugggcaaaaucccaacaguagaaaacuccauuuuccacauggcagcuuggagcggguccgcaugccaugaugguaaagaauggacauauaucggaguugauggccccgacaguaaugcauugcucaaaauaaaauauggagaagcauauacugacacauaccauuccuaugcaaaaaacauccuaaggacacaagaaagugccugcaauugcaucgggggagauuguuaucuuaugauaacugauggcccagcuucagggauuagugaaugcagauuccuuaagauucgagagggccgaauaauaaaagaaauauuuccaacaggaagaguaaaacauacugaggaaugcacaugcggauuugccagcaacaaaaccauagaaugugcuuguagagauaacaguuacacagcaaaaagacccuuugucaaauuaaauguggagacugauacagcggaaauaagauugaugugcacagagacuuauuuggacacccccagaccaaaugauggaagcauaacagggccuugcgaaucugauggggacaaagggaguggaggcaucaagggaggauuuguucaucaaagaauggcauccaagauuggaaggugguacucucgaacgaugucuaaaacuaaaagaauggggaugggacuguauguaaaguaugauggagacccauggacugacagugaagcccuugcucuuaguggaguaaugguuucaauggaagaaccugguugguauuccuucggcuucgaaauaaaagauaagaaaugugauguccccuguauugggauagaaaugguacaugauggugggaaaacgacuuggcacucagcagcaacagccauuuacuguuuaaugggcucaggacaacugcugugggacacugucacagguguugauauggcucuguaa

SEQ ID NO: 60900 - RNA, 1401 nt, Artificial Sequence
  derived and/or modified CDS sequence (wt) from neuraminidase__InfluenzaB__AEQ39466
augcuaccuucaacuauacaaacguuaacccuauuucucacaucagggggaguauuauuaucacuauaugugucagcuucauuaucauacuuacuauauucggauauauugcuaaaauucucaccaacagagauaacugcaccaacaaugccauuggauugugcaaacgcaucaaauguucaggcugugaaccguucugcaacaaaaggggugacacuucuucucccagaaccggaguggacauacccgcguuuaucuugcccgggcucaaccuuucagaaagcacuccuaauuagcccucauagauucggagaaaccaaaggaaacucagcucccuugauaauaagggaaccuuuuauugcuuguggaccaaaugaaugcaaacacuuugcucuaacccauuaugcagcccaaccagggggauacuacaauggaacaagaggagacagaaacaagcugaggcaucuaauuucagucaaauugggcaaaaucccaacaguagaaaacuccauuuuccacauggcagcauggagcggguccgcaugccaugaugguaaggaauggacauauaucggaguugauggcccugacaauaaugcauugcucaaaauaaaauauggagaagcauauacugacacauaccauuccuaugcaaacaacauccuaagaacacaagaaagugccugcaauugcaucgggggaaauuguuaucuuaugauaacugauggcucagcuucagguguuagugaaugcagauuucuuaagauucgagagggccggauaauaaaagaaauauuuccaacaggaagaguaaaacauacugaggaaugcacaugcggauuugccagcaauaaaaccauagaaugugccuguagagauaacaguuacacagcaaaaagacccuuugucaaauuaaacguggaaacugauacagcagaaauaagauugaugugcacagauacuuauuuggacacccccagaccagaugauggaagcauaacaggcccuugugaaucuaauggggacaaagggaguggaggcaucaagggaggauuuguucaucaaagaauggcauccaagguuggaaggugguacucucgaacgaugucuaaaacugaaaggauggggaugggacuguaugucaaguaugauggagacccaugggcugacagugaugcccuugcuuuuaguggaguaaugguuucaaugaaagaaccugguugguacuccuuuggcuucgaaauaaaagauaagaaaugcgauguccccuguauugggauagagaugguacaugaugguggaaaagagacuuggcacucagcagcaacagccauuuacuguuuaaugggcucaggacaguugcugugggacacugucacagguguugacauggcucuguaa

SEQ ID NO: 60901 - RNA, 1401 nt, Artificial Sequence; identical to SEQ ID NO: 60888
  derived and/or modified CDS sequence (wt) from neuraminidase__InfluenzaB__AEQ39477

SEQ ID NO: 60902 - RNA, 1401 nt, Artificial Sequence
  derived and/or modified CDS sequence (wt) from neuraminidase__InfluenzaB__AEQ39488
augcuaccuucaacuauacaaacguuaacccuauuucucacaucagggggaguauuauuaucacuauaugugucagcuucauuaucauacuuauuauauucggauauauugcuaaaauucucaccaacagaaauaacugcaccaacaaugccauuggauugugcaaacgcaucaaauguucaggcugugaaccguucugcaacaaaaggggugacacuucuucucccagaaccggaguggacauacccgcguuuaucuugcccgggcucaaccuuucagaaagcacuccuaauuagcccucauagauucggagaaaccaaaggaaacucagcucccuugauaauaagggaaccuuuuauugcuuguggaccaaaugaaugcaaacacuuugcucuaacccauuaugcagcucagccagggggauacuacaauggaacaagaggagacagaaacaagcugaggcaucuaauuucagucaaauugggcaaaaucccaacaguagaaaacuccauuuuccacauggcagcauggagcggguccgcgugccaugaugguaaggaauggacauauaucggaguugauggcccugacaauaaugcauugcucaaaguaaaauauggagaagcauacacugacacauaccauuccuaugcaaacaaaauccuaagaacacaagaaagugccugcaauugcaucggaggaaauuguuaucuuaugauaacugauggcucagcuucagguguuagugaaugcagauuucuuaagauucgagagggccgaauaauaaaagaaauauuuccaacaggaagaguaaaacacacugaggaaugcacaugcggauuugccagcaauaaaaccauagaaugugccuguagagauaacaguuacacagcaaaaagaccuuuugucaaauuaaacguggagacugauacagcagaaauaagauugaugugcacagauacuuauuuggacacccccagaccaaaugauggaagcauaacaggcccuugugaaucuaauggggacaaagggaguggaggcaucaagggaggauuuguucaucaaagaauggaauccaggauuggaaggugguacucucgaacgaugucuaaaacugaaaggauggggaugggacuguaugucaaguaugauggagacccauggacugacagugaugcccuagcuuuuaguggaguaaugguuucaaugaaagaaccugguugguacuccuuuggcuucgaaauaaaagauaagaaaugcgauguccccuguauugggauagagauggugcaugaugguggaaaagagacuuggcacucagcugcaacagccauuuacuguuuaaugggcucaggacagcugcugugggacacugucacagguguugacauggcucuguaa

SEQ ID NO: 60903 - RNA, 1401 nt, Artificial Sequence
  derived and/or modified CDS sequence (wt) from neuraminidase__InfluenzaB__AEQ39499
augcuaccuucaacuauacaaacguuaacccuauuucucacaucagggggaguauuauuaucacuauaugugucagcuucauuaucauacuuacuauauucggauauauugcuaaaauucucaccaacagaaauaacugcaccaacaaugccguuggauugugcaaacgcaucaaauguucaugcugugaaccguucugcaacaaaaggggugacacuucuucucccagaaccggaguggacauacccgcguuuaucuugcccgggcucaaccuuucagaaagcacuccuaauuagcccucauagauucggagaaaccaaaggaaacucagcucccuugauaauaagggaaccuuuuauugcuuguggaccaaaugaaugcaaacacuuugcucuaacccauuaugcagcccaaccagggggauacuacaauggaacaagaggagacagaaacaagcugaggcaucuaauuucagucaaauugggcaaaaucccaacaguagaaaacuccauuuuccacauggcagcauggagcggguccgcaugccaugaugguaaggaauggacauauaucggaguugauggcccugacaauaaugcauugcucaaaauaaaauauggagaagcauauacugacacauaccauuccuaugcaaacaacauccuaagaacacaagaaagugccugcaauugcaucgggggaaauuguuaucuuaugauaacugauggcucagcuucagguguuagugaaugcagauuucuuaagauucgagagggccgaauaauaaaagaaauauuuccaacaggaagaguaaaacauacugaggaaugcacaugcggauuugccagcaauaaaaccauagaaugugccuguagagauaacaguuacacagcaaaaagacccuuugucaaauuaaacguggaaacugauacagcagaaauaagauugaugugcacagauacuuauuuggacacccccagaccagaugauggaagcauaacaggcccuugugaaucuaauggggacaaagggaguggaggcaucaagggaggauuuguucaucaaagaauggcauccaagauuggaaggugguacucucgaacgaugucuaaaacugaaaggauggggaugggacuguaugucaaguaugauggagacccaugggcugacagugaugcccuugcuuuuaguggaguaaugguuucaaugaaagaaccugguugguacuccuuuggcuucgaaauaaaagauaagaaaugcgauguccccuguauugggauagagaugguacaugaugguggaaaagagacuuggcacucagcagcaacagccauuuacuguuuaaugggcucaggacagcugcugugggacacugucacagguguugacauggcucuguaa

SEQ ID NO: 60904 - RNA, 1401 nt, Artificial Sequence; identical to SEQ ID NO: 60870
  derived and/or modified CDS sequence (wt) from neuraminidase__InfluenzaB__AEQ39510

SEQ ID NO: 60905 - RNA, 1401 nt, Artificial Sequence
  derived and/or modified CDS sequence (wt) from neuraminidase__InfluenzaB__AEQ49685
augcuaccuucaacuauacaaacguuaacccuauuucucacaucagggggaguauuauuaucacuauaugugucagcuucauuaucauacuuacuauauucggauauauugcuaaaauucucaccaacagaaauaacugcaccaacaaugccauuggauugugcaaacgcaucaaauguucaggcugugaaccguucugcaacaaaaggggugacacuucuucucccagaaccagaguggacauacccgcguuuaucuugcccgggcucaaccuuucagaaagcacuccuaauuagcccucauagauucggagaaaccaaaggaaacucagcucccuugauaauaagggaaccuuuuauugcuuguggaccaaaugaaugcaaacacuuugcucuaacccauuaugcagcccaaccagggggauacuacaauggaacaagaggagacagaaacaagcugaggcaucuaauuucagucaaauugggcaaaaucccaacaguagaaaacuccauuuuccacauggcagcauggagcggguccgcgugccaugaugguaaggaauggacauauaucggaguugauggcccugacaauaaugcauugcucaaaguaaaauauggagaagcauauacugacacauaccauuccuaugcaaacaaaauccuaagaacacaagaaagugccugcaauugcaucgggggaaauuguuaucuuaugauaacugauggcucagcuucagguguuagugaaugcagauuucuuaagauucgagagggccgaauaauaaaagaaauauuuccaacaggaagaguaaaacacacugaggaaugcacaugcggauuugccagcaauaaaaccauagaaugugccuguagagauaacaguuacacagcaaaaagaccuuuugucaaauuaaacguggagacugauacagcagaaauaagauugaugugcacagauacuuauuuggacacccccagaccaaaugauggaagcauaacaggcccuugugaaucugauggggacaaagggaguggaggcaucaagggaggauuuguucaucaaagaauggaauccaagauuggaaggugguacucucgaacgaugucuaaaacugaaaggauggggaugggacuguaugucaaguaugauggagacccaugggcugacagugaugcccuagcuuuuaguggaguaaugguuucaaugaaagaaccugguugguacuccuuuggcuucgaaauaaaagauaagaaaugcgauguccccuguauugggauagagaugguacaugaugguggaaaagagacuuggcacucagcagcaacagccauuuacuguuuaaugggcucaggacagcugcugugggacacugucacagguguugacauggaucuguaa

SEQ ID NO: 60906 - RNA, 1401 nt, Artificial Sequence
  derived and/or modified CDS sequence (wt) from neuraminidase__InfluenzaB__AEQ49686
augcuaccuucaacuauacaaacguuaacccuauuucucacaucagggggaguauuauuaucacuauaugugucagcuucauuaucauacuuacuauauucggauauauugcuaaaauucucaccaacagaaauaacugcaccaacaaugccauuggauugugcaaacgcaucaaauguucaggcugugaaccguucugcaacaaaaggggugacacuucuucucccagaaccagaguggacauacccgcguuuaucuugcccgggcucaaccuuucagaaagcacuccuaauuagcccucauagauucggagaaaccaaaggaaacucagcucccuugauaauaagggaaccuuuuauugcuuguggaccaaaugaaugcaaacacuuugcucuaacccauuaugcagcccaaccagggggauacuacaauggaacaagaggagacagaaacaagcugaggcaucuaauuucagucaaauugggcaaaaucccaacaguagaaaacuccauuuuccacauggcagcauggagcggauccgcgugccaugaugguaaggaauggacauauaucggaguugauggcccugacaaugaugcauugcucaaaguaaaauauggagaagcauauacugacacauaccauuccuaugcaaacaaaauccuaagaacacaagaaagugccugcaauugcaucgggggaaauuguuaucuuaugauaacugauggcucagcuucagguguuagugaaugcagauuucuuaagauucgagagggccgaauaauaaaagaaauauuuccaacaggaagaguaaaacacacugaggaaugcacaugcggauuugccagcaauaaaaccauagaaugugccuguagagauaacaguuacacagcaaaaagaccuuuugucaaauuaaacguggagacugauacagcagaaauaagauugaugugcacagauacuuauuuggacacccccagaccagaugauggaagcauaacaggcccuugugaaucuaauggggacaaagggaguggaggcaucaagggaggauuuguucaucaaagaauggaauccaagauugggaggugguacucucgaacgaugucuaagacugaaaggaugggaaugggacuguaugucaaguaugauggagacccaugggcugacagugaugcccuagcuuuuaguggaguaaugguuucaaugaaagaaccugguugguacuccuuuggcuucgaaauaaaagauaagaaaugcgauguccccuguauugggauagagaugguacaugaugguggaaaagagacuuggcacucagcagcaacagccauuuacuguuugaugggcucaggacagcugcugugggacacugucacaggcguugacauggcucuguaa

SEQ ID NO: 60907 - RNA, 1401 nt, Artificial Sequence
  derived and/or modified CDS sequence (wt) from neuraminidase__InfluenzaB__AEQ49687
augcuaccuucaacuauacaaacguuaacccuauuucucacaucaggaggaguauuauuaucacuauaugugucagcuuuauuaucauacuuacuauauucggauauauugcuaaaauucucaccaacagaaauaacugcaccaacaaugucauuggauugugcaaacgcaucaaauguucaggcugugaaccguucugcaacaaaaggggugacauuucuucucccagaaccggaguggacauacccgcguuuaucuugcccgggcucaaccuuucagaaagcacuccuaauuagcccucauagauucggagaaaccaaaggaaacucagcucccuugauaauaagggaaccuuuuauugcuuguggaccaaaugaaugcaaacacuuugcucuaacccauuaugcagcccaaccagggggauacuacaauggaacaagaggagacagaaacaagcugaggcaucuaauuucagucaaauugggcaaaaucccaacaguagaaaacuccauuuuccacauggcagcauggagcggauccgcgugccaugaugguaaggaauggacauauaucggaguugauggcccugacaaugaugcauugcucaaaguaaaauauggagaagcauauacugacacauaccauuccuaugcaaacaaaauccuaagaacacaagaaagugccugcaauugcaucgggggaaauuguuaucuuaugauaacugauggcucagcuucagguguuagugaaugcagauuucuuaagauucgagagggccgaauaauaaaagaaauauuuccaacaggaagaguaaaacacacugaggaaugcacaugcggauuugccagcaauaaaaccauagaaugugccuguagagauaacaguuacacagcaaaaagaccuuuugucaaauuaaacguggagacugauacagcagaaauaagauugaugugcacagauacuuauuuggacacccccagaccagaugauggaagcauaacaggcccuugugaaucuaauggggacaaagggaguggaggcaucaagggaggauuuguucaucaaagaauggaauccaagauugggaggugguacucucgaacgaugucuaagacugaaaggaugggaaugggacuguaugucaaguaugauggagacccaugggcugacagugaugcccuagcuuuuaguggaguaaugguuucaaugaaagaaccugguugguacuccuuuggcuucgaaauaaaagauaagaaaugcgauguccccuguauugggauagagaugguacaugaugguggaaaagagacuuggcacucagcagcaacagccauuuacuguuugaugggcucaggacagcugcugugggacacugucacaggcguugacauggcucuguaa

SEQ ID NO: 60908 - RNA, 1401 nt, Artificial Sequence
  derived and/or modified CDS sequence (wt) from neuraminidase__InfluenzaB__AEQ49688
augcuaccuucaacuauacaaacguuaaccuuauuucucacaucagggggaguguuauuaucacuauaugugucagcuucauugucauacuuacuauauucggauauauugcuaaaauuuucacgaacagaaauaacugcaccaauaaugccauuggguugugcaaacgcaucaaauguucaggcugugaaccguucugcaacaaaaggggugacacuucuucucccagaaccggaguggacguacccucguuuaucuugcccgggcucaaccuuucagaaagcacuccuaauuagcccccauagauucggagaaaccaaaggaaacucagcucccuugauaauaagggaaccuuuuauugcuuguggaccaaaggaaugcaaacauuuugcucuaacccauuaugcagcucaaccagggggauacuacaauggaacaagagaagacagaaacaagcugaggcaucuaauuucagucaaauugggcaaaaucccaacaguagaaaacucuauuuuccacauggcagcuuggagcggguccgcaugccaugaugguagagaauggacuuauaucggaguugauggcccagacaguaaugcauugcucaaaauaaaauauggagaagcauauacugacacauaccauuccuaugcaaaaaacauccuaaggacacaagaaagugccugcaauugcaucgggggagauuguuaucuuaugauaacugauggcccagcuucagggauuagugaaugcagauuccuuaagauucgagaaggccgaauaauaaaagaaauauuuccaacaggaagaguaaaacauacugaggaaugcacaugcggauuugccagcaacaaaaccauagaaugugccuguagagauaacaguuacacagcaaaaagacccuuugucaaauuaaauguggagacugauacagcggaaauaagauugaugugcacagagacuuauuuggacacccccagaccaaaugauggaagcauaacagggccuugcgaaucuaauggggacaaagggaguggaggcaucaagggaggauuuguucaccaaagaauggcauccaagauuggaaggugguacucucgaacgaugucuaaaacuaaaagaauggggaugggacuguauguaaaguaugauggagacccauggacugacagugaagcccuugcucuuaguggaguaaugguuucaauggaagaaccugguugguauuccuuuggcuucgaaauaaaagauaagaaaugugauguccccuguauugggauagaaaugguacaugauggugggaaaacgacuuggcacucagcagcaacagccauuuacuguuuaaugggcucaggacaauugcugugggacacugucacagguguuaauaugacucuguaa

SEQ ID NO: 60909 - RNA, 1401 nt, Artificial Sequence
  derived and/or modified CDS sequence (wt) from neuraminidase__InfluenzaB__AEQ49691
augcuaccuucaacuauacaaacguuaacccuauuucucacaucagggggaguauuauuaucacuauaugugucagcuuuauuaucauacuuacuauauucggauauauugcuaaaauucucaccaacagaaauaacugcaccaacaaugucauuggauugugcaaacgcaucaaauguucaggcugugaaccguucugcaacaaaaggggugacauuucuucucccagaaccggaguggacauacccgcguuuaucuugcccgggcucaaccuuucagaaagcacuccuaauuagcccucauagauucggagaaaccaaaggaaacucagcucccuugauaauaagggaaccuuucauugcuuguggaccaaaugaaugcaaacacuuugcucuaacccauuaugcagcccaaccagggggauacuacaauggaacaagaggagacagaaacaagcugaggcaucuaauuucagucaaauugggcaaaaucccaacaguagaaaacuccauuuuccacauggcagcauggagcgggucugcgugccaugaugguaaggaauggacauauaucggaguugauggcccugacaaugaugcauugcucaaaguaaaauauggagaagcauauacugacacauaccauuccuaugcaaacaaaauccuaagaacacaagaaagugccugcaauugcaucgggggaaauuguuaucuuaugauaacugauggcucagcuucagguguuagugaaugcagauuucuuaagauucgagagggccgaauaauaaaagaaauauuuccaacaggaagaguaaaacauacugaggaaugcacaugcggauuugccagcaauaaaaccauagaaugugccuguagagauaacaguuacacagcaaaaagaccuuuugucaaauugaacguggagacugauacagcagaaauaagauugaugugcacagauacuuauuuggacacccccagaccagaugauggaagcauaacaggcccuugugaaucuaauggggacagagggaguggaggcaucaagggaggauuuguucaucaaagaauggaauccaagauuggaaggugguacucucgaacgaugucuaagacugaaaggauggggaugggacuguaugucaaguaugauggagacccaugggcugacagugaugcccuagcuuuuaguggaguaaugguuucaaugaaagaaccugguugguacuccuuuggcuucgaaauaaaagauaagaaaugcgauguccccuguauugggauagagaugguacaugaugguggaaaagagacuuggcacucagcagcaacagccauuuacuguuuaaugggcucaggacagcugcugugggacacugucacaggcguugacauggcucuguaa

SEQ ID NO: 60910 - RNA, 1401 nt, Artificial Sequence
  derived and/or modified CDS sequence (wt) from neuraminidase__InfluenzaB__AEQ49692
augcuaccuucaacuauacaaacguuaacccuauuucucacaucagggggaguauuauuaucacuauaugugucagcuucauuaucauacuuacuauauucggauauauugcuaaaauucucaccaacagaaacaacugcaccaacaaugucauuggauugugcaaacgcaucaaauguucaggcugugaaccguucugcaacaaaaggggugacauuucuucucccagaaccggaguggacauacccgcguuuaucuugcccgggcucaaccuuucagaaagcacuccuaauuagcccucauagauucggagaaaccaaaggaaacucagcucccuugauaauaagggaaccuuuuauugcuuguggaccaaaugaaugcaaacacuuugcucuaacccauuaugcagcccaaccagggggauacuacaauggaacaagaggagacagaaacaagcugaggcaucuaauuucagucaaauuaggcaaaaucccaacaguagaaaacuccauuuuccacauggcagcauggagcggguccgcgugccaugaugguaaagaauggacauauaucggaguugauggcccugacaaugaugcauugcucaaaguaaaauauggagaagcauauacugacacauaccauuccuaugcaaacaaaauccuaagaacacaagaaagugccuguaauugcaucgggggaaauuguuaucuuaugauaacugauggcucagcuucagguguuagugaaugcagauuucuuaagauucgagagggccgaauaauaaaagaaauauuuccaacaggaagaguaaaacacacugaggaaugcacaugcggauuugccagcaauaaaaccauagaaugugccuguagagauaacaguuacacagcaaaaagaccuuuugucaaauuaaacguggagacugauacagcagaaauaagauugaugugcacagauacuuauuuggacacccccagaccagaugauggaagcauaacaggcccuugugaaucuaauggggacaaagggaguggaggcaucaagggaggauuuguucaucaaagaauggaauccaagauuggaaggugguacucucgaacgaugucuaagacugaaaggauggggaugggacuguaugucaaguaugauggagacccaugggcugacagugaugcccuagcuuuuaguggaguaaugguuucaaugaaagaaccugguugguacuccuuuggcuucgaaauaaaagauaagaaaugcgauguccccuguauugggauagagaugguacaugaugguggaaaagagacuuggcacucagcagcaacagccauuuacuguuuaaugggcucaggacagcugcugugggacacugucacagguguugacauggcucuguaa

SEQ ID NO: 60911 - RNA, 1401 nt, Artificial Sequence
  derived and/or modified CDS sequence (wt) from neuraminidase__InfluenzaB__AEQ49693
augcuaccuucaacuauacaaacguuaacccuauuucucacaucagggggaguauuauuaucacuauaugugucagcuucauuaucauacuuacuauauucggauauauugcuaaaauucucaccaacagaaauaacugcaccaacaaugccauuggauugugcaaacgcaucaaauguucaggcugugaaccguucugcaacaaaaggggugacacuucuucucccagaaccagaguggacauacccgcguuuaucuugcccgggcucaaccuuucagaaagcacuccuaauuagcccucauagauucggagaaaccaaaggaaacucagcucccuugauaauaagggaaccuuuuauugcuuguggaccaaaugaaugcaaacacuuugcucuaacccauuaugcagcccaaccagggggauacuacaauggaacaagaggagacagaaacaagcugaggcaucuaauuucagucaaauugggcaaaaucccaacaguagaaaacuccauuuuccacauggcagcauggagcggguccgcgugccaugaugguaaggaauggacauauaucggaguugauggcccugacaauaaugcauugcucaaaguaaaauauggagaagcauauacugacacauaccauuccuaugcaaacaaaauccuaagaacacaagaaagugccugcaauugcaucgggggaaauuguuaucuuaugauaacugauggcucagcuucagguguuagugaaugcagauuucuuaagauucgagagggccgaauaauaaaagaaauauuuccaacaggaagaguaaaacacacugaggaaugcacaugcggauuugccagcaauagaaccauagaaugugccuguagagauaacaguuacacagcaaaaagaccuuuugucaaauuaaacguggagacugauacagcagaaauaagauugaugugcacagauacuuauuuggacacccccagaccaaaugauggaagcauaacaggcccuugugaaucugauggggacaaggggaguggaggcaucaagggaggauuuguucaucaaagaauggaauccaagauuggaaggugguacucucgaacgaugucuaaaacugaaaggauggggaugggacuguaugucaaguaugauggagacccaugggcugacagugaugcccuagcuuuuaguggaguaaugguuucaaugaaagaaccugguugguacuccuuuggcuucgaaauaaaagauaagaaaugcgauguccccuguauugggauagagaugguacaugaugguggaaaagagacuuggcacucagcagcaacagccauuuacuguuuaaugggcucaggacagcugcugugggacacugucacagguguugacauggcucuguaa

SEQ ID NO: 60912 - RNA, 1401 nt, Artificial Sequence
  derived and/or modified CDS sequence (wt) from neuraminidase__InfluenzaB__AEQ49695
augcuaccuucaacuauacaaacguuaacccuauuucucacaucagggggaguauuauuaucacuauaugugucagcuucauuaucauacuuacuauauucggauauauugcuaaaauucucaccaacagaaauaacugcaccaacaaugccauuggauugugcaaacgcaucaaauguucaggcugugaaccguucugcaacaaaaggggugacacuucuucucccagaaccagaguggacauacccgcguuuaucuugcccgggcucaaccuuucagaaagcacuccuaauuagcccucauagauucggagaaaccaaaggaaacucagcucccuugauaauaagggaaccuuuuauugcuuguggaccaaaugaaugcaaacacuuugcucuaacccauuaugcagcccaaccagggggauacuacaauggaacaagaggagacagaaacaagcugaggcaucuaauuucagucaaauugggcaaaaucccaacaguagaaaacuccauuuuccacauggcagcauggagcggguccgcgugccaugaugguaaggaauggacauauaucggaguugauggcccugacaauaaugcauugcucaaaguaaaauauggagaagcauauacugacacauaccauuccuaugcaaacaaaauccuaagaacacaagaaagugccugcaauugcaucgggggaaauuguuaucuuaugauaacugauggcucagcuucagguguuagugaaugcagauuucuuaagauucgagagggccgaauaauaaaagaaauauuuccaacaggaagaguaaaacacacugaggaaugcacaugcggauuugccagcaauaaaaccauagaaugugccuguagagauaacaguuacacagcaaaaagaccuuuugucaaauuaaacguggagacugauacagcagaaauaagauugaugugcacagauacuuauuuggacacccccagaccaaaugauggaagcauaacaggcccuugugaaucugauggggacaaagggaguggaggcaucaagggaggauuuguucaucaaagaauggaauccaagauuggaaggugguacucucgaacgaugucuaaaacugaaaggauggggaugggacuguaugucaaguaugauggagacccaugggcugacagugaugcccuagcuuuuaguggaguaaugguuucaaugaaagaaccugguugguacuccuuuggcuucgaaauaaaagauaagaaaugcgauguccccuguauugggauagagaugguacaugaugguggaaaagagacuuggcacucagcagcaacagccauuuacuguuuaaugggcucaggacagcugcugugggacacugucacagguguugacauggcucuguaa

SEQ ID NO: 60913 - RNA, 1401 nt, Artificial Sequence
  derived and/or modified CDS sequence (wt) from neuraminidase__InfluenzaB__AEQ49697
augcuaccuucaacuauacaaacguuaacccuauuucucacaucagggggaguauuauuaucacuauaugugucagcuucauuaucauacuuacuauauucggauauauugcuaaaauucucaccaacagaaauaacugcaccaacaaugucauuggauugugcaaacgcaucaaauguucaggcugugaaccguucugcaacaaaaggggugacauuucuucucccagaaccggaguggacauacccgcguuuaucuugcccgggcucaaccuuucagaaagcacuccuaauuagcccucacagauucggagaaaccaaaggaaacucagcucccuugauaauaagggaaccuuuuauugcuuguggaccaaaugaaugcaaacacuuugcucuaacccauuaugcagcccaaccagggggauacuacaauggaacaagaggagacagaaacaagcugaggcaucuaauuucagucaaauugggcaaaaucccaacaguagaaaacuccauuuuccacauggcagcauggagcggguccgcgugccaugaugguaaggaauggacguauaucggaguugauggcccugacaaugaugcauugcucaaaguaaaauauggagaagcauauacugacacauaccauuccuaugcaaacaaaauccuaagaacacaagaaagugccugcaauugcaucgggggaaauuguuaucuuaugauaacugauggcucagcuucagguguuagugaaugcagauuucucaagauucgagagggccgaauaauaaaagagauauuuccaacgggaagaguaaaacacacugaggaaugcacaugcggauuugccagcaauaaaaccauagaaugugccuguagagauaacaguuacacagcaaaaagaccuuuugucaaauuaaacguggagacugauacagcagaaauaagauugaugugcacagauacuuauuuggacacccccagaccagaugauggaagcauaacaggcccuugugaaucuaauggggacaaagggaguggaggcaucaagggaggauuuguucaucaaagaauggaauccaagauuggaaggugguacucucgaacgaugucuaagacugaaaggauggggaugggacuguaugucaaguaugauggagacccaugggcugacagugaugcccuagcuuuuaguggaguaaugguuucaaugaaagaaccuggcugguacuccuuuggcuucgaaauaaaagauaagaaaugcgauguccccuguauugggauagagaugguacaugaugguggaaaagagacuuggcacucagcagcaacagccauuuacuguuuaaugggcucaggacagcugcugugggacacugucacagguguugacauggcucuguaa

SEQ ID NO: 60914 - RNA, 1401 nt, Artificial Sequence; identical to SEQ ID NO: 60913
  derived and/or modified CDS sequence (wt) from neuraminidase__InfluenzaB__AEQ49698

SEQ ID NO: 60915 - RNA, 1401 nt, Artificial Sequence; identical to SEQ ID NO: 60913
  derived and/or modified CDS sequence (wt) from neuraminidase__InfluenzaB__AEQ49699

SEQ ID NO: 60916 - RNA, 1401 nt, Artificial Sequence; identical to SEQ ID NO: 60913
  derived and/or modified CDS sequence (wt) from neuraminidase__InfluenzaB__AEQ49700

SEQ ID NO: 60917 - RNA, 1401 nt, Artificial Sequence; identical to SEQ ID NO: 60910
  derived and/or modified CDS sequence (wt) from neuraminidase__InfluenzaB__AEQ49701

SEQ ID NO: 60918 - RNA, 1401 nt, Artificial Sequence; identical to SEQ ID NO: 60913
  derived and/or modified CDS sequence (wt) from neuraminidase__InfluenzaB__AEQ49702

SEQ ID NO: 60919 - RNA, 1401 nt, Artificial Sequence; identical to SEQ ID NO: 60910
  derived and/or modified CDS sequence (wt) from neuraminidase__InfluenzaB__AEQ49703

SEQ ID NO: 60920 - RNA, 1401 nt, Artificial Sequence; identical to SEQ ID NO: 60913
  derived and/or modified CDS sequence (wt) from neuraminidase__InfluenzaB__AEQ49705

SEQ ID NO: 60921 - RNA, 1401 nt, Artificial Sequence
  derived and/or modified CDS sequence (wt) from neuraminidase__InfluenzaB__AEQ49706
augcuaccuucaacuauacaaauguuaacccuauuucucacauuagggggaguauuauuaucacuauaugugucagcuucauugucauacuuacuauauuuggauauauugcuaaaauucccaccaacggaaauuacugcaccaacaaugccauuagauugugcaaacgcaucaaauguucaggcugugaaucguucugcaacaaaaggggugacauuucuucucccagaaccggaguggacauacccgcguuuaucuugcccgggaucaaccuuucagaaagcacuccuaauuagcccucauagauucggagaaaccaaaggaaacucagcucccuugauaauaagggaaccuuuuauugcuuguggaccaaaggaaugcaaacacuuugcucuaacccauuaugcagcccaaccagggggauacuacaauggaacaagaggagacagaaacaagcugaggcaucuaauuucagucaaauugggcaaaaucccaacaguagaaaacuccauuuuccacauggcagcauggaguggguccgcaugccaugaugguaaggaauggacauauaucgggguugauggcccugacaauaaugcauugcucaaaauaaaauauggagaagcauuuacugacacauaccauuccuaugcaaacaacauccuaagaacacaagaaagugccugcaauugcaucgggggaaauuguuaucuuaugauaacugauggcucagcuucagguguuagugaaugcagauuucuuaagauucgagaaggccgaauaauaaaagaaauauuuccaacaggaagaguaaaacauacugaagaaugcacaugcggauuugcuagcaauaaaaccauagaaugugcaugcagagauaacaguuacacagcaaaaagacccuuugucaaauuaaacguggagacugauacagcagaaauaagauugaugugcacagauacuuauuuggacacccccagaccagaugauggaagcauaacagggccuugugaaucuaauggggacaaagggaguggaggcaucaagggaggauuuguucaucaaagaauggcauccaagauuggaaggugguacucucgaacaauguccaaaacugaaagaauggggaugggacuguaugucaaguaugauggagacccaugggcugacagugaugcccuugcuuuuagugggguaaugguuucaaugaaagaaccugguugguacuccuuuggcuucgaaauaaaagauaagaaaugugaugucccuuguauugggauagagaugguacaugaugguggaaaagagacuuggcacucagcagcuacggccauuuacuguuuaaugggcucaggacagcugcugugggacacugucacagguguuaauauggcucuguaa

SEQ ID NO: 60922 - RNA, 1401 nt, Artificial Sequence; identical to SEQ ID NO: 60913
  derived and/or modified CDS sequence (wt) from neuraminidase__InfluenzaB__AEQ49707

SEQ ID NO: 60923 - RNA, 1401 nt, Artificial Sequence; identical to SEQ ID NO: 60913
  derived and/or modified CDS sequence (wt) from neuraminidase__InfluenzaB__AEQ49708

SEQ ID NO: 60924 - RNA, 1401 nt, Artificial Sequence
  derived and/or modified CDS sequence (wt) from neuraminidase__InfluenzaB__AEQ49709
augcuaccuucaacuauacaaacguuaacccuauuucucacaucagggggaguauuauuaucacuauaugugucagcuuuauuaucauacuuacuauauucggauauauugcuaaaauucucaccaacagaaauaacugcaccaacaaugucauuggauugugcaaacgcaucaaauguucaggcugugaaccguucugcaacaaaaggggugacauuucuucucccagaaccggaguggacauacccgcguuuaucuugcccgggcucaaccuuucagaaagcacuccuaauuagcccucauagauucggagaaaccaaaggaaacucagcucccuugauaauaagggaaccuuuuauugcuuguggaccaaaugaaugcaaacacuuugcucuaacccauuaugcagcccaaccagggggauacuacaauggaacaagaggagacagaaacaagcugaggcaucuaauuucagucaaauugggcaaaaucccaacaguagaaaacuccauuuuccacauggcagcauggagcggguccgcgugccaugaugguaaggaauggacauauaucggaguugauggcccugacaaugaugcauugcucaaaguaaaauauggagaagcauauacugacacauaccauuccuaugcaaacaaaauccuaagaacacaagaaagugccugcaauugcaucgggggaaauuguuaucuuaugauaacugauggaucagcuucagguguuagugaaugcagauuucuuaagauucgagagggccgaauaauaaaagaaauauuuccaacaggaagaguaaaacacacugaggaaugcacaugcggauuugccagcaauaaaaccauagaaugugcuuguagagauaacaguuacacagcaaaaagaccuuuugucaaauuaaacguggagacugauacagcagaaauaagauugaugugcacagauacuuauuuggacacccccagaccagaugauggaagcauaacaggcccuugugaaucuaauggggacaaagggaguggaggcaucaagggaggauuuguucaucaaagaauggaauccaagauuggaaggugguacucucgaacgaugucuaagacugaaaggauggggaugggacuguaugucaaguaugauggagacccaugggcugacagugaugcccuagcuuuuaguggaguaaugguuucaaugaaagaaccugguugguacuccuuuggcuucgaaauaaaagauaagaaaugcgauguccccuguauugggauagagaugguacaugaugguggaaaagagacuuggcacucagcagcaacagccauuuacuguuugaugggcucaggacaucugcugugggacacugucacaggcguugacauggcucuguaa

SEQ ID NO: 60925 - RNA, 1401 nt, Artificial Sequence; identical to SEQ ID NO: 60889
  derived and/or modified CDS sequence (wt) from neuraminidase__InfluenzaB__AEQ49710

SEQ ID NO: 60926 - RNA, 1401 nt, Artificial Sequence
  derived and/or modified CDS sequence (wt) from neuraminidase__InfluenzaB__AER27042
augcuaccuucaacuauacaaacguuaacccuauuucucacaucagggggaguauuauuaucacuauaugugucagcuuuauuaucauacuuacuauauucggauauauugcuaaaauucucaccaacagaaauaauugcaccaacaaugucauuggauugugcaaacgcaucaaauguucaggcugugaaccguucugcaacaaaaggggugacauuucuucucccagaaccggaguggacauacccgcgguuaucuugcccgggcucaaccuuucagaaagcacuccuaauuagcccucauagauucggagaaaccaaaggaaacucagcucccuugauaauaagggaaccuuuuauugcuuguggaccaaaugaaugcaaacacuuugcucuaacccauuaugcagcccaaccagggggauacuacaauggaacaagaggagacagaaacaagcugaggcaucuaauuucagucaaauuggguaaaaucccaacaguagaaaacuccauuuuccacauggcagcauggagcggguccgcgugccaugaugguaaggaauggacauauaucggaguugauggcccugacaaugaugcauugcucaaaguaaaauauggagaagcauauacugacacauaccauuccuaugcaaacaaaauacuaagaacacaagaaagugccugcaauugcaucgggggaaauuguuaucuuaugauaacugauggcucagcuucagguguuagugaaugcagauuucuuaagauucgagagggccgaauaauaaaagaaauauuuccaacaggaagaguaaaacacacugaggaaugcacaugcggauuugccagcaauaaaaccauagaaugugccuguagagauaacaguuacacagcaaaaagaccuuuugucaaauuaaacguggagacugauacagcagaaauaagauugaugugcacagauacuuauuuggacacccccagaccagaugauggaagcauaacaggcccuugugaaucuaauggggacaaagggaguggaggcaucaagggaggauuuguucaucaaagaauggaauccaagauuggaaggugguacucucgaacgaugucuaagacugaaaggauggggaugggacuguaugucaaguauaauggagacccaugggcugacagugaugcccuagcuuuuaguggaguaaugguuucaaugaaagaaccugguugguacuccuuuggcuucgaaauaaaagauaagaaaugcgauguccccuguauugggauagagaugguacaugaugguggaaaagagacuuggcacucagcagcaacagccauuuacuguuuaaugggcucaggacagcugcugugggacacugucacaggcguugacauggcucuguaa

SEQ ID NO: 60927 - RNA, 1401 nt, Artificial Sequence
  derived and/or modified CDS sequence (wt) from neuraminidase__InfluenzaB__AER27053
augcuaccuucaacuauacaaacguuaacccuauuucucacaucagggggaguauuauuaucacuauaugugucagcuucauuaucauacuuacuauauucggauauauugcuaaaauucucaccaacagaaauaacugcaccaacaaugccauuggauugugcaaacgcaucaaauguucaggcugugaaucguucugcaacaaaaggggugacacuucuucucccagaaccggaguggacauacccgcguuuaucuugcccgggcucaaccuuucagaaagcacuccuaauuagcccucauagauucggagaaaccaaaggaaacucagcucccuugauaauaagggaaccuuuuauugcuuguggaccaaaugaaugcaaacacuuugcucuaacccauuaugcagcucaaccagggggauacuacaauggaacaagaggagacagaaacaagcugaggcaucuaauuucagucaaauugggcaaaaucccaacaguagaaaacuccauuuuccacauggcagcauggagcggguccgcgugccaugaugguaaggaauggacauauaucggaguugauggcccugacaauaaugcauugcucaaaguaaaauauggagaagcauauacugacacauaccauuccuaugcaaacaaaauccuaagaacacaagaaagugccugcaauugcaucgggggaaauuguuaucuuaugauaacugauggcucagcuucagguguuagugaaugcagauuucuuaagauucgagagggccgaauaauaaaagaaauauuuccaacaggaagaguaaaacacacugaggaaugcacaugcggauuugccagcaauaaaaccauagaaugugccuguagagauaacaguuacacagcaaaaagaccuuuugucaaauuaaacguggagacugauacagcagaaauaagauugaugugcacagauacuuauuuggacacccccagaccaaaugauggaagcauaacaggcccuugugaaucugauggggacaaagggaguggaggcaucaagggaggauuuguucaucaaagaauggaauccaagauuggaaggugguacucucgaacgaugucuaaaacugaaaggauggggaugggacuguaugucaaguaugauggagacccaugggcugacagugaugcccuagcuuuuaguggaguaaugguuucaaugaaagaaccugguugguacuccuuuggcuucgaaauaaaagauaagaaaugcgauguccccuguauugggauagagaugguacaugaugguggaaaagagacuuggcacucagcagcaacagccauuuacuguuuaaugggcucaggacagcugcugugggacacugucacagguguugacauggcucuguaa

SEQ ID NO: 60928 - RNA, 1401 nt, Artificial Sequence; identical to SEQ ID NO: 60884
  derived and/or modified CDS sequence (wt) from neuraminidase__InfluenzaB__AER27064

SEQ ID NO: 60929 - RNA, 1401 nt, Artificial Sequence; identical to SEQ ID NO: 60888
  derived and/or modified CDS sequence (wt) from neuraminidase__InfluenzaB__AET43128

SEQ ID NO: 60930 - RNA, 1401 nt, Artificial Sequence; identical to SEQ ID NO: 60888
  derived and/or modified CDS sequence (wt) from neuraminidase__InfluenzaB__AET43139

SEQ ID NO: 60931 - RNA, 1401 nt, Artificial Sequence
  derived and/or modified CDS sequence (wt) from neuraminidase__InfluenzaB__AET43150
augcuaccuucaacuauacaaacguuaacccuauuucucacaucagggggaguauuauuaucacuauaugugucagcuucauuaucauacuuacuauauucggauauauugcuaaaauucucaccaaaagaaauaacugcaccaacaaugccauuggauugugcaaacgcaucaaauguucaggcugugaaccauucugcaacaaaaggggugacacuucuucucccagaaccggaguggacauacccgcguuuaucuugcccgggcucaaccuuucagaaagcacuccuaauuagcccucauagauucggagaaacuaaaggaaacucagcucccuugauaauaagggaaccuuuuauugcuugcggaccaaaugaaugcaaacacuuugcucuaacccacuaugcagcccaaccagggggauacuacaauggaacaagaggagacagaaacaagcugaggcaucuaauuucagucaaauugggcaaaaucccaacaguagaaaacuccauuuuccacauggcagcauggagcggguccgcgugccaugaugguaaggaauggacauauaucggaguugauggcccugacaauaaugcauugcucaaaguaaaauauggagaagcauauacugacacauaccauuccuaugcaaacaaaauccuaagaacacaagaaagugccugcaauugcaucgggggaaauuguuaucuuaugauaacugauggcucagcuucagguguuagugagugcagauuucuuaagauucgagagggccgaauaauaaaagaaauauuuccaacgggaagaguaaaacacacugaggaaugcacaugcggauuugccagcaauaaaaccauagaaugugccuguagagauaacaguuacacagcaaaaagaccuuuugucaaauuaaacguggagacugauacagcagaaauaagacugaugugcacagauacuuauuuggacacccccagaccagaugauggaagcauaacaggcccuugugaaucuaauggggacaaagggaguggaggcaucaagggaggauuuguucaucaaagaauggaauccaagauuggaaggugguacucucgaacgaugucuaaaacugaaaggauggggaugggacuguaugucaaguaugauggagacccaugggcugacagugaugcccuaacuuuuaguggaguaaugguuucaaugaaagaaccugguugguacuccuuuggcuucgaaauaaaagauaagaaaugcgauguccccuguauugggauagagauggugcaugaugguggaaaagagacuuggcacucagcagcaacagccauuuacuguuuaaugggcucaggacagcugcugugggacacugucacagguguugacauggcucuguaa

SEQ ID NO: 60932 - RNA, 1401 nt, Artificial Sequence
  derived and/or modified CDS sequence (wt) from neuraminidase__InfluenzaB__AET43161
augcuaccuucaacuauacaaacguuaacccuauuucucacaucagggggaguauuauuaucacuauaugugucagcuucauuaucauacuuacuauauucggauauauugcuaaaauucucaccaaaagaaauaacugcaccaacaaugccauuggauugugcaaacgcaucaaauguucaggcugugaaccauucugcaacaaaaggggugacacuucuucucccagaaccggaguggacauacccgcguuuaucuugcccgggcucaaccuuucagaaagcacuccuaauuagcccucauagauucggagaaaccaaaggaaacucagcucccuugauaauaagggaaccuuuuauugcuugcggaccaaaugaaugcaaacacuuugcucuaacccacuaugcagcccaaccagggggauacuacaauggaacaagaggagacagaaacaagcugaggcaucuaauuucagucaaauugggcaaaaucccaacaguagaaaacuccauuuuccacauggcagcauggagcggguccgcgugccaugaugguaaggaauggacauauaucggaguugauggcccugacaauaaugcauugcucaaaguaaaauauggagaagcauauacugacacauaccauuccuaugcaaacaaaauccuaagaacacaagaaagugccugcaauugcaucgggggaaauuguuaucuuaugauaacugauggcucagcuucagguguuagugaaugcagauuucuuaagauucgagagggccgaauaauaaaagaaauauuuccaacgggaagaguaaaacacacugaggaaugcacaugcggauuugccagcaauaaaaccauagaaugugccuguagagauaacaguuacacagcaaaaagaccuuuugucaaauuaaacguggagacugauacagcagaaauaagacugaugugcacagauacuuauuuggacacccccagaccagaugauggaagcauaacaggcccuugugaaucuaauggggacaaagggaguggaggcaucaagggaggauuuguucaucaaagaauggaauccaagauuggaaggugguacucucgaacgaugucuaaaacugaaaggauggggaugggacuguaugucaaguaugauggagacccaugggcugacagugaugcccuagcuuuuaguggaguaaugguuucaaugaaagaaccugguugguacuccuuuggcuucgaaauaaaagauaaaaaaugcgauguccccuguauugggauagagauggugcaugaugguggaaaagagacuuggcacucagcagcaacagccauuuacuguuuaaugggcucaggacagcugcugugggacacugucacagguguugacauggcucuguaa

SEQ ID NO: 60933 - RNA, 1401 nt, Artificial Sequence; identical to SEQ ID NO: 60889
  derived and/or modified CDS sequence (wt) from neuraminidase__InfluenzaB__AET43172

SEQ ID NO: 60934 - RNA, 1401 nt, Artificial Sequence; identical to SEQ ID NO: 60888
  derived and/or modified CDS sequence (wt) from neuraminidase__InfluenzaB__AET43183

SEQ ID NO: 60935 - RNA, 1401 nt, Artificial Sequence
  derived and/or modified CDS sequence (wt) from neuraminidase__InfluenzaB__AET43194
augcuaccuucaacuauacaaacauuaacccuauuucucacaucagggggaguauuauuaucacuauaugugucagcuucauuaucauacuuacuauauucggauauauugcuaaaauucucaccaaaagaaauaacugcaccaacaaugccauuggauugugcaaacgcaucaaauguucaggcugugaaccauucugcaacaaaaggggugacacuucuucucccagaaccggaguggacauacccgcguuuaucuugcccgggcucaaccuuucagaaagcacuccuaauuagcccucauagauucggagaaaccaaaggaaacucagcucccuugauaauaagggaaccuuuuauugcuugcggaccaaaugaaugcaaacacuuugcucuaacccacuaugcagcccaaccagggggauacuacaauggaacaagaggagacagaaacaagcugaggcaucuaauuucagucaaauugggcaaaaucccaacaguagaaaacuccauuuuccacauggcagcauggagcggguccgcgugccaugaugguaaggaauggacauauaucggaguugauggcccugacaauaaugcauugcucaaaguaaaauauggagaagcauauacugacacauaccauuccuaugcaaacaaaauccuaagaacacaagaaagugccugcaauugcaucgggggaaauuguuaucuuaugauaacugauggcucagcuucagguguuagugaaugcagauuucuuaagauucgagagggccgaauaauaaaagaaauauuuccaacgggaagaguaaaacacacugaggaaugcacaugcggauuugccagcaauaaaaccauagaaugugccuguagagauaacaguuacacagcaaaaagaccuuuugucaaauuaaacguggagacugauacagcagaaauaagacugaugugcacagauacuuauuuggacacccccagaccagaugauggaagcauaacaggcccuugugaaucuaauggggacaaagggaguggaggcaucaagggaggauuuguucaucaaagaauggaauccaagauuggaaggugguacucucgaacgaugucuaaaacugaaaggauggggaugggacuguaugucaaguaugauggagacccaugggcugacagugaugcccuagcuuuuaguggaguaaugguuucaaugaaagaaccugguugguacuccuuuggcuucgaaauaaaagauaagaaaugcgauguccccuguauugggauagagauggugcaugaugguggaaaagagacuuggcacucagcagcaacagccauuuacuguuuaaugggcucaggacagcugcugugggacacugucacagguguugacauggcucuguaa

SEQ ID NO: 60936 - RNA, 1401 nt, Artificial Sequence; identical to SEQ ID NO: 60888
  derived and/or modified CDS sequence (wt) from neuraminidase__InfluenzaB__AET43216

SEQ ID NO: 60937 - RNA, 1401 nt, Artificial Sequence; identical to SEQ ID NO: 60888
  derived and/or modified CDS sequence (wt) from neuraminidase__InfluenzaB__AET43227

SEQ ID NO: 60938 - RNA, 1401 nt, Artificial Sequence
  derived and/or modified CDS sequence (wt) from neuraminidase__InfluenzaB__AET50947
augcuaccuucaacuauacaaacguuaacccuauuucucacaucagggggaguauuauuaucacuauaugugucagcuucauuaucauacuuacuauauucggauauauugcuaaaauucucaccaaaagaaauaacugcaccaacaaugccauuggauugugcaaacgcaucaaauguucaggcugugaaccauucugcaacaaaaggggugacacuucuucucccagaaccggaguggacauacccgcguuuaucuugcccgggcucaaccuuucagaaagcacuccuaauuagcccucauagauucggagaaaccaaaggaaacucagcucccuugauaauaagggaaccuuuuauugcuugcggaccaaaugaaugcaaacacuuugcucuaacccauuaugcagcccaaccagggggauacuacaauggaacaagaggagacagaaacaagcugaggcaucuaauuucagucaaauugggcaaaaucccaacaguagaaaacuccauuuuccacauggcagcauggagcggguccgcgugccaugaugguaaggaauggacauauaucggaguugauggcccugacaauaaugcauugcucaaaguaaaauauggagaagcauauacugacacauaccauuccuaugcaaacaaaauccuaagaacacaagaaagugccugcaauugcaucgggggaaauuguuaucuuaugauaacugauggcucagcuucagguguuagugaaugcagauuucuuaagauucgagagggccgaauaauaaaagaaauauuuccaacgggaagaguaaaacacacugaggaaugcacaugcggauuugccagcaauaaaaccauagaaugugccuguagagauaacaguuacacagcaaaaagaccuuuugucaaauugaacguggagacugauacagcagaaauaagacugaugugcacagauacuuauuuggacacccccagaccagaugauggaagcauaacaggcccuugugaaucuaauggggacaaagggaguggaggcaucaagggaggauuuguucaucaaagaauggaauccaagauuggaaggugguacucucgaacgaugucuaaaacugaaaggauggggaugggacuguaugucaaguaugauggagacccaugggcugacagugaugcccuagcuuuuaguggaguaaugauuucaaugaaagaaccugguugguacuccuuuggcuucgaaauaaaagauaagaaaugcgauguccccuguauugggauagagauggugcaugaugguggaaaagagacuuggcacucagcagcaacagccauuuacuguuuaaugggcucaggacagcugcugugggacacugucacagguguugacauggcucuguaa

SEQ ID NO: 60939 - RNA, 1401 nt, Artificial Sequence
  derived and/or modified CDS sequence (wt) from neuraminidase__InfluenzaB__AET50958
augcuaccuucaacuauacaaacguuaacccuauuucucacaucagggggaguauuauuaucacuauaugugucagcuucauuaucauacuuacuauauucggauauauugcuaaaauucucaccaaaagaaauaacugcaccaacaaugccauuggauugugcaaacgcaucaaauguucaggcugugaaccauucugcaacaaaaggggugacacuucuucucccagaacuggaguggacauacccgcguuuaucuugcccgggcucaaccuuucagaaagcacuccuaauuagcccucauagauucggagaaaccaaaggaaacucagcucccuugauaauaagggaaccuuuuauugcuugcggaccaaaugaaugcaaacacuuugcucuaacccacuaugcagcccaaccagggggauacuacaauggaacaagaggagacagaaacaagcugaggcaucuaauuucagucaaauugggcaaaaucccaacaguagaaaacuccauuuuccacauggcagcauggagcggguccgcgugccaugaugguaaggaauggacauauaucggaguugauggcccugacaauaaugcauugcucaaaguaaaauauggagaagcauauacugacacauaccauuccuaugcaaacaaaauccuaagaacacaagaaagugccugcaauugcaucgggggaaauuguuaucuuaugauaacugauggcucagcuucagguguuagugaaugcagauuucuuaagauucgagagggccgaauaauaaaagaaauauuuccaacgggaagaguaaaacacacugaggaaugcacaugcggauuugccagcaauaaaaccauagaaugugccuguagagauaacaguuacacagcaaaaagaccuuuugucaaauuaaacguggagacugauacagcagaaauaagacugaugugcacagauacuuauuuggacacccccagaccagaugauggaagcauaacaggcccuugugaaucuaauggggacaaagggaguggaggcaucaagggaggauuuguucaucaaagaauggaauccaagauuggaaggugguacucucgaacgaugucuaaaacugaaaggauggggaugggacuguaugucaaguaugauggagacccaugggcugacagugaugcccuagcuuuuaguggaguaaugguuucaaugaaagaaccugguugguacuccuuuggcuucgaaauaaaagauaagaaaugcgauguccccuguauugggauagagauggugcaugaugguggaaaagagacuuggcacucagcagcaacagccauuuacuguuuaaugggcucaggacagcugcugugggacacugucacagguguugacauggcucuguaa

SEQ ID NO: 60940 - RNA, 1401 nt, Artificial Sequence
  derived and/or modified CDS sequence (wt) from neuraminidase__InfluenzaB__AET50969
augcuaccuucaacuauacaaacguuaacccuguuucucacaucagggggaguauuauuaucacuauaugugucagcuucauuaucauacuuacuauauucggauauauugcuaaaauucucaccaaaagaaauaacugcaccaacaaugccauuggauugugcaaacgcaucaaauguucaggcugugaaccauucugcaacaaaaggggugacacuucuucucccagaaccggaguggacauacccgcguuuaucuugcccgggcucaaccuuucagaaagcacuccuaauuagcccucauagauucggagaaaccaaaggaaacucagcucccuugauaauaagggaaccuuuuauugcuugcggaccaaaugaaugcaaacacuuugcucuaacccacuaugcagcccaaccagggggauacuacaauggaacaagaggagacagaaacaagcugaggcaucuaauuucagucaaauugggcaaaaucccaacaguagaaaacuccauuuuccacauggcagcauggagcggguccgcgugccaugaugguaaggaauggacauauaucggaguugauggcccugacaauaaugcauugcucaaaguaaaauauggagaagcauauacugacacauaccauuccuaugcaaacaaaauccuaagaacacaagaaagugccugcaauugcaucgggggaaauuguuaucuuaugauaacugauggcucagcuucagguguuagugaaugcagauuucuuaagauucgagagggccgaauaauaaaagaaauauuuccaacgggaagaguaaaacacacugaggaaugcacaugcggauuugccagcaauaaaaccauagaaugugccuguagagauaacaguuacacagcaaaaagaccuuuugucaaauuaaacguggagacugauacagcagaaauaagacugaugugcacagauacuuauuuggacacccccagaccagaugauggaagcauaacaggcccuugugaaucuaauggggacaaagggaguggaggcaucaagggaggauuuguucaucaaagaauggaauccaagauuggaaggugguacucucgaacgaugucuaaaacugaaaggauggggaugggacuguaugucaaguaugauggagacccaugggcugacagugaugcccuagcuuuuaguggaguaaugguuucaaugaaagaaccugguugguacuccuuuggcuucgaaauaaaagauaagaaaugcgauguccccuguauugggauagagauggugcaugaugguggaaaagagacuuggcacucagcagcaacagccauuuacuguuuaaugggcucaggacagcugcugugggacacugucacagguguugacauggcucuguaa

SEQ ID NO: 60941 - RNA, 1401 nt, Artificial Sequence; identical to SEQ ID NO: 60888
  derived and/or modified CDS sequence (wt) from neuraminidase__InfluenzaB__AET50980

SEQ ID NO: 60942 - RNA, 1401 nt, Artificial Sequence
  derived and/or modified CDS sequence (wt) from neuraminidase__InfluenzaB__AET74259
augcuaccuucaacuauacaaacguuaacccuauuucucacaucagggggaguauuauuaucacuauaugugucagcuucauuaucauacuuacuauauucggauauauugcuaaaauucucaccaaaagaaauaacugcaccaacaaugccauuggauugugcaaacgcaucaaauguucaggcugugaaccauucugcaacaaaaggggugacacuucuucucccagaaccggaguggacauacccgcguuuaucuugcccgggcucaaccuuucagaaagcacuccuaauuagcccucauagauucggagaaacuaaaggaaacucagcucccuugauaauaagggaaccuuuuauugcuugcggaccaaaugaaugcaaacacuuugcucuaacccacuaugcagcccaaccagggggauacuacaauggaacaagaggagacagaaacaagcugaggcaucuaauuucagucaaauugggcaaaaucccaacaguagaaaacuccauuuuccacauggcagcauggagcggguccgcgugccaugaugguaaggaauggacauauaucggaguugauggcccugacaauaaugcauugcucaaaguaaaauauggagaagcauauacugacacauaccauuccuaugcaaacaaaauccuaagaacacaagaaagugccugcaauugcaucgggggaaauuguuaucuuaugauaacugauggcucagcuucagguguuagugaaugcagauuucuuaagauucgagagggccgaauaauaaaagaaauauuuccaacgggaagaguaaaacacacugaggaaugcacaugcggauuugccagcaauaaaaccauagaaugugccuguagagauaacaguuacacagcaaaaagaccuuuugucaaauuaaacguggagacugauacagcagaaauaagacugaugugcacagauacuuauuuggacacccccagaccagaugauggaagcauaacaggcccuugugaaucuaauggggacaaagggaguggaggcaucaagggaggauuuguucaucaaagaauggaauccaagauuggaaggugguacucucgaacgaugucuaaaacugaaaggauggggaugggacuguaugucaaguaugauggagacccaugggcugacagugaugcccuagcuuuuaguggaguaaugguuucaaugaaagaaccugguugguacuccuuuggcuucgaaauaaaagauaagaaaugcgauguccccuguauugggauagagauggugcaugaugguggaaaagagacuuggcacucagcagcaacagccauuuacuguuuaaugggcucaggacagcugcugugggacacugucacagguguugacauggcucuguaa

SEQ ID NO: 60943 - RNA, 1401 nt, Artificial Sequence; identical to SEQ ID NO: 60888
  derived and/or modified CDS sequence (wt) from neuraminidase__InfluenzaB__AET74270

SEQ ID NO: 60944 - RNA, 1401 nt, Artificial Sequence; identical to SEQ ID NO: 60938
  derived and/or modified CDS sequence (wt) from neuraminidase__InfluenzaB__AET74281

SEQ ID NO: 60945 - RNA, 1401 nt, Artificial Sequence; identical to SEQ ID NO: 60942
  derived and/or modified CDS sequence (wt) from neuraminidase__InfluenzaB__AET74292

SEQ ID NO: 60946 - RNA, 1401 nt, Artificial Sequence; identical to SEQ ID NO: 60889
  derived and/or modified CDS sequence (wt) from neuraminidase__InfluenzaB__AET74303

SEQ ID NO: 60947 - RNA, 1401 nt, Artificial Sequence; identical to SEQ ID NO: 60888
  derived and/or modified CDS sequence (wt) from neuraminidase__InfluenzaB__AET74314

SEQ ID NO: 60948 - RNA, 1401 nt, Artificial Sequence; identical to SEQ ID NO: 60888
  derived and/or modified CDS sequence (wt) from neuraminidase__InfluenzaB__AET74333

SEQ ID NO: 60949 - RNA, 1401 nt, Artificial Sequence
  derived and/or modified CDS sequence (wt) from neuraminidase__InfluenzaB__AET74344
augcuaccuucaacuauacaaacguuaacccuauuucucacaucagggggaguauuauuaucgcuauaugugucagcuucauuaucauacuuacuauauucggauauauugcuaaaauucucaccaaaagaaauaacugcaccaacaaugccauuggauugugcaaacgcaucaaauguucaggcugugaaccauucugcaacaaaaggggugacacuucuucucccagaaccggaguggacauacccgcguuuaucuugcccgggcucaaccuuucagaaagcacuccuaauuagcccucauagauucggagaaaccaaaggaaacucagcucccuugauaauaagggaaccuuuuauugcuugcggaccaaaugaaugcaaacacuuugcucuaacccacuaugcagcccaaccagggggauacuacaauggaacaagaggagacagaaacaagcugaggcaucuaauuucagucaaauugggcaaaaucccaacaguagaaaacuccauuuuccacauggcagcauggagcggguccgcgugccaugaugguaaggaauggacauauaucggaguugauggcccugacaauaaugcauugcucaaaguaaaauauggagaagcauauacugacacauaccauuccuaugcaaacaaaauccuaagaacacaagaaagugccugcaauugcaucgggggaaauuguuaucuuaugauaacugauggcucagcuucagguguuagugaaugcagauuucuuaagauucgagagggccgaauaauaaaagaaauauuuccaacgggaagaguaaaacacacugaggaaugcacaugcggauuugccagcaauaaaaccauagaaugugccuguagagauaacaguuacacagcaaaaagaccuuuugucaaauuaaacguggaggcugauacagcagaaauaagacugaugugcacagauacuuauuuggacacccccagaccagaugauggaagcauaacaggcccuugugaaucuaauggggacaaagggaguggaggcaucaagggaggauuuguucaucaaagaauggaauccaagauuggaaggugguacucucgaacgaugucuaaaacugaaaggauggggaugggacuguaugucaaguaugauggagacccaugggcugacagugaugcccuagcuuuuaguggaguaaugguuucaaugaaagaaccugguugguacuccuuuggcuucgaaauaaaagauaagaaaugcgauguccccuguauugggauagagauggugcaugaugguggaaaagagacuuggcacucagcagcaacagccauuuacuguuuaaugggcucaggacagcugcugugggacacugucacagguguugacauggcucuguaa

SEQ ID NO: 60950 - RNA, 1401 nt, Artificial Sequence; identical to SEQ ID NO: 60942
  derived and/or modified CDS sequence (wt) from neuraminidase__InfluenzaB__AET74355

SEQ ID NO: 60951 - RNA, 1404 nt, Artificial Sequence
  derived and/or modified CDS sequence (wt) from neuraminidase__InfluenzaB__AEY75594
augcuaccuucaacuauacaaauguuaacccuauuucucacaucagggggaguacuauuaucacuauaugugucagcuucauuaucauacuuacuauauucggauauauugcuaaaauucucaccaacagaaauaacugcaccaacaaugccauuggauugugcaaacgcaucaaauguucaugcugugaaccguucugcaacaaaaggggugacauuucuucuucucccagaaccggaguggacauacccgcguuuaucuugcccgggcucaaccuuucagaaagcacuccuaauuagcccucauagauucggagaaaccaaaggaaacucagcucccuugauaauaagggaaccuuuuauugcuuguggaccaaaugaaugcaaacacuuugcucuaacccauuaugcagcccaaccagggggauacuacaauggaacaagaggagacagaaacaagcugaggcaucuaauuucagucaaauugggcaaaaucccaacaguagaaaacuccauuuuccacauggcagcauggagcggguccgcaugccaugaugguaaggaauggacauauaucggaguugaugguccugacaauaaugcauugcucaaaauaaaauauggagaagcauauacugacacauaucauuccuaugcaaacaacauccuaagaacacaagaaagugccugcaauugcaucgggggaaauuguuaucuuaugauaacugauggcucagcuucagguguuagugaaugcagauuucuuaagauucgagagggccgaauaauaaaagaaauauuuccaacaggaagaguaaagcauacugaggagugcacaugcggauuugccagcaauaaaaccauagaaugugccuguagagauaacaguuacacagcaaaaagacccuuugucaaauuaaacguggaaacugauacagcagaaauaagauugaugugcacagauacuuauuuggacacccccagaccagaugauggaagcauaacaggcccuugugaaucuaauggggacaaagggaguggaggcaccaagggaggauuuguucaucaaagaauggcauccaagauugggaggugguacucucgaacgaugucuaaaacugaaaggaaggggaugggacuguaugucaaguaugauggagacccauggacugacagugaugcccuugcuuuuaggggaguaauggucucaaugaaagaaccugguugguacuccuuuggcuucgaaauaaaagauaagaaaugcgauguccccuguauugggauagagaugguacaugaugguggaaaagagacuuggcacucagcagcaacagccauuuacuguuuaaugggcucaggacagcugcugugggacacagucacaggugucgacauggcucuauaa

SEQ ID NO: 60952 - RNA, 1401 nt, Artificial Sequence
  derived and/or modified CDS sequence (wt) from neuraminidase__InfluenzaB__AFA45223
augcuaccuucaacuauacaaacgcuaacccuauuucucacaucagggggaguguuauuaucacuauaugugucagcuuuauuaucauacuuacuauauucggauauauugccaaaauucucaccaacagaaauaacugcaccaacaaugucauuggauugugcaaacgcaucaaauguucaggcugugaaccguucugcaacaaaaggggugacauuucuucucucagaaccggaguggacauacccgcguuuaucuugcccgggcucaaccuuucagaaagcacuccuaauuagcccucauagauucggagaaaccaaaggaaacucagcucccuugauaauaagggaaccuuuuauugcuuguggaccaaaugaaugcaaacacuuugcucuaacccauuaugcagcccaaccagggggauacuacaauggaacaagaggagacagaaacaaacugaggcaucuaauuucagucaaauugggcaaaaucccaacaguagaaaacuccauuuuccacauggcagcauggagcggguccgcgugccaugaugguaaggaauggacauauaucggaguugauggcccugacaaugaugcauugcucaaaguaaaauauggagaagcauauacugacacauaccauuccuaugcaaacaaaauccuaagaacacaagaaagugccugcaauugcaucgggggaaauuguuaucuuaugauaacugauggcucagcuucagguguuagugaaugcagauuucuuaagauucgagagggccgaauaauaaaagaaauauuuccaacaggaagaguaaaacacacugaggaaugcacaugcggauuugccagcaauaaaaccauagaaugugccuguagagauaacaguuacacagcaaaaagaccuuuugucaaauuaaacguggagacugauacagcagaaauaagauugaugugcacagauacuuauuuggacacccccagaccagaugauggaagcauaacaggcccuugugaaucuaauggggacaaagggaguggaggcaucaagggaggauuuguucaucaaagaauggaauccaagauuggaaggugguacucucgaacgaugucuaagacugaaaggauggggaugggacuguaugucaaguaugauggagacccaugggcugacagugaugcccuagcuuuuaguggaguaaugguuucaaugaaagaaccugguugguacuccuuuggcuucgaaauaaaagauaagaaaugcgauguccccuguauugggauagagaugguacaugaugguggaaaagagacuuggcacucagcagcaacagccauuuacuguuuaaugggcucaggacagcugcugugggacacugucacaggcguugacauggcucuguaa

SEQ ID NO: 60953 - RNA, 1401 nt, Artificial Sequence
  derived and/or modified CDS sequence (wt) from neuraminidase__InfluenzaB__AFA45226
augcuaccuucaacuauacaaacguuaacccuauuucucacaucagggggaguauuauuaucacuauaugugucagcuucauuaucauacuuacuauauucggauauauugcuaaaauucucaccaacagaaacaacugcaccaacaaugucauuggauugugcaaacgcaucaaauguucaggcugugaaccguucugcaacaaaaggggugacauuucuucucccagaaccggaguggacauacccgcguuuaucuugcccgggcucaaccuuucagaaagcacuccuaauuagcccucauagauucggagaaaccaaaggaaacucagcucccuugauaauaagggaaccuuuuauugcuuguggaccaaaugaaugcaaacacuuugcucuaacccauuaugcagcccaaccagggggauacuacaauggaacaagaggagacagaaacaagcugaggcaucuaauuucagucaaauugggcaaggucccaacaguagaaaacuccauuuuccacauggcagcauggagcggguccgcgugccaugaugguaaagaauggacauauaucggaguugauggcccugacaaugaugcauugcucaaaguaaaauauggagaagcauauacugacacauaccauuccuaugcaaacaaaauccuaagaacacaagaaagugccugcaauugcaucgggggaaauuguuaucuuaugauaacugauggcucagcuucagguguuagugaaugcagauuucuuaagauucgagagggccgaauaauaaaagaaauauuuccaacaggaagaguaaaacacacugaggaaugcacaugcggauuugccagcaauaaaaccauagaaugugccuguagagauaacaguuacacagcaaaaagaccuuuugucaaauuaaacguggagacugauacagcagaaauaagauugaugugcacagauacuuauuuggacacccccagaccagaugauggaagcauaacaggcccuugugaaucuaauggggacaaagggaguggaggcaucaagggaggauuuguucaucaaagaauggaauccaagauuggaaggugguacucccgaacgaugucuaagacugaaaggauggggaugggacuguaugucaaguaugauggagacccaugggcugacagugaugcccuagcuuuuaguggaguaaugguuucaaugaaagaaccugguugguacuccuuuggcuucgaaauaaaagauaagaaaugcgauguccccuguauugggauagagaugguacaugaugguggaaaagggacuuggcacucagcagcaacagccauuuacuguuuaaugggcucaggacagcugcugugggacacugucacagguguugacauggcucuguaa

SEQ ID NO: 60954 - RNA, 1401 nt, Artificial Sequence
  derived and/or modified CDS sequence (wt) from neuraminidase__InfluenzaB__AFA45229
augcuaccuucaacuauacaaacguuaacccuauuucucacaucagggggaguauuauuaucacuauaugugucagcuuuauuaucauacuuacuauauucggauauauugcuaaaauucucaccaacagaaauaacugcaccaacaaugccauuggauugugcaaacgcaucaaauguucaggcugugaaccguucugcaacaaaaggggugacauuucuucucccagaaccggaguggacauacccgcguuuaucuugcccgggcucaaccuuucagaaagcacuccuaauuagcccucauagauucggagaaaccaaaggaaacucagcucccuugauaauaagggaaccuuuuauugcuuguggaccaaaugaaugcaaacacuuugcucuaacccauuaugcagcccaaccagggggauacuacaauggaacaagaggagacagaaacaagcugaggcaucuaauuucagucaaauugggcaaaaucccaacaguagaaaacuccauuuuccacauggcagcguggagcggguccgcgugccaugaugguaaggaauggacauauaucggaguugauggcccugacaaugaugcauugcucaaaguaaaauauggagaagcauauacugacacauaccauuccuaugcaaacaaaauacuaagaacacaagaaagugccugcaauugcaucgggggaaauuguuaucuuaugauaacugauggcucagcuucagguguuagugaaugcagauuucuuaagauucgagagggccgaauaauaaaagaaauauuuccaacaggaagaguaaaacacacugaggaaugcacaugcggauuugccagcaauaaaaccauagaaugugccuguagagauaacaguuacacagcaaaaagaccuuuugucaaauuaaacguggagacugauacagcagaaauaagauugaugugcacagauacuuauuuggacacccccagaccagaugauggaagcauaacaggcccuugugaaucuaauggggacaaagggaguggaggcaucaagggaggauuuguucaucaaagaauggaauccaagauuggaaggugguacucucgaacgaugucuaagacugaaaggauggggaugggacuguaugucaaguaugauggagacccaugggcugacagugaugcccuagcuuuuaguggaguaaugguuucaaugaaagaaccugguugguacuccuuuggcuucgaaauaaaagauaagaaaugcgauguccccuguauugggauagagaugguacaugaugguggaaaagagacuuggcacucagcagcaacagccauuuacuguuuaaugggcucaggacaguugcugugggacacugucacaggcguugacauggcucuguaa

SEQ ID NO: 60955 - RNA, 1401 nt, Artificial Sequence
  derived and/or modified CDS sequence (wt) from neuraminidase__InfluenzaB__AFA45235
augcuaccuucaacuauacaaacguuaacccuauuucucacaucagggggaguauuauuaucacuauaugugucagcuuuauuaucauacuuacuauauucggauauauugcuaaaauucucaccaacagaaauaacugcaccaacaaugucauuggauugugcaaacgcaucaaauguucaggcugugaaccguucugcaacaaaaggggugacauuucuucucccagaaccggaguggacauacccgcguuuaucuugcccgggcucaaccuuucagaaagcacuccuaauuagcccucauagauucggagaaaccaaaggaaacucagcucccuugauaauaagggaaccuuuuauugcuuguggaccaaaugaaugcaaacacuuugcucuaacccauuaugcagcccaaccagggggauacuacaauggaacaagaggagacagaaacaagcugaggcaucuaauuucagucaaauugggcaaaaucccaacaguagaaaacuccauuuuccacauggcagcguggagcggguccgcgugccaugaugguaaggaauggacauauaucggaguugauggcccugacaaugaugcauugcucaaaguaaaauauggagaagcauauacugacacauaccauuccuaugcaaacaaaauacuaagaacacaagaaagugccugcaauugcaucgggggaaauuguuaucuuaugauaacugauggcucagcuucagguguuagugaaugcagauuucuuaagauucgagagggccgaauaauaaaagaaauauuuccaacaggaagaguaaaacacacugaggaaugcacaugcggauuugccagcaauaaaaccauagaaugugccuguagagauaacaguuacacagcaaaaagaccuuuugucaaauuaaacguggagacugauacagcagaaauaagauugaugugcacagauacuuauuuggacacccccagaccagaugauggaagcauaacaggcccuugugaaucuaauggggacaaagggaguggaggcaucaagggaggauuuguucaucaaagaauggaauccaagauuggaaggugguacucucgaacgaugucuaagacugaaaggauggggaugggacuguaugucaaguaugauggagacccaugggcugacagugaugcccuagcuuuuaguggaguaaugguuucaaugaaagaaccugguugguacuccuuuggcuucgaaauaaaagauaagaaaugcgauguccccuguauugggauagagaugguacaugaugguggaaaagagacuuggcacucagcagcaacagccauuuacuguuuaaugggcucaggacaguugcugugggacacugucacaggcguugacauggcucuguaa

SEQ ID NO: 60956 - RNA, 1401 nt, Artificial Sequence
  derived and/or modified CDS sequence (wt) from neuraminidase__InfluenzaB__AFA45238
augcuaccuucaacuauacaaacguuaacccuauuucucacaucaggaggaguauuauuaucacuauaugugucagcuucauuaucauacuuacuauauucggauauauugcuaaaauucucaccaacaaaaacaacugcaccaacaaugucauuggauugugcaaacgcaucaaauguucaggcugugaaccguucugcaacaaaaggggugacauuucuucucccagaaccggaguggacauacccgcguuuaucuugcccgggcucaaccuuucagaaagcacuccuaauuagcccucauagauucggagaaaccaaaggaaacucagcucccuugauaauaagggaaccuuuuauugcuuguggaccaaaugaaugcaaacacuuugcucuaacccauuaugcugcccaaccagggggauacuacaauggaacaagaggagacagaaacaagcugaggcaucuaauuucagucaaauugggcaagaucccaacaguagaaaacuccauuuuccacauggcagcauggagcggguccgcgugccaugaugguaaagaauggacauauaucggaguugauggcccugacaaugaugcauugcucaaaguaaaauauggagaagcauauacugacacauaccauuccuaugcaaacaaaauccuaagaacacaagaaagugccugcaauugcaucgggggaaauuguuaucuuaugauaacugauggcucagcuucagguguuagugaaugcagauuucuuaagauucgagagggccgaauaauaaaagaaauauuuccaacaggaagaguaaaacacacugaggaaugcacaugcggauuugccagcaauaaaaccauagaaugugccuguagagauaacaguuacacagcaaaaagaccuuuugucaaauuaaacguggagacugauacagcagaaauaagauugaugugcacagauacuuauuuggacacccccagaccagaugauggaagcauaacaggcccuugugaaucuaauggggacaaagggaguggaggcaucaagggaggauuuguucaucaaagaauggaauccaagauuggaaggugguacucucgaacgaugucuaagacugaaaggauggggaugggacuguaugucaaguaugauggagacccaugggcugacagugaugcccuagcuuuuaguggaguaaugguuucaaugaaagaaccugguugguacuccuuuggcuucgaaauaaaagauaagaaaugcgauguccccuguauugggauagagaugguacaugaugguggaaaagagacuuggcacucagcagcaacagccauuuacuguuuaaugggcucaggacagcugcugugggacacugucacagguguugacauggcucuguaa

SEQ ID NO: 60957 - RNA, 1401 nt, Artificial Sequence
  derived and/or modified CDS sequence (wt) from neuraminidase__InfluenzaB__AFA45241
augcuaccuucaacuauacaaacguuaacccuauuucucacaucagggggaguauuauuaucacuauaugugucagcuucauuaucauacuuacuauauucggauauauugcuaaaauucucaccaacagaaauaacugcaccaacaaugccauuggauugugcaaacgcaucaaauguucaggcugugaaccguucugcaacaaaaggggugauauuucuucucccagaaccggaguggacauacccgcguuuaucuugcccgggcucaaccuuucagaaagcacucuuaauuagcccucauagauucggagaaaccaaaggaaacucagcucccuugauaauaagggaaccuuuuauugcuuguggaccaaaugaaugcaaacacuuugcucuaacccauuaugcagcccaaccagggggauacuacaauggaacaagaggagacagaaacaagcugaggcaucuaauuucagucaaauugggcaaaaucccaacaguagaaaacuccauuuuccacauggcagcauggagcggguccgcgugccaugaugguaaggaauggacauauaucggaguugauggcccugacaauaaugcauugcucaaaguaaaauauggagaagcauauacugacacauaccauuccuaugcaaacaaaauccuaagaacacaagaaagugccugcaauugcaucgggggaaauuguuaucuuaugauaacugacggcucagcuucagguguuagugaaugcagauuucuuaagauucgagagggccgaauaauaaaagaaauauuuccaacaggaagaguaaaacacacugaggaaugcacaugcggauuugccagcaauaaaaccauagaaugugccuguagagauaacaguuacacagcaaaaagaccuuuugucaaauugaacguggagacugauacagcagaaauaagauugaugugcacagauacuuauuuggacacccccagaccagaugauggaagcauaacaggcccuugugaaucuaauggggacaaagggaguggaggcaucaagggaggauuuguucaucaaagaauggaauccaagauuggaaggugguacucucgaacgaugucuaaaacugaaaggaugggaaugggacuguaugucaaguaugauggagacccaugggcugacagugaugcccuaacuuuuaguggaguaaugguuucaaugaaagaaccugguugguacuccuuuggcuucgaaauaaaagauaagaaaugcgauguccccuguauugggauagagaugguacaugaugguggaaaagagacuuggcacucagcagcaacagccauuuacuguuuaaugggcucagggcagcugcugugggacacugucacagguguugacauggcucuguaa

SEQ ID NO: 60958 - RNA, 1401 nt, Artificial Sequence
  derived and/or modified CDS sequence (wt) from neuraminidase__InfluenzaB__AFA45244
augcuaccuucaacuauacaaacguuaacccuauuucucacaucaggaggaguauuauuaucacuauaugugucagcuucauuaucauacuuacuauauucggauauauugcuaaaauucucaccaacagaaacaacugcaccaacaaugucauuggauugugcaaacgcaucaaauguucaggcugugaaccguucugcaacaaaaggggugacauuucuucucccagaaccggaguggacauacccgcguuuaucuugcccgggcucaaccuuucagaaagcacuccuaauuagcccucauagauucggagaaaccaaaggaaacucagcucccuugauaauaagggaaccuuuuauugcuuguggaccaaaugaaugcaaacacuuugcucuaacccauuaugcagcucaaccagggggauacuacaauggaacaagaggagacagaaacaagcugaggcaucuaauuucagucaaauugggcaagaucccaacaguagaaaacuccauuuuccacauggcagcauggagcggguccgcgugccaugaugguaaagaauggacauauaucggaguugauggcccugacaaugaugcauugcucaaaguaaaauauggagaagcauauacugacacauaccauuccuaugcaaacaaaauccuaagaacacaagaaagugccugcaauugcaucgggggaaauuguuaucuuaugauaacugauggcucagcuucagguguuagugaaugcagauuucuuaagauucgagagggccgaauaauaaaagaaauauuuccaacaggaagaguaaaacacacugaggaaugcacaugcggauuugccagcaauaaaaccauagaaugugccuguagagauaacaguuacacagcaaaaagaccuuuugucaaauuaaacguggagacugauacagcagaaauaagauugaugugcacagauacuuauuuggacacccccagaccagaugauggaagcauaacaggcccuugugaaucuaauggggacaaagggaguggaggcauuaagggaggauuuguucaucaaagaauggaauccaagauuggaaggugguacucucgaacgaugucuaagacugaaaggauggggaugggacuguaugucaaguaugauggagacccaugggcugacagugaugcccuagcuuuuaguggaguaaugguuucaaugaaagaaccugguugguacuccuuuggcuucgaaauaaaagauaagaaaugcgauguccccuguauugggauagagaugguacaugaugguggaaaaaagacuuggcacucagcagcaacagccauuuacuguuuaaugggcucaggacagcugcugugggacacugucacagguguugacauggcucuguaa

SEQ ID NO: 60959 - RNA, 1401 nt, Artificial Sequence
  derived and/or modified CDS sequence (wt) from neuraminidase__InfluenzaB__AFA45247
augcuaccuucaacuauacaaacguuaacccuauuucucacaucagggggaguauuauuaucacuauaugugucagcuucauuaucauacuuacuauauucggauauauugcuaaaauucucaacaacagaaauaacugcaccaacaaugccauuggauugugcaaacgcaucaaauguucaggcugugaaucguucugcaacaaaaggggugacacuucuucucccagaaccggaguggacauacccgcguuuaucuugcccgggcucaaccuuucagaaagcacuccuaauuagcccucauagauucggagaaaccaaaggaaacucagcucccuugauaauaagggaaccuuuuauugcuuguggaccaaaugaaugcaaacacuuugcucuaacccauuaugcagcccagccagggggauacuacaauggaacaagaggagacagaaacaagcugaggcaucuaauuucagucaaauugggcaaaaucccaacaguagaaaacuccauuuuccacauggcagcauggagcggguccgcgugccaugaugguaaggaauggacauauaucggaguugauggcccugacaauaaugcauugcucaaaguaaaauauggagaagcauauacugacacauaccauuccuaugcaaacaaaauccuaagaacacaagaaagugccugcaauugcaucgggggaaauuguuaucucaugguaacugauggcucagcuucagguguuagugaaugcagauuucuuaagauucgagagggccgaauaauaaaagaaauauuuccaacaggaagaguaaaacacacugaggaaugcacaugcggauuugcuagcaauaaaaccauagaaugugccuguagagauaacaguuacaccgcaaaaagaccuuuugucaaauuaaacguggagacugauacagcagaaauaagauugaugugcacagauacuuauuuggacacccccagaccagaugauggaagcauaacaggcccuugugaaucuaauggggacaaaggaaguggaggcaucaagggaggauuuguucaucaaagaauggaauccaagauuggaaggugguacucucgaacgaugucuaaaacugaaaggaugggaaugggacuguaugucaaguaugauggagacccaugggcugacagugaugcccuaguuuuuaguggaguaaugguuucaaugaaagaaccugguugguacuccuuuggcuucgaaauaaaagauaagaaaugcgauguccccuguauugggauagagaugguacaugaugguggaaaagagacuuggcacucagcagcaacagccauuuacuguuuaaugggcucaggacagcugcugugggacacugucacagguguugacauggcucuguaa

SEQ ID NO: 60960 - RNA, 1401 nt, Artificial Sequence
  derived and/or modified CDS sequence (wt) from neuraminidase__InfluenzaB__AFA45250
augcuaccuucaacuauacaaacguuaacccuauuucucacaucagggggaguauuauuaucacuauaugugucagcuucauuaucauacuuacuauauucggauauauugcuaaaauucucaccaacagaaacaacugcaccaacaaugucauuggauugugcaaacgcaucaaauguucaggcugugaaccguucugcaacaaaaggggugacauuucuucucccagaaccggaguggacauacccgcguuuaucuugcccgggcucaaccuuucagaaagcacuccuaauuagcccucauagauucggagaaaccaaaggaaacucagcucccuugauaauaagggaaccuuuuauugcuuguggaccaaaugaaugcaaacacuuugcucuaacccauuaugcagcccaaccagggggauacuacaauggaacaagaggagacagaaacaagcugaggcaucuaauuucagucaaauugggcaagaucccaacaguagaaaacuccauuuuccacauggcagcauggagcggguccgcgugccaugaugguaaagaauggacauauaucggaguugauggcccugacaaugaugcauugcucaaaguaaaauauggagaagcauauacugacacauaccauuccuaugcaaacaaaauccuaagaacacaagaaagugccugcaauugcaucgggggaaauuguuaucuuaugauaacugauggcucagcuucagguguuagugaaugcagauuucuuaagauucgagagggccgaauaauaaaagaaauauuuccaacaggaagaguaaaacacacugaggaaugcacaugcggauuugccagcaauaaaaccauagaaugugccuguagagauaacaguuacacagcaaaaagaccuuuugucaaauuaaacguggagacugauacagcagaaauaagauugaugugcacagauacuuauuuggacacccccagaccagaugauggaagcauaacaggcccuugugaaucuaauggggacaaagggaguggaggcaucaagggaggauuuguucaucaaagaauggaauccaagauuggaaggugguacucucgaacgaugucuaagacugaaaggauggggaugggacuguaugucaaguaugauggagacccaugggcugacagugaugcccuagcuuuuaguggaguaaugguuucaaugaaagaaccugguugguacuccuuuggcuucgaaauaaaagauaagaaaugcgauguccccuguauugggauagagaugguacaugaugguggaaaagagacuuggcacucagcagcaacagccauuuacuguuuaaugggcucaggacagcugcugugggacacugucacagguguugacauggcucuguaa

SEQ ID NO: 60961 - RNA, 1401 nt, Artificial Sequence
  derived and/or modified CDS sequence (wt) from neuraminidase__InfluenzaB__AFA45253
augcuaccuucaacuauacaaacguuaacccuauuucucacaucagggggaguguuauuaucacuauaugugucagcuuuauuaucauacuuacuauauucggauauauugcuaaaauucucaccaacagaaauaacugcaccaacaaugucauuggauugugcaaacgcaucaaauguucaggcugugaaccguucugcaacaaaaggggugacauuucuucucccagaaccggaguggacauacccgcguuuaucuugcccgggcucaaccuuucagaaagcacuccuaauuagcccucauagauucggagaaaccaaaggaaacucagcucccuugauaauaagggaaccuuuuauugcuuguggaccaaaugaaugcaaacacuuugcucuaacccauuaugcagcccaaccagggggauacuacaauggaacaagaggagacagaaacaagcugaggcaucuaauuucagucaaauugggcaaaaucccaacaguagaaaacuccauuuuccacauggcagcauggagcggguccgcgugccaugaugguaaggaauggacauauaucggaguugauggcccugacaaugaugcauugcucaaaguaaaauauggagaagcauauacugacacauaccauuccuaugcaaacaaaauccuaagaacacaagaaagugccugcaauugcaucgggggaaauuguuaucuuaugauaacugauggcucagcuucagguguuagugaaugcagauuucuuaagauucgagagggccgaauaauaaaagaaauauuuccaacaggaagaguaaaacacacugaggaaugcacaugcggauuugccagcaauaaaaccauagaaugugucuguagagauaacaguuacacagcaaaaagaccuuuugucaaauuaaacguggagacugauacagcagaaauaagauugaugugcacagauacuuauuuggacacccccagaccagaugauggaagcauaacaggcccuugugaaucuaauggggacaaagggaguggaggcaucaagggaggauuuguucaucaaagaauggaauccaagauuggaaggugguacucucgaacgaugucuaagacugaaaggauggggaugggacuguaugucaaguaugauggagacccaugggcugacagugaugcccuagcuuuuaguggaguaaugguuucaaugaaagaaccugguugguacuccuuuggcuucgaaauaaaagauaagaaaugcgauguccccuguauugggauagagaugguacaugaugguggaaaagagacuuggcacucagcagcaacagccauuuacuguuuaaugggcucaggacagcugcugugggacacugucacaggcguugacauggcucuguaa

SEQ ID NO: 60962 - RNA, 1401 nt, Artificial Sequence
  derived and/or modified CDS sequence (wt) from neuraminidase__InfluenzaB__AFB77645
augcucccuucaacuauacaaacguuaacccuauuucucacaucagggggaguauuauuaucacuauaugugucagcuucauuaucauacuuacuauauucggauauauugcuaaaauucucaccaacagaaauaacugcaccagcaaugccauuggauugugcaaacgcaucaaauguucaggcugugaaccguucugcaacaaaaggggugacacuucuucucccagaaccggaguggacauacccgcguuuaucuugcccgggcucaaccuuucagaaagcacuccuaauuagcccucauagauucggagaaaccaaaggaaacucagcucccuugauaauaagggaaccuuuuauugcuuguggaccaaaugaaugcaaacacuuugcucuaacccauuaugcagcccaaccagggggauacuacaauggaacaagaggagacagaaacaagcugaggcaucuaauuucagucaaauugggcaaaaucccaacaguagaaaacuccauuuuccacauggcagcauggagcggguccgcgugccaugaugguaaggaauggacauauaucggaguugauggcccugacaauaaugcauugcucaaaguaaaauauggagaagcauauacugacacauaccauuccuaugcaaacaaaauccuaagaacacaagaaagugccugcaauugcaucgggggaaauuguuaucuuaugauaacugauggcucagcuucagguguuagugaaugcagauuucuuaagauucgagagggccgaauaauaaaagaaauauuuccaacaggaagaguaaaacacacugaggaaugcacaugcggauuugccagcaauaaaaccauagaaugugccuguagagauaacaguuacacagcaaaaagaccuuuugucaaauuaaacguggagacugauacagcagaaauaagauugaugugcacagauacuuauuuggacacccccagaccaaaugauggaagcauaacaggcccuugugaaucugauggggacaaagggaguggaggcaucaagggaggauuuguucaucaaagaauggaauccaagauuggaaggugguacucucgaacgaugucuaaaacugaaaggauggggaugggacuguaugucaaguaugauggagacccaugggcugacagugaugcccuaguuuuuaguggaguaaugguuucaaugaaagaaccugguugguacuccuuuggcuucgaaauaaaagauaagaaaugcgauguccccuguauugggauagagaugguacaugaugguggaaaagagacuuggcacucagcagcaacagccauuuacuguuuaaugggcucaggacagcugcugugggacacugucacagguguugacauggcucuguaa

SEQ ID NO: 60963 - RNA, 1401 nt, Artificial Sequence
  derived and/or modified CDS sequence (wt) from neuraminidase__InfluenzaB__AFB77647
augcuaccuucaacuauacaaacguuaacccuauuucucacaucagggggaguauuauuaucacuauaugugucagcuucauuaucauacuuacuauauucggauauauugcuaaaauucucaccaacagaaauaacugcaccagcaauaccauuggauugugcaaaugcaucaaauguucaggcugugaaccguucugcaacaaaaggggugacacuucuucucccagaaccggaguggacauacccgcguuuaucuugcccgggcucaaccuuucagaaagcacuccuaauuagcccucauagauucggagaaaccaaaggaaacucagcucccuugauaauaagggaaccuuuuauugcuuguggaccaaaugaaugcaaacacuuugcucuaacccauuaugcagcccaaccagggggauacuacaauggaacaagaggagacagaaacaagcugaggcaucuaauuucagucaaauugggcaaaaucccaacaguagaaaacuccauuuuccacauggcagcauggagcggguccgcgugccaugaugguaaggaauggacauauaucggaguugauggcccugacaauaaugcauugcucaaaguaaaauauggagaagcauauacugacacauaccauuccuaugcaaacaaaauccuaagaacacaagaaagugccugcaauugcaucgggggaaauuguuaucuuaugauaacugauggcucagcuucagguguuagugaaugcagauuucuuaagauucgagagggccgaauaauaaaagaaauauuuccaacaggaagaguaaaacacacugaggaaugcacaugcggauuugccagcaauaaaaccauagaaugugccuguagagauaacaguuacacagcaaaaagaccuuuugucaaauuaaacguggagacugauacagcagaaauaagauugaugugcacagauacuuauuuggacacccccagaccaaaugauggaagcauaacaggcccuugugaaucugauggggacaaagggaguggaggcaucaagggaggauuuguucaucaaagaauggaauccaagauuggaaggugguacucucgaacgaugucuaaaacugaaaggauggggaugggacuguaugucaaguaugauggagacccaugggcugacagugaugcccuagcuuuuaguggaguaaugguuucaaugaaagaaccugguugguacuccuuuggcuucgaaauaaaagauaagaaaugcgauguccccuguauugggauagagaugguacaugaugguggaaaagagacuuggcacucagcagcaacagccauuuacuguuuaaugggcucaggacagcugcuaugggacacugucacagguguugacauggcucuguaa

SEQ ID NO: 60964 - RNA, 1401 nt, Artificial Sequence
  derived and/or modified CDS sequence (wt) from neuraminidase__InfluenzaB__AFB77649
augcuaccuucaacuauacaaacguuaacccuauuucucacaucagggggaguauuauuaucacuauaugugucagcuucauuaucauacuuacuauauucggauauauugcuaaaauucucaccaacagaaauaacugcaccagcaaugccauuggauugugcaaacgcaucaaauguucaggcugugaaccguucugcaacaaaaggggugacacuucuucucccagaaccggaguggacauacccgcguuuaucuugcccgggcucaaccuuucagaaagcacuccuaauuagcccucauagauucggagaaaccaaaggaaacucagcucccuugauaauaagggaaccuuuuauugcuuguggaccaaaugaaugcaaacacuuugcucuaacccauuaugcagcccaaccagggggauacuacaauggaacaagaggagacagaaacaagcugaggcaucuaauuucagucaaauugggcaaaaucccaacaguagaaaacuccauuuuccacauggcagcauggagcggguccgcgugccaugaugguaaggaauggacauauaucggaguugauggcccugacaauaaugcauuacucaaaguaaaauauggagaagcauauacugacacauaccauuccuaugcaaacaaaauccuaagaacacaagaaagugccugcaauugcaucgggggaaauuguuaucuuaugauaacugauggcucagcuucagguguuagugaaugcagauuucuuaagauucgagagggccgaauaauaaaagaaauauuuccaacaggaagaauaaaacacacugaggaaugcacaugcggauuugccagcaauaaaaccauagaaugugccuguagagauaacaguuacacagcaaaaagaccuuuugucaaauuaaacguggagacugauacagcagaaauaagauugaugugcacagauacuuauuuggacacccccagaccaaaugauggaagcauaacaggcccuugugaaucugauggggacaaagggaguggaggcaucaagggaggauuuguucaucaaagaauggaauccaagauuggaaggugguacucucgaacgaugucuaaaacugaaaggauggggaugggacuauaugucaaguaugauggagacccaugggcugacagugaugcccuagcuuuuaguggaguaaugguuucaaugaaagaaccugguugguacuccuuuggcuucgaaauaaaagauaagaaaugcgauguccccuguauugggauagagaugguacaugaugguggaaaagagacuuggcacucagcagcaacagccauuuacuguuuaaugggcucaggacagcugcugugggacacugucacagguguugacauggcucuguaa

SEQ ID NO: 60965 - RNA, 1401 nt, Artificial Sequence
  derived and/or modified CDS sequence (wt) from neuraminidase__InfluenzaB__AFB77651
augcuaccuucaacuauacaaacguuaacccuauuucucacaucagggggaguauuauuaucacuauauguaucagcuucauuaucauacuuacuauauucggauauauugcuaaaauucucaccaacagaaauaacugcaccagcaaugccauuggauugugcaaacgcaucaaauguucaggcugugaaccguucugcaacaaaaggggugacacuucuucucccagaaccggaguggacauacccgcguuuaucuugcccgggcucaaccuuucagaaagcacuccuaauuagcccucauagauucggagaaaccaaaggaaacucagcucccuugauaauaagggaaccuuuuauugcuuguggaccaaaugaaugcaaacacuuugcucuaacccauuaugcagcccaaccagggggauacuacaauggaacaagaggagacagaaacaagcugaggcaucuaacuucagucaaauugggcaaaaucccaacaguagaaaacuccauuuuccacauggcagcauggagcggguccgcgugccaugaugguaaggaauggacauauaucggaguugauggcccugacaauaaugcauugcucaaaguaaaauauggagaagcauauacugacacauaccauuccuaugcaaacaaaauccuaagaacacaagaaagugccugcaauugcaucgggggaaauuguuaucuuaugauaacugauggcucagcuucagguguuagugaaugcagauuucuuaagauucgagagggccgaauaauaaaagaaauauuuccaacaggaagaguaaaacacacugaggaaugcacaugcggauuugccagcaauaaaaccauagaaugugccuguagagauaacaguuacacagcaaaaagaccuuuugucaaauuaaacguggagacugauacagcagaaauaagauugaugugcacagauacuuauuuggacacccccagaccaaaugauggaagcauaacaggcccuugugaaucugauggggacaaagggaguggaggcaucaagggaggauuuguucaucaaagaauggaauccaagauuggaaggugguacucucgaacgaugucuaaaacugaaaggauggggaugggacuguaugucaaguaugauggagacccaugggcugacagugaugcccuagcuuuuaguggaguaaugguuucaaugaaagaaccugguugguacuccuuuggcuucgaaauaaaagauaagaaaugcgauguccccuguauugggauagagaugguacaugaugguggaaaagagacuuggcacucagcagcaacagccauuuacuguuuaaugggcucaggacagcugcugugggacacugucacagguguugacauggcucuguaa

SEQ ID NO: 60966 - RNA, 1401 nt, Artificial Sequence
  derived and/or modified CDS sequence (wt) from neuraminidase__InfluenzaB__AFE00364
augcuaccuucaacuauacaaauguuaacccuauuucucacaucagggggaguacuauuaucacuauaugugucagcuucauuaucauacuuacuauauucggauauauugcuaaaauucucaccaacagaaauaacugcaccaacaaugccauuggauugugcaaacgcaucaaauguucaugcugugaaccguucugcaacaaaaggggugacauuucuucucccagaaccggaguggacauacccgcguuuaucuugcccgggcucaaccuuucagaaagcacuccuaauuagcccucauagauucggagaaaccaaaggaaacucagcucccuugauaauaagggaaccuuuuauugcuuguggaccaaaugaaugcaaacacuuugcucuaacccauuaugcagcccaaccagggggauacuacaauggaacaagaggagacagaaacaggcugaggcaucuaauuucagucaaauugggcaaaaucccaacaguagaaaacuccauuuuccacauggcagcauggagcggguccgcaugccaugaugguaaggaauggacauauaucggaguugaugguccugacaauaaugcauugcucaaaauaaaauauggagaagcauauacugacacauaucauuccuaugcaaacaacauccuaagaacacaagaaagugccugcaauugcaucgggggaaauuguuaucuuaugauaacugauggcucagcuucagguguuagugaaugcagauuucuuaagauucgagagggccgaauaauaaaagaaauauuuccaacaggaagaguaaaacauacugaggagugcacaugcggauuugccagcaauaaaaccauagaaugugccuguagagauaacaguuacacagcaaaaagacccuuugucaaauuaaacguggaaacugauacagcagaaauaagauugaugugcacagauacuuauuuggacacccccagaccagaugauggaagcauaacaggcccuugugaaucuaauggggacaaagggaguggaggcaucaagggaggauuuguucaucaaagaauggcauccaagauugggaggugguacucucgaacgaugucuaaaacugaaaggaaggggaugggacuguaugucaaguaugauggagacccauggacugacagugaugcccuugcuuuuagaggaguaaugguuucaaugaaagaaccugguugguacuccuuuggcuucgaaauaaaagauaagaaaugcgauguccccuguauugggauagagaugguacaugaugguggaaaagagacuuggcacucagcagcaacagccauuuacuguuuaaugggcucaggacagcugcugugggacacagucacaggugucgacauggcucuauaa

SEQ ID NO: 60967 - RNA, 1401 nt, Artificial Sequence
  derived and/or modified CDS sequence (wt) from neuraminidase__InfluenzaB__AFF18536
augcuaccuucaacuauacaaauguuaacccuauuucucacaucagggggaguacuauuaucacuauaugugucagcuucauuaucauacuuacuauauucggauauauugcuaaaauucucaccaacagaaauaacugcaccaacaaugccauuggauugugcaaacgcaucaaauguucaugcugugaaccguucugcaacaaaaggggugacauuucuucucccagaaccggaguggacauacccgcguuuaucuugcccgggcucaaccuuucagaaagcacuccuaauuagcccucauagauucggagaaaccaaaggaaacucagcucccuugauaauaagggaaccuuuuauugcuuguggaccaaaugaaugcagacacuuugcucuaacccauuaugcagcccaaccagggggauacuacaauggaacaagaggagacagaaacaagcugaggcaucuaauuucagucaaauugggcaaaaucccaacaguagaaaacuccauuuuccacauggcagcauggagcggguccgcaugccaugaugguaaggaauggacauauaucggaguugaugguccugacaauaaugcauugcucaaaauaaaauauggagaagcauauacugacacauaucauuccuaugcaaacaacauccuaagaacacaagaaagugccugcaauugcaucaggggaaauuguuaucuuaugauaacugauggcucagcuucagguguuagugaaugcagauuucuuaagauucgagagggccgaauaauaaaagaaauauuuccaacaggaagaguaaaacauacugaggagugcacaugcggauuugccagcaauaaaaccauagaaugugccuguagagauaacaguuacacagcaaaaagacccuuugucaaauuaaacguggaaacugauacagcagaaauaagauugaugugcacagauacuuauuuggacacccccagaccagaugauggaagcauaacaggcccuugugaaucuaauggggacaaagggaguggaggcaucaagggaggauuuguucaucaaagaauggcauccaagauugggaggugguacucucgaacgaugucuaaaacugaaagaaaggggaugggacuguaugucaaguaugauggagacccauggacugacagugaugcccuugcuuuuaggggaguaaugguuucaaugaaagaaccugguugguacuccuuuggcuucgaaauaaaagauaagaaaugcgauguccccuguauugggauagagaugguacaugaugguggaaaagagacuuggcacucagcagcaacagccauuuacuguuuaaugggcucaggacagcugcugugggacacagucacaggugucgacauggcucuauaa

SEQ ID NO: 60968 - RNA, 1401 nt, Artificial Sequence
  derived and/or modified CDS sequence (wt) from neuraminidase__InfluenzaB__AFF18545
augcuaccuucaacuauacaaauguuaacccuauuucucacaucagggggaguacuauuaucacuauaugugucagcuucauuaucauacuuacuauauucggauauauugcuaaaauucucaccaacagaaauaacugcaccaacaaugccauuggauugugcaaacgcaucaaauguucaugcugugaaccguucugcaacaaaaggggugacauuucuucucccagaaccggaguggacauacccgcguuuaucuugcccgggcucaaccuuucagaaagcacuccuaauuagcccucauagauucggagaaaccaaaggaaacucagcucccuugauaauaagggaaccuuuuauugcuuguggaccaaaugaaugcaaacacuuugcucuaacccauuaugcagcccaaccagggggauacuacaauggaacaagaggagacagaaacaagcugaggcaucuaauuucagucaaauugggcaaaaucccaacaguagaaaacuccauuuuccacauggcagcauggagcggguccgcaugccaugaugguaaggaauggacauauaucggaguugaugguccugacaauaaugcauugcucaaaauaaaauauggagaagcauauacugacacauaucauuccuaugcaaacaacauccuaagaacacaagaaagugccugcaauugcaucgggggaaauuguuaucuuaugauaacugauggcucagcuucagguguuagugaaugcagauuucuuaagauucgagagggccgaauaauaaaagaaauauuuccaacaggaagaguaaaacauacugaggagugcacaugcggauuugccagcaauaaaaccauagaaugugccuguagagauaacaguuacacagcaaaaagacccuuugucaaauuaaacguggaaacugauacagcagaaauaagauugaugugcacagauacuuauuuggacacccccagaccagaugauggaagcauaacaggcccuugugaaucuaauggggacaaaggaaguggaggcaucaagggaggauuuguucaucaaagaauggcauccaagauugggaggugguacucucgaacgaugucuaaaacugaaaggaaggggaugggacuguaugucaaguaugauggagacccauggacugacagugaugcccuugcuuuuaggggaguaaugguuucaaugaaagaaccugguugguacuccuuuggcuucgaaauaaaagauaagaaaugcgauguccccuguauugggauagagaugguacaugaugguggaaaagagacuuggcacucagcagcaacagccauuuacuguuuaaugggcucaggacagcugcugugggacacagucacaggugucgacauggcucuauaa

SEQ ID NO: 60969 - RNA, 1401 nt, Artificial Sequence
  derived and/or modified CDS sequence (wt) from neuraminidase__InfluenzaB__AFH34933
augcuaccuucaacuauacaaacguuaaccuuauuucucacaucagggggaguguuauuaucacuauaugugucagcuucauugucauacuuacuauauucggauauauugcuaaaauuuucacgaacagaaauaacugcaccaauaaugccauuggauugugcaaacgcaucaaauguucaggcugugaaccguucugcaacaaaaggggugacacuucuucucccagaaccggaguggacguacccccguuuaucuugcccgggcucaaccuuucagaaagcacuccuaauuagcccccauagauucggagaaaccaaaggaaacucagcucccuugauaauaagggaaccuuuuauugcuuguggaccaaaggaaugcaaacauuuugcucuaacccauuaugcagcucaaccagggggauacuacaauggaacaagagaagacagaaacaaguugaggcaucuaauuucaguuaaauugggcaaaaucccaacaguagaaaacucuauuuuccacauggcagcuuggagcggguccgcaugccaugaugguagagaauggacuuauaucggaguugauggccccgacaguaaugcauugcucaaaauaaaauauggagaagcauauacugacacauaccauuccuaugcaaaaaacaucuuaaggacacaagaaagugccugcaauugcaucgggggagauuguuaucuuaugauaacugauggcccagcuucagggauuagugaaugcagauuccuuaaaauucgagagggccgaauaauaaaagaaauauuuccaacaggaagaguaaaacauacugaggaaugcacaugcggauuugccagcaacaaaaccauagaaugugccuguagagauaacaguuacacagcaaaaagacccuuugucaaauuaaauguggagacugauacagcggaaauaagauugaugugcacagagacuuauuuggacacccccagaccaaaugauggaagcauaacagggccuugcgaaucuaauggggacaaagggaguggaggcaucaagggaggauuuguucaccaaagaauggcauccaagauuggaaggugguacucucgaacgaugucuaaaacuaaaagaauggggaugggacuguauguaaaguaugauggagacccauggacugacagugaagcccuugcucuuaguggagugaugguuucaauggaagaaccugguugguauuccuuuggcuucgaaauaaaagauaagaaaugugauguccccuguauugggauagaaaugguacaugauggugggaaaacgacuuggcacucagcagcaacagccauuuacuguuuaaugggcucaggacaacugcugugggacacugucacagguguuaauaugacucuguaa

SEQ ID NO: 60970 - RNA, 1401 nt, Artificial Sequence; identical to SEQ ID NO: 60969
  derived and/or modified CDS sequence (wt) from neuraminidase__InfluenzaB__AFH34939

SEQ ID NO: 60971 - RNA, 1401 nt, Artificial Sequence; identical to SEQ ID NO: 60767
  derived and/or modified CDS sequence (wt) from neuraminidase__InfluenzaB__AFH57869

SEQ ID NO: 60972 - RNA, 1401 nt, Artificial Sequence
  derived and/or modified CDS sequence (wt) from neuraminidase__InfluenzaB__AFH57891
augcuaccuucaacuauacaaacguuaacccuauuucucacaucagggggaguguuauuaucacuauaugugucagcuucauugucauacuuacuauauucggauauauugcuaaaauuuucacaaacagaaauaacugcaccaauaaugccauuggauuaugcaaacgcaucaaauguucaggcugugaaccauucugcagcaaaaggggugacacuucuucucccagaaccggaguggacauacccucguuuaucuugcccgggcucaaccuuucagaaagcacuccuaauuagcccccauagauucggagaaaccaaaggaaacucagcucccuugauaauaagggaaccuuuuauugcuuguggaccaacggaaugcaaacacuuugcucuaacccauuaugcagcucaaccagggggauacuacaauggaacaagagaagacagaaacaagcugaggcaucuaauuucagucaaauugggcaaaaucccaacaguagaaaacuccauuuuccauauggcagcuuggagcggguccgcaugccaugaugguaaagaauggacauauaucggaguugauggccccgacaguaaugcauuacucaaaauaaaauauggagaagcauauacugacacauaccauuccuaugcaaaaaacauccuaaggacacaagaaagugccugcaauugcaucgggggagauuguuaucuuaugauaacugauggcccagcuucagggauuagugaaugcagauuccuuaagauucgagagggccgaauaauaaaagaaauauuuccaacaggaagaguaaaacauacugaggaaugcacaugcggauuugccagcaacaaaaccauagaaugugcuuguagagauaacaguuacacagcaaaaagacccuuugucaaauuaaauguggagacugauacagcggaaauaagauugaugugcacagagacuuauuuggacacccccagaccaaaugauggaagcauaacagggccuugcgaaucugauggggacaaagggaguggaggcaucaagggaggauuuguucaucaaagaauggcauccaagauuggaaggugguacucucgaacgaugucuaaaacuaaaagaauggggaugggacuguauguaaaguaugauggagacccauggacugacagugaagcccuugcucuuaguggaguaaugguuucgauggaagaaccugguugguauuccuuuggcuucgaaauaaaagauaagaaaugugauguccccuguauugggauagaaaugguacaugauggugggaaaacgacuuggcacucagcagcaacagccauuuacuguuuaaugggcucaggacaacugcugugggacacugucacagguguugauauggcucuguaa

SEQ ID NO: 60973 - RNA, 1401 nt, Artificial Sequence
  derived and/or modified CDS sequence (wt) from neuraminidase__InfluenzaB__AFH57913
augcuaccuucaacuauacaaacguuaacccuauuucucacaucagggggaguauuauuaucacuauaugugucagcuucauuaucauacuuacuauauucggauauauugcuaaaauucucaccaacagaaauaacugcaccaacaaugccauuggauugugcaaacgcaucaaauguucaggcugugaaccguucugcaacaaaaggggugacacuucuucucccagaaccggaguggacauacccgcguuuaucuugcccgggcucaaccuuucagaaagcacuccuaauuagcccucauagauucggagaaaccaaaggaaacucagcucccuugauaauaagggaaccuuuuauugcuuguggaccaaaugaaugcaaacacuuugcucuaacccauuaugcagcccaaccagggggauacuacaauggaacaagaggagacagaaacaagcugaggcaucuaauuucagucaaauugggcaaaaucccaacaguagaaaacuccauuuuccacauggcagcauggagcggguccgcgugccaugaugguaaggaauggacauauaucggaguugauggcccugacaauaaugcauugcucaaaguaaaauauggagaagcauauacugacacauaccauuccuaugcaaacaaaauccuaagaacacaagaaagugccugcaauugcaucgggggaaauuguuaucuuaugauaacugauggcucagcuucagguguuagugaaugcagauuucuuaagauucgagagggccgaauaauaaaagaaauauuuccaacaggaagaguaaaacacacugaggaaugcacaugcggauuugccagcaauaaaaccauagaaugugccuguagagauaacaguuacacagcaaaaagaccuuuugucaaauuaaacguggagacugauacagcagaaauaagauugaugugcacagauacuuauuuggacacccccagaccaaacgauggaagcauaacaggcccuugugaaucuaauggggacaaagggaguggaggcaucaagggaggauuuguucaucaaagaauggaauccaagauuggaaggugguacucucgaacgaugucuaaaacugaaaggauggggaugggacuguaugucaaguaugauggagacccaugggcugacagugaugcccuagcuuuuaguggaguaaugguuucaaugaaagaaccugguugguacuccuuuggcuucgaaauaaaagauaagaaaugcgauguccccuguauugggauagagaugguacaugaugguggaaaagagacuuggcacucagcagcaacagccauuuacuguuuaaugggcucaggacagcugcugugggacacugucacagguguugacauggcucuguaa

SEQ ID NO: 60974 - RNA, 1401 nt, Artificial Sequence; identical to SEQ ID NO: 60829
  derived and/or modified CDS sequence (wt) from neuraminidase__InfluenzaB__AFH57935

SEQ ID NO: 60975 - RNA, 1401 nt, Artificial Sequence; identical to SEQ ID NO: 60829
  derived and/or modified CDS sequence (wt) from neuraminidase__InfluenzaB__AFH57946

SEQ ID NO: 60976 - RNA, 1401 nt, Artificial Sequence
  derived and/or modified CDS sequence (wt) from neuraminidase__InfluenzaB__AFH57957
augcuaccuucaacuauacaaacguuaaccuuauuucucacaucagggggaguguuauuaucacuauaugugucagcuucauugucauacuuacuauauucggauauauugcuaaaauuuucacgaacagaaauaacugcaccaauaaugccauuggauugugcaaacgcaucaaauguucaggcugugaaccguucugcaacaaaaggggugacacuucuucucccagaaccggaguggacguacccccguuuaucuugcccgggcucaaccuuucagaaagcacuccuaauuagcccccauagauucggagaaaccaaaggaaacucagcucccuugauaauaagggaaccuuuuauugcuuguggaccaaaggaaugcaaacauuuugcucuaacccauuaugcagcucaaccagggggauacuacaauggaacaagagaagacagaaacaagcugaggcaucuaauuucagucaaauugggcaaaaucccaacaguagaaaacucuauuuuccacauggcagcuuggagcggguccgcaugccaugaugguagagaauggacuuauaucggaguugauggccccgacaguaaugcauugcucaaaauaaaauauggagaagcauauacugacacauaccauuccuaugcaaaaaacauccuaaggacacaagaaagugcuugcaauugcaucgggggagauuguuaucuuaugauaacugauggcccagcuucagggauuagugaaugcagauuccuuaagauucgagagggccgaauaauaaaagaaauauuuccaacaggaagaguaaaacauacugaggaaugcacaugcggauuugccagcaacaaaaccauagaaugugccuguagagauaacaguuacacagcaaaaagacccuuugucaaauuaaauguggagacugauacagcggaaauaagauugaugugcacagagacuuauuuggacacccccagaccaaaugauggaagcauaacagggccuugcgaaucuaauggggacaaagggaguggaggcaucaagggaggauuuguucaccaaagaauggcauccaagauuggaaggugguacucucgaacgaugucuaaaacuaaaagaauggggaugggacuguauguaaaguaugauggagacccauggacugacagugaagcccuugcucuuaguggaguaaugguuucaauggaagaaccugguugguauuccuuuggcuucgaaauaaaagauaagaaaugugauguccccuguauugggauagaaaugguacaugauggugggaaaacgacuuggcacucagcagcaacagccauuuacuguuuaaugggcucaggacaacugcugugggacacugucacagguguuaauaugacucuguaa

SEQ ID NO: 60977 - RNA, 1401 nt, Artificial Sequence
  derived and/or modified CDS sequence (wt) from neuraminidase__InfluenzaB__AFH57968
augcuaccuucaacuauacaaacguuaaccuuauuucucacaucagggggaguauuauuaucacuauaugugucagcuuuauuaucauacuuacuauauucggauauauugcuaaaauucucaccaacagaaauaacugcaccaacaaugucauuggauugugcaaacgcaucaaauguucaggcugugaaccguucugcaacaaaaggggugacauuucuucucccagaaccggaguggacauacccgcguuuaucuugcccgggcucaaccuuucagaaagcacuccuaauuagcccucauagauucggagaaaccaaaggaaacucagcucccuugauaauaagggaaccuuuuauugcuuguggaccaaaugaaugcaaacacuuugcucuaacccauuaugcagcccaaccagggggauacuacaauggaacaagaggagacagaaacaagcugaggcaucuaauuucagucaaauugggcaaaaucccaacaguagaaaacuccauuuuccacauggcagcauggagcggguccgcgugccaugaugguaaggaauggacauauaucggaguugauggcccugacaaugaugcauugcucaaaguaaaauauggagaagcauauacugacacauaccauuccuaugcaaacaaaauccuaagaacacaagaaagugccugcaauugcaucgggggaaauuguuaucuuaugauaacugauggcucagcuucagguguuagugaaugcagauuucuuaagauucgagagggccgaauaauaaaagaaauauuuccaacaggaagaguaaaacacacugaggaaugcacaugcggauuugccagcaauaaaaccauagaaugugccuguagagauaacaguuacacagcaaaaagaccuuuugucaaauuaaacguggagacugauacagcagaaauaagauugaugugcacagauacuuauuuggacacccccagaccagaugauggaagcauaacaggcccuugugaaucuaauggggacaaagggaguggaggcaucaagggaggauuuguucaucaaagaauggaauccaagauuggaaggugguacucucgaacgaugucuaagacugaaaggauggggaugggacuguaugucaaguaugauggagacccaugggcugacagugaugcccuagcuuuuaguggaguaaugguuucaaugaaagaaccugguugguacuccuuuggcuucgaaauaaaagauaagaaaugcgauguccccuguauugggauagagaugguacaugaugguggaaaagagacuuggcacucagcagcaacagccauuuacuguuuaaugggcucaggacagcugcugugggacacugucacaggcguugacauggcucuguaa

SEQ ID NO: 60978 - RNA, 1401 nt, Artificial Sequence
  derived and/or modified CDS sequence (wt) from neuraminidase__InfluenzaB__AFH57979
augcuaccuucaacuauacaaacguuaaccuuauuucucacaucagggggaguauuauuaucacuauaugugucagcuuuauuaucauacuuacuauauucggauauauugcuaaaauucucaccaacagaaauaacugcaccaacaaugucauuggauugugcaaacgcaucaaauguucaggcugugaaccguucugcaacaaaaggggugauauuucuucucccagaaccggaguggacauacccgcguuuaucuugcccgggcucaaccuuucagaaagcacuccuaauuagcccucauagauucggagaaaccaaaggaaacucagcucccuugauaauaagggaaccuuuuauugcuuguggaccaaaugaaugcaaacacuuugcucuaacccauuaugcagcccaaccagggggauacuacaauggaacaagaggagacagaaacaagcugaggcaucuaauuucagucaaauugggcaaaaucccaacaguagaaaacuccauuuuccacauggcagcauggagcggguccgcgugccaugaugguaaggaauggacauauaucggaguugauggcccugacaaugaugcauugcucaaaguaaaauauggagaagcauauacugacacauaccauuccuaugcaaacaaaauccuaagaacacaagaaagugccugcaauugcaucgggggaaauuguuaucuuaugauaacugauggcucagcuucagguguuagugaaugcagauuucuuaagauucgagagggccgaauaauaaaagaaauauuuccaacaggaagaguaaaacacacugaggaaugcacaugcggauuugccagcaauaaaaccauagaaugugccuguagagauaacaguuacacagcaaaaagaccuuuugucaaauuaaacguggagacugauacagcagaaauaagauugaugugcacagauacuuauuuggacacccccagaccagaugauggaagcauaacaggcccuugugaaucuaauggggacaaagggaguggaggcaucaagggaggauuuguucaucaaagaauggaauccaagauuggaaggugguacucucgaacgaugucuaagacugaaaggauggggaugggacuguaugucaaguaugauggagacccaugggcugacagugaugcccuagcuuuuaguggaguaaugguuucaaugaaagaaccugguugguacuccuuuggcuucgaaauaaaagauaagaaaugcgauguccccuguauugggauagagaugguacaugaugguggaaaagagacuuggcacucagcagcaacagccauuuacuguuuaaugggcucaggacagcugcugugggacacugucacaggcguugacauggcucuguaa

SEQ ID NO: 60979 - RNA, 1401 nt, Artificial Sequence; identical to SEQ ID NO: 60672
  derived and/or modified CDS sequence (wt) from neuraminidase__InfluenzaB__AFH58253

SEQ ID NO: 60980 - RNA, 1401 nt, Artificial Sequence; identical to SEQ ID NO: 60768
  derived and/or modified CDS sequence (wt) from neuraminidase__InfluenzaB__AFH58264

SEQ ID NO: 60981 - RNA, 1401 nt, Artificial Sequence; identical to SEQ ID NO: 60823
  derived and/or modified CDS sequence (wt) from neuraminidase__InfluenzaB__AFH58275

SEQ ID NO: 60982 - RNA, 1401 nt, Artificial Sequence; identical to SEQ ID NO: 60823
  derived and/or modified CDS sequence (wt) from neuraminidase__InfluenzaB__AFH58286

SEQ ID NO: 60983 - RNA, 1401 nt, Artificial Sequence
  derived and/or modified CDS sequence (wt) from neuraminidase__InfluenzaB__AFH58297
augcuaccuucaacuauacaaacguuaacccuauuucucacaucagggggaguauuauuaucacuauaugugucagcuucauuaucauacuuacuauauucggauauauugcuaaaauucucaccaacagaaauaacugcaccaacaaugccauuggauugugcaaacgcaucaaauguucaggcugugaaccguucugcaacaaaaggggugacacuucuucucccagaaccggaguggacauacccgcguuuaucuugcccgggcucaaccuuucagaaagcacuccuaauuagcccucauagauucggagaaaccaaaggaaacucagcucccuugauaauaagggaaccuuuuauugcuuguggaccaaaugaaugcaaacacuuugcucuaacccauuaugcagcccaaccagggggauacuacaauggaacaagaggagacagaaacaagcugaggcaucuaauuucagucaaauugggcaaaaucccaacaguagaaaacuccauuuuccacauggcagcauggagcggguccgcgugccaugaugguaaggaauggacauauaucggaguugauggcccugacaauaaugcauugcucaaaguaaaauauggagaagcauauacugacacauaccauuccuaugcaaacaaaauccuaagaacacaagaaagugccugcaauugcaucgggggaaauuguuaucuuaugauaacugaugguucagcuucagguguuagugaaugcagauuucuuaagauucgagagggccgaauaauaaaagaaauauuuccaacaggaagaguaaaacacacugaggaaugcacaugcggauuugccagcaauaaaaccauagaaugugccuguagagauaacaguuacacagcaaaaagaccuuuugucaaauuaaacguggagacugauacagcagaaauaagauugaugugcacagauacuuauuuggacacccccagaccaaacgauggaagcauaacaggcccuugugaaucuaauggggacaaagggaguggaggcaucaagggaggauuuguucaucaaagaauggaauccaagauuggaaggugguacucucgaacgaugucuaaaacugaaaggauggggaugggacuguaugucaaguaugauggagacccaugggcugacagugaugcccuagcuuuuaguggaguaaugguuucaaugaaagaaccugguugguacuccuuuggcuucgaaauaaaagauaagaaaugcgauguccccuguauugggauagagaugguacaugaugguggaaaagagacuuggcacucagcagcaacagccauuuacuguuuaaugggcucaggacagcugcugugggacacugucacagguguugacauggcucuguaa

SEQ ID NO: 60984 - RNA, 1401 nt, Artificial Sequence
  derived and/or modified CDS sequence (wt) from neuraminidase__InfluenzaB__AFH58308
augcuacccucaacuauacaaacguuaaccuuauuucucacaucagggggaguguuauuaucacuauaugugucagcuucauugucauacuuacuauauucggauauauugcuaaaauuuucacgaacagaaacaaccgcaccaauaaugccauuggauugugcaaacgcaucaaauguucaggcugugaaccguucugcaacaaaaggggugacacuucuucucccagaaccggaguggacguacccucguuuaucuugcccgggcucaaccuuucagaaagcacuccuaauuagcccccauagauucggagaaaccaaaggaaacucagcucccuugauaauaagggaaccuuuuauugcuuguggaccaaaggaaugcaaacauuuugcucuaacccauuaugcagcucaaccagggggauacuacaauggaacaagagaagacagaaacaagcugaggcaucuaauuucagucaaauugggcaaaaucccaacaguagaaaacucuauuuuccacauggcagcuuggagcggguccgcaugccaugaugguagagaauggacauauaucggaguugauggccccgacaguaaugcauugcucaaaauaaaauauggagaagcauauacugacacauaccauuccuaugcaaaaaacauccuaaggacacaagaaagugccugcaauugcaucgggggagauuguuaucuuaugauaacugauggcccagcuucagggauuagugaaugcagauuccuuaagauucgagagggccgaauaauaaaagaaauauuuccaacaggaagaguaaaacauacugaggaaugcacaugcggauuugccagcaacaaaaccauagaaugugccuguagagauaacaguuacacagcaaaaagacccuuugucaaauuaaauguggagacugauacagcggaaauaagauugaugugcacagagacuuauuuggacacccccagaccaaaugauggaagcauaacagggccuugcgaaucuaauggggacaaagggaguggaggcaucaagggaggauuuguucaccaaagaauggcauccaagauuggaaggugguacucucgaacgaugucuaaaacuaaaagaauggggaugggacuguauguaaaguaugauggagacccauggacugacagugaagcccuugcucuuaguggaguaaugguuucaauggaagaaccugguugguauuccuuuggcuucgaaauaaaagauaagaaaugugauguccccuguauugggauagaaaugguacaugauggugggaaaacgacuuggcacucagcagcaacagccauuuacuguuuaaugggcucaggacaacugcugugggacacugucacagguguugauauggcucuguaa

SEQ ID NO: 60985 - RNA, 1401 nt, Artificial Sequence; identical to SEQ ID NO: 60984
  derived and/or modified CDS sequence (wt) from neuraminidase__InfluenzaB__AFH58319

SEQ ID NO: 60986 - RNA, 1401 nt, Artificial Sequence
  derived and/or modified CDS sequence (wt) from neuraminidase__InfluenzaB__AFH58341
augcuaccuucaacuauacaaacguuaaccuuauuucucacaucagggggaguguuauuaucacuauaugugucagcuucauugucauacuuacuauauucggauauauugcuaaaauuuucacgaacagaaauaacugcaccaauaaugccauuggauugugcaaacgcaucaaauguucaggcugugaaccguucugcaacaaaaggggugacacuucuucucccagaaccggaguggacguacccucguuuaucuugcccgggcucaaccuuucagaaagcacuccuaauuagcccccauagauucggagaaaccaaaggaaacucagcucccuugauaauaagggaaccuuuuauugcuuguggaccaaaggaaugcaaacauuuugcucuaacccauuaugcagcucaaccagggggauacuacaauggaacaagagaagacagaaacaagcugaggcaucuaauuucagucagauugggcaaaaucccaacaguagaaaacucuauuuuccacauggcagcuuggagcggguccgcaugccaugaugguagagaauggacuuauaucggaguugauggccccgacaguaaugcauugcucaaaauaaaauauggagaagcauauacugacacauaccauuccuaugcaaaaaacauccuaaggacacaagaaagugccugcaauugcaucgggggagauuguuaucuuaugauaacugauggcccagcuucagggauuagugaaugcagauuccuuaagauucgagagggccgaauaauaaaagaaauauuuccaacaggaagaguaaaacauacugaggaaugcacaugcggauuugccagcaacaaaaccauagaaugugccuguagagauaacaguuacacagcaaaaagacccuuugucaaauuaaauguggagacugauacagcggaaauaagauugaugugcacagagacuuauuuggacacccccagaccaaaugauggaagcauaacagggccuugcgaaucuaauggggacaaagggaguggaggcaucaagggaggauuuguucaccaaagaauggcauccaagauuggaaggugguacucucgaacgaugucuaaaacuaaaagaauggggaugggacuguauguaaaguaugauggagacccauggacugacagugaagcccuugcucuuaguggaguaaugguuucaauggaagaaccugguugguauuccuuuggcuucgaaauaaaagauaagaaaugugauguccccuguauugggauagaaaugguacaugauggugggaaaacgacuuggcacucagcagcaacagccauuuacuguuuaaugggcucaggacaacugcugugggacacugucacagguguuaauaugacucuguaa

SEQ ID NO: 60987 - RNA, 1401 nt, Artificial Sequence
  derived and/or modified CDS sequence (wt) from neuraminidase__InfluenzaB__AFH58363
augcuaccuucaacuauacaaacguuaacccuauuucucacaucagggggaguauuauuaucacuauaugugucagcuucauugucauacuuacuauauucggauauauugcuaaaauucccaucaacagaaauuacugcaccaacaaugccauuggauugugcaaacgcaucaaauguucaggcugugaaccguucugcaacaaaaggggugacauuucuucucccagaaccggaguggacauacccgcguuuaucuugcccgggcucaaccuuucagaaagcacuccuaauuagcccucauagauucggagaaaccaaaggaaacucagcucccuugauaauaagggaaccuuuuauugcuuguggaccaaaggaaugcaaacacuuugcucuaacccacuaugcagcccaaccagggggauacuacaauggaacaagaggagacagaaacaagcugaggcaucuaauuucagucaaauugggcaaaaucccaacaguagaaaacuccauuuuccacauggcagcauggagcggguccgcaugccaugaugguaaggaauggacauauaucggaguugauggcccugacaauaaugcauugcucaaaauaaaauauggagaagcauauacugacacauaccauuccuaugcaaacaacauccuaagaacacaagaaagugccugcaauugcaucgggggaaauuguuaucuuaugauaacugauggcucagcuucagguguuagugaaugcagauuucuuaagauuagagagggccgaauaauaaaagaaauauuuccaacaggaagaauaaaacauacugaagaaugcacaugcggauuugcuagcaauaaaaccauagaaugugccuguagagauaacaguuacacagcaaaaagacccuuugucaaauuaaacguggagacugauacagcagaaauaagauugaugugcacagagacuuauuuggacacccccagaccagaugauggaagcauaacagggccuugugaaucuaaugggggcaaagggaguggaggcaucaagggaggauuuguccaucaaagaauggcauccaagauuggaaggugguacucucgaacuaugucuaaaacugaaagaaaggggauggggcuguaugucaaguaugauggagauccaugggcugacagugaugcccuugcuuuuaguggaguaauggucucaauggaagaaccugguugguacuccuuuggcuucgaaauaaaagacaagaaaugugauguccccuguauugggauagagaugguacaugaugguggaaaagagacuuggcacucagcagcuacagccauuuauuguuuaaugggcucaggacagcugcugugggacacugucacagguguuaauauggcucuguaa

SEQ ID NO: 60988 - RNA, 1401 nt, Artificial Sequence; identical to SEQ ID NO: 60987
  derived and/or modified CDS sequence (wt) from neuraminidase__InfluenzaB__AFH58374

SEQ ID NO: 60989 - RNA, 1401 nt, Artificial Sequence; identical to SEQ ID NO: 60973
  derived and/or modified CDS sequence (wt) from neuraminidase__InfluenzaB__AFH58385

SEQ ID NO: 60990 - RNA, 1401 nt, Artificial Sequence; identical to SEQ ID NO: 60973
  derived and/or modified CDS sequence (wt) from neuraminidase__InfluenzaB__AFH58396

SEQ ID NO: 60991 - RNA, 1401 nt, Artificial Sequence; identical to SEQ ID NO: 60983
  derived and/or modified CDS sequence (wt) from neuraminidase__InfluenzaB__AFH58407

SEQ ID NO: 60992 - RNA, 1401 nt, Artificial Sequence; identical to SEQ ID NO: 60973
  derived and/or modified CDS sequence (wt) from neuraminidase__InfluenzaB__AFH58418

SEQ ID NO: 60993 - RNA, 1401 nt, Artificial Sequence
  derived and/or modified CDS sequence (wt) from neuraminidase__InfluenzaB__AFH58429
augcuaccuucaacuauacaaacguuaacccuauuucucacaucagggggaguauuauuaucacuauaugugucagcuucauuaucauacuuacuauauucggauauauugcuaaaauucucaccaacagaaauaacugcaccaacaaugccauuggauugugcaaacgcaucaaauguucaggcugugaaccguucugcaacaaaaggggugacacuucuucucccagaaccggaguggacauacccgcguuuaucuugcccgggcucaaccuuucagaaagcacuccuaauuagcccucauagauucggagaaaccaaaggaaacucagcucccuugauaauaagggaaccuuuuauugcuuguggaccaaaugaaugcaaacacuuugcucuaacccauuaugcagcccaaccagggggauacuacaauggaacaagaggagacagaaacaagcugaggcaucuaauuucagucaaauugggcaaaaucccaacaguagaaaacuccauuuuccacauggcagcauggagcggguccgcgugccaugaugguaaggaauggacauauaucggaguugauggcccugacaauaaugcauugcucaaaguaaaauauggagaagcauauacugacacauaccauuccuaugcaaacaaaauccuaagaacacaagaaagugccugcaauugcaucgggggaaauuguuaucuuaugauaacugauggcucagcuucagguguuagugaaugcagauuucuuaagauucgagagggccgaauaauaaaagaaauauuuccaacaggaagaguaaaacacacugaggaaugcacaugcggauuugccagcaaugaaaccauagaaugugccuguagagauaacaguuacacagcaaaaagaccuuuugucaaauuaaacguggagacugauacagcagaaauaagauugaugugcacagauacuuauuuggacacccccagaccaaacgauggaagcauaacaggcccuugugaaucuaauggggacaaagggaguggaggcaucaagggaggauuuguucaucaaagaauggaauccaagauuggaaggugguacucucgaacgaugucuaaaacugaaaggauggggaugggacuguaugucaaguaugauggagacccaugggcugacagugaugcccuagcuuuuaguggaguaaugguuucaaugaaagaaccugguugguacuccuuuggcuucgaaauaaaagauaagaaaugcgauguccccuguauugggauagagaugguacaugaugguggaaaagagacuuggcacucagcagcaacagccauuuacuguuuaaugggcucaggacagcugcugugggacacugucacagguguugacauggcucuguaa

SEQ ID NO: 60994 - RNA, 1401 nt, Artificial Sequence
  derived and/or modified CDS sequence (wt) from neuraminidase__InfluenzaB__AFH58440
augcuaccuucaacuauacaaacguuaacccuauuucucacaucagggggaguauuauuaucacuauaugugucagcuucauuaucauacuuacuauauucggauauauugcuaaaauucucaccaacagaaauaacugcaccaacaaugccauuggauugugcaaacgcaucaaauguucaggcugugaaccguucugcaacaaaaggggugacacuucuucucccagaaccggaguggacauacccgcguuuaucuugcccgggcucaaccuuucagaaagcacuccuaauuagcccucauagauucggagaaaccaaaggaaacucagcucccuugauaauaagggaaccuuuuauugcuuguggaccaaaugaaugcaaacacuuugcucuaacccauuaugcagcccaaccagggggauacuacaauggaacaagaggagacagaaacaagcugaggcaucuaauuucagucaaauugggcaaaaucccaacaguagaaaacuccauuuuccacauggcagcauggagcggguccgcgugccaugaugguaaggaauggacauauaucggaguugauggcccugacaauaaugcauugcucaaaguaaaauauggagaagcauauacugacacauaccauuccuaugcaaacaaaauccuaagaacacaagaaagugccugcaauugcaucgggggaaauuguuaucuuaugauaacugauggcucagcuucagguguuagugaaugcagauuucuuaagauucaagagggccgaauaauaaaagaaauauuuccaacaggaagaguaaaacacacugaggaaugcacaugcggauuugccagcaauaaaaccauagaaugugccuguagagauaacaguuacacagcaaaaagaccuuuugucaaauuaaacguggagacugauacagcagaaauaagauugaugugcacagauacuuauuuggacacccccagaccaaacgauggaagcauaacaggcccuugugaaucuaauggggacaaagggaguggaggcaucaagggaggauuuguucaucaaagaauggaauccaagauuggaaggugguacucucgaacgaugucuaaaacugaaaggauggggaugggacuguaugucaaguaugauggagacccaugggcugacagugaugcccuagcuuuuaguggaguaaugguuucaaugaaagaaccugguugguacuccuuuggcuucgaaauaaaagauaagaaaugcgauguccccuguauugggauagagaugguacaugaugguggaaaagagacuuggcacucagcagcaacagccauuuacuguuuaaugggcucaggacagcugcugugggacacugucacagguguugacauggcucuguaa

SEQ ID NO: 60995 - RNA, 1401 nt, Artificial Sequence
  derived and/or modified CDS sequence (wt) from neuraminidase__InfluenzaB__AFH58462
augcuaccuucaacuauacaaacguuaacccuauuucucacaucagggggaguauuauuaucacuauaugugucagcuucauuaucauacuuacuauauucggauauauugcuaaaauucucaccaacagaaauaacugcaccaacaaugccauuggauugugcaaacgcaucaaauguucaggcugugaaccguucugcaacaaaaggggugacguuucuucucccagaaccggaguggacauacccgcguuuaucuugcccgggcucaaccuuucagaaagcacuccuaauuagcccucauagauucggagaaaccaaaggaaacucagcucccuugauaauaagggaaccuuuuauugcuuguggaccaaaugaaugcaaacacuuugcucuaacccauuaugcagcccaaccagggggauacuacaauggaacaagaggagacagaaacaagcugaggcaucuaauuucagucaaauugggcaaaaucccaacaguagaaaacuccauuuuccacauggcagcauggagcggguccgcgugccaugaugguaaggaauggacauauaucggaguugauggcccugacaauaaugcauugcucaaaguaaaauauggagaagcauauacugacacauaccauuccuaugcaaacaaaauccuaagaacacaagaaagugccugcaauugcaucgggggaaauuguuaucuuaugauaacugauggcucagcuucagguguuagugaaugcagauuucuuaagauucgagagggccgaauaauaaaagaaauauuuccaacaggaagaguaaaacacacugaggaaugcacaugcggauuugccagcaauaaaaccauagaaugugccuguagagauaacaguuacacagcaaaaagaccuuuugucaaauuaaacguggagacugauacagcagaaauaagacugaugugcacagauacuuauuuggacacccccagaccagaugauggaagcauaacaggcccuugugaaucuaauggggacgaagggaguggaggcaucaagggaggauuuguucaucaaagaauggaauccaagauuggaaggugguacucucgaacgaugucuaaaacugaaaggauggggaugggacuguaugucaaguaugauggagacccaugggcugacagugaugcccuagcuuuuaguggaguaaugguuucaaugaaagaaccugguugguacuccuuuggcuucgaaauaaaagauaagaaaugcgauguccccuguauugggauagagaugguacaugaugguggaaaagagacuuggcacucagcagcaacagccauuuacuguuuaaugggcucaggacagcugcugugggacacugucacagguguugacaugacucuguaa

SEQ ID NO: 60996 - RNA, 1401 nt, Artificial Sequence; identical to SEQ ID NO: 60995
  derived and/or modified CDS sequence (wt) from neuraminidase__InfluenzaB__AFH58473

SEQ ID NO: 60997 - RNA, 1401 nt, Artificial Sequence; identical to SEQ ID NO: 60829
  derived and/or modified CDS sequence (wt) from neuraminidase__InfluenzaB__AFH58484

SEQ ID NO: 60998 - RNA, 1401 nt, Artificial Sequence; identical to SEQ ID NO: 60976
  derived and/or modified CDS sequence (wt) from neuraminidase__InfluenzaB__AFH58495

SEQ ID NO: 60999 - RNA, 1401 nt, Artificial Sequence
  derived and/or modified CDS sequence (wt) from neuraminidase__InfluenzaB__AFH58506
augcuaccuucaacuauacaaacguuaaccuuauuucucacaucagggggaguguuauuaucacuauaugugucagcuucauugucauacuuacuauauucggauauauugcuaaaauuuucacgaacagaaauaacugcaccaauaaugccauuggauugugcaaacgcaucaaauguucaggcugugaaccguucugcaacaaaaggggugacacuucuucucccagaaccggaguggacguacccccguuuaucuugcccgggcucaaccuuucagaaagcacuccuaauuagcccccauagauucggagaaaccaaaggaaacucagcucccuugauaauaagggaaccuuuuauugcuuguggaccaaaggaaugcaaacauuuugcucuaacccauuaugcagcucaaccagggggauacuacaauggaacaagagaagacagaaacaagcugaggcaucuaauuucagucaaauugggcaaaaucccaacaguagaaaacucuauuuuccacauggcagcuuggagcggguccgcaugccaugaugguagagaauggacuuauaucggaguugauggccccgacaguaaugcauugcucaaaauaaaauauggagaagcauauacugacacauaccauuccuaugcaaaaaacauccuaaggacacaagaaagugcuugcaauugcaucgggggagauuguuaucuuaugauaacugauggcccagcuucagggauuagugaaugcagauuccuuaagauucgagagggccgaauaauaaaagaaauauuuccaacaggaagaguaaaacauacugaggaaugcacaugcggauuugccagcaacaaaaccauagaaugugccuguagagauaacaguuacacagcaaaaagacccuuugucaaauuaaauguggagacugauacagcggaaauaagauugaugugcacagagacuuauuuggacacccccagaccaaaugauggaagcauaacagggccuugcgaaucuaauggggacaaagggaguggaggcaucaagggaggauuuguucaccaaagaauggcauccaagauuggaaggugguacucucgaacgaugucuaaaacuaaaagaauggggaugggacuguauguaaaguaugauggagacccauggacugacagugaagcccuugcucuuaguggaguaaugguuucaauggaagaaccuggcugguauuccuuuggcuucgaaauaaaagauaagaaaugugauguccccuguauugggauagaaaugguacaugauggugggaaaacgacuuggcacucagcagcaacagccauuuacuguuuaaugggcucaggacaacugcugugggacacugucacagguguuaauaugacucuguaa

SEQ ID NO: 61000 - RNA, 1401 nt, Artificial Sequence
  derived and/or modified CDS sequence (wt) from neuraminidase__InfluenzaB__AFH58517
augcuaccuucaacuauacaaacguuaaccuuauuucucacaucagggggaguauuauuaucacuauaugugucagcuuuauuaucauacuuacuauauucggauauauugcuaaaauucucaccaacagaaauaacugcaccaacaaugucauuggauugugcaaacgcaucaaauguucaggcugugaaccguucugcaacaaaaggggugacauuucuucucccagaaccggaguggacauacccgcguuuaucuugcccgggcucaaccuuucagaaagcacuccuaauuagcccucauagauucggagaaaccaaaggaaacucagcucccuugauaauaagggaaccuuuuauugcuuguggaccaaaugaaugcaaacacuuugcucuaacccauuaugcagcccaaccagggggauacuacaauggaacaagaggagacagaaacaagcugaggcaucuaauuucagucaaauugggcaaaaucccaacaguagaaaacuccauuuuccacauggcagcauggagcggguccgcgugccaugaugguaaggaauggacauauaucggaguugauggcccugacaaugaugcauugcucaaaguaaaauauggagaagcauauacugacacauaccauuccuaugcaaacaaaauccuaagaacacaagaaagugccugcaauugcaucgggggaaauuguuaucuuaugauaacugauggcucagcuucagguguuagugaaugcagauuucuuaagauucgagagggccgaauaauaaaagaaauauuuccaacaggaagaguaaaacacacugaggaaugcacaugcggauuugccagcaauaaaaccauagaaugugccuguagagauaacaguuacacagcaaaaagaccuuuugucaaauuaaacguggagacugauacagcagaaauaagauugaugugcacagauacuuauuuggacacccccagaccagaugauggaagcauaacaggcccuugugaaucuaauggggacaaagggaguggaggcaucaagggaggauuuguucaucaaagaauggaauccaagauuggaaggugguacucucgaacgaugucuaagacugaaaggauggggaugggacuguaugucaaguaugauggagacccaugggcugacagugaugcccuagcuuuuaguggaguaaugguuucaaugaaagagccugguugguacuccuuuggcuucgaaauaaaagauaagaaaugcgauguccccuguauugggauagagaugguacaugaugguggaaaagagacuuggcacucagcagcaacagccauuuacuguuuaaugggcucaggacggcugcugugggacacugucacaggcguugacauggcucuguaa

SEQ ID NO: 61001 - RNA, 1401 nt, Artificial Sequence; identical to SEQ ID NO: 60977
  derived and/or modified CDS sequence (wt) from neuraminidase__InfluenzaB__AFH58528

SEQ ID NO: 61002 - RNA, 1401 nt, Artificial Sequence
  derived and/or modified CDS sequence (wt) from neuraminidase__InfluenzaB__AFH58539
augcuaccuucaacuguacaaacauuaacccuauuacucacaucagggggaguauuauuaucacuauaugugucagccucauugucauacuuauuguauucggauguauugcuaaaauuuucaucaacaaaaacaacugcaccaacaaugucauuagagugcacaaacgcaucaaaugcccagacugugaaccauucugcaacaaaagagaugacauuuccacccccagagccggaguggacauacccucguuuaucuugccagggcucaaccuuucagaaggcacuccuaauuagcccucauagguucggagagaucaaaggaaacucagcucccuugauaauaagagaaccuuuuguugcuuguggaccaaaagaaugcagacacuuugcucugacccauuaugcagcucagccggggggauacuacaauggaacaagaaaggacagaaacaagcugaggcaucuaguaucagucaaauugggaaaaaucccaacuguggaaaacuccauuuuccacauggcagcuuggagcggauccgcaugccaugaugguagagaauggacauauaucggaguugaugguccugacaaugaugcauuggucaaaauaaaauauggagaagcauauacugacacauaucauuccuaugcacacaacauccuaagaacacaagaaagugccugcaauugcaucgggggagauuguuaucuuaugauaacagacggcucagcuucaggaauuaguaaaugcagauuucuuaaaauuagagagggucgaauaauaaaagaaauacuuccaacaggaagaguggagcacacugaagagugcacaugcggguucgccagcaauaaaaccauagaaugugccuguagagacaacaguuacacagcaaaaagacccuuugucaaauuaaauguggaaacugauacagcugaaauaagauugaugugcacaaagacuuaucuagacacucccagaccggaugauggaagcauagcagggccuugcgaaucuaauggagacaaguggcuuggaggcaucaaaggaggauucguccaucaaagaauggcaucuaagauuggaagaugguacucccgaacgaugucuaaaacuaacagaauggggauggaacuguauguaaaguaugauggugacccauggacugacagugaugcucuuacucuuaguggaguaaugguuuccauagaagaaccugguugguauucuuuuggcuucgaaauaaaggacaagaaaugugaugucccuuguauugggauagagaugguacacgaugguggaaaagauacuuggcauucagcugcaacagccauuuacuguuugaugggcucaggacaauugcuaugggacacugccacaggcguugauauggcuuuauaa

SEQ ID NO: 61003 - RNA, 1401 nt, Artificial Sequence
  derived and/or modified CDS sequence (wt) from neuraminidase__InfluenzaB__AFH58550
augcuaccuucaacuauacaaacguuaacccuauuucucacaucagggggaguguuauuaucacuauaugugucagcuucacugucauacuuacuguauucggauauauugcuaaaauuuucaccaacagaaauaacugcaccaacaaugccauuggauugugcaaacgcaucaaauguucaggcugugaaccguucugcaacaaaagagaugacacuucuucucccagaaccggaguggacauacccucguuuaucuugcccgggcucaaccuuucagaaagcacuccuaauuagcccucauagauucggagaaaccagaggaaacucagcucccuugacaauaagggaaccuuuuauugcuuguggaccaaaggaaugcaaacacuuugcucuaacccauuaugcagcucaaccagggggauacuacaauggaacaagagaggacagaaacaagcugaggcaucugauuucagucaaauugggcaaaauaccaacaguagaaaacuccauuuuccacauggcagcuuggagcggguccgcaugccaugaugguagagaauggacauauaucggaguugauggcccugacaguaaugcauugaucaaaauaaaauauggagaagcauauacugacacauaccauuccuaugcaaacaacauccuaagaacacaagaaagugccugcaauugcauugggggagauuguuaucuuaugauaacugauggcucagcuucaggaauuaguaaaugcagauuucuuaagauucgagagggucgaauaauaaaagaaauauuuccaacaggaagaguagaacauacugaagaaugcacaugcggauuugccagcaacaaaaccauagaaugugccuguagagauaacaguuacacagcaaaaagacccuuugucaaauuaaauguggagacugauacagcugaaauaagauugaugugcacagagacuuauuuggacacccccagaccagaugauggaagcauaacagggccuugcgaaucuaauggggacaaagggcguggaggcaucaagggaggauuuguucaucaaagaauggcauccaagauuggaagaugguacucucgaacgaugucuaaaacugaaagaauggggauggaacuguaugucaaguaugauggagacccauggacugacagugaagcccuugcuccuaguggaguaaugguuucaauggaagaaccugguugguauucuuuuggcuucgaaauaaaagauaagaaaugugauguccccuguauugggauagagaugguacacgaugguggaaaaaagacuuggcacucagcagcaacagccauuuacuguuuaaugggcucaggacaauugcuaugggacacugucacagguguugauauggcucuguaa

SEQ ID NO: 61004 - RNA, 1401 nt, Artificial Sequence; identical to SEQ ID NO: 61003
  derived and/or modified CDS sequence (wt) from neuraminidase__InfluenzaB__AFH58561

SEQ ID NO: 61005 - RNA, 1401 nt, Artificial Sequence
  derived and/or modified CDS sequence (wt) from neuraminidase__InfluenzaB__AFJ69969
augcuaccuucaacuauacaaacguuaacccuauuucucacaucagggggaguauuauuaucacuauaugugucagcuucauuaucauacuuacuauauucggauauauuguuaaaauucucaccaacagaaauaacugcaccaacaaugccauuggauugugcaaacgcaucaaauguucaggcugugaaccguucugcaacaaaaggggugacacuucuucucccagaaccggaguggacauacccgcguuuaucuugcccgggcucaaccuuucagaaagcacuccuaauuagcccucauagauucggagaaaccaaaggaaacucagcucccuugauaauuagggaaccuuuuauugcuuguggaccaaaugaaugcaaacacuuugcucuaacccauuaugcagcccaaccagggggauacuacaauggaacaagaggagacagaaacaagcugaggcaucuaauuucagucaaauugggcaaaaucccaacaguagaaaacuccauuuuccacauggcagcauggagcggguccgcgugccaugaugguaaggaauggacauauaucggaguugauggcccugacaauaaugcguugcucaaaguaaaauauggagaagcauacacugacacauaccauuccuaugcaaacaaaauccuaagaacacaagaaagugccugcaacugcaucgggggaaacuguuaucuuaugauaacugauggcucagcuucagguguuagugaaugcagauuucuuaagauucgggagggccgaauaauaaaagaaauauuuccaacaggaagaguaaaacacacugaggaaugcacaugcggauuugccagcaauaaaaccauagaaugugccuguagagauaacaguuacacagcaaaaagaccuuuugucaaauuaaacguggagacugauacagcagaaauaagauugaugugcacagauacuuauuuggacacccccagaccaaaugauggaagcauaacaggcccuugugaaucuaauggggacaaagggaguggaggcaucaagggaggauuuguucaucaaagaauggaauccaagauuggaaggugguacucucgaacgaugucuaaaacugaaaggauggggaugggacuguaugucaaguaugauggagacccauggacugacagugaugcccuagcuuuuaguggaguaaugguuucaaugaaagaaccugguugguacuccuuuggcuucgaaauaaaagauaagaaaugcgauguccccuguauugggauagagauggugcaugaugguggaaaagagacuuggcacucagcugcaacagccauuuacuguuuaaugggcucaggacagcugcugugggacacugucacagguguugacauggcucuguaa

SEQ ID NO: 61006 - RNA, 1401 nt, Artificial Sequence
  derived and/or modified CDS sequence (wt) from neuraminidase__InfluenzaB__AFJ69971
augcuaccuucaacuauacaaauguuaacccuauuucucacaucagggggaguacuauuaucacuauaugugucagcuucauuaucauacuuacuauauucggauauauugcuaaaauucucaccaacagaaauaacugcaccaacaaugccauuggauugugcaaacgcaucaaauguucaugcugugaaccguucugcaacaaaaggggugacauuucuucucccagaaccggaguggacauacccgcguuuaucuugcccgggcucaaccuuucagaaagcacuccuaauuagcccucauagauucggagaaaccaaaggaaacucagcucccuugauaauaagggaaccuuuuauugcuuguggaccaaaugaaugcaaacacuuugcucuaacccauuaugcagcccaaccagggggauacuacaauggaacaagaggagacagaaacaagcugaggcaucuaauuucagucaaauugggcaaaaucccaacaguagaaaacuccauuuuccacauggcagcauggagcggguccgcaugccaugaugguaaggaauggacauauaucggaguugaugguccugacaauaaugcauugcucaaaauaaaauauggagaagcauauacugacacauaucauuccuaugcaaacaacauccuaagaacacaagaaagugccugcaauugcaucgggggaaauuguuaucuuaugauaacugauggcucagcuucagguguuagugaaugcagauuucuuaagauucgagagggccgaauaauaaaagaaauauuuccaacaggaagaguaaaacauacugaggagugcacaugcggauuugccagcaauaaaaccauagaaugugccuguagagauaacaguuacacagcaaaaagacccuuugucaaauuaaacguggaaacugauacagcagaaauaagauugaugugcacagauacuuauuuggacacccccagaccagaugauggaagcauaacaggcccuugugaaucuaauggggacaaagggaguggaggcaucaagggaggauuuguucaucaaagaauggcauccaagauugggaggugguacucucgaacgaugucuaaaacugaaagaaaggggaugggacuguaugucaaguaugauggagacccauggacugacagugaugcccuugcuuuuaggggaguaaugguuucaaugaaagaaccugguugguacuccuuuggcuucgaaauaaaagauaagaaaugcgauguccccuguauugggauagagaugguacaugaugguggaaaagagacuuggcacucagcagcaacagccauuuacuguuuaaugggcucaggacagcugcugugggacacagucacaggugucgacauggcucuauaa

SEQ ID NO: 61007 - RNA, 1401 nt, Artificial Sequence
  derived and/or modified CDS sequence (wt) from neuraminidase__InfluenzaB__AFJ69973
augcuaccuucaacuauacaaauguuaacccuauuucucacaucagggggaguacuauuaucacuauaugugucagcuucauuaucauacuuacuauauucggauauauugcuaaaauucucaccaacagaaauaacugcaccaacaaugccauuggauugugcaaacgcaucaaauguucaugcugugaaccguucugcaacaaaaggggugacauuucuucucccagaaccggaguggacauacccgcguuuaucuugcccgggcucaaccuuucagaaagcacuccuaauuagcccucauagauucggagaaaccaaaggaaacucagcucccuugauaauaagggaaccuuuuauugcuuguggaccaaaugaaugcaaacacuuugcucuaacccauuaugcagcccaaccagggggauacuacaauggaacaagaggagacagaaacaagcugaggcaucuaauuucagucaaauugggcaaaaucccaacaguagaaaacuccauuuuccacauggcagcauggagcggguccgcaugccaugaugguaaggaauggacauauaucggaguugaugguccugacaauaaugcauugcucaaaauaaaauauggagaagcauauacugacacauaucauuccuaugcaaacaacauccuaagaacacaagaaagugccugcaauugcaucgggggaaauuguuaucuuaugauaacugauggcucagcuucagguguuagugcaugcagauuucuuaagauucgagagggccgaauaauaaaagaaauauuuccaacaggaagaguaaaacauacugaggagugcacaugcggauuugccagcaauaaaaccauagaaugugccuguagagauaacaguuacacagcaaaaagacccuuugucaaauuaaacguggaaacugauacagcagaaauaagauugaugugcacagauacuuauuuggacacccccagaccagaugauggaagcauaacaggcccuugugaaucuaauggggacaaagggaguggaggcaucaagggaggauuuguucaucaaagaauggcauccaagauugggaggugguacucucgaacgaugucuaaaacugaaaggaaggggaugggacuguaugucaaguaugauggagacccauggacugacagugaugcccuugcuuuuagaggaguaauggucucaaugaaagaaccugguugguacuccuuuggcuucgaaauaaaagauaagaaaugcgauguccccuguauugggauagagaugguacaugaugguggaaaagagacuuggcacucagcagcaacagccauuuacuguuuaaugggcucaggacagcugcugugggacacagucacaggugucgacauggcucuauaa

SEQ ID NO: 61008 - RNA, 1401 nt, Artificial Sequence
  derived and/or modified CDS sequence (wt) from neuraminidase__InfluenzaB__AFJ69975
augcuaccuucaacuauacaaacguuaaccuuauuucucacaucagggggaguguuauuaucacuauaugugucagcuucauugucauacuuacuauauucggauauauugcuaaaauuuucacgaacagaaauaacugcaccaauaaugccauuggauugugcaaacgcaucaaauguucaggcugugaaccguucugcaacaaaaggggugacacuucuucucccagaaccggaguggacguacccucguuuaucuugcccgggaucaaccuuucagaaagcacuccuaauuagcccccauagauucggagaaaccaaaggaaacucagcucccuugauaauaagggaaccuuuuauugcuuguggaccaaaggaaugcaaacauuuugcucuaacccauuaugcagcucaaccagggggauacuacaauggaacaagagaagacagaaacaagcugaggcaucuaauuucagucaaauugggcaaaaucccaacaguagaaaacucuauuuuccacauggcagcuuggagcggguccgcaugccaugaugguagagaauggacuuauaucggaguugauggcccagacaguaaugcauugcucaaaauaaaauauggagaagcauauacugacacauaccauuccuaugcaaaaaacauccuaaggacacaagaaagugccugcaauugcaucgggggagauuguuaucuuaugauaacugauggcccagcuucagggauuagugaaugcagauuccuuaagauucgagagggccgaauaauaaaagaaauauuuccaacaggaagaguaaaacauacugaggaaugcacaugcggauuugccagcaacaaaaccauagaaugugccuguagagauaacaguuacacagcaaaaagacccuuugucaaauuaaauguggagacugauacagcggaaauaagauugaugugcacagagacuuauuuggacacccccagaccaaaugauggaagcauaacagggccuugcgaaucuaauggggacaaagggaguggaggcaucaagggaggauuuguucaccaaagaauggcauccaagauuggaaggugguacucucggacgaugucuaaaacuaaaagaauggggaugggacuguauguaaaguaugauggagacccauggacugacagugaagcccuugcucuuaguggaguaaugguuucaauggaagaaccugguugguauuccuuuggcuucgaaauaaaagauaagaaaugugauguccccuguauugggauagaaaugguacaugauggugggaaaacgacuuggcacucagcagcaacagccauuuacuguuuaaugggcucaggacaacugcugugggacacugucacagguguuaauaugacucuguaa

SEQ ID NO: 61009 - RNA, 1401 nt, Artificial Sequence
  derived and/or modified CDS sequence (wt) from neuraminidase__InfluenzaB__AFJ69979
augcuaccuucaacuauacaaacguuaacccuauuucucacaucagggggaguauuauuaucacuauaugugucagcuucauuaucauacuuacuauauucggauauauugcuaaaauucucaccaacagaaauaacugcaccaacaaugccauuggauugugcaaacacaucaaauguucaggcugugaaccauucugcaacaaaaggggugacacuucuucucccagaaccggaguggacauacccgcguuuaucuugcccgggcucaaccuuucagaaagcacuccuaauuagcccucauagauucggagaaaccaaaggaaacucagcucccuugauaauaagggaaccuuuuauugcuugcggaccaaaugaaugcaaacacuuugcucuaacccauuaugcagcccaaccagggggauacuacaauggaacaagaggagacagaaacaagcugaggcaucuaauuucagucaaauugggcaaaaucccaacaguagaaaacuccauuuuccacauggcagcauggagcggguccgcgugccaugaugguaaggaauggacauauaucggaguugauggcccugacaauaaugcauugcucaaaguaaaauauggagaagcauauacugacacauaccauuccuaugcaaacaaaauccuaagaacacaagaaagugccugcaauugcaucgggggaaauuguuaucuuaugauaacugauggcucagcuucagguguuagugaaugcagauuucuuaagauucgagagggccgaauaauaaaagaaauauuuccaacgggaagaguaaaacacacugaggaaugcacaugcggauuugccagcaauaaaaccauagaaugugccuguagagauaacaguuacacagcaaaaagaccuuuugucaaauuaaacguggagacugauacagcagaaauaagacugaugugcacagauacuuauuuggacacccccagaccagaugauggaagcauaacaggcccuugugaaucuaauggggacaaagggaguggaggcaucaagggaggauuuguucaucaaagaauggaauccaagauuggaaggugguacucucgaacgaugucuaaaacugaaaggauggggaugggacuguaugucaaguaugauggagacccaugggcugacagugaugcccuagcuuuuaguggaguaaugguuucaaugaaagaaccugguugguacuccuuuggcuucgaaauaaaagauaagaaaugugauguccccuguauugggauagagauggugcaugaugguggaaaagagacuuggcacucagcagcaacagccauuuacuguuuaaugggcucaggacagcugcugugggacacugucacagguguugacauggcucuguaa

SEQ ID NO: 61010 - RNA, 1401 nt, Artificial Sequence; identical to SEQ ID NO: 61006
  derived and/or modified CDS sequence (wt) from neuraminidase__InfluenzaB__AFJ69981

SEQ ID NO: 61011 - RNA, 1401 nt, Artificial Sequence
  derived and/or modified CDS sequence (wt) from neuraminidase__InfluenzaB__AFJ69983
augcuaccuucaacuauacaaauguuaacccuauuucucacaucagggggaguacuauuaucacuauaugugucagcuucauuaucauauuuacuauauucggauauauugcuaaaauucucaccaacagaaauaacugcaccaacaaugccauuggauugugcaaacgcaucaaauguucaugcugugaaccguucugcaacaaaaggggugacauuucuucucccagaaccggaguggacauacccgcguuuaucuugcccgggcucaaccuuucagaaagcacuccuaauuagcccucauagauucggagaaaccaaaggaaacucagcucccuugauaauaagggaaccuuuuauugcuuguggaccaaaugaaugcaaacacuuugcucuaacccauuaugcagcccaaccagggggauacuacaauggaacaagaggagacagaaacaagcugaggcaucuaauuucagucaaauugggcaaaaucccaacaguagaaaacuccauuuuccacauggcagcauggagcggguccgcaugccaugaugguaaggaauggacauauaucggaguugaugguccugacaauaaugcauugcucaaaauaaaauauggagaagcauauacugacacauaucauuccuaugcaaacaacauccuaagaacacaagaaagugccugcaauugcaucgggggaaauuguuaucuuaugauaacugauggcucagcuucagguguuagugaaugcagauuucuuaagauucgagagggccgaauaauaaaagaaauacuuccaacaggaagaguaaaacauacugaggagugcacaugcggauuugccagcaauaaaaccauagaaugugccuguagagauaacaguuacacagcaaaaagacccuuugucaaauuaaacguggaaacugauacagcagaaauaagauugaugugcacagauacuuauuuggacacccccagaccagaugauggaagcauaacaggcccuugugaaucuaaugggggcaaagggaguggaggcaucaagggaggauuuguucaucaaagaauggcauccaagauugggaggugguacucucgaacgaugucuaaaacugaaaggaaggggaugggacuguaugucaaguaugauggagacccauggacugacagugaugcccuugcuuuuaggggaguaaugguuucaaugaaagaaccugguugguacuccuuuggcuucgaaauaaaagauaagaaaugcgauguccccuguauugggauagagaugguacaugaugguggaaaagagacuuggcacucagcagcaacagccauuuacuguuuaaugggcucaggacagcugcugugggacacagucacaggugucgacauggcucuauaa

SEQ ID NO: 61012 - RNA, 1401 nt, Artificial Sequence
  derived and/or modified CDS sequence (wt) from neuraminidase__InfluenzaB__AFJ69987
augcuaccuucaacuauacaaacguuaacccuauuucucacaucagggggaguauuauuaucacuauaugugucagcuucauuaucauacuuacuauauucggauauauugcuaaaauucucaccaacagaaauaacugcaccaacaaugccauuggauugugcaaacgcaucaaauguucaggcugugaaccguucugcaacaaaaggggugacacuucuucucccagaaccggaguggacauacccgcguuuaucuugcccgggcucaaccuuucagaaagcacuccuaauuagcccucauagauucggagaaaccaaaggaaacucagcucccuugauaauaagggaaccuuuuauugcuuguggaccaaaugaaugcaaacacuuugcucugacccauuaugcagcccaaccagggggauacuacaauggaacaagaggagacagaaacaagcugaggcaucuaauuucagucaaauugggcaaaaucccaacaguagaaaacuccauuuuccacauggcagcauggagcggguccgcgugccaugaugguaaggaauggacauauaucggaguugauggcccugacaauaaugcauugcucaaaguaaaauauggagaagcauauacugacacauaccauuccuaugcaaacaaaauccuaagaacacaagaaagugccugcaauugcaucgggggaaauuguuaucuaaugauaacugauggcucagcuucagguguuagugaaugcagauuucuuaagauucgagagggccgaauaauaaaagaaauauuuccaacaggaagaguaaaacacacugaggaaugcacaugcggauuugccagcaauaaaaccauagaaugugccuguagagacaacagguacacagcaaaaagaccuuuugucaaauuaaacguggagacugauacagcagaaauaagauugaugugcacagauacuuauuuggacacccccagaccaaaugauggaagcauaacaggcccuugugaaucugauggggacaaagggaguggaggcaccaagggaggauuuguucaucaaagaaugaaauccaagauuggaaggugguacucucgaacgaugucuaaaacugaaaggauggggaugggacuguaugucaaguaugauggagacccaugggcugacagugaugcccuaacuuuuaguggaguaaugguuucaaugaaagaaccugguugguacuccuuuggcuucgaaauaaaagauaagaaaugcgauguccccuguauugggauagagaugguacaugaugguggaaaagagacuuggcacucagcagcaacagccauuuacuguuuaaugggcucaggacagcugcugugggacacugucacagguguugacauggcucuguaa

SEQ ID NO: 61013 - RNA, 1401 nt, Artificial Sequence
  derived and/or modified CDS sequence (wt) from neuraminidase__InfluenzaB__AFJ76228
augcuaccuucaacuauacaaacguuaacccuauuucucacaucagggggaguguuauuaucacuauaugugucagcuucacugucauacuuacuauauucggguauauugcuaaaauuuucaccaacagaaauaacugcaccaacaaugccauugaauugugcaaacgcaucaaauguucaggcugugaaccguucugcaacaaaaggggugacacuucuucucccagaaccggaguggacauacccucguuuaucuugcccgggcucaaccuuucagaaagcacuccuaauuagcccucauagauucggagaaaccaaaggaaacucagcucccuugauaauaagggaaccuuuuauugcuuguggaccaaaggaaugcaaacacuuugcucuaacccauuaugcagcccaaccagggggauacuacaauggaacaagagaagacagaaacaagcugaggcaucuaauuucagucaaauugggcaaaaucccaacaguagaaaacuccauuuuccacauggcagcuuggagcggguccgcaugccaugaugguagagaauggacauauaucggaguugaugguccugacaguaaugcauugcucaaaauaaaauauggagaagcauauacugacacauaccauuccuaugcaaacaacauccuaagaacacaagaaagugccugcaauugcaucgggggagauuguuaucuuaugauaacugauggcucagcuucagggauuagugaaugcagauuucuuaagauucgagagggccgaauaauaaaagaaauauuuccaacaggaagaguagaacauacugaagaaugcacaugcggauuugccagcaauaaaaccauagaaugugccuguagagauaacaguuacacagcaaaaagacccuuugucaaauuaaauguggagaccgauacagcagaaauaagauugaugugcacagagacuuauuuggacacccccagaccagaugauggaagcauaacagggccuugugaaucuaauggggauaaagggaguggaggcaucaaaggaggauuuguucaucaaagaauggcauccaagauuggaaggugguacucucgaacgaugucuaaaacuaaaaggauggggauggggcuguaugucaaguaugauggagacccauggauugacagugaugcccuuacucuuagcggaguaaugguuucaauggaagaaccugguugguauuccuuuggcuucgaaauaaaagauaagaaaugugauguccccuguauugggauagagaugguacaugaugguggaaagaagacuuggcacucagcagcaacagccauuuacuguuuaaugggcucaggacaacugcuaugggacacugucacaggcguugauauggcucuguaa

SEQ ID NO: 61014 - RNA, 1401 nt, Artificial Sequence
  derived and/or modified CDS sequence (wt) from neuraminidase__InfluenzaB__AFJ76261
augcuaccuucaacuauacaaacguuaacccuauuucucacaucagggggaguauuauuaucacuauaugugucagcuucauugucauacuuacuauauucggauauauugcuaaaauucccaucaacagaaauuacugcaccaacaaugccauuggauugugcaaacgcaucaaauguucaggcugugaaccguucugcaacaaaaggggugacacuucuucucccagaaccggaguggacauacccgcguuuaucuugcccgggcucaaccuuucagaaagcacuccuaauuagcccucauagauucggagaaaccaaaggaaacucagcucccuugauaauaagggaaccuuuuauugcuuguggaccaaaggaaugcaaacacuuugcucuaacccacuaugcagcccaaccagggggauacuacaauggaacaagaggagacagaaacaagcugaggcaucuaauuucagucaaauugggcaaaaucccaacaguagaaaacuccauuuuccacauggcagcauggagcggguccgcaugccaugaugguaaggaauggacauauaucggaguugauggcccugacaauaaugcauugcucaaaauaaaauauggagaagcauauacugacacauaccauuccuaugcaaacaacauccuaagaacacaagaaagugccugcaauugcaucgggggaaauuguuaucuuaugauaacugauggcucagcuucagguguuagugaaugcagauuucuuaagauucgagagggccgaauaauaaaagaaauauuuccaacaggaagaauaaaacauacugaagaaugcacaugcggauuugcuagcaauaaaaccauagaaugugccuguagagacaacaguuacacagcaaaaagacccuuugucaaauuaaacguggagacugauacagcagaaauaagauugaugugcacagagacuuauuuggacacccccagaccagaugauggaagcauaacagggccuugugaaucuaauggggacaaagggaguggaggcaucaagggaggauuuguccaucaaagaauggcauccaagauuggaaggugguacucucgaacgaugucuaaaacuaaaaggauggggauggggcuguaugucaaguaugauggagacccaugggcugacagugaugcccuugcuuuuaguggaguaaugguuucaauggaagaaccugguugguacuccuuuggcuucgaaauaaaagacaagaaaugugauguccccuguauugggauagagaugguacaugaugguggaaaagagacuuggcacucagcagcuacagccauuuacuguuuaaugggcucaggacagcugcugugggacacugucacagguguuaauauggcucuguaa

SEQ ID NO: 61015 - RNA, 1401 nt, Artificial Sequence
  derived and/or modified CDS sequence (wt) from neuraminidase__InfluenzaB__AFJ76283
augcuaccuucaacuauacaaacguuaacccuauuucucacaucagggggaguauuauuaucacuauaugugucagcuucauugucauacuuacuauauucggauauauugcuaaaauucccaccaacagaaauuacugcaccaacaaugccauuggauugugcaaacgcaucaaauguucaggcugugaaccguucugcaacaaaaggggugacacuucuucucccagaaccggaguggacauacccgcguuuaucuugcccgggcucaaccuuucagaaagcacuccuaauuagcccucauagauucggagaaaccaaaggaaacucagcucccuugauaauaagggaaccuuuuauugcuuguggaccaaaggaaugcaaacacuuugcucuaacccacuaugcagcccaaccagggggauacuacaauggaacaagaggagacagaaacaagcugaggcaucuaauuucagucaaauugggcaaaaucccaacaguagaaaacuccauuuuccacauggcagcauggagcggguccgcaugccaugaugguaaggaauggacauauaucggaguugauggcccugacaauaaugcauugcucaaaauaaaauauggagaagcauauacugacacauaccauuccuaugcaaacaacauccuaagaacacaagaaagugccugcaauugcaucgggggaaauuguuaucuuaugauaacugauggcucagcuucagguguuagugaaugcagauuucuuaagauucgagagggccgaauaauaaaagaaauauuuccaacaggaagaauaaaacauacugaagaaugcacaugcggauuugcuagcaauaaaaccauagaaugugccuguagagauaacaguuacacagcaaaaagacccuuugucaaauuaaacguggagacugauacagcagaaauaagauugaugugcacagagacuuauuuggacacccccagaccagaugauggaagcauaacagggccuugugaaucuaauggggacaaagggaguggaggcaucaagggaggauuuguccaucaaagaauggcauccaagauuggaaggugguacucucgaacgaugucuaaaacugaaaggauggggauggggcuguaugucaaguaugauggagacccaugggcugacagugaugcccuuacuuuuaguggaguaaugguuucaauggaagaaccugguugguacuccuuuggcuucgaaauaaaagacaagaaaugugauguccccuguauugggauagagaugguacaugaugguggaaaagagacuuggcacucagcagcuacagccauuuacuguuuaaugggcucaggacagcugcugugggacacugucacagguguuaauauggcucuguaa

SEQ ID NO: 61016 - RNA, 1401 nt, Artificial Sequence
  derived and/or modified CDS sequence (wt) from neuraminidase__InfluenzaB__AFJ76305
augcuaccuucaacuauacaaacguuaacccuauuucucacaucagggggaguauuauuaucacuauaugugucagcuucauugucauacuuacuauauucggauauauugcuaaaauucccaucaacagaaauuacugcaccaacaaugccauuggauugugcaaacgcaucaaauguucaagcugugaaccguucugcaacaaaaggggugacacuucuucucccagaaccggaguggacauacccgcguuuaucuugcccgggcucaaccuuucagagagcacuccuaauuagcccucauagauucggagaaaccaaaggaaacucagcucccuugauaauaagggaaccuuuuauugcuuguggaccaaaggaaugcaaacacuuugcucuaacccacuaugcagcccaaccagggggauacuacaauggaacaagaggagacagaaacaagcugaggcaucuaauuucagucaaauugggcaaaaucccaacaguagaaaacuccauuuuccacauggcagcauggagcggguccgcaugccaugaugguaaggaauggacauauaucggaguugauggcccugacaauaaugcauugcucaaaauaaaauauggagaagcauauacugacacauaccauuccuaugcaaacaacauccuaagaacacaagaaagugccugcaauugcaucgggggaaauuguuaucuuaugauaacugauggcucagcuucagguguuagugaaugcagauuucuuaagauucgagagggccgaauaauaaaagaaauauuuccaacaggaagaauaaaacauacugaagaaugcacaugcggauuugcuagcaauaaaaccauagaaugugccuguagagauaacaguuacacagcaaaaagacccuuugucaaauuaaacguggagacugauacagcagaaauaagauugaugugcacagagacuuauuuggauacccccagaccagaugauggaaguauaacagggccuugugaaucuaauggggacaaagggaguggaggcaucaagggaggauuuguccaucaaagaauggcauccaagauuggaaggugguacucucgaacgaugucuaaaacugaaaggauggggaugggacuguaugucaaguaugauggagacccaugggcugacagugaugcccuuacuuuuaguggaguaaugguuucaauggaagaaccugguugguacuccuuuggcuucgaaauaaaagacaagaaaugugauguccccuguauugggauagagauggugcaugaugguggaaaagagacuuggcacucagcagcuacagccauuuacuguuuaaugggcucaggacagcugcugugggacacugucacagguguugauauggcucuguaa

SEQ ID NO: 61017 - RNA, 1401 nt, Artificial Sequence
  derived and/or modified CDS sequence (wt) from neuraminidase__InfluenzaB__AFJ76316
augcuaccuucaacuauacaaacauuaacccuauuucucacaucagggggaguauuauuaucacuauaugugucagcuucauugucauacuuacuauauucggauauauugcuaaaauucccaucaacagaaauuacugcaccaacaaugccauuggauugugcaaacgcaucaaauguucaggcugugaaccguucugcaacaaaaggggugacacuucuucucccagaaccggaguggacauacccgcguuuaucuugcccgggcucaaccuuucagaaagcacuccuaauuagcccucauagauucggagaaaccaaaggaaacucagcucccuugauaauaagggaaccuuuuauugcuuguggaccaaaggaaugcaaacacuuugcucuaacccacuaugcagcccaaccagggggauacuacaauggaacaagaggagacagaaacaagcugaggcaucuaauuucagucaaauugggcaaaaucccaacaguagaaaacuccauuuuccacauggcagcauggagcggguccgcaugccaugaugguaaggaauggacauauaucggaguugauggcccugacaauaaugcauugcucaaaauaaaauauggagaagcauauacugacacauaccauuccuaugcaaacaacauccuaagaacacaagaaagugccugcaauugcaucgggggaaauuguuaucuuaugauaacugauggcucagcuucagguguuagugaaugcagauuucuuaagauucgagagggccgaauaauaaaagaaauauuuccaacaggaagaauaaaacauacugaagaaugcacaugcggauuugcuagcaauaaaaccauagaaugugccuguagagauaacaguuacacagcaaaaagacccuuugucaaauuaaacguggagaccgauacagcagaaauaagauugaugugcacagagacuuauuuggacacccccagaccagaugauggaagcauaacagggccuugugaaucuaauggggacaaagggaguggaggcaucaagggaggauuuguccaucaaagaauggcauccaagauuggaaggugguacucucgaacgaugucuaaaacugaaaggauggggauggggcuguaugucaaguaugauggagacccaugggcugacagugaugcccuuacuuuuaguggaguaaugguuucaauggaagaaccugguugguacuccuuuggcuucgaaauaaaagacaagaaaugugauguccccuguauugggauagagaugguacaugaugguggaaaagagacuuggcacucagcagcuacagccauuuacuguuuaaugggcucaggacagcugcugugggacacugucacagguguuaauauggcucuguaa

SEQ ID NO: 61018 - RNA, 1401 nt, Artificial Sequence; identical to SEQ ID NO: 60680
  derived and/or modified CDS sequence (wt) from neuraminidase__InfluenzaB__AFJ76338

SEQ ID NO: 61019 - RNA, 1401 nt, Artificial Sequence
  derived and/or modified CDS sequence (wt) from neuraminidase__InfluenzaB__AFJ77331
augcuaccuucaacuauacaaacguuaacccuauuucucacaucagggggaguguuauuaucacuauaugugucagcuucauugucauacuuacuauauucggauauauugcuaaaauuuucacaaacagaaauaacugcaccaauaaugccauuggauugugcaaacgcaucaaauguucaggcugugaaccauucugcagcaaaaggggugacacuucuucucccagaaccggaguggacauacccucguuuaucuugcccgggcucaaccuuucagaaagcacuccuaauuagcccccauagauucggagaaaccaaaggaaacucagcucccuugauaauaagggaaccuuuuauugcuuguggaccaacggaaugcaaacacuuugcucuaacccauuaugcagcucaaccagggggauacuacaauggaacaagagaagacagaaacaagcugaggcaucuaauuucagucaaauugggcaaaaucccaacaguagaaaacuccauuuuccauauggcagcuuggagcggguccgcaugccaugaugguaaagaauggacauauaucggaguugauggccccgacaguaaugcauugcucaaaauaaaauauggagaagcauauacugacacauaccauuccuaugcaaaaaacauccuaaggacacaagaaagugccuacaauugcauugggggagauuguuaucuuaugauaacugauggcccagcuucagggauuagugaaugcagauuccuuaagauucgagagggccgaauaauaaaagaaauauuuccaacaggaagaguaaaacauacugaggaaugcacaugcggauuugccagcaacaaaaccauagaaugugcuugcagagauaacaguuacacagcaaaaagacccuuugucaaauuaaauguggagacugauacagcggaaauaagauugaugugcacagagacuuauuuggacacccccaggccaaaugauggaagcauaacagggccuugcgaaucugauggggacaaagggaguggaggcaucaagggaggauuuguucaucaaagaauggcauccaagauuggaaggugguacucucgaacgaugucuaaaacuaaaagaauggggaugggacuguauguaaaguaugauggagauccauggacugacagugaagcccuugcucuuaguggaguaaugguuucaauggaagaaccugguugguauuccuuuggcuucgaaauaaaagauaagaaaugugauguccccuguauugggauagaaaugguacaugauggugggaaaacgacuuggcacucagcagcaacagccauuuacuguuuaaugggcucaggacaacugcugugggacacugucacagguguugauauggcucuguaa

SEQ ID NO: 61020 - RNA, 1401 nt, Artificial Sequence
  derived and/or modified CDS sequence (wt) from neuraminidase__InfluenzaB__AFJ77351
augcuaccuucaacuauacaaacguuaacccuauuucucacaucagggggaguguuauuaucacuauaugugucagcuucauugucauacuuacuauauucggauauauugcuaaaauuuucacaaacagaaauaacugcaccaauaaugccauuggauugugcaaacgcaucaaauguucaggcugugaaccguucugcaacaaaaggggugacacuucuucucccagaaccggaguggacguacccucguuuaucuugcccgggcucaaccuuucagaaagcacuccuaauuagcccccauagauucggagaaaccaaaggaaacucagcucccuugauaauaagggaaccuuuuauugcuuguggaccaaaggaaugcaaacacuuugcucuaacccauuaugcagcucaaccagggggauacuacaauggaacaagagaagacagaaacaagcugaggcaucuaauuucagucaaauugggcaaaaucccaacaguagaaaacucuauuuuccacauggcagcuuggagcggguccgcaugccaugaugguagagaauggacauauaucggaguugauggccccgacaguaaugcauugcucaaaauaaaauauggagaagcauauacugacacauaccauuccuaugcaaaaaacauccuaaggacacaagaaagugccugcaauugcaucgggggagauuguuaucuuaugauaacugauggcccagcuucaggaauuagugaaugcagauuccuuaagauucgagagggccgaauaauaaaagaaauauuuccaacaggaagaguaaaacauacugaggaaugcacaugcggauuugccagcaacaaaaccauagaaugugccuguagagauaacaguuacacagcaaaaagacccuuugucaaauuaaauguggagacugauacagcggaaauaagauugaugugcacagagacuuauuuggacacccccagaccaaaugauggaagcauaacagggccuugcgaaucuaauggggacaaagggaguggaggcaucaagggaggauuuguucaucaaagaauggcauccaagauuggaaggugguacucucgaacgaugucuaaaacuaaaagaauggggaugggacuguauguaaaguaugauggagacccauggacugacagugaagcccuugcucuuaguggaguaaugguuucaauggaagaaccugguugguauuccuuuggcuucgaaauaaaagauaagaaaugugauguccccuguauugggauagaaaugguacaugauggugggaaaacgacuuggcacucagcagcaacagccauuuacuguuuaaugggcucaggacaacugcugugggacacugucacagguguugauauggcucuguaa

SEQ ID NO: 61021 - RNA, 1401 nt, Artificial Sequence
  derived and/or modified CDS sequence (wt) from neuraminidase__InfluenzaB__AFJ77362
augcuaccuucaacuauacaaacguuaacccuauuucucacaucagggggaguauuauuaucacuauaugugucagcuucauuaucauacuuacuauauucggauauauugcuaaaauucucaccaacagaaauaacugcaccaacaaugccauuggauugugcaaacgcaucaaauguucaggcugugaaccguucugcaacaaaaggggugacacuucuucucccagaaccggaguggacauacccgcguuuaucuugcccgggcucaaccuuucagaaagcacuccuaauuagcccucauagauucggagaaaccaaaggaaacucagcucccuugauaauaagggaaccuuuuauugcuuguggaccaaaugaaugcaaacacuuugcucuaacccauuacgcagcccaaccagggggauacuacaauggaacaagaggagacagaaacaagcugaggcaucuaauuucagucaaauugggcaaaaucccaacaguagaaaacuccauuuuccacauggcagcauggagcggguccgcaugccaugaugguaaggaauggacauauaucggaguugauggcccugacaauaaugcauugcucaaaauaaaauauggagaagcauauacugacacauaccauuccuaugcaaacaaaauccuaagaacacaagaaagugccugcaauugcaucgggggaaauuguuaucuuaugauaacugauggcucagcuucagguguuagugaaugcagauuucuuaagauucgagagggccgaauaauaaaagaaauauuuccaacaggaagaguaaaacacacugaggaaugcacaugcggauuugccagcaauaaaaccauagaaugugccuguagagacaacaguuacacagcaaaaagacccuuugucaaauuaaacguggagacugauacagcagaaauaagauugaugugcacagauacuuauuuggacacccccagaccagaugauggaagcauaacaggcccuugugaaucuaauggggacaaagggaguggaggcaucaagggaggauuuguucaucaaagaauggcauccaagauuggaaggugguacucucgaacgaugucuaaaacugaaaggauggggaugggacuguaugucaaguaugauggagacccaugggcugacagugaugcccuagcuuuuaguggaguaaugguuucaaugaaagaaccugguugguacuccuuuggcuucgaaauaaaagauaagaaaugcgauguccccuguauugggauagagaugguacaugaugguggaaaagagacuuggcacucagcagcaacagccauuuacuguuuaaugggcucaggacagcugcugugggacacugucacagguguugacauggcucuguaa

SEQ ID NO: 61022 - RNA, 1401 nt, Artificial Sequence
  derived and/or modified CDS sequence (wt) from neuraminidase__InfluenzaB__AFJ77384
augcuaccuucaacuauacaaacauuaacccuauuucucacaucagggggaguguuauuaucacuauaugugucagcuucauugucauacuuacuauauucggauauauugcuaaaauuuucacaaacagaaauaacugcaccaauaaugccauuggauugugcaaacgcaucaaauguucaagcugugaaccguucugcagcaaaaggggugacacuucuucucccagaaccggaguggacauacccucguuuaucuugcccgggcucaaccuuucagaaagcacuccuaauuagcccccauagauucggagaaaccaaaggaaacucagcucccuugauaauaagggaaccuuuuauugcuuguggaccaacggaaugcaaacacuuugcucuaacccauuaugcagcucaaccagggggauacuacaauggaacaagagaagacagaaacaagcugaggcaucuaauuucagucaaauugggcaaaaucccaacaguagaaaacuccauuuuccauauggcagcuuggagcggguccgcaugccaugaugguaaagaauggacauauaucggaguugauggcccugacaguaaugcauugcucaaaauaaaauauggagaagcauauacugacacauaccauuccuaugcaaaaaacauccuaaggacacaagaaagugccugcaauugcauugggggagauuguuaucuuaugauaacugauggcccagcuucagggauuagugaaugcagauuccuuaagauucgagagggccgaauaauaaaagaaauauuuccaacaggaagaguaaaacauacugaggaaugcacaugcggauuugccagcaacaaaaccauagaaugugcuugcagagauaacaguuacacagcaaaaagacccuuugucaaauuaaauguggagacugauacagcggaaauaagauugaugugcacagagacuuauuuggacacccccagaccaaaugauggaagcauaacagggccuugcgaaucugauggggacaaagggaguggaggcaucaagggaggauuuguucaucaaagaauggcauccaagauuggaaggugguacucucgaacgaugucuaaaacuaaaagaauggggaugggacuguauguaaaguaugauggagauccauggacugacagugaagcccuugcucuuaguggaguaaugguuucaauggaagaaccugguugguauuccuuuggcuucgaaauaaaagauaagaaaugugauguccccuguauugggauagaaaugguacaugauggugggaaaacgacuuggcacucagcagcaacagccauuuacuguuuaaugggcucaggacaacugcugugggacacugucacagguguugauauggcucuguaa

SEQ ID NO: 61023 - RNA, 1401 nt, Artificial Sequence
  derived and/or modified CDS sequence (wt) from neuraminidase__InfluenzaB__AFJ80132
augcuaccuucaacuauacaaacguuaacccuauuucucacaucagggggaguguuauuaucacuauaugugucagcuucacugucauacuuacuauauucggauauauugcuaaaauuuucaccaacagaaauaacugcaccaacaaugccauuggauugugcaaacgcaucaaauguucaggcugugaaccguucugcaacaaaaggggugacacuucuucucccagaaccggaguggacauacccucguuugucuugcccaggcucaaccuuucagaaagcacuccuaauuagcccucauagauucggagaaaccaaaggaaacucagcucccuugauaauaagggaaccuuuuauugcuuguggaccaaaggaaugcaaacacuuugcucuaacccauuaugcagcucaaccagggggauacuacaauggaacaagagaagacagaaacaagcugaggcaucuaauuucagucaaauugggcaaaauuccaacaguagaaaacuccauuuuccacauggcagcuuggagcggguccgcaugccaugaugguagagaauggacauauaucggaguugauggcccugacaguaaugcauugcucaaaauaaaauauggagaagcauauacugacacauaccauuccuaugcaaacaacauccuaagaacacaagaaagugccugcaauugcaucgggggagauuguuaucuuaugauaacugauggcucagcuucagggauuagugaaugcagauuucuuaagauucgagagggccgaauaauaaaagaaauauuuccaacaggaagaguagaacauacugaagaaugcacaugcggauuugccagcaauaaaaccauagaaugugccuguagagauaacaguuacacagcaaaaagacccuuugucaaauuaaauguggagacugauacagcagaaauaagauugaugugcacagagacuuauuuggacacccccagaccagaugauggaagcauaacagggccuugugaaucuaauggggauaaagggaguggaggcaucaagggaggauuuguucaucaaagaauggcauccaagauuggaaggugguacucucgaacgaugucuaaaacuaaaaggauggggaugggacuguaugucaaguaugauggagacccauggacugacagugaugcccuugcucuuaguggaguaaugguuucaauggaagaaccugguugguauuccuuuggcuucgaaauaaaagauaagaaaugugauguccccuguauugggauagagaugguacaugaugguggaaaaaagacuuggcacucagcagcaacagccauuuacuguuuaaugggcucaggacaacugcuaugggacacugucacagguguugauauggcucuguaa

SEQ ID NO: 61024 - RNA, 1401 nt, Artificial Sequence
  derived and/or modified CDS sequence (wt) from neuraminidase__InfluenzaB__AFJ80143
augcuaccuucaacuauacaaacguuaacccuauuucucacaucagggggaguguuauuaucacuauaugugucagcuucacugucauacuuacuauauucggauauauugcuaaaauuuucaccaacagaaauaacugcaccaacaaugccauuggauugugcaaacgcaucaaauguucaggcugugaaccguucugcaacaaaaggggugacacuucuucucccagaaccggaguggacauacccucguuuaucuugcccgggcucaaccuuucagaaagcacuccuaauuagcccucauagauucggagaaaccaaaggaaacucagcucccuugauaauaagggaaccuuuuauugcuuguggaccaaaggaaugcaaacacuuugcucuaacccauuaugcagcccaaccagggggauacuacaauggaacaagagaagacagaaacaagcugaggcaucuaauuucagucaaauuaggcaaaauuccaacaguagaaaacuccauuuuccacauggcagcuuggagcggguccgcaugccaugaugguagagaauggacauauaucggaguugauggcccugacaguaaugcauugcucaaaauaaaauauggagaagcauauacugacacauaccauuccuaugcaaacaacauccuaagaacacaagaaagugccugcaauugcaucgggggaaauuguuaucuuaugauaacugauggcucagcuucagggauuagugaaugcagauuucucaagauucgagagggccgaauaauaaaagaaauauuuccaacaggaagaguagaacauacugaagaaugcacaugcggauuugccagcaauaaaaccauagaaugugccuguagagauaacaguuacacagcaaaaagacccuuugucaaauuaaauguggagacugauacagcagaaauaagauugaugugcacagagacuuauuuggacacccccagaccagaugauggaagcauaacagggccuugugaaucuaauggggauaaagggaguggaggcaucaagggaggauuuguucaucaaagaauggcauccaagauuggaaggugguacucucgaacgaugucuaaaacuaaaaggauggggauggggcuguaugucaaguaugauggagacccauggacugacagugaugcccuugcucuuaguggaguaaugguuucaauggaagaaccugguugguauuccuuuggcuucgaaauaaaagauaagaaaugugauguccccuguauugggauagagaugguacaugaugguggaaagaagacuuggcacucagcagcaacagccauuuacuguuuaaugggcucaggacaacugcuaugggacacugucacagguguugacauggcucuguaa

SEQ ID NO: 61025 - RNA, 1401 nt, Artificial Sequence
  derived and/or modified CDS sequence (wt) from neuraminidase__InfluenzaB__AFJ80154
augcuaccuucaacuauacaaacguuaacccuauuucucacaucagggggaguguuauuaucacuauaugugucagcuucacugucauacuuacuauauucggauauauugcuaaaauuuucaccaacagaaauaacugcaccaacaaugccauuggauugugcaaacgcaucaaauguucaggcugugaaccguucugcaacaaaaggggugacacuucuucucccagaaccggaguggacauacccucguuuaucuugcccgggcucaaccuuucagaaagcaauccuaauuagcccucauagauucggagaaaccaaaggaaacucagcucccuugauaauaagggaaccuuuuauugcuuguggaccaaaggaaugcaaacacuuugcucuaacccauuaugcagcccaaccagggggauacuacaauggaacaagagaagacagaaacaagcugaggcaucuaauuucagucaaauuaggcaaaauuccaacaguagaaaacuccauuuuccacauggcagcuuggagcggguccgcaugccaugaugguagagaauggacauauaucggaguugauggcccugacaguaaugcauugcucaaaauaaaauauggagaagcauauacugacacauaccauuccuaugcaaacaacauccuaagaacacaagaaagugccugcaauugcaucgggggaaauuguuaucuuaugauaacugauggcucagcuucagggauuagugaaugcagauuucucaagauucgagagggccgaauaauaaaagaaauauuuccaacaggaagaguagaacauacugaagaaugcacaugcggauuugccagcaauaaaaccauagaaugugccuguagagauaacaguuacacagcaaaaagacccuuugucaaauuaaauguggagacugauacagcagaaauaagauugaugugcacagagacuuauuuggacacccccagaccagaugauggaagcauaacagggccuugugaaucuaauggggauaaagggaguggaggcaucaagggaggauuuguucaucaaagaauggcauccaagauuggaaggugguacucucgaacgaugucuaaaacuaaaaggauggggaugggacuguaugucaaguaugauggagacccauggacugacagugaugcccuugcucuuaguggaguaaugguuucaauggaagaaccugguugguauuccuuuggcuucgaaauaaaagauaagaaaugugauguccccuguauugggauagagaugguacaugaugguggaaagaagacuuggcacucagcagcaacagccauuuacuguuuaaugggcucaggacaacugcuaugggacacugucacagguguugacauggcucuguaa

SEQ ID NO: 61026 - RNA, 1401 nt, Artificial Sequence
  derived and/or modified CDS sequence (wt) from neuraminidase__InfluenzaB__AFJ80165
augcuaccuucaacuauacaaacguuaacccuauuccucacaucagggggaguguuauuaucacuauaugugucagcuucacugucauacuuacuauauucggauauauugcuaaaauuuucaccaacagaaauaacugcaccaacaauaccauuggauugugcaaacgcaucaaauguucaggcugugaaccguucugcaacaaaaggggugacacuucuucucccagaaccggaguggacauacccgcguuuaucuugcccgggcucaaccuuucagaaagcacuccuaauuagcccucauagauucggagaaaucaaaggaaacucagcucccuugauaauaagggaaccuuuuauugcuuguggaccaaaggaaugcaaacacuuugcucuaacccauuaugcagcccaaccagggggauacuacaauggaacaagagaagacagaaacaagcugaggcaucuaauuucagucaaauugggcaaaaucccaacaguagaaaacuccauuuuccacauggcagcauggagcggguccgcaugccaugaugguaaagaauggacauauaucggaguugauggcccugacaguaaugcauugcucaaaauaaaauauggagaagcauauacugacacauaccauuccuaugcaaacaacauccuaagaacacaagaaagugccugcaauugcaucgggggaaauuguuaucuuaugauaacugauggcucagcuucagguauuagugaaugcagauuucuuaagauucgagagggccgaauaauaaaagaaauauuuccaacaggaagaguagaacauacugaagaaugcacaugcggauuugccagcaauaaaaccauagaaugugccuguagagauaacaguuacacagcaaaaagacccuuugucaaauuaaauguggagacugauacagcagaaauaagauugaugugcacagagacuuauuuggacacccccagaccagaugauggaagcauaacagggccuugugaaucuaauggggauaaagggaguggaggcaucaagggaggauuuguucaucaaagaauggcaucuaagauuggaaggugguacucucgaacaaugucuaaaacuaaaaggauggggaugggacuguaugucaaguaugauggagacccauggacugacagugaugcccuugcucuuaguggaguaaugguuucaauggaagaaccugguugguacuccuuuggcuucgaaauaaaagauaagaaaugugauauccccuguauugggauagagaugguacaugaugguggaaaggagacuuggcacucagcagcaacagccauuuacuguuuaaugggcucaggacaacugcuaugggacacugucacagguguugauauggcucuguaa

SEQ ID NO: 61027 - RNA, 1401 nt, Artificial Sequence
  derived and/or modified CDS sequence (wt) from neuraminidase__InfluenzaB__AFJ80176
augcuaccuucaacuauacaaacguuaacccuauuucucacaucagggggaguguuauuaucacuauaugugucagcuucacugucauacuuacuauauucggauauauugcuaaaauuuucaccaacagaaauaacuguaccaacaaugccauuggauugugcaaacgcaucaaauguucaggcugugaaccguucugcaacaaaaggggugacacuucuucucccagaaccggaguggacauacccucguuuaucuugcccgggcucaaccuuucagaaagcacuccuaauuagcccucauagauucggagaaaccaaaggaaacucagcucccuugauaauaagggaaccuuuuauugcuuguggaccaaaggaaugcaaacacuuugcucuaacccauuaugcagcccaaccagggggauacuacaauggaacaagagaagacagaaacaagcugaggcaucuaauuucagucaaauuaggcaaaauuccaacaguagaaaacuccauuuuccacauggcagcuuggagcggguccgcaugccaugaugguagagaauggacauauaucggaguugauggcccugacaguaaugcauugcucaaaauaaaauauggagaagcauauacugacacauaccauuccuaugcaaacaacauccuaagaacacaagaaagugccugcaauugcaucgggggaaauuguuaucuuaugauaacugauggcucagcuucagggauuagugaaugcagauuucucaagauucgagagggccgaauaauaaaagaaauauuuccaacaggaagaguagaacauacugaagaaugcacaugcggauuugccagcaauaaaaccauagaaugugccuguagagauaacaguuacacagcaaaaagacccuuugucaaauuaaauguggagacugauacagcagaaauaagauuaaugugcacagagacuuauuuggacacccccagaccagaugauggaagcauaacagggccuugugaaucuaauggggauaaagggaguggaggcaucaagggaggauuuguucaucaaagaauggcauccaagauuggaaggugguacucucgaacgaugucuaaaacuaaaaggauggggaugggacuguaugucaaguaugauggagacccauggacugacagugaugcccuugcucuuaguggaguaaugguuucaauggaagaaccugguugguauuccuuuggcuucgaaauaaaagauaagaaaugugauguccccuguauugggauagagaugguacaugaugguggaaagaagacuuggcacucagcagcaacagccauuuacuguuuaaugggcucaggacaacugcuaugggacacugucacagguguugacauggcucuguaa

SEQ ID NO: 61028 - RNA, 1401 nt, Artificial Sequence
  derived and/or modified CDS sequence (wt) from neuraminidase__InfluenzaB__AFJ80187
augcuaccuucaacuauacaaacguuaacccuauuucucacaucagggggaguguuauuaucacuauaugugucagcuucacugucauacuuacuauauucggguauauugcuaaaauuuucaccaacagaaauaacugcaccaacaaugccauugaauugugcaaacgcaucaaauuuucaggcugugaaccguucugcaacaaaaggggugacacuucuucucccagaaccggaguggacauacccucguuuaucuugcccgggcucaaccuuucagaaagcacuccuaauuagcccucauagauucggagaaaccaaaggaaacucagcucccuugauaauaagggaaccuuuuauugcuuguggaccaaaggaaugcaaacacuuugcucuaacccauuaugcagcccaaccagggggauacuacaauggaacaagagaagacagaaacaagcugaggcaucuaauuucagucaaauugggcaaaaucccaacaguagaaaacuccauuuuccacauggcagcuuggagcggguccgcaugccaugaugguagagaauggacauauaucggaguugaugguccugacaguaaugcauugcucaaaauaaaauauggagaagcauauacugacacauaccauuccuaugcaaacaacauccuaagaacacaagaaagugccugcaauugcaucgggggagauuguuaucuuaugauaacugauggcucagcuucagggauuagugaaugcagauuucuuaagauucgagagggccgaauaauaaaagaaauauuuccaacaggaagaguagaacauacugaagaaugcacaugcggauuugccagcaauaaaaccauagaaugugccuguagagauaacaguuacacagcaaaaagacccuuugucaaauuaaauguggagaccgauacagcagaaauaagauugaugugcacagagacuuauuuggacacccccagaccagaugauggaagcauaacagggccuugugaaucuaauggggauaaagggaguggaggcaucaaaggaggauuuguucaucaaagaauggcauccaagauuggaaggugguacucucgaacgaugucuaaaacuaaaaggauggggauggggcuguaugucaaguaugauggagacccauggauugacagugaugcccuuacucuuagcggaguaaugguuucaauggaagaaccugguugguauuccuuuggcuucgaaauaaaagauaagaaaugugauguccccuguauugggauagagaugguacaugaugguggaaagaagacuuggcacucagcagcaacagccauuuacuguuuaaugggcucaggacaacugcuaugggacacugucacaggcguugauauggcucuguaa

SEQ ID NO: 61029 - RNA, 1401 nt, Artificial Sequence
  derived and/or modified CDS sequence (wt) from neuraminidase__InfluenzaB__AFJ80198
augcuaccuucaacuauacaaacguuaacccuauuucucacaucagggggaguguuauuaucacuauaugugucagcuucacugucauacuuacuauauucggauauauugcuaaaauuuucaccaacagaaauaacugcaccaacaaugccauuggauugugcaaacgcaucaaauguucaggcugugaaccguucugcaacaaaaggggugacacuucuucucccagaaccggaguggacauacccucguuuaucuugcccgggcucaaccuuucagaaagcacuccuaauuagcccucauagauucggagaaaccaaaggaaacucagcucccuugauaauaagggaaccuuuuauugcuuguggaccaaaggaaugcaaacacuuugcucuaacccauuaugcagcccaaccagggggauacuacaauggaacaagagaagacagaaacaagcugaggcaucuaaucucagucaaauuaggcaaaauuccaacaguagaaaacuccauuuuccacauggcagcuuggagcggguccgcaugccaugaugguagagaauggacauauaucggaguugauggcccugacaguaaugcauugcucaaaauaaaauauggagaagcauauacugacacauaccauuccuaugcaaacaacauccuaagaacacaagaaagugccugcaauugcaucgggggaaauuguuaucuuaugauaacugauggcucagcuucagggauuagugaaugcagauuucucaagauucgagagggccgaauaauaaaagaaauauuuccaacaggaagaguagaacauacugaagaaugcacaugcggauuugccagcaauaaaaccauagaaugugccuguagagauaacaguuacacagcaaaaagacccuuugucaaauuaaauguggagacugauacagcagaaauaagauugaugugcacagagacuuauuuggacacccccagaccagaugauggaagcauaacagggccuugugaaucuaauggggauaaagggaguggaggcaucaagggaggauuuguucaucaaagaauggcauccaagauuggaaggugguacucucgaacgaugucuaaaacuaaaaggauggggaugggacuguaugucaaguaugauggagacccauggacugacagugaugcccuugcucuuaguggaguaaugguuucaauggaagaaccugguugguauuccuuuggcuucgaaauaaaagauaagaaaugugauguccccuguauugggauagagaugguacaugaugguggaaagaagacuuggcacucagcagcaacagccauuuacuguuuaaugggcucaggacaacugcuaugggacacugucacagguguugacauggcucuguaa

SEQ ID NO: 61030 - RNA, 1401 nt, Artificial Sequence
  derived and/or modified CDS sequence (wt) from neuraminidase__InfluenzaB__AFJ80220
augcuacccucaacuauacaaacguuaacccuauuccucacaucagggggaguguuauuaucacuauaugugucagcuucacugucauacuuacuauauucggauauauugcuaaaauuuucaccaacagaaauaacugcaccaacaaugccauuggauugugcaaacgcaucaaauguucaggcugugaaccguucugcaacaaaaggggugacacuucuucucccagaaccggaguggacauacccgcguuuaucuugcccgggcucaaccuuucagaaagcacuccuaauuagcccucauagauucggagaaaccaaaggaaacucagcucccuugauaauaagggaaccuuuuauugcuuguggaccaaaggaaugcaaacacuuugcucuaacccauuaugcagcccaaccagggggauacuacaauggaacaagagaagacagaaacaagcugaggcaucuaauuucagucaaauugggcaaaaucccaacaguagaaaacuccauuuuccacauggcagcauggagcggguccgcaugccaugaugguaaagaauggacauauaucggaguugauggcccugacaguaaugcauugcucaaaauaaaauauggagaagcauauacugacacauaccauuccuaugcaaacaacauccuaagaacacaagaaagugccugcaauugcaucggaggaaauuguuaucuuaugauaacugauggcucagcuucagguauuagugagugcagauuucuuaagauucgagagggccgaauaauaaaagaaauauuuccaacaggaagaguaaaacauacugaagaaugcacaugcggauuugccagcaauaaaaccauagaaugugccuguagagauaacaguuacacagcaaaaagacccuuugucaaauuaaauguggagacugauacagcagaaauaagauugaugugcacagagacuuauuuggacacccccagaccagaugauggaagcauaacagggccuugugaaucuaauggggauaaagggaguggaggcaucaagggaggauuuguucaucaaagaauggcauccaagauuggaaggugguacucucgaacaaugucuaaaaccaaaaggauggggaugggacuguaugucaaguaugauggagacccauggacugacagugaugcccuugcucuuaguggaguaaugguuucaauggaagaaccugguugguauucauuuggcuucgaaauaaaagauaagaaaugugauguccccuguauugggauagagaugguacaugaugguggaaaggagacuuggcacucagcagccacagccauuuacuguuuaaugggcucaggacaacugcuaugggacacugucacagguguugauauggcucuguaa

SEQ ID NO: 61031 - RNA, 1401 nt, Artificial Sequence
  derived and/or modified CDS sequence (wt) from neuraminidase__InfluenzaB__AFJ80231
augcuaccuucaacuauacaaacguuaacccuauuucucacaucagggggaguguuauuaucacuauaugugucagccucacugucauacuuacuauauucggguauauugcuaaaauuuucacuaacagaaauaacugcaccaacaaugccauugaauugugcaaacgcaucaaauguucaggcugugaaccguucugcaacaaaaggggugacacuuuuucucccagaaccggaguggacauacccucguuuaucuugcccgggcucaaccuuucagaaagcacuccuaauuagcccucauagauucggagaaaccaaaggaaacucagcucccuugauaauaagggaaccuuuuauugcuuguggaccaaaggaaugcaaacacuuugcucuaacccauuaugcagcccaaccagggggauacuacaauggaacaagagaagacagaaacaagcugaggcaucuaauuucagucgaauugggcaaaaucccaacaguagaaaacuccauuuuccacauggcagcuuggagcggguccgcaugccaugaugguaaagaauggacauauaucggaguugaugguccugacaguaaugcauugcucaaaauaaaauauggagaagcauauacugacacauaccauuccuaugcaaacaacauccuaagaacacaagaaagugccugcaauugcaucgggggagauugcuaucuuaugauaacugauggcucagcuucagggauuagugaaugcagauuucuuaagauucgagagggccgaauaauaaaagaaauauuuccaacaggaagaguagaacauacugaagaaugcacaugcggauuugccagcaauaaaaccauagaaugugccuguagagauaacaguuacacagcaaaaagacccuuugucaaauuaaauguggagaccgauacagcagaaauaagauugaugugcacagagacuuauuuggacacccccagaccagaugauggaagcauaacagggccuugugaaucuaauggggauaaagggaguggaggcaucaaaggaggauuuguucaucaaagaauggcauccaagauuggaaggugguacucucgaacgaugucuaaaacuaaaaggauggggauggggcuguaugucaaguaugauggagacccauggauugacagugaugcccuuacucuuagcggaguaaugguuucaauggaagaaccugguugguauuccuuuggcuucgaaauaaaagauaagaaaugugauguccccuguauugggauagagaugguacaugaugguggaaagaagacuuggcacucagcagcaacagccauuuacuguuuaaugggcucaggacaacugcuaugggacacugucacaggcguugauauggcucuguaa

SEQ ID NO: 61032 - RNA, 1401 nt, Artificial Sequence
  derived and/or modified CDS sequence (wt) from neuraminidase__InfluenzaB__AFJ80242
augcuaccuucaacuauacaaacguuaacccuauuucucacaucagggggaguacuguuaucacuauaugugucagccuuacugucauacuuacuguauucggauauauugcuaaaauuuucaccaacaaaaguaauugcaccaacaaugucauuggacugcgcgaacgcaucaaauguucaggcugugaaucauucugcaacagaagagaugacauuucuucucccagaaccggaguggacauacccucguuuaucuugccaggguucaaccuuucagaaagcacuccuaauuagcccucauagauucggagaagccaaaggaaacucagcucccuugauaauaagggaaccuuuuauugcuuguggaccaaaggaguguaaacacuuugcucuaacccauuaugcagcucaaccagggggauacuauaauggaacaagagaggacagaaacaagcugaggcaucugauuucagucaacuuaggcaaaaucccaacuguagaaaacuccauuuuccacauggcagcuuggaguggauccgcaugccaugaugguagagaauggacuuauaucggaguugauggcccugacaguaaugcauugaucaaaauaaaauauggagaagcauacacugacacauaccauuccuaugcaaacaacauccuaagaacacaagaaagugccugcaauugcaucgggggagauuguuaucuuaugauaacugauggcucagcuucaggaauuaguagaugcagauuccuuaagauucgagagggucgaauaauaaaagaaauauuuccaacaggaagaguagagcauacugaagaaugcacaugcggauuugccagcaauaaaaccauagaaugugccuguagagauaacaguuacacagcaaaaagacccuuugucaaauuaaauguggaaacugauacagcugaaauaagauugaugugcacagagacuuauuuggacacccccagaccagaugauggaagcauaacagggccuugcgaaucuaauggggacaaagggaauggagguaucaagggaggauuuguccaucaaagaauggcauccaggauuggaagaugguacucucgaacgaugucuaaaacuaaaagaauggggauggaacuguaugucaaguaugauggagacccauggacugacagugacgcccuugcuccuaguggaguaauggucucaauggaagaaccugguugguauucuuucgguuucgaaauaaaagauaagaaaugcgauguccccuguauugggauagagaugguacacgaugguggaaaaacgacuuggcacucagcagcaacagccauuuacuguuuaaugggcucaggacaguugcuaugggacacugucacagguguugauauggcuuuguaa

SEQ ID NO: 61033 - RNA, 1401 nt, Artificial Sequence
  derived and/or modified CDS sequence (wt) from neuraminidase__InfluenzaB__AFJ80660
augcuaccuucaacuauacaaacguuaacccuauuucucacaucagggggaguguuauuaucacuauaugugucagcuucacugucauacuuacuauauucggauauauugcuaaaauuuucaccaacagaaauaacugcaccaacaaugccauuggauugugcaaacgcaucaaauguucaggcugugaaccguucugcaacaaaaggggugacacuucuucucccagaaccggaguggacauacccucguuuaucuugcccgggcucaaccuuucagaaagcacuccuaauuagcccucauagauucggagaaaccaaaggaaacucagcucccuugauaauaagggaaccuuuuauugcuuguggaccaaaggaaugcaaacacuuugcucuaacccauuaugcagcccaaccagggggauacuacaauggaacaagagaagacagaaacaagcugaggcaucuaauuucagucaaauugggcaaaaucccaacaguagaaaacuccauuuuccacauggcagcuuggagcggauccgcaugccaugaugguagagaauggacauauaucggaguugauggcccugacaguaaugcauugcucaaaauaaaauauggagaagcauauacugacacauaccauuccuaugcaaacaacauccuaagaacacaagaaagugccugcaauugcaucgggggagauuguuaucuuaugauaacugauggcucagcuucagggauuagugaaugcagauuucuuaagauucgagagggccgaauaauaaaagaaauauuuccaacaggaagaguagaacauacugaagaaugcacaugcggauuugccagcaauaaaaccauagaaugugccuguagagauaacaguuacacagcaaaaagacccuuugucaaauuaaauguggagacugauacagcagaaauaagauugaugugcacagagacuuauuuggacacccccagaccagaugauggaagcauaacagggccuugugaaucuaauggggauaaagggaguggaggcaucaagggaggauuuguucaucaaagaaugacauccaagauuggaaggugguacucucgaacgaugucuaaaacuaaaaggauggggaugggacuguaugucaaguaugauggagacccauggacugacagugaugcccuugcucuuaguggaguaaugguuucaauggaagaaccugguugguauuccuuuggcuucgaaauaaaagauaagaaaugugauguccccuguauugggauagagaugguacaugaugguggaaagaagacuuggcacucagcagcaacagccauuuacuguuuaaugggcucaggacaacugcuaugggacacugucacaggcguugauauggcucuguaa

SEQ ID NO: 61034 - RNA, 1401 nt, Artificial Sequence; identical to SEQ ID NO: 61031
  derived and/or modified CDS sequence (wt) from neuraminidase__InfluenzaB__AFJ80671

SEQ ID NO: 61035 - RNA, 1401 nt, Artificial Sequence
  derived and/or modified CDS sequence (wt) from neuraminidase__InfluenzaB__AFJ80682
augcuaccuucaacuauacaaacguuaacccuauuucucacaucagggggaguguuauuaucacuauaugugucagccucacugucauacuuacuauauucggguauauugcuaaaauuuucacuaacagaaauaacugcaccaacaaugccauugaauugugcaaacgcaucaaauguucaggcugugaaccguucugcaacaaaaggggugacacuuuuucucccagaaccggaguggacauacccucguuuaucuugcccgggcucaaccuuucagaaagcacuccuaauuagcccucauagauucggagaaaccaaaggaaacucagcucccuugauaauaagggaaccuuuuauugcuuguggaccaaaggaaugcaaacacuuugcucuaacccauuaugcagcccaaccagggggauacuacaauggaacaagagaagacagaaacaagcugaggcaucuaauuucagucgaauugggcaaaaucccaacaguagaaaacuccauuuuccacauggcagcuuggagcggguccgcaugccaugaugguaaagaauggacauauaucggaguugaugguccugacaguaaugcauugcucaaaauaaaauauggagaagcauauacugacacauaccauuccuaugcaaacaacauccuaagaacacaagaaagugccugcaauugcaucgggggagauugcuaucuuaugauaacugauggcucagcuucagggauuagugaaugcagauuucuuaagauucgagagggccgaauaauaaaagaaauauuuccaacaggaagaguagaacauacugaagaaugcacaugcggauuugccagcaauaaaaccauagaaugugccuguagagauaacaguuacacagcaaaaagacccuuugucaaauuaaauguggagaccgauacagcagaaauaagauugaugugcacagagacuuauuuggacacccccagaccagaugauggaagcauaacagggccuugugaaucuaauggggauaaagggaguggaggcaucaaaggaggauuuguucaucaaagaauggcauccaagauuggaaggugguacucucgaacgaugucuaaaacuaaaaggauggggauggggcuguaugucaaguaugauggagacccauggauugacagugaugcucuuacucuuagcggaguaaugguuucaauggaagaaccugguugguauuccuuuggcuucgaaauaaaagauaagaaaugugauguccccuguauugggauagagaugguacaugaugguggaaagaagacuuggcacucagcagcaacagccauuuacuguuuaaugggcucaggacaacugcuaugggacacugucacaggcguugauauggcucuguaa

SEQ ID NO: 61036 - RNA, 1401 nt, Artificial Sequence
  derived and/or modified CDS sequence (wt) from neuraminidase__InfluenzaB__AFJ80693
augcuaccuucaacuauacaaacguuaacccuauuucucacaucagggggaguguuauuaucacuauaugugucagcuucacugucauacuuacuauauucggguauauugcuaaaauuuucaccaacagaaauaacugcaccaacaaugccauugaauugugcaaacgcaucaaauguucaggcugugaaccguucugcaacaaaaggggugacacuucuucucccagaaccggaguggacauacccucguuuaucuugcccgggcucaaccuuucagaaagcacuccuaauuagcccucauagauucggagaaaccaaaggaaacucagcucccuugauaauaagggaaccuuucauugcuuguggaccaaaggaaugcaaacacuuugcucuaacccauuaugcagcccaaccagggggauacuacaauggaacaagagaagacagaaacaagcugaggcaucuaauuucagucaaauugggcaaaaucccaacaguagaaaacuccauuuuccacauggcagcuuggagcggguccgcaugccaugaugguagagaauggacauauaucggaguugaugguccugacaguaaugcauugcucaaaauaaaauauggagaagcauauacugacacauaccauuccuaugcaaacaacauccuaagaacacaagaaagugccugcaauugcaucgggggagauuguuaucuuaugauaacugauggcucagcuucagggauuagugaaugcagauuucuuaagauucgagagggccgaauaauaaaagaaauauuuccaacaggaagaguagaacauacugaagaaugcacaugcggauuugccagcaauaaaaccauagaaugugccuguagagauaacaguuacacagcaaaaagacccuuugucaaauuaaauguggagaccgauacagcagaaauaagauugaugugcacagagacuuauuuggacacccccagaccagaugauggaagcauaacagggccuugugaaucucauggggauaaagggaguggaggcaucaaaggaggauuuguucaucaaagaauggcauccaaaauuggaaggugguacucucgaacgaugucuaaaacuaaaaggauggggauggggcuguaugucaaguaugauggagacccauggauugacaguggugcccuuacucuuagcggaguaaugguuucaauggaagaaccugguugguauuccuuuggcuucgaaauaaaagauaagaaaugugauguccccuguauugggauagagaugguacaugaugguggaaagaagacuuggcauucagcagcaacagccauuuacuguuuaaugggcucaggacaacugcuaugggacacugucacaggcguugauauggcucuguaa

SEQ ID NO: 61037 - RNA, 1401 nt, Artificial Sequence
  derived and/or modified CDS sequence (wt) from neuraminidase__InfluenzaB__AFJ80726
augcuaccuucaacuauacaaacguuaacccuauuucucacaucagggggaguguuauuaucacuauaugugucagcuucacugucauacuuacuauauucggauauauugcuaaaauuuucacaaacagaaauaacugcaccaacaaugccauuggauugugcaaacgcaucaaauguucaggcugugaaccguucugcaacaaaaggggugacacuucuucucccagaaccggaauggacguacccucguuuaucuugcccgggcucaaccuuucagaaagcacuccuaauuagcccccauagauucggagaaaccaaaggaaacucagcucccuugauaauaagggaaccuuuuauugcuuguggaccaaaggaaugcaaacacuuugcucuaacccauuaugcagcucaaccagggggauacuacaacggaacaagagaagacagaaacaagcugaggcaucuaauuucagucaaauugggcaaaaucccaacaguagaaaacucuauuuuccacauggcagcuuggagcggguccgcaugccaugaugguagagaauggacauauaucggaguugauggccccgacaguaaugcauugcucaaaauaaaauauggagaagcauauacugacacauaccauuccuaugcaaaaaacauccuaaggacacaagaaagugccugcaauugcaucgggggagauuguuaucuuaugauaacugauggcucagcuucagggauuagugaaugcagauuccuuaagauucgagagggccgaauaauaaaagaaauauuuccaacaggaagaguaaaacauacugaagaaugcacaugcggauuugccagcaacaaaaccauagaaugugccuguagagauaacaguuacacagcaaaaagacccuuugucaaauuaaauguggagacugauacagcggaaauaagauugaugugcacagagacuuauuuggacacccccagaccaaaugauggaagcauaacagggccuugcgaaucuaauggggacagaggggguggaggcaucaaaggaggguuuguucaucaaagaauggcauccaagauuggaaggugguacucucgaacgaugucuaaaacuaaaagaauggggaugggacuguaugucaaguaugauggagacccauggacugacagugaagcccuugcucuuaguggaguaaugguuccaauggaagaaccugguugguauuccuuuggcuucgaaauaaaagauaagaaaugugauguccccuguauugggauagaaaugguacaugauggugggaaaacgacuuggcacucagcagcaacagccauuuacuguuuaaugggcucaggacaacuacugugggacacugucacagguguugauauggcucuguaa

SEQ ID NO: 61038 - RNA, 1401 nt, Artificial Sequence
  derived and/or modified CDS sequence (wt) from neuraminidase__InfluenzaB__AFJ80737
augcuaccuucaacuauacaaacguuaacccuauuucucacaucagggggaguguuauuaucacuauaugugucagcuucauugucauacuuacuauauucggauauauugcuaaaauuuucacaaacagaaauaacugcaccaauaaugccauuggauugugcaaacgcaucaaauguucaggcugugaaccguucugcaacaaaaggggugacacuucuucucccagaaccggaguggacguacccucguuuaucuugcccgggcucaaccuuucagaaagcacuccuaauuagcccccauagauucggagaaaccaaaggaaacucagcucccuugauaauaagggaaccuuuuauugcuuguggaccaaaggaaugcaaacacuuugcucuaacccauuaugcagcucaaccagggggauacuacaauggaacaagagaagacagaaacaagcugaggcaucuaauuucagucaaauugggcaaaaucccaacaguagaaaacucuauuuuccacauggcagcuuggagcggguccgcaugccaugaugguagagaauggacauauaucggaguugauggccccgacaguaaugcauugcucaaaauaaaauauggagaagcauauacugacacauaccauuccuaugcaaaaaacauccuaaggacacaagaaagugccugcaauugcaucaggggagauuguuaucuuaugauaacugauggcccagcuucaggaauuagugaaugcagauuccuuaagauucgagagggccgaauaauaaaagaaauauuuccaacaggaagaguaaaacauacugaggaaugcacaugcggauuugccagcaacaaaaccauagaaugugccuguagagauaacaguuacacagcaaaaagaccauuugucaaauuaaauguggagacugauacagcggaaauaagauugaugugcacagagacuuauuuggacacccccagaccaaaugauggaagcauaacagggccuugcgaaucuaauggggacaaagggaguggaggcaucaagggaggauuuguucaucaaagaauggcauccaagauuggaaggugguacucucgaacgaugucuaaaacuaaaagaauggggaugggacuguauguaaaguaugauggagacccauggacugacagugaagcccuugcucuuaguggaguaaugguuucaauggaagaaccugguugguauuccuuuggcuucgaaauaaaagauaagaaaugugauguccccuguauugggauagaaaugguacaugauggugggaaaacgacuuggcacucagcagcaacagccauuuacuguuuaaugggcucaggacagcugcugugggacacugucacagguguugauauggcucuguaa

SEQ ID NO: 61039 - RNA, 1401 nt, Artificial Sequence; identical to SEQ ID NO: 60680
  derived and/or modified CDS sequence (wt) from neuraminidase__InfluenzaB__AFJ80759

SEQ ID NO: 61040 - RNA, 1401 nt, Artificial Sequence
  derived and/or modified CDS sequence (wt) from neuraminidase__InfluenzaB__AFJ80770
augcuaccuucaacuauacaaacguuaacccuauuucucacaucagggggaguguuauuaucacuauaugugucagcuucauugucauacuuacuauauucggauauauugcuaaaauuuucacaaacagaaauaacugcaccaacaaugccauuggauugugcaaacgcaucaaauguucaggcugugaaccguucugcaacaaaaggggugacacuucuucucccagaaccggaguggacguacccucguuuaucuugcccgggcucaacuuuucagaaagcacuccuaauuagcccccauagauucggagaaaccaaaggaaacucagcucccuugauaauaagggaaccuuuuauugcuuguggaccaaaugaaugcaaacacuuugcucuaacccauuaugcagcucaaccagggggauacuacaauggaacaagagaagacagaaacaagcugaggcaucuaauuucagucaaauugggcaaaaucccaacaguagaaaacucuauuuuccacauggcagcuuggagcggguccgcaugucaugaugguagagaauggacauauaucggaguugauggccccgacaguaaugcauugcucaaaauaaaauauggagaagcauauacugacacauaccauuccuaugcaaaaaacauccuaaggacacaagaaagugccugcaauugcaucgggggagauuguuaucuuaugauaacugauggcccagcuucagggauuagugaaugcagauuccuuaagauucgagagggccgaauaauaaaagaaauauuuccaacaggaagaguaaaacauacugaggaaugcacaugcggauuugccagcaacaaaaccauagaaugugccuguagagauaacaguuacacagcaaaaagacccuuugucaaauuagauguggagacugauacagcggaaauaagauuaaugugcacagagacuuauuuggacacccccagaccaaaugauggaagcauaacagggccuugcgaaucuaauggggauaaagggaguggaggcaucaagggaggauuuguucaucaaagaauggcauccaagauuggaaggugguacucucgaacgcugucuaaaacuaaaagaauggggaugggacuguaugucaaguaugauggagacccauggacugacagugaagcccuugcucuuaguggaguaaugguuucaauggaagaaccugguugguauuccuuuggcuucgaaauaaaagauaagaaaugugauguccccuguauugggauagaaaugguacaugauggugggaaaacgacuuggcacucagcagcaacagccauuuacuguuuaaugggcucaggacaacugcugugggacacugucacagguguugauauggcucuguaa

SEQ ID NO: 61041 - RNA, 1401 nt, Artificial Sequence
  derived and/or modified CDS sequence (wt) from neuraminidase__InfluenzaB__AFJ80785
augcuaccuucaacuauacaaacguuaacccuauuucucacaucagggggaguauuauuaucacuauaugugucagcuucauugucauauuuacuauauucggauauauugcuaaaauucccaucaacagaaauuacugcaccaacaaugccauuggauugugcaaacgcaucaaauguucaggcugugaaccguucugcaacaaaaggggugacacuucuucucccagaaccggaguggacauacccgcguuuaucuugcccgggcucaaccuuucagaaagcacuccuaauuagcccucauagauucggagaaaccaaaggaaacucagcucccuugauaauaagggaaccuuuuauugcuuguggaccaaaggaaugcaaacacuuugcucuaacccacuaugcagcccaaccagggggauacuacaauggaacaagaggagacagaaacaagcugaggcaucuaauuucagucaaauugggcaaaaucccaacaguagaaaacuccauuuuccacauggcagcauggagcggguccgcaugccaugaugguaaggaauggacauauaucggaguugauggcccugacaauaaugcauugcucaaaauaaaauauggagaagcauauacugacacauaccauuccuaugcaaacaacauccuaagaacacaagaaagugccugcaauugcaucgggggaaauuguuaucuuaugauaacugauggcucagcuucagguguuagugaaugcagauuucuuaagauucgagagggccgaauaauaaaagaaauauuuccaacaggaagaauaaaacauacugaagaaugcacaugcggauuugcuagcaauaaaaccauagaaugugccuguagagauaacaguuacacagcaaaaagacccuuugucaaauuaaacguggagacugauacagcagaaauaagauugaugugcacagagacuuauuuggacacccccagaccagaugauggaagcauaacagggccuugugaaucuaauggggacaaagggaguggaggcaucaagggaggauuuguccaucaaagaauggcauccaagauuggaaggugguacucucgaacgaugucuaaaacuaaaaggauggggauggggcuguaugucaaguaugauggagacccaugggcugacagugaugcccuugcuuuuaguggaguaaugguuucaauggaagaaccugguugguacuccuuuggcuucgaaauaaaagacaagaaaugugauguccccuguauugggauagagaugguacaugaugguggaaaagagacuuggcacucagcagcuacagccauuuacuguuuaaugggcucaggacagcugcugugggacacugucacagguguuaauauggcucuguaa

SEQ ID NO: 61042 - RNA, 1401 nt, Artificial Sequence
  derived and/or modified CDS sequence (wt) from neuraminidase__InfluenzaB__AFJ80796
augcuaccuucaacuauacaaacguuaacccuauuucucacaucagggggaguauuauuaucacuauaugugucagcuucauugucauacuuacuauauucggauauauugcuaaaauucccaucaacagaaauuacugcaccaacaaugccauuggauugugcaaacgcaucaaauguucaggcugugaaccguucugcaacaaaaggggugacacuucuucucccagaaccggaguggacauacccgcguuuaucuugcccgggcucaaccuuucagaaagcacuccuaauuagcccucauagauucggagaaaccaaaggaaacucagcucccuugauaauaagggaaccuuuuauugcuuguggaccaaaggaaugcaaacacuuugcucuaacccacuaugcagcccaaccagggggauacuacaauggaacaagaggagacagaaacaagcuuaggcaucuaauuucagucaaauugggcaaaaucccaacaguagaaaacuccauuuuccacauggcagcauggagcggguccgcaugccaugaugguaaggaauggacauauaucggaguugauggcccugacaauaaugcauugcucaaaauaaaauauggagaagcauauacugacacauaccauuccuaugcaaacaacauccuaagaacacaagaaagugccugcaauugcaucgggggaaauuguuaucuuaugauaacugauggcucagcuucagguguuagugaaugcagauuucuuaagauucgagagggccgaauaauaaaagaaauauuuccaacaggaagaauaaaacauacugaagaaugcacaugcggauuugcuagcaauaaaaccauagaaugugccuguagagauaacaguuacacagcaaaaagacccuuugucaaauuaaacguggagacugauacagcagaaauaagauugaugugcacagagacuuauuuggacacccccagaccagaugauggaagcauaacagggccuugugaaucuaauggggacaaagggaguggaggcaucaagggaggauuuguccaucaaagaauggcauccaagauuggaaggugguacucucgaacgaugucuaaaacuaaaaggauggggauggggcuguaugucaaguaugauggagacccaugggcugacagugaugcccuugcuuuuaguggaguaaugguuucaauggaagaaccugguugguacuccuuuggcuucgaaauaaaagacaagaaaugugauguccccugcauugggauagagaugguacaugaugguggaaaagagacuuggcacucagcagcuacagccauuuacuguuuaaugggcucaggacagcugcugugggacacugucacagguguuaauauggcucuguaa

SEQ ID NO: 61043 - RNA, 1401 nt, Artificial Sequence
  derived and/or modified CDS sequence (wt) from neuraminidase__InfluenzaB__AFJ80807
augcuaccuucaacuauacaaacguuaacccuauuucucacaucagggggaguauuauuaucacuauaugugucaguuucauugucauacuuacuauauucggauauauugcuaaaauucccaucaacagaaauuacugcaccaacaaugccauuggauugugcaaacgcaucaaauguucaggcugugaaccguucugcaacaaaaggagugacacuucuucucccagaaccggaguggacauacccgcguuuaucuugcccgggcucaaccuuucagaaagcacuccuaauuagcccucauagauucggagaaaccaaaggaaacucagcucccuugauaauaagggaaccuuuuauugcuuguggaccaaaggaaugcaaacacuuugcucuaacccacuaugcagcccaaccagggggauacuacaauggaacaagaggagacagaaacaagcugaggcaucuaauuucagucaaauugggcaaaaucccaacaguagaaaacuccauuuuccacauggcagcauggagcggguccgcaugccaugaugguaaggaauggacauauaucggaguugauggcccugacaauaaugcauugcucaaaauaaaauauggagaagcauauacugacacauaccauuccuaugcaaacaacauccuaagaacacaagaaagugccugcaauugcaucgggggaaauuguuaucuuaugauaacugauggcucagcuucagguguuagugaaugcagauuucuuaagauucgagagggccgaauaauaaaagaaauauuuccaacaggaagaauaaaacauacugaagaaugcacaugcggauuugcuagcaauaaaaccauagaaugugccuguagagauaacaguuacacagcaaaaagacccuuugucaaauuaaacguggagacugauacagcagaaauaagauugaugugcacagagacuuauuuggacacccccagaccagaugauggaagcauaacagggccuugugaaucuaauggggacaaagggaguggaggcaucaagggaggauuuguccaucaaagaauggcauccaagauuggaaggugguacucucgaacgaugucuaaaacuaaaaggauggggauggggcuguaugucaaguaugauggagacccaugggcugacagugaugcccuugcuuuuaguggaguaaugguuucaauggaagaaccugguugguacuccuuuggcuucgaaauaaaagacaagaaaugugauguccccuguauugggauagagaugguacaugaugguggaaaagagacuuggcacucagcagcuacagccauuuacuguuuaaugggcucaggacagcugcugugggacacugucacagguguuaauauggcucuguaa

SEQ ID NO: 61044 - RNA, 1401 nt, Artificial Sequence; identical to SEQ ID NO: 60680
  derived and/or modified CDS sequence (wt) from neuraminidase__InfluenzaB__AFJ80818

SEQ ID NO: 61045 - RNA, 1401 nt, Artificial Sequence; identical to SEQ ID NO: 60680
  derived and/or modified CDS sequence (wt) from neuraminidase__InfluenzaB__AFJ80829

SEQ ID NO: 61046 - RNA, 1401 nt, Artificial Sequence
  derived and/or modified CDS sequence (wt) from neuraminidase__InfluenzaB__AFJ80840
augcuaccuucaacuauacaaacauuaacccuauuucucacaucagggggaguauuauuaucacuauaugugucagcuucauugucauacuuacuauauucggauauauugcuaaaauucccaucaacagaaauuacugcaccaacaaugccauuggauugugcaaacgcaucaaauguucaggcugugaaccguucugcaacaaaaggggugacacuucuucucccagaaccggaguggacauacccgcguuuaucuugcccgggcucaaccuuucagaaagcacuccuaauuagcccucauagauucggagaaaccaaaggaaacucagcucccuugauaauaagggaaccuuuuauugcuuguggaccaaaggaaugcaaacacuuugcucuaacccacuaugcagcccaaccagggggauacuacaauggaacaagaggagacagaaacaagcugaggcaucuaauuucagucaaauugggcaaaaucccaacaguagaaaacuccauuuuccacauggcagcauggagcggguccgcaugccaugaugguaaggaauggacauauaucggaguugauggcccugacaauaaugcauugcucaaaauaaaauauggagaagcauauacugacacauaccauuccuaugcaaacaacauccuaagaacacaagaaagugccugcaauugcaucgggggaaauuguuaucuuaugauaacugauggcucagcuucagguguuagugaaugcagauuucuuaagauucgagagggccgaauaauaaaagaaauauuuccaacaggaagaauaaaacauacugaagaaugcacaugcggauuugcuagcaauaaaaccauagaaugugccuguagagauaacaguuacacagcaaaaagacccuuugucaaauuaaacguggagacugauacagcagaaauaagauugaugugcacagagacuuauuuggacacccccagaccagaugauggaagcauaacagggccuugugaaucuaauggggacaaagggaguggaggcaucaagggaggauuuguccaucaaagaauggcauccaagauuggaaggugguacucucgaacgaugucuaaaacugaaaggauggggauggggcuguaugucaaguaugauggagacccaugggcugacagugaugcccuuacuuuuaguggaguaaugguuucaauggaagaaccugguugguacuccuuuggcuucgaaauaaaagacaagaaaugugauguccccuguauugggauagagaugguacaugaugguggaaaagagacuuggcacucagcagcuacagccauuuacuguuuaaugggcucaggacagcugcugugggacacugucacagguguuaauauggcucuguaa

SEQ ID NO: 61047 - RNA, 1401 nt, Artificial Sequence; identical to SEQ ID NO: 61046
  derived and/or modified CDS sequence (wt) from neuraminidase__InfluenzaB__AFJ80851

SEQ ID NO: 61048 - RNA, 1401 nt, Artificial Sequence
  derived and/or modified CDS sequence (wt) from neuraminidase__InfluenzaB__AFJ80862
augcuaccuucaacuauacaaacguuaacccuauuucucacaucagggggaguauuauuaucacuauaugugucagcuucauugucauacuuacuauauucggauauauugcuaaaauucccaucaacagaaauuacugcaccaacaaugccauuggauugugcaaacgcaucaaauguucaggcuaugaaccguucugcaacaaaaggggugacacuucuucucccagaaacggaguggacauacccgcguuuaucuugcccgggcucaaccuuucagaaagcacuccuaauuagcccucauagauucggagaaaccaaaggaaacucagcucccuugauaauaagggaaccuuuuauugcuuguggaccaaaggaaugcaaacacuuugcucuaacccauuaugcagcccaaccagggggauacuacaauggaacaagaggagacagaaacaagcugaggcaucuaauuucagucaaauugggcaaaaucccaacaguagaaaacuccauuuuccacauggcagcauggagcggguccgcaugccaugaugguaaggaauggacauauaucggaguugaugguccugacaauaaugcauugcucaaaauaaaauauggagaagcauauacugacacauaccauuccuaugcaaacaacauccuaagaacacaagaaagugccugcaauugcaucgggggaaauuguuaucuuaugauaacugauggcucagcuucagguguuagugaaugcagauuucuuaagauucgagagggccgaauaauaaaagaaauauuuccaacaggaagaauaaaacauacugaagaaugcacaugcggauuugcuagcaauaaaaccauagaaugugccuguagagauaacaguuacacagcaaaaagacccuuugucaaauuaaacguggagacugauacagcagaaauaagauugaugugcacagaaacuuauuuggacacccccagaccagaugauggaagcauaacagggccuugugaaucuaauggggacaaagggaguggaggcaucaagggaggauuuguccaucaaagaauggcauccaagauuggaaggugguacucucgaacgaugucuaaaacugaaaggauggggauggggcuguaugucaaguaugauggagacccaugggcugacagugaugcccuuacuuuuaguggaguaaugguuucaauggaagaaccugguugguacuccuuuggcuucgaaauaaaagacaagaaaugugauguccccuguauugggauagagaugguacaugaugguggaaaagagacuuggcacucagcagcuacagccauuuacuguuuaaugggcucaggacagcugcugugggacacugucacagguguuaauauggcucuguaa

SEQ ID NO: 61049 - RNA, 1401 nt, Artificial Sequence
  derived and/or modified CDS sequence (wt) from neuraminidase__InfluenzaB__AFJ80873
augcuaccuucaacuauacaaacguuaacccuauuucucacaucagggggaguauuauuaucacuauaugugucagcuucauugucacacuuacuauauucggguauauugcuaaaauucccaucaacagaaauuacugcaccaacaaugccauuggauugugcaaacgcaucaaauguucaggcuguaaaccguucugcaacaaaaggggugacacuucuucccccagaaccggaguggacauacccgcguuuaucuugcccgggcucaaccuuucagaaagcacuccuaauuagcccucauagauucggagaaaccaaaggaaacucagcucccuugauaauaagggaaccuuuuauugcuuguggaccaaaggaaugcaaacacuuugcucuaacccacuaugcagcccaaccagggggauacuacaauggaacaagaggagacagaaacaagcugaggcaucuaauuucagucaaauugggcaaaaucccaacaguagaaaacuccauuuuccacauggcagcauggagcggguccgcaugccaugaugguaaggaauggacauauaucggaguugauggcccugacaauaaugcauugcucaaaauaaaauauggagaagcauauacugacacauaccauuccuaugcaaacaacauccuaagaacacaagaaagugccugcaauugcaucgggggaaauuguuaucuuaugauaacugauggcucagcuucagguguuagugaaugcagauuucuuaagauucgagagggccgaauaauaaaagaaauauuuccaacaggaagaauaaaacauacugaagaaugcacaugcggauuugcuagcaauaaaaccauagaaugugccuguagagauaacaguuacacagcaaaaagacccuuugucaaauuaaacguggagacugauacagcagaaauaagauugaugugcacagagacuuauuuggacacccccagaccagaugauggaagcauaacagggccuugugaaucuaauggggacaaagggaguggaggcaucaagggaggauuuguccaucaaagaauggcauccaagauuggaaggugguacucucgaacgaugucuaaaacugaaaggauggggauggggcuguaugucaaguaugauggagacccaugggcugacagugaugcccuuacuuuuaguggaguaaugguuucaauggaagaaccugguugguacuccuuuggcuucgaaauaaaagacaagaaaugugauguccccuguauugggauagagaugguacaugaugguggaaaagagacuuggcacucagcagcuacagccauuuacuguuuaaugggcucaggacagcugcugugggacacugucacagguguuaauauggcucuguaa

SEQ ID NO: 61050 - RNA, 1401 nt, Artificial Sequence
  derived and/or modified CDS sequence (wt) from neuraminidase__InfluenzaB__AFJ80884
augcuaccuucaacuauacaaacauuaacccuauuucucacaucagggggaguauuauuaucacuauaugugucagcuucauugucauacuuacuauauucggauauauugcuaaaauucccaucaacagaaauuacugcaccaacaaugccauuggauugugcaaacgcaucaaauguucaggcugugaaccguucugcaacaaaaggggugacacuucuucucccagaaccggaguggacauacccgcguuuaucuugcccgggcucaaccuuucagaaagcacuccuaauuagcccucauagauucggagaaaccaaaggaaacucagcucccuugauaauaagggaaccuuuuauugcuuguggaccaaaggaaugcaaacacuuugcucuaacccacuaugcagcccaaccagggggauacuacaauggaacaagaggagacagaaacaagcugaggcaucuaauuucagucaaauugggcaaaaucccaacaguagaaaacuccauuuuccacauggcagcauggagcggguccgcaugccaugaugguaaggaauggacauauaucggaguugaugguccugacaacaaugcauugcucaaaauaaaauauggagaagcauauacugacacauaccauuccuaugcaaacaacauccuaagaacacaagaaagugccugcaauugcaucgggggaaauuguuaucuuaugauaacugauggcucagcuucagguguuaguaaaugcagauuucuuaagauucgagagggccgaauaauaaaagaaauauuuccaacaggaagaauaaaacauacugaagaaugcacaugcggauuugcuagcaauaaaaccauagaaugugccuguagagauaacaguuacacagcaaaaagacccuuugucaaauuaaacguggagacugauacagcagaaauaagauugaugugcacagagacuuauuuggacacccccagaccagaugauggaagcauaacagggccuugugaaucuaauggggacaaagggaguggaggcaucaagggaggauuuguccaucaaagaauggcauccaagauuggaaggugguacucucgaacgaugucuaaaacugaaaggauggggauggggcuguaugucaaguaugauggagacccaugggcugacagugaugcccuuacuuuuaguggaguaaugguuucaauggaagaaccugguugguacuccuuuggcuucgaaauaaaagacaagaaaugugauguccccuguauugggauagagaugguacaugaugguggaaaagagacuuggcacucagcagcuacagccauuuacuguuuaaugggcucaggacagcugcugugggacacugucacagguguuaauauggcucuguaa

SEQ ID NO: 61051 - RNA, 1401 nt, Artificial Sequence; identical to SEQ ID NO: 61016
  derived and/or modified CDS sequence (wt) from neuraminidase__InfluenzaB__AFJ80895

SEQ ID NO: 61052 - RNA, 1401 nt, Artificial Sequence
  derived and/or modified CDS sequence (wt) from neuraminidase__InfluenzaB__AFJ80917
augcuaccuucaacuauacaaacauuaacccuauuucucacaucagggggaguauuauuaucacuauaugugucagcuucauugucauacuuacuauauucggauauauugcuaaaauucccaucaacagaaauuacugcaccaacaaugccauuggauugugcaaacgcaucaaauguucaggcugugaaccguucugcaacaaaaggggugacacuucuucucccagaaccggaguggacauacccgcguuuaucuugcccgggcucaaccuuucagaaagcacuccuaauuagcccucauagauucggagaaaccaaaggaaacucagcucccuugauaauaagggaaccuuuuauugcuuguggaccaaaggaaugcaaacacuuugcucuaacccacuaugcagcccaaccagggggauacuacaauggaacaagaggagacagaaacaagcugaggcaucuaauuucagucaaauugggcaaaaucccaacaguagaaaacuccauuuuccacauggcagcauggagcggguccgcaugccaugaugguaaggaauggacauauaucggaguugauggcccugacaauaaugcauugcucaaaauaaaauauggagaagcauauacugacacauaccauuccuaugcaaacaacauccuaagaacacaagaaagugccugcaauugcaucgggggaaauuguuaucuuaugauaacugauggcucagcuucagguguuagugaaugcagauuucuuaagauucgagagggccgaauaauaaaagaaauauuuccaacaggaagaauaaaacauacugaagaaugcacaugcggauuugcuagcaauaaaaccauagaauguaccuguagagauaacaguuacacagcaaaaagacccuuuguuaaauuaaacguggagacugauacagcagaaauaagauugaugugcacagagacuuauuuggacacccccagaccagaugauggaagcauaacagggccuugugaaucuaauggggacaaagggaguggaggcaucaagggaggauuuguccaucaaagaauggcauccaagauuggaaggugguacucucgaacgaugucuaaaacugaaaggauggggauggggcuguaugucaaguaugauggagacccaugggcugacagugaugcccuuacuuuuaguggaguaaugguuucaauggaagaaccugguugguacuccuuuggcuucgaaauaaaagacaagaaaugugauguccccuguauugggauagagaugguacaugaugguggaaaagagacuuggcacucagcagcuacagccauuuacuguuuaaugggcucaggacaguugcugugggacacugucacagguguuaauauggcucuguaa

SEQ ID NO: 61053 - RNA, 1401 nt, Artificial Sequence
  derived and/or modified CDS sequence (wt) from neuraminidase__InfluenzaB__AFJ80928
augcuaccuucaacuauacaaacguuaacccuauuucucacaucagggggaguauuauuaucacuauaugugucagcuucauugucauacuuacuauauucggauauauugcuaaaauucccaucaacagaaauuacugcaccaacaaugccauuggauugugcaaacgcaucaaauguucaggcugugaaccguucugcaacaaaaggggugacacuucuucucccagaaccggaguggacauacccgcguuuaucuugcccgggcucaaccuuucagaaagcacuccuaauuagcccucauagauucggagaaaccaaaggaaacucagcucccuugauaauaagggaaccuuuuauugcuugugaaccaaaggaaugcaaacacuuugcucuaacccacuaugcagcccaaccggggggauacuacaauggaacaagaggagacagaaacaagcugaggcaucuaauuucagucaaauugggcaaaaucccaacaguagaaaacuccauuuuccacauggcagcauggagcggguccgcaugccaugaugguaaggaauggacauauaucggaguugauggcccugacaauaaugcauugcucaaaauaaaauauggagaagcauauacugacacauaccauuccuaugcaaacaacauccuaagaacacaagaaagugccugcaauugcaucgggggaaauuguuaucuuaugauaacugauggcucagcuucagguguuagugaaugcagauuucuuaagauucgagagggccgaauaauaaaagaaauauuuccaacaggaagaauaaaacauacugaagaaugcacaugcggauuugcuagcaauaaaaccauagaaugugccuguagagauaacaguuacacagcaaaaagacccuuugucaaauuaaacguggagacugauacagcagaaauaagauugaugugcacagaaacuuauuuggacacccccagaccagaugauggaagcauaacagggccuugugaaucuaauggggacaaagggaguggaggcaucaagggaggauuuguccaucaaagaauggcauccaagauuggaaggugguacucucgaacgaugucuaaaacugaaaggauggggauggggcuguaugucaaguaugauggagacccaugggcugacagugaugcccuuacuuuuaguggaguaaugguuucaauggaagaaccugguugguacuccuuuggcuucgaaauaaaagacaagaaaugugauguccccuguauugggauagagaugguacaugaugguggaaaagagacuuggcacucagcagcuacagccauuuacuguuuaaugggcucaggacagcugcugugggacacugucacagguguuaauauggcucuguaa

SEQ ID NO: 61054 - RNA, 1401 nt, Artificial Sequence
  derived and/or modified CDS sequence (wt) from neuraminidase__InfluenzaB__AFJ80939
augcuaccuucaacuauacaaacguuaacccuauuucucacaucagggggaguauuauuaucacuauaugugucagcuucauugucauacuuacuauauucggauauauugcuaaaauucccaccaacagaaguuacugcaccaacaaugccauuggauugugcaaacgcaucaaauguucaggcugugaaccguucugcaacaaaaggggugacacuucuucucccagaaccggaguggacauacccgcguuuaucuugcccgggcucaaccuuucagaaagcacuccuaauuagcccucauagauucggagaaaccaaaggaaacucagcucccuugauaauaagggaaccuuuuauugcuuguggaccaaaggaaugcaaacacuuugcucuaacccacuaugcagcccaaccagggggauacuacaauggaacaagaggagacagaaacaagcugaggcaucuaauuucagucaaauugggcaaaaucccaacaguagaaaacuccauuuuccacauggcagcauggagcggguccgcaugccaugaugguaaggaauggacauauaucggaguugauggcccugacaauaaugcauugcucaaaauaaaauauggagaagcauauacugacacauaccauuccuaugcaaacaacauccuaagaacacaagaaagugccugcaauugcaucgggggaaauuguuaucuuaugauaacugauggcucagcuucagguguuagugaaugcagauuucuuaagauucgagagggccgaauaauaaaagaaauauuuccaacaggaagaauaaaacauacugaagaaugcacaugcggauuugcuagcaauaaaaccauagaaugugccuguagagauaacaguuacacagcaaaaagacccuuugucaaauuaaacguggagacugauacagcagaaauaagauugaugugcacagagacuuauuuggacacccccagaccagaugauggaagcauaacagggccuugugaaucuaauggggacaaagggaguggaggcaucaagggaggauuuguccaucaaagaauggcauccaagauuggaaggugguacucucgaacgaugucuaaaacugaaaggauggggauggggcuguaugucaaguaugauggagacccaugggcugacagugaugcccuuacuuuuaguggaguaaugguuucaauggaagaaccugguugguacuccuuuggcuucgaaauaaaagacaagaaaugugauguccccuguauugggauagagaugguacaugaugguggaaaagagacuuggcacucagcagcuacagccauuuacuguuuaaugggcucaggacagcugcugugggacacugucacagguguuaauauggcucuguaa

SEQ ID NO: 61055 - RNA, 1401 nt, Artificial Sequence
  derived and/or modified CDS sequence (wt) from neuraminidase__InfluenzaB__AFJ80950
augcuaccuucaacuauacaaacguuaacccuauuccucacaucagggggaguguuauuaucacuauaugugucagcuucauugucauacuuacuauauucggauauauugcuaaaauuuucacaaacagaaauaacugcaccaauaaugccauuggauugugcaaacgcaucaaauguucaggcugugaaccguucugcagcaaaaggggugacacuucuucucccagaaccggaguggacauacccucguuuaucuugcccgggcucaaccuuucagaaagcacuccuaauuagcccccauagauucggagaaaccaaaggaaacucagcucccuugauaauaagggaaccuuuuauugcuuguggaccaacggaaugcaaacacuuugcucuaacccauuaugcagcucaaccagggggauacuacaauggaacaagagaagacagaaacaagcugaggcaucuaauuucagucaaauugggcaaaaucccaacaguagaaaacuccauuuuccauauggcagcuuggagcggguccgcaugccaugaugguaaagaauggacauauaucggaguugauggccccgacaguaaugcauugcucaaaauaaaauauggagaagcauauacugacacauaccauuccuaugcaaaaaacauccuaaggacacaagaaagugccugcaauugcauugggggagauuguuaucuuaugauaacugauggcccagcuucagggauuagugaaugcagauuccuuaagauucgagagggccgaauaauaaaagaaauauuuccaacaggaagaguaaaacauacugaggaaugcacaugcggauuugccagcaacaaaaccauagaaugugcuuguagagauaacaguuacacagcaaaaagacccuuugucaaauuaaauguggagacugauacagcggaaauaagauugaugugcacagagacuuauuuggacacccccagaccaaaugauggaagcauaacagggccuugcgaaucugauggggacaaagggaauggaggcaucaagggaggauuuguucaucaaagaauggcauccaagauuggaaggugguacucucgaacgaugucuaaaacuaaaagaauggggaugggacuguauguaaaguaugauggagauccauggacugacagugaagcccuugcucuuaguggaguaaugguuucaauggaagaaccugguugguauuccuuuggcuucgaaauaaaagauaagaaaugugauguccccuguauugggauagaaaugguacaugauggugggaaaacgacuuggcacucagcagcaacagccauuuacuguuuaaugggcucaggacaacugcugugggacacugucacagguguugauauggcucuguaa

SEQ ID NO: 61056 - RNA, 1401 nt, Artificial Sequence
  derived and/or modified CDS sequence (wt) from neuraminidase__InfluenzaB__AFJ80961
augcuaccuucaacuauacaaacauuaacccuauuucucacaucagggggaguauuauuaucacuauaugugucagcuucauugucauacuuacuauauucggauauauugcuaaaauucccaucaacagaaauuacugcaccaacaaugccauuggauugugcaaacgcaucaaauguucaggcugugaaccguucugcaacaaaaggggugacacuucuucucccagaaccggaguggacauacccgcguuuaucuugcccgggcucaaccuuucagaaagcacuccuaauuagcccucauagauucggagaaaccaaaggaaacucagcucccuugauaauaagggaaccuuuuauugcuuguggaccaaaggaaugcaaacacuuugcucuaacccacuaugcagcccaaccagggggauacuacaauggaacaagaggagacagaaacaagcugaggcaucuaauuucagucaaauugggcaaaaucccaacaguagaaaacuccauuuuccacauggcagcauggagcggguccgcaugccaugaugguaaggaauggacauauaucggaguugauggcccugacaauaaugcauugcucaaaauaaaauauggagaagcauauacugacacauaccauuccuaugcaaacaacauccuaagaacacaagaaagugccugcaauugcaucgggggaaauuguuaucuuaugauaacugauggcucagcuucagguguuagugaaugcagauuucuuaagauucgagagggccgaauaauaaaagaaauauuuccaacaggaagaauaaaacauacugaagaaugcacaugcggauuugcuagcaauaaaaccauagaaugugccuguagagauaacaguuacacagcaaaaagacccuuugucaaauuaaacguggagacugauacagcagaaauaagauugaugugcacagagacuuauuuggacacccccagaccagaugauggaagcauaacagggccuugugaaucuaauggggacaaagggaguggaggcaucaagggaggauuuguccaucaaagaauggcauccaagauuggaaggugguacucucgaacgaugucuaaaacugaaaggauggggauggggcuguaugucaaguaugauggagacccaugggcugacagcgaugcccuuacuuuuaguggaguaaugguuucaauggaagaaccugguugguacuccuuuggcuucgaaauaaaagacaagaaaugugauguccccuguauugggauagagaugguacaugaugguggaaaagagacuuggcacucagcagcuacagccauuuacuguuuaaugggcucaggacagcugcugugggacacugucacagguguuaauauggcucuguaa

SEQ ID NO: 61057 - RNA, 1401 nt, Artificial Sequence
  derived and/or modified CDS sequence (wt) from neuraminidase__InfluenzaB__AFJ80972
augcuaccuucaacuauacaaacguuaacccuauuucucacaucagggggaguguuauuaucacuauaugugucagcuucauugucauacuuacuauauucggauauauugcuaaaauuuucacaaacagaaauaacugcaccaauaaugccauuggauugugcaaacgcaucaaauguucaggcugugaaccguucugcagcaaaaggggugacacuucuucucccagaaccggaguggacauacccucguuuaucuugcccgggcucaaccuuucagaaagcacuccuaauuagcccccauagauucggagaaaccaaaggaaacucagcucccuugauaauaagggaaccuuuuauugcuuguggaccaacggaaugcaaacacuuugcucuaacccauuaugcagcucaaccagggggauacuacaauggaacaagagaagacagaaacaagcugaggcaucuaauuucagucaaauugggcaaaaucccaacaguagaaaacuccauuuuccauauggcagcuuggagcggguccgcaugccaugaugguaaagaauggacauauaucggaguugauggccccgacaguaaugcauugcucaaaauaaaauauggagaagcauauacugacacauaccauuccuaugcaaaaaacauccuaaggacacaagaaagugccugcaauugcauugggggagauuguuaucuuaugauaacugauggcccagcuucagggauuagugaaugcagauuccuuaagauucgagagggccgaauaauaaaagaaauauuuccaacaggaagaguaaaacauacugaggaaugcacaugcggauuugccagcaacaaaaccauagaaugugcuuguagagauaacaguuacacagcaaaaagacccuuugucaaauuaaauguggagacugauacagcggaaauaagauugaugugcacagagacuuauuuggacacccccagaccaaaugauggaagcauaacagggccuugcgaaucugauggggacaaagggaguggaggcaucaagggaggauuuguucaucaaagaauggcauccaagauuggaaggugguacucucgaacgaugucuaaaacuaaaagaauggggaugggacuguauguaaaguaugauggagauccauggacugacagugaagcccuugcucuuaguggaguaaugguuucaauggaagaaccugguugguauuccuuuggcuucgaaauaaaagauaagaaaugugauguccccuguauugggauagaaaugguacaugauggugggaaaacgacuuggcacucagcagcaacagccauuuacuguuuaaugggcucaggacaacugcugugggacacugucacagguguugauauggcucuguaa

SEQ ID NO: 61058 - RNA, 1401 nt, Artificial Sequence; identical to SEQ ID NO: 61057
  derived and/or modified CDS sequence (wt) from neuraminidase__InfluenzaB__AFJ80983

SEQ ID NO: 61059 - RNA, 1401 nt, Artificial Sequence; identical to SEQ ID NO: 61020
  derived and/or modified CDS sequence (wt) from neuraminidase__InfluenzaB__AFJ80994

SEQ ID NO: 61060 - RNA, 1401 nt, Artificial Sequence
  derived and/or modified CDS sequence (wt) from neuraminidase__InfluenzaB__AFJ81005
augcuaccuucaacuauacaaacguuaacccuauuucucacaucagggggaguguuauuaucacuauaugugucagcuucauugucauacuuacuauauucggauauauugcuaaaauuuucacaaacagaaauaacugcaccaauaaugccauuggauugugcaaacgcaucaaauguucaggcugugaaccguucugcagcaaaaggggugacacuucuucucccagaaccggaguggacauacccucguuuaucuugcccgggcucaaccuuucagaaagcacuccuaauuagcccccauagauucggagaaaccaaaggaaacucagcucccuugauaauaagggaaccuuuuauugcuuguggaccaacggaaugcaaacacuuugcucuaacccauuaugcagcucaaccagggggauacuacaauggaacaagagaagacagaaacaagcugaggcaucuaauuucagucaaauugggcaaaaucccaacaguagaaaacuccauuuuccauauggcagcuuggagcggguccgcaugccaugaugguaaggaauggacauauaucggaguugauggccccgacaguaaugcuuugcucaaaauaaaauauggagaagcauauacugacacauaccauuccuaugcaaaaaacauccuaaggacacaagaaagugccugcaauugcauugggggagauuguuaucuuaugauaacugauggcccagcuucagggauuagugaaugcagauuccuuaagauucgagagggccgaauaauaaaagaaauauuuccaacaggaagaguaaaacauacugaggaauguacaugcggauuugccagcaacaaaaccauagaaugugcuuguagagauaacaguuacacagcaaaaagacccuuugucaaauuaaauguggagacugauacagcggaaauaagauugaugugcacagagacuuauuuggacacccccagaccaaaugauggaagcauaacagggccuugcgaaucugauggggacaaagggaguggaggcaucaagggaggauuuguucaucaaagaauggcauccaagauuggaaggugguacucucgaacgaugucuaaaacuaaaagaauggggaugggacuguacguaaaguaugauggagauccauggacugacagugaagcccuugcucuuaguggaguaaugguuucaauggaagaaccugguugguauuccuuuggcuucgaaauaaaagauaagaaaugugauguccccuguauugggauagaaaugguacaugauggugggaaaacgacuuggcacucagcagcaacagccauuuacuguuuaaugggcucaggacaacugcugugggacacugucacagguguugauauggcucuguaa

SEQ ID NO: 61061 - RNA, 1401 nt, Artificial Sequence
  derived and/or modified CDS sequence (wt) from neuraminidase__InfluenzaB__AFJ84364
augcuaccuucaacuauacaaacguuaacccuauuucucacaucagggggaguguuauuaucacuauaugugucagcuucauugucauacuuacuauauucggauauauugcuaaaauuuucacaaacagaaauaacugcaccaauaaugccauuggauugugcaaacgcaucaaauguucaggcugugaaccguucugcagcaaaaggggugacacuucuucucccagaaccggaguggacauacccucguuuaucuugcccgggcucaaccuuucagaaagcacuccuaauuagcccccauagauucggagaaaccaaaggaaacucagcucccuugauaauaagggaaccuuuuauugcuuguggaccaacggaaugcaaacacuuugcucuaacccauuaugcagcucaaccagggggauacuacaauggaacaagagaagacagaaacaagcugaggcaucuaauuucagucaaauugggcaaaaucccaacaguagaaaacuccauuuuccauauggcagcuuggagcggguccgcaugccaugaugguaaagaauggacauauaucggaguugauggccccgacaguaaugcauugcucaaaauaaaauauggagaagcauauacugacacauaccauuccuaugcaaaaaacauccuaaggacacaagaaagugccugcaauugcauugggggagauuguuaucuuaugauaacugauggcccagcuucagggauuagugaaugcagauuccuuaagauucgagagggccgaauaauaaaagaaauauuuccaacaggaagaguaaaacauacugaggaaugcacaugcggauuugccagcaacaaaaccauagaaugugcuugcagagauaacaguuacacagcaaaaagacccuuugucaaauuaaauguggagacugauacagcggaaauaagauugaugugcacagagacuuauuuggacacccccagaccaaaugauggaagcauaacagggccuugcgaaucugauggggacaaagggaguggaggcaucaagggaggauuuguucaucaaagaauggcauccaagauuggaaggugguacucucgaacgaugucuaaaacuaaaagaauggggaugggacuguauguaaaguaugauggagauccauggacugacagugaagcccuugcucuuaguggaguaaugguuucaauggaagaaccugguugguauuccuuuggcuucgaaauaaaagauaagaaaugugauguccccuguauugggauagaaaugguacaugauggugggaaaacgacuuggcacucagcagcaacagccauuuacuguuuaaugggcucaggacaacugcugugggacacugucacagguguugauauggcucuguaa

SEQ ID NO: 61062 - RNA, 1401 nt, Artificial Sequence
  derived and/or modified CDS sequence (wt) from neuraminidase__InfluenzaB__AFJ90399
augcuaccuucaacuauacaaacguuaacccuauuucucacaucagggggaguauuauuaucacuauaugugucagcuucauugucauacuuacuauauucggauauauugcuaaaauucccaucaacagaaauuacugcaccaccaaugccauuggauugugcaaacgcaucaaauguucaagcugugaaccguucugcaacaaaaggggugacacuucuucucccagaaccggaguggacauacccgcguuuaucuugcccgggcucaaccuuucagagagcacuccuaauuagcccucauagauucggagaaaccaaaggaaacucagcucccuugauaauaagggaaccuuuuauugcuuguggaccaagggaaugcaaacacuuugcucuaacccacuaugcagcccaaccagggggauacuacaauggaacaagaggagacagaaacaagcugaggcaucuaauuucagucaaauugggcaaaaucccaacaguagagaacuccauuuuccacauggcagcauggagcggguccgcaugccaugaugguaaggaauggacauauaucggaguugauggcccugacaauaaugcauugcucaaaauaaaauauggagaagcauauacugacacauaccauuccuaugcaaacaacauccuaagaacacaagaaagugccugcaauugcaucgggggaaauuguuaucuuaugauaacugauggcucagcuucagguguuagugaaugcagauuucuuaagauucgagagggccgaauaauaaaagaaauauuuccaacaggaagaauaaaacauacugaagaaugcacaugcggauuugcuagcaauaaaaccauagaaugugccuguagagauaacaguuacacagcaaaaagacccuuugucaaauuaaacguggagacugauacagcagaaauaagauugaugugcacagagacuuauuuggacacccccagaccagaugauggaaguauaacagggccuugugaaucuaauggggacaaagggaguggaggcaucaagggaggauuuguccaucaaagaaugacauccaagauuggaaggugguacucucgaacgaugucuaaaacugaaaggauggggaugggacuguaugucaaguaugauggagacccaugggcugacagugaugcccuuacuuuuaguggagugaugguuucaauggaagaaccugguugguacuccuuuggcuucgaaauaaaagacaagaaaugugauguacccuguauugggauagagauggugcaugaugguggaaaagagacuuggcacucagcagcuacagccauuuacuguuuaaugggcucaggacagcugcugugggacacugucacagguguuaauauggcucuguaa

SEQ ID NO: 61063 - RNA, 1401 nt, Artificial Sequence
  derived and/or modified CDS sequence (wt) from neuraminidase__InfluenzaB__AFJ90410
augcuaccuucaacuauacaaacguuaacccuauuucucacaucagggggaguguuauuaucacuauaugugucagcuucauugucauacuuacuauauucggauauauugcuaaaauuuucacaaacagaaauaacugcaccaauaaugccauuggauugugcaaacgcaucaaauguucaagcugugaaccguucugcagcaaaaggggugacacuucuucucccaaaaccggaguggacauacccucguuuaucuugcccgggcucaaccuuucagaaagcacuccuaauuagcccccauagauucggagaaaccaaaggaaacucagcucccuugauaauaagggaaccuuuuauugcuuguggaccaacggaaugcaaacacuuugcucuaacccauuaugcagcucaaccagggggauacuacaauggaacaagagaagacagaaacaaucugaggcaucuaauuucagucaaauugggcaaaaucccaacaguagaaaacuccauuuuccauauggcagcuuggagcggguccgcaugccaugaugguaaagaauggacauauaucggaguugauggccccgacaguaaugcauugcucaaaauaaaauauggagaagcauauacugacacauaccauuccuaugcaaaaaacauccuaaggacacaagaaagugccugcaauugcauugggggagauuguuaucuuaugauaacugauggcccagcuucagggauuagugaaugcagauuccuuaagauucgagagggccgaauaauaaaagaaauauuuccaacaggaagaguaaaacauacugaggaaugcacaugcggauuugccagcaacaaaaccauagaaugugcuugcagagauaacaguuacacagcaaaaagacccuuugucaaauuaaauguggagacugauacagcggaaauaagauugaugugcacagagacuuauuuggacacccccagaccaaaugauggaagcauaacagggccuugcgaaucugauggggacaaagggaguggaggcaucaagggaggauuuguucaucaaagaauggcauccaagauuggaaggugguacucucgaacgaugucuaaaacuaaaagaauggggaugggacuguauguaaaguaugauggagauccauggacugacagugaagcccuugcucuuaguggaguaaugguuucaauggaagaaccugguugguauuccuuuggcuucgaaauaaaagauaagaaaugugauguccccuguauugggauagaaaugguacaugauggugggaaaacgacuuggcacucagcagcaacagccauuuacuguuuaaugggcucaggacaacugcugugggacacugucacagguguugauauggcucuguaa

SEQ ID NO: 61064 - RNA, 1401 nt, Artificial Sequence
  derived and/or modified CDS sequence (wt) from neuraminidase__InfluenzaB__AFJ90432
augcuaccuucaacuauacaaacguuaacccuauuucucacaucagggggaguguuauuaucacuauaugugucaacuucauugucauacuuacuauauucggauauauugcuaaaauuuucacaaacagaaauaacugcaccaauaaugccauuggauugugcaaacgcaucaaauguucaggcugugaaccguucugcagcaaaaggggugacacuucuucucccagaaccggaguggacauacccucguuuaucuugcccgggcucaaccuuucagaaagcacuccuaauuagcccccauagauucggagaaaccaaaggaaacucagcucccuugauaauaagggaaccuuuuauugcuuguggaccaacggaaugcaaacacuuugcucuaacccauuaugcagcucaaccagggggauacuacaauggaacaagagaagacagaaacaagcugaggcaucuaauuucagucaaauugggcaaaaucccaacaguagaaaacuccauuuuccauauggcagcuuggagcggguccgcaugccaugaugguaaagaauggacauauaucggaguugauggccccgacaguaaugcauugcucaaaauaaaauauggagaagcauauacugacacauaccauuccuaugcaaaaaacauccuaaggacacaagaaagugccugcaauugcauugggggagauuguuaucuuaugauaacugauggcccagcuucagggauuagugaaugcagauuccuuaagauucgagagggccgaauaauaaaagaaauauuuccaacaggaagaguaaaacauacugaggaaugcacaugcggauuugccagcaacaaaaccauagaaugugcuugcagagauaacaguuacacagcaaaaagacccuuugucaaauuaaauguggagacugauacagcggaaauaagauugaugugcacagagacuuauuuggacacccccagaccaaaugauggaagcauaacagggccuugcgaaucugauggggacaaagggaguggaggcaucaagggaggauuuguucaucaaagaauggcauccaagauuggaaggugguacucucgaacgaugucuaaaacuaaaagaauggggaugggacuguauguaaaguaugauggagauccauggacugacagugaagcccuugcucuuaguggaguaaugguuucaauggaagaaccugguugguauuccuuuggcuucgaaauaaaagauaagaaaugugauguccccuguauugggauagaaaugguacaugauggugggaaaacgacuuggcacucagcagcaacagccauuuacuguuuaaugggcucaggacaacugcugugggacacugucacaggcguugauauggcucuguaa

SEQ ID NO: 61065 - RNA, 1401 nt, Artificial Sequence
  derived and/or modified CDS sequence (wt) from neuraminidase__InfluenzaB__AFJ90443
augcuaccuucaacuauacaaacguuaaccuuauuucucacaucagggggaguguuauuaucacuauaugugucagcuucauugucauacuuacuauauucggauauauugcuaaaauuuucacgaacagaaacaaccgcaccaauaaugccauuggauugugcaaacgcaucaaauguucaggcugugaaccguucugcaacaaaaggggugacacuucuucucccagaaccggaguggacguacccucguuuaucuugcccgggcucaaccuuucagaaagcacuccuaauuagcccccauagauucggagaaaccaaaggaaacucagcucccuugauaauaagggaaccuuuuauugcuuguggaccaaaggaaugcaaacauuuugcucuaacccauuaugcagcucaaccagggggauacuacaauggaacaagagaagacagaaacaagcugaggcaucuaauuucagucaaauugggcaaaaucccaacaguagaaaacucuauuuuccacauggcagcauggagcggguccgcaugccaugaugguagagaauggacauauaucggaguugauggccccgacaguaaugcauugcucaaaauaaaauauggagaagcauauacugacacauaccauuccuaugcaaaaaacauccuaaggacacaagaaagugccugcaauugcaucgggggagauuguuaucuuaugauaacugauggcccagcuucagggauuagugaaugcagauuccuuaagauucgagagggccgaauaauaaaagaaauauuuccaacaggaagaguaaaacauacugaggaaugcacaugcggauuugccagcaacaaaaccauagaaugugccuguagagauaacaguuacacagcaaaaagacccuuugucaaauuaaauguggagacugauacagcggaaauaagauugaugugcacagagacuuauuuggacacccccagaccaaaugauggaagcauaacagggccuugcgaaucuaauggggacaaagggaguggaggcaucaagggaggauuuguucaccaaagaauggcauccaagauuggaaggugguacucucgaacgaugucuaaaacuaaaagaauggggaugggacuguauguaaaguaugauggagacccauggacugacagugaagcccuugcucuuaguggaguaaugguuucaauggaagaaccugguugguauuccuuuggcuucgaaauaaaagauaagaaaugugauguccccuguauugggauagaaaugguacaugauggugggaaaacgacuuggcacucagcagcaacagccauuuacuguuuaaugggcucaggacaacugcugugggacacugucacagguguugauauggcucuguaa

SEQ ID NO: 61066 - RNA, 1401 nt, Artificial Sequence
  derived and/or modified CDS sequence (wt) from neuraminidase__InfluenzaB__AFJ90454
augcuaccuucaacuauacaaacguuaacccuauuucucacaucagggggaguguuauuaucacuauaugugucagcuucauugucauacuuacuauauucggauauauugcuaaaauuuucacaaacagaaauaacugcaccaauagugccacuggauugugcaaacgcaucaaauguucaggcugugaaccguucugcagcaaaaggggugacacuucuucucccagaaccggaguggacauacccucguuuaucuugcccgggcucaaccuuucagaaagcacuccuaauuagcccccauagauucggagaaaccaaaggaaacucagcucccuugauaauaagggaaccuuuuauugcuuguggaccaacggaaugcaaacacuuugcucuaacccauuaugcagcucaaccaggggaauacuacaauggaacaagagaagacagaaacaagcugaggcaucuaauuucagucaaauugggcaaaaucccaacaguagaaaacuccauuuuccauauggcagcuuggagcggguccgcaugccaugaugguaaagaauggacauauaucggaguugauggccccgacaguaaugcauugcucaaaauaaaauauggagaagcauauacugacacauaccauuccuaugcaaaaaacauccuaaggacacaagaaagugccugcaauugcauugggggagauuguuaucuuaugauaacugauggcccagcuucagggauuagugaaugcagauuccuuaagauucgagagggccgaauaauaaaagaaauauuuccaacaggaagaguaaaacauacugaggaaugcacaugcggauuugccagcaacaaaaccauagaaugugcuugcagagauaacaguuauacagcaaaaagaccauuugucaaauuaaauguggagacugauacagcggaaauaagauugaugugcacagagacuuauuuggacacccccagaccaaaugauggaagcauaacagggccuugcgaaucugauggggacaaagggaguggaggcaucaagggaggauuuguucaucaaagaauggcauccaagauuggaaggugguacucucgaacgaugucuaaaacuaaaagaauggggaugggacuguauguaaaguaugauggagauccauggacugacagugaagcccuugcucuuaguggaguaaugguuucaauggaagaaccugguugguauuccuuuggcuucgaaauaaaagauaagaaaugugauguccccuguauugggauagaaaugguacaugauggugggaaaacgacuuggcacucagcagcaacagccauuuacuguuuaaugggcucaggacaacugcugugggacacugucacagguguugauauggcucuguaa

SEQ ID NO: 61067 - RNA, 1401 nt, Artificial Sequence
  derived and/or modified CDS sequence (wt) from neuraminidase__InfluenzaB__AFJ91042
augcuaccuucaacuauacaaacguuaacccuauuucucacaucagggggaguguuauuaucacuauaugugucagcuucauugucauacuugcuauauucggauauauugcuaaaauuuucacaaacagaaauaacugcaccaauaaugccauuggauugugcaaacgcaucaaauguucaggcugugaaccguucugcagcaaaaggggugacacuucuuaucccagaaccggaguggacauacccucguuuaucuugcccgggcucaaccuuucagaaagcacuccuaauuagcccccauagauucggagaaaccaaaggaaacucagcucccuugauaauaagggaaccuuuuauugcuuguggaccaacggaaugcaaacacuuugcucuaacccauuaugcagcucaaccagggggauacuacaauggaacaagagaagacagaaacaagcugaggcaucuaauuucagucaaauugggcaaaaucccaacaguagaaaacuccauuuuccauauggcagcuuggagcggguccgcaugccaugaugguaaagaauggacauauaucggaguugauggccccgacaguaaugcauugcucaaaauaaaauauggagaagcauauacugacacauaccauuccuaugcaaaaaacauccuaaggacacaagaaagugccugcaauugcauugggggagauuguuaucuuaugauaacugauggcccagcuucagggauuagugaaugcagauuccuuaagauucgagagggccgaauaauaaaagaaauauuuccaacaggaagaguaaaacauacugaggaaugcacaugcggauuugccagcaacaaaaccauagaaugugcuugcagagauaacaguuacacagcaaaaagacccuuugucaaauuaaauguggagacugauacagcggaaauaagauugaugugcacagagacuuauuuggacacccccagaccaaaugauggaagcauagcagggccuugcgaaucugauggggacaaagggaguggaggcaucaagggaggauuuguucaucaaagaaugacauccaagauuggaaggugguacucucgaacgaugucuaaaacuaaaagaauggggaugggacuguauguaaaguaugauggagauccauggacugacagugaagcccuugcucuuaguggaguaaugguuucaauggaagaaccugguugguauuccuuuggcuucgaaauaaaagauaagaaaugugauguccccuguauugggauagaaaugguacaugauggugggaaaacgacuuggcacucagcagcaacagccauuuacuguuuaaugggcucaggacaacugcugugggacacugucacagguguugauauggcucuguaa

SEQ ID NO: 61068 - RNA, 1401 nt, Artificial Sequence
  derived and/or modified CDS sequence (wt) from neuraminidase__InfluenzaB__AFJ91053
augcuaccuucaacuauacaaacguuaacccuauuucucacaucagggggaguguuauuaucacuauaugugucagcuucauugucauacuuacuauauucggauauauugcuaaaauuuucacaaacagaaauaacugcaccaauaaugccauuggauugugcaaacgcaucaaauguucaagcugugaaccguucugcagcaaaagaggugacacuucuucucccagaaccggaguggacauacccucguuuaucuugcccgggcucaaccuuucagaaagcacuccuaauuagcccccauagauucggagaaaccaaaggaaacucagcucccuugauaauaagggaaccuuuuauugcuuguggaccaacggaaugcaaacacuuugcucuaacccauuaugcagcucaaccagggggauacuacaauggaacaagagaagacagaaacaagcugaggcaucuaauuucagucaaauugggcaaaaucccaacaguagaaaacuccauuuuccauauggcagcuuggagcggguccgcaugccaugaugguaaagaauggacauauaucggaguugauggccccgacaguaaugcauugcucaaaauaaaauauggagaagcauauacugacacauaccauuccuaugcaaaaaacauccuaaggacacaagaaagugccugcaauugcauugggggagauuguuaucuuaugauaacugauggcccagcuucagggauuagugaaugcagauuccuuaagauucgagagggccgaauaauaaaagaaauauuuccaacaggaagaguaaaacauacugaggaaugcacaugcggauuugccagcaacaaaaccauagaaugugcuugcagagauaacaguuacacagcaaaaagacccuuugucaaauuaaauguggagacugauacagcggaaauaagauugaugugcacagagacuuauuuggacacccccagaccaaaugauggaagcauaacagggccuugcgaaucugauggggacaaagggaguggaggcaucaagggaggauuuguucaucaaagaauggcauccaagauuggaaggugguacucucgaacgaugucuaaaacuaaaagaauggggaugggacuguauguaaaguaugauggagauccauggacugacagugaagcccuugcucuuaguggaguaaugguuucaauggaagaaccugguugguauuccuuuggcuucgaaauaaaagauaagaaaugugauguccccuguauugggauagaaaugguacaugauggugggaaaacgacuuggcacucagcagcaacagccauuuacuguuuaaugggcucaggacaacugcugugggacacugucacagguguugauauggcucuguaa

SEQ ID NO: 61069 - RNA, 1401 nt, Artificial Sequence
  derived and/or modified CDS sequence (wt) from neuraminidase__InfluenzaB__AFJ91075
augcuaccuucaacuauacaaacauuaacccuauuucucacaucagggggaguguuauuaucacuauaugugucagcuucauugucauacuuacuauauucggauauauugcuaaaauuuucacaaacagaaauaacugcaccaauaaugccauuggauugugcaaacgcaucaaauguucaagcugugaaccguucugcagcaaaaggggugacacuucuucucccagaaccggaguggacauacccucguuuaucuugcccgggcucaaccuuucagaaagcacuccuaauuagcccccauagauucggagaaaccaaaggaaacucagcucccuugauaauaagggaaccuuuuauugcuuguggaccaacggaaugcaaacacuuugcucuaacccauuaugcagcucaaccagggggauacuacaauggaacaagagaagacagaaacaagcugaggcaucuaauuucagucaaauugggcaaaaucccaacaguagaaaacuccauuuuccauauggcagcuuggagcggguccgcaugccaugaugguaaagaauggacauauaucggaguugauggcccugacaguaauacauugcucaaaauaaaauauggagaagcauauacugacacauaccauuccuaugcaaaaaacauccuaaggacacaagaaagugccugcaauugcauugggggagauuguuaucuuaugauaacugauggcccagcuucagggauuagugaaugcagauuccuuaagauucgagagggccgaauaauaaaagaaauauuuccaacaggaagaguaaaacauacugaggaaugcacaugcggauuugccagcaacaaaaccauagaaugugcuugcagagauaacaguuacacagcaaaaagacccuuugucaaauuaaauguggagacugauacagcggaaauaagauugaugugcacagagacuuauuuggacacccccagaccaaaugauggaagcauaacagggccuugcgaaucugauggggacaaagggaguggaggcaucaagggaggauuuguucaucaaagaauggcauccaagauuggaaggugguacucucgaacgaugucuaaaacuaaaagaauggggaugggacuguauguaaaguaugauggagauccauggacugacagugaagcccuugcucuuaguggaguaaugguuucaauggaagaaccugguugguauuccuuuggcuucgaaauaaaagauaagaaaugugauguccccuguauugggauagaaaugguacaugauggugggaaaacgacuuggcacucagcagcaacagccauuuacuguuuaaugggcucaggacaacugcugugggacacugucacagguguugauauggcucuguaa

SEQ ID NO: 61070 - RNA, 1401 nt, Artificial Sequence
  derived and/or modified CDS sequence (wt) from neuraminidase__InfluenzaB__AFJ91086
augcuaccuucaacuauacaaacauuaaccuuauuucucacaucagggggaguguuauuaucacuauaugugucagcuucauugucauacuuacuauauucggauauauugcuaaaauuuucacgaacagaaauaacugcaccaauaaugccauuggauugugcaaacgcaucaaauguucaggcugugaaccguucugcaacaaaaggggugacacuucuucucccagaaccggaguggacguacccucguuuaucuugcccgggcucaaccuuucagaaagcacuccuaauuagcccccauagauucggagaaaccaaaggaaacucagcucccuugauaauaagggaaccuuuuauugcuuguggaccaaaggaaugcaaacauuuugcucuaacccauuaugcagcucaaccagggggauacuacaauggaacaagagaagacagaaacaagcugaggcaucuaauuucagucaaauugggcaaaaucccaacaguagaaaacucuauuuuccacauggcagcuuggagcggguccgcaugccaugaugguagagaauggacuuauaucggaguugauggccccgacaguaaugcauugcucaaaauaaaauauggagaagcauauacugacacauaccauuccuaugcaaaaaacauccuaaggacacaagaaagugccugcaauugcaucgggggagauuguuaucuuaugauaacugauggcccagcuucagggauuagugaaugcagauuccuuaagauucgagagggccgaauaauaaaagaaauauuuccaacaggaagaguaaaacauacugaggaaugcacaugcggauuugccagcaacaaaaccauagaaugugccuguagagauaacaguuacacagcaaaaagacccuuugucaaauuaaauguggagacugauacagcggaaauaagauugaugugcacagagacuuauuuggacacccccagaccaaaugauggaagcauaacagggccuugcgaaucuaauggggacaaagggaguggaggcaucaagggaggauuuguucaccaaagaauggcauccaagauuggaaggugguacucucgaacgaugucuaaaacuaaaagaauggggaugggacuguauguaaaguaugauggagacccauggacugacagugaagcccuugcucuuaguggaguaaugguuucaauggaagaaccugguugguauuccuuuggcuucgaaauaaaagauaagaaaugugauguccccuguauugggauagaaaugguacaugauggugggaaaacgacuuggcacucagcagcaacagccauuuacuguuuaaugggcucaggacaacugcugugggacacugucacagguguuaauaugacucuguaa

SEQ ID NO: 61071 - RNA, 1401 nt, Artificial Sequence; identical to SEQ ID NO: 60829
  derived and/or modified CDS sequence (wt) from neuraminidase__InfluenzaB__AFJ91097

SEQ ID NO: 61072 - RNA, 1401 nt, Artificial Sequence; identical to SEQ ID NO: 60829
  derived and/or modified CDS sequence (wt) from neuraminidase__InfluenzaB__AFJ91108

SEQ ID NO: 61073 - RNA, 1401 nt, Artificial Sequence; identical to SEQ ID NO: 61070
  derived and/or modified CDS sequence (wt) from neuraminidase__InfluenzaB__AFJ91119

SEQ ID NO: 61074 - RNA, 1401 nt, Artificial Sequence
  derived and/or modified CDS sequence (wt) from neuraminidase__InfluenzaB__AFJ91707
augcuaccuucaacuauacaaacguuaacccuauuucucacaucagggggaguauuauuaucacuauaugugucagcuucauugucauacuuacuauauucggauauauugcuaaaauucccaucaacagaaauuacugcaccaacaaugccauuggauugugcaaacgcaucaaauguucaggcugugaaccguucugcaacaaaaggggugacacuucuucucccagaaccggaguggacauacccgcguuuaucuugcccgggcucaaccuuucagaaagcacuccuaaucagcccucauagauucggagaaaccaaaggaaacucagcucccuugauaauaagggaaccuuuuauugcuuguggaccaaaggaaugcaaacacuuugcucuaacccacuaugcagcccaaccagggggauacuacaauggaacaagaggagacagaaacaagcugaggcaucuaauuucagucaaauugggcaaaaucccaacaguagaaaacuccauuuuccacauggcagcauggagcggguccgcaugccaugaugguaaggaauggacauauaucggaguugauggcccugacaauaaugcauugcucaaaauaaaauauggagaagcauauacugacacauaccauuccuaugcaaacaacauccuaagaacacaagaaagugccugcaauugcaucgggggaaauuguuaucuuaugauaacugauggcucagcuucagguguuagugaaugcagauuucuuaagauucgagagggccgaauaauaaaagaaauauuuccaacaggaagaauaaaacauacugaagaaugcacaugcggauuugcuagcaauaaaaccauagaaugugccuguagagauaacaguuacacagcaaaaagacccuuugucaaauuaaacguggaaacugauacagcagaaauaagauugaugugcacagagacuuauuuggacacccccagaccagaugauggaagcauaacagggccuugugaaucuaauggggacaaagggaguggaggcaucaagggaggauuuguccaucaaagaauggcauccaagauuggaaggugguacucucgaacgaugucuaaaacuaaaaggauggggauggggcuguaugucaaguaugauggagacccaugggcugacagugaugcccuugcuuuuaguggaguaaugguuucaauggaagaaccugguugguacuccuuuggcuucgaaauaaaagacaagaaaugugauguccccuguauugggauagagaugguacaugaugguggaaaagagacuuggcacucagcagcuacagccauuuacuguuuaaugggcucaggacagcugcugugggacacugucacagguguuaauauggcucuguaa

SEQ ID NO: 61075 - RNA, 1401 nt, Artificial Sequence
  derived and/or modified CDS sequence (wt) from neuraminidase__InfluenzaB__AFK09801
augcuaccuucaacuauacaaacguuaacccuauuucucacaucagggggaguguuauuaucacuauaugugucagcuucacugucauacuuacuauauucggauauauugcuaaaauuuucacaaacagaaauaacugcaccaacaaugccauuggauugugcaaacgcaucaaauguucaggcugugaaccguucugcaacaaaaggggugacacuucuucucccagaaccggaauggacguacccucguuuaucuugcccgggcucaaccuuucagaaagcacuccuaauuagcccccauagauucggagaaaccaaaggaaacucagcucccuugauaauaagggaaccuuuuauugcuuguggaccaaaggaaugcaaacacuuugcucuaacccauuaugcagcucaaccagggggauacuacaauggaacaagagaagacagaaacaagcugaggcaucuaauuucagucaaauugggcaaaaucccaacaguagaaaacucuauuuuccacauggcagcuuggaguggguccgcaugccaugaugguagagaauggacauauaucggaguugauggccccgacaguaaugcauugcucaaaauaaaauauggagaagcauauacugacacauaccauuccuaugcaaaaaacauccuaaggacacaagaaagugccugcaauugcaucgggggagauuguuaucuuaugauaacugauggcucagcuucagggauuagugaaugcagauuccuuaagauucgagagggccgaauaauaaaagaaauauuuccaacaggaagaguaaaacauacugaagaaugcacaugcggauuugccagcaacaaaaccauagaaugugccuguagagauaacaguuacacagcaaaaagacccuuugucaaauuaaauguggagacugauacagcggaaauaagauugaugugcacagagacuuauuuggacacccccagaccaaaugauggaagcauaacagggccuugcgaaucuaauggggacagagggaguggaggcaucaaaggaggguuuguucaucaaagaauggcauccaagauuggaaggugguacucucgaacgaugucuaaaacuaaaagaauggggaugggacuguaugucaaguaugauggagacccauggacugacagugaagcccuugcucuuaguggaguaaugguuccaauggaagaaccugguugguauuccuuuggcuucgaaauaaaagauaagaaaugugauguccccuguauugggauagaaaugguacaugauggugggaaaacgacuuggcacucagcagcaacagccauuuacuguuuaaugggcucaggacaacuacugugggacacugucacagguguugauauggcucuguaa

SEQ ID NO: 61076 - RNA, 1401 nt, Artificial Sequence; identical to SEQ ID NO: 60804
  derived and/or modified CDS sequence (wt) from neuraminidase__InfluenzaB__AFN54669

SEQ ID NO: 61077 - RNA, 1401 nt, Artificial Sequence; identical to SEQ ID NO: 60804
  derived and/or modified CDS sequence (wt) from neuraminidase__InfluenzaB__AFN54680

SEQ ID NO: 61078 - RNA, 1401 nt, Artificial Sequence
  derived and/or modified CDS sequence (wt) from neuraminidase__InfluenzaB__AFN54691
augcuaccuucaacuauacaaacguuaaccuuauuucucacaucagggggaguguuauuaucacuauaugugucagcuucauugucauacuuacuauauucggauauauugcuaaaauuuucacgaacagaaauaacugcaccaauaaugccauuggauugugcaaacgcaucaaauguucaggcugugaaccguucugcaacaaaaggggugacacuucuucucccggaaccggaguggacguacccucguuuaucuugcccgggcucaaccuuucagaaagcacuccuaauuagcccccauagauucggagaaaccaagggaaacucagcucccuugauaauaagggaaccuuuuauugcuuguggaccaaaggaaugcaaacauuuugcucuaacccauuaugcagcucaaccagggggauacuacaauggaacaagagaagacagaaacaagcugaggcaucuaauuucagucaaauugggcaaaaucccaacaguagaaaacucuauuuuccacauggcagcuuggagcggguccgcaugccaugaugguagagaauggacuuauaucggaguugauggccccgacaguaaugcauugcucaaaauaaaauauggagaagcauauacugacacauaccauuccuaugcaaaaaacauccuaaggacacaagaaagugccugcaauugcaucgggggagauuguuaucuuaugauaacugauggcccagcuucagggauuagugaaugcagauuccuuaagauucgagagggccgaauaauaaaagaaauauuuccaacaggaagaguaaaacauacugaggaaugcacaugcggauuugccagcaacaaaaccauagaaugugccuguagagauaacaguuacacagcaaaaagacccuuugucaaauuaaauguggagacugauacagcggaaauaagauugaugugcacagagacuuauuuggacacccccagaccaaaugauggaagcauaacagggccuugcgaaucuaauggggacaaagggaguggaggcaucaagggaggauuuguucaccaaagaauggcauccaagauuggaaggugguacucucgaacgaugucuaaaacuaaaagaauggggaugggacuguauguaaaguaugauggagacccauggacugacagugaagcccuugcucuuaguggaguaaugguuucaauggaagaaccugguugguauuccuuuggcuucgaaauaaaagauaagaaaugugauguccccuguauugggauagaaaugguacaugauggugggaaaacgacuuggcacucagcagcaacagccauuuacuguuuaaugggcucaggacaacugcugugggacacugucacagguguuaauaugacucuguaa

SEQ ID NO: 61079 - RNA, 1401 nt, Artificial Sequence; identical to SEQ ID NO: 61078
  derived and/or modified CDS sequence (wt) from neuraminidase__InfluenzaB__AFN54702

SEQ ID NO: 61080 - RNA, 1401 nt, Artificial Sequence
  derived and/or modified CDS sequence (wt) from neuraminidase__InfluenzaB__AFN54713
augcuaccuucaacuauacaaacguuaaccuuauuucucacaucagggggaguguuauuaucacuauaugugucagcuucauugucauacuuacuauauucggauauauugcuaaaauuuucacgaacagaaauaacugcaccaauaaugccauuggauugugcaaacgcaucaaauguucaggcugugaaccguucugcaacaaaaggggugacacuucuucucccagaaccggaguggacguacccucguuuaucuugcccgggcucaaccuuucagaaagcacuccuaauuagcccccauagauucggagaaaccaagggaaacucagcucccuugauaauaagggaaccuuuuauugcuuguggaccaaaggaaugcaaacauuuugcucuaacccauuaugcagcucaaccagggggauacuacaauggaacaagagaagacagaaacaagcugaggcaucuaauuucagucaaauugggcaaaaucccaacaguagaaaacucuauuuuccacauggcagcuuggagcggguccgcaugccaugaugguagagaauggacuuauaucggaguugauggccccgacaguaaugcauugcucaaaauaaaauauggagaagcauauacugacacauaccauuccuaugcaaaaaacauccuaaggacacaagaaagugccugcaauugcaucgggggagauuguuaucuuaugauaacugauggcccagcuucagggauuagugaaugcagauuccuuaagauucgagagggccgaauaauaaaagaaauauuuccaacaggaagaguaaaacauacugaggaaugcacaugcggauuugccagcaacaaaaccauagaaugugccuguagagauaacaguuacacagcaaaaagacccuuugucaaauuaaauguggagacugauacagcggaaauaagauugaugugcacagagacuuauuuggacacccccagaccaaaugauggaagcauaacagggccuugcgaaucuaauggggacaaagggaguggaggcaucaagggaggauuuguucaccaaagaauggcauccaagauuggaaggugguacucucgaacgaugucuaaaacuaaaagaauggggaugggacuguauguaaaguaugauggagacccauggacugacagugaagcccuugcucuuaguggaguaaugguuucaauggaagaaccugguugguauuccuuuggcuucgaaauaaaagauaagaaaugugauguccccuguauugggauagaaaugguacaugauggugggaaaacgacuuggcacucagcagcaacagccauuuacuguuuaaugggcucaggacaacugcugugggacacugucacagguguuaauaugacucuguaa

SEQ ID NO: 61081 - RNA, 1401 nt, Artificial Sequence
  derived and/or modified CDS sequence (wt) from neuraminidase__InfluenzaB__AFN54724
augcuaccuucaacuauacaaacguuaaccuuauuucucacaucagggggaguguuauuaucacuauaugugucagcuucauugucauacuuacuauauucggauauauugcuaaaauuuucacgaacagaaauaacugcaccaauaaugccauuggauugugcaaacgcaucaaauguucaggcugugaaccguucugcaacaaaaggggugacacuucuucucccagaaccggaguggacguacccucguuuaucuugcccgggcucaaccuuucagaaagcacuccuaauuagcccccauagauucggagaaaccaagggaaacucagcucccuugauaauaagggaaccuuuuauugcuuguggaccaaaggaaugcaaacauuuugcucuaacccauuaugcagcucaaccagggggauacuacaauggaacaagagaagacagaaacaagcugaggcaucuaauuucagucaaauugggcaaaaucccaacaguagaaaacucuauuuuccacauggcagcuuggagcggguccgcaugccaugaugguagagaauggacuuauaucggaguugauggccccgacaguaaugcauugcucaaaauaaaauauggagaagcauauacugacacauaccauuccuaugcaaaaaacauccuaaggacacaagaaagugccugcaauugcaucgggggagauuguuaucuuaugauaacugauggcccagcuucagggauuagugaaugcagauuccuuaagauucgagagggccgaauaauaaaagaaauauuuccaacaggaagaguaaaacauacugaggaaugcacaugcggauuugccagcaacaaaaccauagagugugccuguagagauaacaguuacacagcaaaaagacccuuugucaaauuaaauguggagacugauacagcggaaauaagauugaugugcacagagacuuauuuggacacccccagaccaaaugauggaagcauaacagggccuugcgaaucuaauggggacaaagggaguggaggcaucaagggaggauuuguucaccaaagaauggcauccaagauuggaaggugguacucucgaacgaugucuaaaacuaaaagaauggggaugggacuguauguaaaguaugauggagacccauggacugacagugaagcccuugcucuuaguggaguaaugguuucaauggaagaaccugguugguauuccuuuggcuucgaaauaaaagauaagaaaugugauguccccuguauugggauagaaaugguacaugauggugggaaaacgacuuggcacucagcagcaacagccauuuacuguuuaaugggcucaggacaacugcugugggacacugucacagguguuaauaugacucuguaa

SEQ ID NO: 61082 - RNA, 1401 nt, Artificial Sequence
  derived and/or modified CDS sequence (wt) from neuraminidase__InfluenzaB__AFN54735
augcuaccuucaacuauacaaacguuaaccuuauuucucacaucagggggaguguuauuaucacuauaugugucagcuucauugucauacuuacuauauucggauauauugcuaaaauuuucacgaacagaaauaacugcaccaauaaugccauuggauugugcaaacgcaucaaauguucaggcugugaaccguucugcaacaaaaggggugacacuucuucucccggaaccggaguggacguacccucguuuaucuugcccgggcucaaccuuucagaaagcacuccuaauuagcccccauagauucggagaaaccaagggaaacucagcucccuugauaauaagggaaccuuuuauugcuuguggaccaaaggaaugcaaacauuuugcucuaacccauuaugcagcucaaccagggggauacuacaauggaacaagagaagacagaaacaagcugaggcaucuaauuucagucaaauugggcaaaaucccaacaguagaaaauucuauuuuccacauggcagcuuggagcggguccgcaugccaugaugguagagaauggacuuauaucggaguugauggccccgacaguaaugcauugcucaaaauaaaauauggagaagcauauacugacacauaccauuccuaugcaaaaaacauccuaaggacacaagaaagugccugcaauugcaucgggggagauuguuaucuuaugauaacugauggcccagcuucagggauuagugaaugcagauuccuuaagauucgagagggccgaauaauaaaagaaauauuuccaacaggaagaguaaaacauacugaggaaugcacaugcggauuugccagcaacaaaaccauagaaugugccuguagagauaacaguuacacagcaaaaagacccuuugucaaauuaaauguggagacugauacagcggaaauaagauugaugugcacagagacuuauuuggacacccccagaccaaaugauggaagcauaacagggccuugcgaaucuaauggggacaaagggaguggaggcaucaagggaggauuuguucaccaaagaauggcauccaagauuggaaggugguacucucgaacgaugucuaaaacuaaaagaauggggaugggacuguauguaaaguaugauggagacccauggacugacagugaagcccuugcucuuaguggaguaaugguuucaauggaagaaccugguugguauuccuuuggcuucgaaauaaaagauaagaaaugugauguccccuguauugggauagaaaugguacaugauggugggaaaacgacuuggcacucagcagcaacagccauuuacuguuuaaugggcucaggacaacugcugugggacacugucacagguguuaauaugacucuguaa

SEQ ID NO: 61083 - RNA, 1401 nt, Artificial Sequence
  derived and/or modified CDS sequence (wt) from neuraminidase__InfluenzaB__AFN54746
augcuaccuucaacuauacaaacauuaaccuuauuucucacaucagggggaguguuauuaucacuauaugugucagcuucauugucauacuuacuauauucggauauauugcuaaaauuuucacgaacagaaauaacugcaccaauaaugccauuggauugugcaaacgcaucaaauguucaggcugugaaccguucugcaacaaaaggggugacacuucuucucccggaaccggaguggacguacccucguuuaucuugcccgggcucaaccuuucagaaagcacuccuaauuagcccccauagauucggagaaaccaagggaaacucagcucccuugauaauaagggaaccuuuuauugcuuguggaccaaaggaaugcaaacauuuugcucuaacccauuaugcagcucaaccagggggauacuacaauggaacaagagaagacagaaacaagcugaggcauuuaauuucagucaaauugggcaaaaucccaacaguagaaaacucuauuuuccacauggcagcuuggagcggguccgcaugccaugaugguagagaauggacuuauaucggaguugauggccccgacaguaaugcauugcucaaaauaaaauauggagaagcauauacugacacauaccauuccuaugcaaaaaacauccuaaggacacaagaaagugccugcaauugcaucgggggagauuguuaucuuaugauaacugauggcccagcuucagggauuagugaaugcagauuccuuaagauucgagagggccgaauaauaaaagaaauauuuccaacaggaagaguaaaacauacugaggaaugcacaugcggauuugccagcaacaaaaccauagaaugugccuguagagauaacaguuacacagcaaaaagacccuuugucaaauuaaauguggagacugauacagcggaaauaagauugaugugcacagagacuuauuuggacacccccagaccaaaugauggaagcauaacagggccuugcgaaucuaauggggacaaagggaguggaggcaucaagggaggauuuguucaccaaagaauggcauccaagauuggaaggugguacucucgaacgaugucuaaaacuaaaagaauggggaugggacuguauguaaaguaugauggagacccauggacugacagugaagcccuugcucuuaguggaguaaugguuucaauggaagaaccugguugguauuccuuuggcuucgaaauaaaagauaagaaaugugauguccccuguauugggauagaaaugguacaugauggugggaaaacgacuuggcacucagcagcaacagccauuuacuguuuaaugggcucaggacaacugcugugggacacugucacagguguuaauaugacucuguaa

SEQ ID NO: 61084 - RNA, 1401 nt, Artificial Sequence; identical to SEQ ID NO: 61083
  derived and/or modified CDS sequence (wt) from neuraminidase__InfluenzaB__AFN54757

SEQ ID NO: 61085 - RNA, 1401 nt, Artificial Sequence; identical to SEQ ID NO: 61080
  derived and/or modified CDS sequence (wt) from neuraminidase__InfluenzaB__AFN54768

SEQ ID NO: 61086 - RNA, 1401 nt, Artificial Sequence
  derived and/or modified CDS sequence (wt) from neuraminidase__InfluenzaB__AFN54779
augcuaccuucaacuauacaaacguuaaccuuauuucucacaucagggggaguguuauuaucacuauaugugucagcuucauugucauacuuacuauauucggauauauugcuaaaauuuucacgaacagaaauaacugcaccaauaaugccauuggauugugcaaacgcaucaaauguucaggcugugaaccguucugcaacaaaaggggugacacuucuucucccagaaccggaguggacguacccucguuuauccugcccgggcucaaccuuucagaaagcacuccuaauuagcccccauagauucggagaaaccaagggaaacucagcucccuugauaauaagggaaccuuuuauugcuuguggaccaaaggaaugcaaacauuuugcucuaacccauuaugcagcucaaccagggggauacuacaauggaacaagagaagacagaaacaagcugaggcaucuaauuucagucaaauugggcaaaaucccaacaguagaaaacucuauuuuccacauggcagcuuggagcggguccgcaugccaugaugguagagaauggacuuauaucggaguugauggccccgacaguaaugcauugcucaaaauaaaauauggagaagcauauacugacacauaccauuccuaugcaaaaaacauccuaaggacacaagaaagugccugcaauugcaucgggggagacuguuaucuuaugauaacugauggcccagcuucagggauuagugaaugcagauuccuuaagauucgagagggccgaauaauaaaagaaauauuuccaacaggaagaguaaaacauacugaggaaugcacaugcggauuugccagcaacaaaaccauagaaugugccuguagagauaacaguuacacagcaaaaagacccuuugucaaauuaaauguggagacugauacagcggaaauaagauugaugugcacagagacuuauuuggacacccccagaccaaaugauggaagcauaacagggccuugcgaaucuaauggggacaaagggaguggaggcaucaagggaggauuuguucaccaaagaauggcauccaagauuggaaggugguacucucgaacgaugucuaaaacuaaaagaauggggaugggacuguauguaaaguaugauggagacccauggacugacagugaagcccuugcucuuaguggaguaaugguuucaauggaagaaccugguugguauuccuuuggcuucgaaauaaaagauaagaaaugugauguccccuguauugggauagaaaugguacaugauggugggaaaacgacuuggcacucagcagcaacagccauuuacuguuuaaugggcucaggacaacugcugugggacacugucacagguguuaauaugacucuguaa

SEQ ID NO: 61087 - RNA, 1401 nt, Artificial Sequence; identical to SEQ ID NO: 61080
  derived and/or modified CDS sequence (wt) from neuraminidase__InfluenzaB__AFN54790

SEQ ID NO: 61088 - RNA, 1401 nt, Artificial Sequence; identical to SEQ ID NO: 61080
  derived and/or modified CDS sequence (wt) from neuraminidase__InfluenzaB__AFN54801

SEQ ID NO: 61089 - RNA, 1401 nt, Artificial Sequence
  derived and/or modified CDS sequence (wt) from neuraminidase__InfluenzaB__AFN54812
augcuaccuucaacuauacaaacguuaaccuuauuucucacaucagggggaguguuauuaucacuauaugugucagcuucauugucauacuuacuauauucggauauauugcuaaaauuuucacgaacagaaauaacugcaccaauaaugccauuggauugugcaaacgcaucaaauguucaggcugugaaccguucugcaacaaaaggggugacacuucuucucccggaaccggaguggacguacccucguuuaucuugcccgggcucaaccuuucagaaagcacuccuaauuagcccccauagauucggagaaaccaagggaaacucagcucccuugauaauaagggaaccuuuuauugcuuguggaccaaaggaaugcaaacauuuugcucuaacccauuaugcagcucaaccagggggauacuacaauggaacaagagaagacagaaacaagcugaggcauuuaauuucagucaaauugggcaaaaucccaacaguagaaaacucuauuuuccacauggcagcuuggagcggguccgcaugccaugaugguagagaauggacuuauaucggaguugauggccccgacaguaaugcauugcucaaaauaaaauauggagaagcauauacugacacauaccauuccuaugcaaaaaacauccuaaggacacaagaaagugccugcaauugcaucgggggagauuguuaucuuaugauaacugauggcccagcuucagggauuagugaaugcagauuccuuaagauucgagagggccgaauaauaaaagaaauauuuccaacaggaagaguaaaacauacugaggaaugcacaugcggauuugccagcaacaaaaccauagaaugugccuguagagauaacaguuacacagcaaaaagacccuuugucaaauuaaauguggagacugauacagcggaaauaagauugaugugcacagagacuuauuuggacacccccagaccaaaugauggaagcauaacagggccuugcgaaucuaauggggacaaagggaguggaggcaucaagggaggauuuguucaccaaagaauggcauccaagauuggaaggugguacucucgaacgaugucuaaaacuaaaagaauggggaugggacuguauguaaaguaugauggagacccauggacugacagugaagcccuugcucuuaguggaguaaugguuucaauggaagaaccugguugguauuccuuuggcuucgaaauaaaagauaagaaaugugauguccccuguauugggauagaaaugguacaugauggugggaaaacgacuuggcacucagcagcaacagccauuuacuguuuaaugggcucaggacaacugcugugggacacugucacagguguuaauaugacucuguaa

SEQ ID NO: 61090 - RNA, 1401 nt, Artificial Sequence
  derived and/or modified CDS sequence (wt) from neuraminidase__InfluenzaB__AFN54834
augcuaccuucaacuauacaaacauuaaccuuauuucucacaucagggggaguguuauuaucacuauaugugucagcuucauugucauacuuacuauauucggauauauugcuaaaauuuucacgaacagaaauaacugcaccaauaaugccauuggauugugcaaacgcaucaaauguucaggcugugaaccguucugcaacaaaaggggugacacuucuucucccggaaccggaguggacguacccucguuuaucuugcccgggcucaaccuuucagaaagcacuccuaauuagcccccauagauucggagaaaccaagggaaacucagcucccuugauaauaagggaaccuuuuauugcuuguggaccaaaggaaugcaaacauuuugcucuaacccauuaugcagcucaaccagggggauacuacaauggaacaagagaagacagaaacaagcugaggcauuuaauuucagucaaauugggcaaaaucccaacaguagaaaacucuauuuuccacauggcagcuuggagcggguccgcaugccaugaugguagagaauggauuuauaucggaguugauggccccgacaguaaugcauugcucaaaauaaaauauggagaagcauauacugacacauaccauuccuaugcaaaaaacauccuaaggacacaagaaagugccugcaauugcaucgggggagauuguuaucuuaugauaacugauggcccagcuucagggauuagugaaugcagauuccuuaagauucgagagggccgaauaauaaaagaaauauuuccaacaggaagaguaaaacauacugaggaaugcacaugcggauuugccagcaacaaaaccauagaaugugccuguagagauaacaguuacacagcaaaaagacccuuugucaaauuaaauguggagacugauacagcggaaauaagauugaugugcacagagacuuauuuggacacccccagaccaaaugauggaagcauaacagggccuugcgaaucuaauggggacaaagggaguggaggcaucaagggaggauuuguucaccaaagaauggcauccaagauuggaaggugguacucucgaacgaugucuaaaacuaaaagaauggggaugggacuguauguaaaguaugauggagacccauggacugacagugaagcccuugcucuuaguggaguaaugguuucaauggaagaaccugguugguauuccuuuggcuucgaaauaaaagauaagaaaugugauguccccuguauugggauagaaaugguacaugauggugggaaaacgacuuggcacucagcagcaacagccauuuacuguuuaaugggcucaggacaacugcugugggacacugucacagguguuaauaugacucuguaa

SEQ ID NO: 61091 - RNA, 1401 nt, Artificial Sequence; identical to SEQ ID NO: 61083
  derived and/or modified CDS sequence (wt) from neuraminidase__InfluenzaB__AFN54845

SEQ ID NO: 61092 - RNA, 1401 nt, Artificial Sequence
  derived and/or modified CDS sequence (wt) from neuraminidase__InfluenzaB__AFN54856
augcuaccuucaacuauacaaacguuaaccuuauuucucacaucagggggaguguuauuaucacuauaugugucagcuucauugucauacuuacuauauucggauauauugcuaaaauuuucacgaacagaaauaacugcaccaauaaugccauuggauugugcaaacgcaucaaauguucaggcugugaaccguucugcaacaaaaggggugacacuucuucucccagaaccggaguggacguacccucguuuaucuugcccgggcucaaccuuucagaaagcacuccuaauuagcccccauagauucggagaaaccaagggaaacucagcucccuugauaauaagggaaccuuuuauugcuuguggaccaaaggaaugcaaacauuuugcucuaacccauuaugcagcucaaccagggggauacuacaauggaacaagagaagacagaaacaaguugaggcaucuaauuucagucaaauugggcaaaaucccaacaguagaaaacucuauuuuccacauggcagcuuggagcggguccgcaugccaugaugguagagaauggacuuauaucggaguugauggccccgacaguaaugcauugcucaaaauaaaauauggagaagcauauacugacacauaccauuccuaugcaaaaaacauccuaaggacacaagaaagugccugcaauugcaucgggggagauuguuaucuuaugauaacugauggcccagcuucagggguuagugaaugcagauuccuuaagauucgagagggccgaauaauaaaagaaauauuuccaacaggaagaguaaaacauacugaggaaugcacaugcggauuugccagcaacaaaaccauagagugugccuguagagauaacaguuacacagcaaaaagacccuuugucaaauuaaauguggagacugauacagcggaaauaagauugaugugcacagagacuuauuuggacacccccagaccaaaugauggaagcauaacagggccuugcgaaucuaauggggacaaagggaguggaggcaucaagggaggauuuguucaccaaagaauggcauccaagauuggaaggugguacucucgaacgaugucuaaaacuaaaagaauggggaugggacuguauguaaaguaugauggagacccauggacugacagugaagcccuugcucuuaguggaguaaugguuucaauggaagaaccugguugguauuccuuuggcuucgaaauaaaagauaagaaaugugauguccccuguauugggauagaaaugguacaugaugguggaaaaacgacuuggcacucagcagcaacagccauuuacuguuuaaugggcucaggacaacugcugugggacacugccacagguguuaauaugacucuguaa

SEQ ID NO: 61093 - RNA, 1401 nt, Artificial Sequence
  derived and/or modified CDS sequence (wt) from neuraminidase__InfluenzaB__AFN54867
augcuaccuucaacuauacaaacguuaaccuuauuucucacaucagggggaguguuauuaucacuauaugugucagcuucauugucauacuuacuauauucggauauauugcuaaaauuuucacgaacagaaauaacugcaccaauaaugccauuggauugugcaaacgcaucaaauguucaggcugugaaccguucugcaacaaaaggggugacacuucuucucccggaaccggaguggacguacccucguuuaucuugcccgggcucaaccuuucagaaagcacuccuaauuagcccccauagauucggagaaaccaagggaaacucagcucccuugauaauaagggaaccuuuuauugcuuguggaccaaaggaaugcaaacauuuugcucuaacccauuaugcagcucaaccagggggauacuacaauggaacaagagaagacagaaauaagcugaggcauuuaauuucagucaaauugggcaaaaucccaacaguagaaaacucuauuuuccacauggcagcuuggagcggguccgcaugccaugaugguagagaauggacuuauaucggaguugauggccccgacaguaaugcauugcucaaaauaaaauauggagaagcauauacugacacauaccauuccuaugcaaaaaacauccuaaggacacaagaaagugccugcaauugcaucggaggagauuguuaucuuaugauaacugauggcccagcuucagggauuagugaaugcagauuccuuaagauucgagagggccgaauaauaaaagaaauauuuccaacaggaagaguaaaacauacugaggaaugcacaugcggauuugccagcaacaaaaccauagaaugugccuguagagauaacaguuacacagcaaaaagacccuuugucaaauuaaauguggagacugauacagcggaaauaagauugaugugcacagagacuuauuuggacacccccagaccaaaugauggaagcauaacagggccuugcgaaucuaauggggacaaagggaguggaggcaucaagggaggauuuguucaccaaagaauggcauccaagauuggaaggugguacucucgaacgaugucuaaaacuaaaagaauggggaugggacuguauguaaaguaugauggagacccauggacugacagugaagcccuugcucuuaguggaguaaugguuucaauggaagaaccugguugguauuccuuuggcuucgaaauaaaagauaagaaaugugauguccccuguauugggauagaaaugguacaugauggugggaaaacgacuuggcacucagcagcaacagccauuuacuguuuaaugggcucaggacaacugcugugggacacugucacagguguuaauaugacucuguaa

SEQ ID NO: 61094 - RNA, 1401 nt, Artificial Sequence
  derived and/or modified CDS sequence (wt) from neuraminidase__InfluenzaB__AFU34598
augcuaccuucaacuauacaaacguuaacccuauuucucacaucagggggaguauuauuaucacuauaugugucagcuucauuaucauacuuacuauauucggauauauugcuaaaauucucaccaacagaaauaacugcaccaacaaugucauuggauugugcaaacgcaucaaauguucaggcugugaaccguucugcaacaaaaggggugacauuucuucucccagaaccggaguggacauacccgcguuuaucuugcccgggcucaaccuuucagaaagcacuccuaauuagcccucauagauucggagaaaccaaaggaaacucagcucccuugauaauaagggaaccuuuuauugcuuguggaccaaaugaaugcaaacacuuugcucuaacccauuaugcagcccaaccagggggauacuacaauggaacaagaggagacagaaacaagcugaggcaucuaauuucagucaaauugggcaaaaucccaacaguagaaaacuccauuuuccacauggcagcauggagcggguccgcgugccaugaugguaaggaauggacauauaucggaguugauggcccugacaauaaugcauugcucaaaguaaaauauggagaagcauauacugacacauaccauuccuaugcaaacaaaauccuaagaacacgagaaagugccugcaauugcaucgggggaaauuguuaucuuaugauaacugauggcucagcuucagguguuagugaaugcagauuucuuaagauucgagugggccgaauaauaaaagaaauauuuccaacaggaagaguaaaacacacugaggaaugcacaugcggauuugccagcaauaaaaccauagaaugugccuguagagauaacaguuacacagcaaaaagaccuuuugucaaauuaaacguggagacugauacagcagaaauaagauugaugugcacagauacuuauuuggacacccccagaccagaugauggaagcauaacaggcccuugugaaucuaauggggacaaagggaguggaggcaucaagggaggauuuguucaucaaagaauggaauccaagauuggaaggugguacucucgaacgaugucuaagacugaaaggauggggaugggacuguaugucaaguaugauggagacccaugggcugacagugaugcccuagcuuuuaguggaguaaugguuucaaugaaggaaccugguugguacuccuuuggcuucgaaauaaaagauaagaaaugcgauguccccuguauugggauagagaugguacaugaugguggaaaagagacuuggcacucagcagcaacagccauuuacuguuuaaugggcucaggacagcugcugugggacacugucacagguguugacguggcucuguaa

SEQ ID NO: 61095 - RNA, 1401 nt, Artificial Sequence
  derived and/or modified CDS sequence (wt) from neuraminidase__InfluenzaB__AFU34609
augcuaccuucaacuauacaaacguugacccuauuucucacaucagggggaguauuauuaucacuauaugugucagcuuuauuaucauacuuacuauauucggauauauugcuaaaauucucaccaacagaaauaacugcaccaacaaugucauuggauugugcaaacgcaucaaauguucaggcugugaaccguucugcaacaagaggggugacauuucuucucccagaaccggagugggcauacccgcguuuaucuugcccgggcucaaccuuucagaaagcacuccuaauuagcccucauagauucggagaaaccaaaggaaacucagcucccuugauaauaagggaaccuuuuauugcuuguggaccaaaugaaugcaaacacuuugcucuaacccauuaugcagcccaaccagggggauacuacaauggaacaagaggagacagaaacaagcugaggcaucuaauuucagucaaauugggcaaaaucccaacaguagaaaacuccauuuuccacauggcagcauggagcggguccgcgugccaugaugguaaggaauggacauauaucggaguugauggcccugacaaugaugcauugcucaaaguaaaauauggagaagcauauacugacacauaccauuccuaugcaaacaaaauccuaagaacacaagaaagugccugcaauugcaucgggggaaauuguuaucuuaugauaacugauggcucagcuucagguguuagugaaugcagauuucuuaagauucgagagggccgaauaauaaaagaaauauuuccaacaggaagaguaaaacacacugaggaaugcacaugcggauuugcuagcaauaaaaccauagaaugugccuguagagauaacaguuacacagcaaaaagaccuuuugucaaauuaaacguggagacugauacagcagaaauaagauugaugugcacagauacuuauuuggacacccccagaccagaugauggaagcauaacaggcccuugugaaucuaauggggacaaagggaguggaggcaucaagggaggauuuguucaucaaagaauggaauccaagauuggaaggugguacucucgaacgaugucuaagacugaaaggauggggaugggacuguaugucaaguaugauggagacccaugggcugacagugaugcccuagcuuuuaguggaguaaugguuucaaugaaagaaccugguugguacuccuuuggcuucgaaauaaaagauaagaaaugcgauguccccuguauugggauagagaugguacaugaugguggaaaagagacuuggcacucagcagcaacagccauuuacuguuuaaugggcucaggacagcugcugugggacacugucacaggcguugacauggcucuguaa

SEQ ID NO: 61096 - RNA, 1401 nt, Artificial Sequence
  derived and/or modified CDS sequence (wt) from neuraminidase__InfluenzaB__AFU34620
augcuaccuucaacuauacaaacguugacccuauuucucacaucagggggaguauuauuaucacuauaugugucagcuuuauuaucauacuuacuauauucggauauauugcuaaaauucucaccaacagaaauaacugcaccaacaaugucauuggauugugcaaacgcaucaaauguucaggcugugaaccguucugcaacaagaggggugacauuucuucucccagaaccggaguggacauacccgcguuuaucuugcccgggcucaaccuuucagaaagcacuccuaauuagcccucauagauucggagaaaccaaaggaaacucagcucccuugauaauaagggaaccuuuuauugcuuguggaccaaaugaaugcaaacacuuugcucuaacccauuaugcagcccaaccagggggauacuacaauggaacaagaggagacagaaacaagcugaggcaucuaauuucagucaaauugggcaaaaucccaacaguagaaaacuccauuuuccacauggcagcauggagcggguccgcgugccaugaugguaaggaauggacauauaucggaguugauggcccugacaaugaugcauugcucaaaguaaaauauggagaagcauauacugacacauaccauuccuaugcaaacaaaauccuaagaacacaagaaagugccugcaauugcaucgggggaaauuguuaucuuaugauaacugauggcucagcuucagguguuagugaaugcagauuucuuaagauucgagagggccgaauaauaaaagaaauauuuccaacaggaagaguaaaacacacugaggaaugcacaugcggauuugccagcaauaaaaccauagaaugugccuguagagauaacaguuacacagcaaaaagaccuuuugucaaauuaaacguggagacugauacagcagaaauaagauugaugugcacagauacuuauuuggacacccccagaccagaugauggaagcauaacaggcccuugugaaucuaauggggacaaagggaguggaggcaucaagggaggauuuguucaucaaagaauggaauccaagauuggaaggugguacucucgaacgaugucuaagacugaaaggauggggaugggacuguaugucaaguaugauggagacccaugggcugacagugaugcccuagcuuuuaguggaguaaugguuucaaugaaagaaccugguugguacuccuuuggcuucgaaauaaaagauaagaaaugcgauguccccuguauugggauagagaugguacaugaugguggaaaagagacuuggcacucagcagcaacagccauuuacuguuuaaugggcucaggacagcugcugugggacacugucacaggcguugacauggcucuguaa

SEQ ID NO: 61097 - RNA, 1401 nt, Artificial Sequence
  derived and/or modified CDS sequence (wt) from neuraminidase__InfluenzaB__AFU34631
augcuaccuucaacuauacaaacguugacccuauuucucacaucagggggaguauuauuaucacuauaugugucagcuuuauuaucauacuuacuauauucggauauauugcuaaaauucucaccaacagaaauaacugcaccaacaaugucauuggauugugcaaacgcaucaaauguucaggcugugaaccguucugcaacaagaggggugacauuucuucucccagaaccggaguggacauacccgcguuuaucuugcccgggcucaaccuuucagaaagcacuccuaauuagcccucauagauucggagaaaccaaaggaaacucagcucccuugauaauaagggaaccuuuuauugcuuguggaccaaaugaaugcaaacacuuugcucuaacccauuaugcagcccaaccagggggauacuacaauggaacaagaggagacagaaacaagcugaggcaucuaauuucagucaaauugggcaaaaucccaacaguagaaaacuccauuuuccacauggcagcauggagcggguccgcgugccaugaugguaaggaauggacauauaucggaguugauggcccugacaaugaugcauugcucaaaguaaaauauggagaagcauauacugacacauaccauuccuaugcaaacaaaauccuaagaacacaagaaagugccugcaauugcaucaggggaaauuguuaucuuaugauaacugauggcucagcuucagguguuagugaaugcagauuucuuaagauucgagagggccgaauaauaaaagaaauauuuccaacaggaagaguaaaacacacugaggaaugcacaugcggauuugccagcaauaaaaccauagaaugugccuguagagauaacaguuacacagcaaaaagaccuuuugucaaauuaaacguggagacugauacagcagaaauaagauugaugugcacagauacuuauuuggacacccccagaccagaugauggaagcauaacaggcccuugugaaucuaauggggacaaagggaguggaggcaucaagggaggauuuguucaucaaagaauggaauccaagauuggaaggugguacucucgaacgaugucuaagacugaaaggauggggaugggacuguaugucaaguaugauggagacccaugggcugacagugaugcccuagcuuuuaguggaguaaugguuucaaugaaagaaccugguugguacuccuuuggcuucgaaauaaaagauaagaaaugcgauguccccuguauugggauagagaugguacaugaugguggaaaagagacuuggcacucagcagcaacagccauuuacuguuuaaugggcucaggacagcugcugugggacacugucacaggcguugacauggcucuguaa

SEQ ID NO: 61098 - RNA, 1401 nt, Artificial Sequence
  derived and/or modified CDS sequence (wt) from neuraminidase__InfluenzaB__AFU34642
augcuaccuucaacuauacaaacguuaacccuauuucucacaucagggggaguauuauuaucacuauaugugucagcuucauuaucauacuuacuauauucggauauauugcuaaaauucucaccaacagaaauaacugcaccaacaaugucauuggauugugcaaacgcaucaaauguucaggcugugaaccguucugcaacaaaagggaugacauuucuucucccagaaccggaguggacauacccgcguuuaucuugcccgggcucaaccuuucagaaagcacuccuaauuagcccucauagauucggagaaaccaaaggaaacucagcccccuugauaauaagggaaccuuuuauugcuuguggaccaaauggaugcaaacacuuugcucuaacccauuacgcagcccaaccagggggauacuacaauggaacaagaggagacagaaacaagcugaggcaucuaauuucagucaaauugggcaaaaucccaacaguagaaaacuccauuuuccacauggcagcauggagcggguccgcgugccaugaugguaaggaauggacauauaucggaguugauggcccugacaauaaugcauugcucaaaguaaaauauggagaagcauauacugacacauaccauuccuaugcaaacaaaauccuaagaacacaagaaagugccugcaauugcaucgggggaaauuguuaucuuaugauaacugauggcucagcuucagguguuagugaaugcagauuucuuaagauucgagagggccgaauaauaaaagaaauauuuccaacaggaagaguaaaacacacugaggaaugcacaugcggauuugccagcaauaaaaccauagaaugugccuguagagauaacaguuacacagcaaaaagaccuuuugucaaauuaaacguggagacugauacagcagaaauaagauugaugugcacagauacuuauuuggacacccccagaccagaugauggaagcauaacaggcccuugugaaucuuauggggacaaggggaguggaggcaucaagggaggauuuguccaucaaagaauggaauccaagauuggaaggugguacucucgaacgaugucuaagacugaaaggauggggaugggacuguaugucaaguaugauggagacccaugggcugacagugaugcccuagcuuuuaguggaguaaugguuucaaugaaagaaccugguugguacuccuuuggcuucgaaauaaaagauaagaaaugcgauguccccuguauugggauagagaugguacaugaugguggaaaagagacuuggcacucagcagcaacagccauuuacuguuuaaugggcucaggacagcugcugugggacacugucacagguguugacauggcucuguaa

SEQ ID NO: 61099 - RNA, 1401 nt, Artificial Sequence
  derived and/or modified CDS sequence (wt) from neuraminidase__InfluenzaB__AGB97261
augcuaccuucaacuauacaaacguuaaccuuauuucucacaucagggggaguguuauuaucacuauaugugucagcuucauugucauacuuacuauauucggauauguugcuaaaauuuucacgaacagaaauaacugcaccaauaaugccauuggauugugcaaacgcaucaaauguucaggcugugaaccguucugcaacaaaaggggugacacuucuucucccagaaccggaguggacguacccccguuuaucuugcccgggcucaaccuuucagaaagcacuccuaauuagcccccauagauucggagaaaccaaaggaaacucagcucccuugauaauaagggaaccuuuuauugcuuguggaccaaaggaaugcaaacauuuugcucuaacccauuaugcagcucaaccagggggauacuacaauggaacaagagaagacagaaacaaguugaggcaucuaauuucagucaaauugggcaaaaucccaacaguagaaaacucuauuuuccacauggcagcuuggagcggguccgcaugccaugaugguagagaauggacuuauaucggaguugauggccccgacaguaaugcauugcucaaaauaaaauauggagaagcauauacugacacauaccauuccuaugcaaaaaacaucuuaaggacacaagaaagugccugcaauugcaucgggggagacuguuaucuuaugauaacugauggcccagcuucagggauuagugaaugcagauuccuuaaaauucgagagggccgaauaauaaaagaaauauuuccaacaggaagaguaaaacauacugaggaaugcacaugcggauuugccagcaacaaaaccauagaaugugccuguagagauaacaguuacacagcaaaaagacccuuugucaaauuaaauguggagacugauacagcggaaauaagauugaugugcacagagacuuauuuggacacccccagaccaaaugauggaagcauaacagggccuugcgaaucuaauggggacaaagggaguggaggcaucaagggaggauuuguucaccaaagaauggcauccaagauuggaaggugguacucucgaacgaugucuaaaacuaaaagaauggggaugggacuguauguaaaguaugauggagacccauggacugacagugaagcccuugcucuuaguggagugaugguuucaauggaagaaccugguugguauuccuuuggcuucgaaauaaaagauaagaaaugugauguccccuguauugggauagaaaugguacaugauggugggaaaacgacuuggcacucagcagcaacagccauuuacuguuuaaugggcucaggacaacugcugugggacacugucacagguguuaauaugacucuguaa

SEQ ID NO: 61100 - RNA, 1401 nt, Artificial Sequence
  derived and/or modified CDS sequence (wt) from neuraminidase__InfluenzaB__AGB97267
augcuaccuucaacuauacaaacguuaacccuauuucucacaucagggggaguguuauuaucacuauaugugucagcuucauugucauacuuacuauauucggauauauugcuaaaauuuucacagacagaaauaacugcaccaauaaugccauuggauuguacaaacgcaucaaauguucaggcugugaaucguucugcagcaaaaggggugacacuucuucucccagaaccggaguggacauacccucguuuaucuugcccgggcucaaccuuucagaaagcacuccuaauuagcccccauagauucggagaaaucaaaggaaacucagcucccuugauaauaagggaaccuuuuauugcuuguggaccaacggaaugcaaacacuuugcucuaacccauuaugcagcucaaccagggggauacuacaauggaacaagagaagacagaaacaagcugaggcaucuaauuucagucaaauugggcaaaaucccaacaguagaaaacuccauuuuccacauggcagcuuggagcggguccgcaugccaugaugguaaagaauggacauauaucggaauugauggccccgacaguaaugcauugcucaaaauaaaauauggagaagcauauacugacacguaccauuccuaugcaaaaaacauccuaaggacacaagaaagugccugcaauugcaucgggggagauuguuaucuuaugauaacugauggcccagcuucagggguuagugaaugcagauuccuuaagauucgagaaggcagaauaauaaaagaaauauuuccaacaggaagaguaaaacauacugaggaaugcacaugcggauuugccagcaacaaaaccauagaaugugcuuguagagauaaccguuacacagcaaaaagacccuuugucaaauuaaauguggagacugauacagcggaaauaagauugaugugcacagagacuuauuuggacacccccagaccaaaugauggaagcauaacagggccuugcgaaucugauggggacaaagggaguggaggcaucaagggaggauuuguucaucaaagaauggcauccaagauuggaaggugguacucucgaacgaugucuaaaaccaaaagaauggggaugggacuauauguaaaguaugauggagacccauggacugacagugaagcccuugcucuuaguggaguaaugguuucaauggaagaaccugguugguauuccuuuggcuucgaaauaaaagauaagaaaugugauguccccuguauugggauagaaaugguacaugauggugggaaaacgacuuggcacucagcagcaacagccauuuauuguuuaaugggcucaggacaauugcugugggacacugucacagguguugauauggcucuguaa

SEQ ID NO: 61101 - RNA, 1401 nt, Artificial Sequence
  derived and/or modified CDS sequence (wt) from neuraminidase__InfluenzaB__AGR54784
augcuaccuucaacuauacaaacguuaaccuuauuucucacaucagggggaguguuauuaucacuauaugugucagcuucauugucauacuuacuauauucggauauauugcuaaaauuuucacgaacagaaauaacugcaccaauaaugccauuggauugugcaaacgcaucaaauguucaggcugugaaccguucugcaacaaaaggggugacacuucuucucccagaaccggaguggacguacccucguuuaucuugcccgggcucaaccuuucagaaagcacuccuaauuagcccccauagauucggagaaaccaaaggaaacucagcucccuugauaauaagggaaccuuuuauugcuuguggaccaaaggaaugcaaacauuuugcucuaacccauuaugcagcucaaccagggggauacuacaauggaacaagagaagacagaaacaagcugaggcaucuaauuucagucaaauugggcaaaaucccaacaguagaaaacucuauuuuccacauggcagcuuggagcggguccgcaugccaugaugguagagaauggacuuauaucggaguugauggccccgacaguaaugcauugcucaaaauaaaauauggagaagcauauacugacacauaccauuccuaugcaaaaaacauccuaaggacacaagaaagugccugcaauugcaucgggggugauuguuaucuuaugauaacugauggcccagcuucagggauuagugaaugcagauuccuuaagauucgagagggccgaauaauaaaagaaauauuuccaacaggaagaguaaaacauacugaggaaugcacaugcggauuugccagcaacaaaaccauagaaugugccuguagagauaacaguuacacagcaaaaagacccuuugucaaauuaaauguggagacugauacagcggaaauaagauugaugugcacagagacuuauuuggacacccccagaccaaaugauggaagcauaacagggccuugcgaaucuaauggggacaaagggaguggaggcaucaagggaggauuuguucaccaaagaauggcauccaagauuggaaggugguacucucgaacgaugucuaaaacuaaaagaauggggaugggacuguauguaaaguaugauggagacccauggacugacagugaagcccuugcucuuaguggaguaaugguuucaauggaagaaccugguugguauuccuuuggcuucgaaauaaaagacaagaaaugcgauguccccuguauugggauagaaaugguacaugauggugggaaaacgacuuggcacucagcagcaacagccauuuacuguuuaaugggcucaggacaacugcugugggacacugucacagguguuaauaugacucuguaa

SEQ ID NO: 61102 - RNA, 1401 nt, Artificial Sequence
  derived and/or modified CDS sequence (wt) from neuraminidase__InfluenzaB__AGX15491
augcuaccuucaacuauacaaacguuaacccuauuucucacaucagggggaguauuauuaucacuauaugugucagcuucauugucauacuuacuauauucggauauauugcuaaaauucucaccaacagaaauaacugcaccaacaaugccauuggauugugcaaacgcaucaaauguucaggcugugaaccguucugcaacaaaaggggugacacuucuucucccagaaccggaguggacauacccgcguuuaucuugcccgggcucaaccuuucagaaagcacuccuaauuagcccucauagauucggagaaaccaaaggaaacucagcucccuugauaauaagggaaccuuuuauugcuuguggaccaaaggaaugcaaacacuuugcucuaacccauuaugcagcccaaccagggggauacuacaauggaacaagaggagacagaaacaaacugaggcaucuaauuucagucaaauugggaaaaaucccaacaguagaaaacuccauuuuccacauggcagcauggagcggguccgcaugccaugaugguaaggaauggacauauaucggaguugauggcccugacaauaaugcauugcucaaaauaaaauauggagaagcauauacugacacauaccauuccuaugcaaacaacauccuaagaacacaagaaagugccugcaauugcaucgggggaaauuguuaucuuaugauaacugauggcucagcuucagguguuagugaaugcagauuucuuaagauucgagagggccgaauaauaaaagaaauauuuccaacaggaagaguaaaacauacugaagaaugcacaugcggauuugccagcaauaaaaccauagaaugugccuguagagauaacaguuacacagcaaaaagacccuuugucaaauuaaacguggagacugauacagcagaaauaagauugaugugcacagagacuuauuuggacacccccagaccagaugauggaagcauaacagggccuugugaaucuaauggggacaaagggaguggaggcaucaagggaggauuuguucaucaaagaauggcauccaagauuggaaggugguacucucgaacgaugucuaaaacuaaaaggauggggaugggacuguaugucaaguaugauggagacccaugggcugacagugaugcccuugcucuuaguggaguaaugguuucaauggaagaaccugguugguacuccuuuggcuucgaaauaaaagauaagaaaugugauguccccuguauugggauagagaugguacaugaugguggaaaagagacuuggcacucagcagcaacagccauuuacuguuuaaugggcucaggacagcugcugugggacacugucacagguguugauauggcucuguaa

SEQ ID NO: 61103 - RNA, 1401 nt, Artificial Sequence
  derived and/or modified CDS sequence (wt) from neuraminidase__InfluenzaB__AGX15533
augcuaccuucaacuauacaaacguuaacccuauuucucacaucagggggaguauuauuaucacuauaugugucagcuucauuaucauacuuacuauauucggauauauugcuaaaauucucaccaacagagauaacugcaccaacaaugccauuggauugugcaaacgcaucaaauguucaggcugugaaccguucugcaacaaaaggggugacacuucuucucccagaaccggaguggacauacccgcguuuaucuugcccgggcucaaccuuucagaaagcacuccuaauuagcccucauagauucggagaaaccaaaggaaacucagcucccuugauaauaagggaaccuuuuauugcuuguggaccaaaugaaugcaaacacuuugcucuaacccauuaugcagcccaaccagggggauacuacaauggaaaaagaggagacagaaacaagcugaggcaucuaauuucagucaaauugggcaaaaucccaacaguagaaaacuccauuuuccacauggcagcauggagcggguccgcaugccaugaugguaaggaauggacauauaucggaguugauggcccugacaauaaugcauugcucaaaauaaaauauggagaagcauauacugacacauaccauuccuaugcaaacaacauccuaagaacacaagaaagugccugcaauugcaucgggggaaauuguuaucuuaugauaacugauggcucagcuucagguguuagugaaugcagauuucuuaagauucgagagggccgaauaauaaaagaaauauuuccaacaggaagaguaaaacauacugaggaaugcacaugcggauuugccagcaauaaaaccauagaaugugccuguagagauaacaguuacacagcaaaaagacccuuugucaaauuaaacguggagacugauacagcagaaauaagauugaugugcacagauacuuauuuggacacccccagaccagaugauggaagcauaacaggcccuugugaaucuaauggggacaaagggaguggaggcaucaagggaggauuuguucaucaaagaauggcauccaagguuggaaggugguacucucgaacgaugucuaaaacugaaaggauggggaugggacuguaugucaaguaugauggagacccaugggcugacagugaugcccuugcuuuuaguggaguaaugguuucaaugaaagaaccugguugguacuccuuuggcuucgaaauaaaagauaagaaaugcgauguccccuguauugggauagagaugguacaugaugguggaaaagagacuuggcacucagcagcaacagccauuuacuguuuaaugggcucaggacaguugcugugggacacugucacagguguugacauggcucuguaa

SEQ ID NO: 61104 - RNA, 1401 nt, Artificial Sequence; identical to SEQ ID NO: 60746
  derived and/or modified CDS sequence (wt) from neuraminidase__InfluenzaB__AGX15545

SEQ ID NO: 61105 - RNA, 1401 nt, Artificial Sequence; identical to SEQ ID NO: 60746
  derived and/or modified CDS sequence (wt) from neuraminidase__InfluenzaB__AGX15556

SEQ ID NO: 61106 - RNA, 1401 nt, Artificial Sequence
  derived and/or modified CDS sequence (wt) from neuraminidase__InfluenzaB__AGX15567
augcuaccuucaacuauacaaacguuaacccuauuucucacaucagggggaguauuauuaucacuauaugugucagcuucauugucauacuuacuauauucggauauauugcuaaaauucccaucaacagaaauuacugcaccaacaaugccauuggauugugcaaacgcaucaaauguucaggcugugaaccguucugcaacaaaaggggugacacuucuucucccagaaccggaauggacauacccgcguuuaucuugcccgggcucaaccuuucagaaagcacuccuaauuagcccucauagauucggagaaaccaaaggaaacucagcucccuugauaauaagggaaccuuuuauugcuuguggaccaaaggaaugcaaacacuuugcucuaacccacuaugcagcccaaccagggggauacuacaauggaacaagaggagacagaaacaagcugaggcaucuaauuucagucaaauugggcaaaaucccaacaguagaaaacuccauuuuccacauggcagcauggagcggguccgcaugccaugaugguaaggaauggacauauaucggaguugauggcccugacaauaaugcauugcucaaaauaaaauauggagaagcauauacugacacauaccauuccuaugcaaacaacauccuaagaacacaagaaagugcuugcaauugcaucgggggaaauuguuaucuuaugauaacugauggcucagcuucagguguuagugaaugcagauuucuuaagauucgagagggccgaauaauaaaagaaauauuuccaacaggaagaauaaaacauacugaagaaugcacaugcggauuugcuagcaauaaaaccauagaaugugccuguagagauaacaguuacacagcaaaaagacccuuugucaaauuaaacguggagacugauacagcagaaauaagauugaugugcacagagacuuauuuggacacccccagaccagaugauggaagcauaacagggccuugugaaucuaauggggacaaagggaguggaggcaucaagggaggauuuguccaucaaagaauggcauccaagauuggaaggugguacucucgaacgauguccaaaacugaaaggauggggauggggcuguaugucaaguaugauggagacccaugggcugacagugaugcccuugcuuuuaguggaguaaugguuucaauggaagaaccugguugguacuccuuuggcuucgaaauaaaagacaagaaaugugauguccccuguauugggauagagaugguacaugaugguggaaaagagacuuggcacucagcagcuacagccauuuacuguuuaaugggcucaggacaguugcugugggacacugucacagguguuaauauggcucuguaa

SEQ ID NO: 61107 - RNA, 1401 nt, Artificial Sequence; identical to SEQ ID NO: 60746
  derived and/or modified CDS sequence (wt) from neuraminidase__InfluenzaB__AGX15578

SEQ ID NO: 61108 - RNA, 1401 nt, Artificial Sequence; identical to SEQ ID NO: 60748
  derived and/or modified CDS sequence (wt) from neuraminidase__InfluenzaB__AGX15589

SEQ ID NO: 61109 - RNA, 1401 nt, Artificial Sequence
  derived and/or modified CDS sequence (wt) from neuraminidase__InfluenzaB__AGX15600
augcuaccuucaacuauacaaacguuaacccuauuucucacaucagggggaguguuauuaucacuauaugugucagccucauuaucauacuuacuauauucggauauauugcuaaaauucucaccaacagaaauaacugcaccaacaaugccauuggauugugcaaacgcaucaaauguucaugcugugaaccguucugcaacaaaaggggugacacuucuucucccagaaccggaguggacauacccgcguuuaucuugcccgggcucaaccuuucagaaagcacuccuaauuagcccucauagauucggagaaaccaaaggaaacucagcucccuugauaauaagggaaccuuuuauugcuuguggaccaaaugaaugcaaacacuuugcucuaacccauuaugcagcccaaccagggggauacuacaauggaacaagaggagacagaaacaagcugaggcaucuaauuucagucaaauugggcaaaaucccaacaguagaaaacuccauuuuccacauggcagcauggagcggguccgcaugccaugaugguaaggaauggacauauaucggaguugauggcccugacaauaaugcauugcucaaaauaaaauauggagaagcauauacugacacauaccauuccuaugcaaacaacauccuaagaacacaagaaagugccugcaauugcaucgggggaaauuguuaucuuaugauaacugauggcucagcuucagguguuagugaaugcagauuucuuaagauucgagagggccgaauaauaaaagaaauauuuccaacaggaagaguaaaacauacugaggaaugcacaugcggauuugccagcaauaaaaccauagaaugugccuguagagauaacaguuacacagcaaaaagacccuuugucaaauuaaacguggaaacugauacagcagaaauaagauugaugugcacagauacuuauuuggacacccccagaccagaugauggaagcauaacaggcccuugugaaucuaauggggacaaagggaguggaggcaucaagggaggauuuguucaucaaagaauggcauccaagauuggaaggugguacucucgaacgaugucuaaaacugaaaggauggggaugggacuguaugucaaguaugauggagacccaugggcugacagugaugcccuugcuuuuaguggaguaaugguuucaaugaaagaaccugguugguacuccuuuggcuucgaaauaaaagauaagaaaugcgauguccccuguauugggauagagaugguacaugaugguggaaaagagacuuggcacucagcagcaacagccauuuacuguuuaaugggcucaggacagcugcugugggacacugucacagguguugacauggcucuguaa

SEQ ID NO: 61110 - RNA, 1401 nt, Artificial Sequence; identical to SEQ ID NO: 61109
  derived and/or modified CDS sequence (wt) from neuraminidase__InfluenzaB__AGX15611

SEQ ID NO: 61111 - RNA, 1401 nt, Artificial Sequence
  derived and/or modified CDS sequence (wt) from neuraminidase__InfluenzaB__AGX15644
augcuaccuucaacuauacaaacguuaacccuauuucucacaucagggggaguauuauuaucacuauaugugucagcuucauuaucauacuuacuauauucggauauauugcuaaaauucucaccaacagaaauaacugcaccaacaaugccauuggauugugcaaacgcaucaaauguucaggcugugaaccguucugcaacaaaaggggugacacuucuucucccagaaccggaguggacauacccgcguuuaucuugcccgggcucaaccuuucagaaagcacuccuaauuagcccucauagauucggagaaaccaaaggaaacucagcucccuugauaauaagggaaccuuuuauugcuuguggaccaaaugaaugcaaacacuuugcucuaacccauuaugcagcccaaccagggggauacuacaauggaacaagaggagacagaaacaagcugaggcaucuaauuucagucaaauugggcaaaaucccaacaguagaaaacuccauuuuccacauggcagcauggagcggguccgcgugccaugaugguaaagaauggacauauaucggaguugauggcccugacaauaaugcauugcucaaaguaaaauauggagaagcauauacugacacauaccauuccuaugcaaacaaaauccuaagaacacaagaaagugccugcaauugcaucgggggaaauuguuaucuuaugauaacugauggcucagcuucagguguuagugaaugcagauuucuuaagauucgagagggccgaauaauaaaagaaauauuuccaacaggaagaguaaaacacacugaggaaugcacaugcggauuugccagcaauaaaaccauagaaugugccuguagagauaacaguuacacagcaaaaagaccuuuugucaaauuaaacguggagacugauacagcagaaauaagauugaugugcacagauacuuauuuggacacccccagaccaaaugauggaagcauaacaggcccuugugaaucuaauggggacaaagggaguggaggcaucaagggaggauuuguucaucaaagaauggaauccaagauuggaaggugguacucucgaacgaugucuaaaacugaaaggauggggaugggacuguaugucaaguaugauggagacccaugggcugacagugaugcccuagcuuuuaguggaguaaugguuucaaugaaagaaccugguugguacuccuuuggcuucgaaauaaaagauaagaaaugcgauguccccuguauugggauagagaugguacaugaugguggaaaagagacuuggcacucagcagcaacagccauuuacuguuuaaugggcucaggacagcugcugugggacacugucacagguguugacauggcucuguaa

SEQ ID NO: 61112 - RNA, 1401 nt, Artificial Sequence; identical to SEQ ID NO: 61111
  derived and/or modified CDS sequence (wt) from neuraminidase__InfluenzaB__AGX15655

SEQ ID NO: 61113 - RNA, 1401 nt, Artificial Sequence
  derived and/or modified CDS sequence (wt) from neuraminidase__InfluenzaB__AGX15666
augcuaccuucaacuauacaaacguuaacccuauuucucacaucagggggaguauuauuaucacuauaugugucagcuucauuaucauacuuacuauauucggauauauugcuaaaauucucaccaacagaaauaacugcaccaacaaugccauuggauugugcaaacgcaucaaauguucaggcugugaaccguucugcaacaaaaggggugacacuucuucucccagaaccggaguggacauacccgcguuuaucuugcccgggcucaaccuuucagaaagcacuccuaauuagcccucauagauucggagaaaccaaaggaaacucagcucccuugauaauaagggaaccuuuuauugcuuguggaccaaaugaaugcaaacacuuugcucuaacccauuaugcagcccaaccagggggauacuacaauggaacaagaggagacagaaacaagcugaggcaucuaauuucagucaaauugggcaaaaucccaacaguagaaaacuccauuuuccacauggcagcauggagcggguccgcgugccaugaugguaaagaauggacauauauaggaguugauggcccugacaauaaugcauugcucaaaguaaaauauggagaagcauauacugacacauaccauuccuaugcaaacaaaauccuaagaacacaagaaagugccugcaauugcaucgggggaaauuguuaucuuaugauaacugauggcucagcuucagguguuagugaaugcagauuucuuaagauucgagagggccgaauaauaaaagaaauauuuccaacaggaagaguaaaacacacugaggaaugcacaugcggauuugccagcaauaaaaccauagaaugugccuguagagauaacaguuacacagcaaaaagaccuuuugucaaauuaaacguggagacugauacagcagaaauaagauugaugugcacagauacuuauuuggacacccccagaccaaaugauggaagcauaacaggcccuugugaaucuaauggggacaaagggaguggaggcaucaagggaggauuuguucaucaaagaauggaauccaagauuggaaggugguacucucgaacgaugucuaaaacugaaaggauggggaugggacuguaugucaaguaugauggagacccaugggcugacagugaugcccuagcuuuuaguggaguaaugguuucaaugaaagaaccugguugguacuccuuuggcuucgaaauaaaagauaagaaaugcgauguccccuguauugggauagagaugguacaugaugguggaaaagagacuuggcacucagcagcaacagccauuuacuguuuaaugggcucaggacagcugcugugggacacugucacagguguugacauggcucuguaa

SEQ ID NO: 61114 - RNA, 1401 nt, Artificial Sequence
  derived and/or modified CDS sequence (wt) from neuraminidase__InfluenzaB__AGX15679
augcuaccuucaacuauacaaacguuaacccuauuucucacaucagggggaguauuauuaucacuauaugugucagcuucauuaucauacuuacuauauucggauauauugcuaaaauucucaccaacagaaauaacugcaccaacaaugccauuggauugugcaaacgcaucaaauguucaggcugugaaccguucugcaacaaaaggggugacacuucuucucccagaaccggaguggacauacccgcguuuaucuugcccgggcucaaccuuucagaaagcacuccuaauuagcccucauagauucggagaaaccaaaggaaacucagcucccuugauaauaagggaaccuuuuauugcuuguggaccaaaugaaugcaaacacuuugcucuaacccauuaugcagcccaaccagggggauacuacaauggaacaagaggagacagaaacaagcugaggcaucuaauuucagucaaauugggcaaaaucccaacaguagaaaacuccauuuuccacauggcagcauggagcggguccgcgugccaugaugguaaggaauggacauauaucggaguugauggcccugacaauaaugcauugcucaaaguaaaauauggagaagcauauacugacacauaccauuccuaugcaaacaaaauccuaagaacacaagaaagugccugcaauugcaucgggggaaauuguuaucuuaugauaacugauggcucagcuucagguguuagugaaugcagauuucuuaagauucgagagggccgaauaauaaaagaaauauuuccaacaggaagaguaaaacacacugaggaaugcacaugcggauuugccagcaauaaaaccauagaaugugccuguagagauaacaguuacacagcaaaaagaccuuuugucaaauuaaacguggagacugauacagcagaaauaagauugaugugcacagauacuuauuuggacacccccagaccaaaugauggaagcauaacaggcccuugugaaucuaauggggacaaagggaguggaggcaucaagggaggauuuguucaucaaagaauggaauccaagauuggaaggugguacucucgaacgaugucuaaaacugaaaggauggggaugggacuguaugucaaguaugauggagacccaugggcugacagugaugcccuagcuuuuaguggaguaaugguuucaaugaaagaaccugguugguacuccuuuggcuucgaaauaaaagauaagaaaugcgauguccccuguauugggauagagaugguacaugaugguggaaaagagacuuggcacucagcagcaacagccauuuacuguuuaaugggcucaggacagcugcugugggacacugucacagguguugacauggcucuguaa

SEQ ID NO: 61115 - RNA, 1401 nt, Artificial Sequence
  derived and/or modified CDS sequence (wt) from neuraminidase__InfluenzaB__AGX15690
augcuaccuucaacuauacaaacguuaacccuauuucucacaucagggggaguauuauuaucacuauaugugucagcuucauuaucauacuuacuauauucggauauauugcuaaaauucucaccaacagaaauaacugcaccaacaaugccauuggauugugcaaacgcaucaaauguucaggcugugaaccgcucugcaacaaaaggggugacacuucuucucccagaaccggaguggacauacccgcguuuaucuugcccgggcucaaccuuucagaaagcacuccuaauuagcccucauagauucggagaaaccaaaggaaacucagcucccuugauaauaagggaaccuuuuauugcuuguggaccaaaugaaugcaaacacuuugcucuaacccauuaugcagcccaaccagggggauacuacaauggaacaagaggagacagaaacaagcugaggcaucuaauuucagucaaauugggcaaaaucccaacaguagaaaacuccauuuuccacauggcagcauggagcggguccgcgugccaugaugguaaggaauggacauauaucggaguugauggcccugacaauaaugcauugcucaaaguaaaauauggagaagcauauacugacacauaccauuccuaugcaaacaaaauccuaagaacacaagaaagugccugcaauugcaucgggggaaauuguuaucuuaugauaacugauggcucagcuucagguguuagugaaugcagauuucuuaagauucgagagggccgaauaauaaaagaaauauuuccaacaggaagaguaaaacacacugaggaaugcacaugcggauuugccagcaauaaaaccauagaaugugccuguagagauaauaguuacacagcaaaaagaccuuuugucaaauuaaacguggagacugauacagcagaaauaagauugaugugcacagauacuuauuuggacacccccagaccaaaugauggaagcauaacaggcccuugugaaucuaauggggacaaagggaguggaggcaucaagggaggauuuguucaucaaagaaugaaauccaagauuggaaggugguacucucgaacgaugucuaaaacugaaaggauggggaugggacuguaugucaaguaugauggagacccaugggcugacagugaugcccuagcuuuuaguggaguaaugguuucaaugaaagaaccugguugguacuccuuuggcuucgaaauaaaagauaagaaaugcgauguccccuguauugggauagagaugguacaugaugguggaaaagagacuuggcacucagcagcaacagccauuuacuguuuaaugggcucaggacagcugcugugggacacugucacagguguugacauggcucuguaa

SEQ ID NO: 61116 - RNA, 1401 nt, Artificial Sequence; identical to SEQ ID NO: 61114
  derived and/or modified CDS sequence (wt) from neuraminidase__InfluenzaB__AGX15701

SEQ ID NO: 61117 - RNA, 1401 nt, Artificial Sequence
  derived and/or modified CDS sequence (wt) from neuraminidase__InfluenzaB__AGX15712
augcuaccuucaacuauacaaacguuaacccuauuucucacaucagggggaguauuauuaucacuauaugugucagcuucauuaucauacuuacuauauucggauauauugcuaaaauucucaccaacagaaauaacugcaccaacaaugccauuggauugugcaaacgcaucaaauguucaggcugugaaccguucugcaacaaaaggggugacacuucuucucccagaaccggaguggacauacccgcguuuaucuugcccgggcucaaccuuucagaaagcacuccuaauuagcccucauagauucggagaacccaaaggaaacucagcucccuugauaauaagggaaccuuuuauugcuuguggaccaaaugaaugcaaacacuuugcucuaacccauuaugcagcccaaccagggggauacuacaauggaacaagaggagacagaaacaagcugaggcaucuaauuucagucaaauugggcaaaaucccaacaguagaaaacuccauuuuccacauggcagcauggagcggguccgcgugccaugaugguaaagaauggacauauaucggaguugauggcccugacaauaaugcauugcucaaaguaaaauauggagaagcauauacugacacauaccauuccuaugcaaacaaaauccuaagaacacaagaaagugccugcaauugcaucgggggaaauuguuaucuuaugauaacugauggcucagcuucagguguuagugaaugcagauuucuuaagauucgagagggccgaauaauaaaagaaauauuuccaacaggaagaguaaaacacacugaggaaugcacaugcggauuugccagcaauaaaaccauagaaugugccuguagagauaacaguuacacagcaaaaagaccuuuugucaaauuaaacguggagacugauacagcagaaauaagauugaugugcacagauacuuauuuggacacccccagaccaaaugauggaagcauaacaggcccuugugaaucugauggggacaaagggaguggaggcaucaagggaggauuuguucaucaaagaauggaauccaagauuggaaggugguacucucgaacgaugucuaaaacugaaaggauggggaugggacuguaugucaaguaugauggagacccaugggcugacagugaugcccuagcuuuuaguggaguaaugguuucaaugaaagaaccugguugguacuccuuuggcuucgaaauaaaagauaagaaaugcgauguccccuguauugggauagagaugguacaugaugguggaaaagagacuuggcacucagcagcaacagccauuuacuguuuaaugggcucaggacagcugcugugggacacugucacagguguuaacauggcucuguaa

SEQ ID NO: 61118 - RNA, 1401 nt, Artificial Sequence; identical to SEQ ID NO: 61111
  derived and/or modified CDS sequence (wt) from neuraminidase__InfluenzaB__AGX15723

SEQ ID NO: 61119 - RNA, 1401 nt, Artificial Sequence; identical to SEQ ID NO: 61111
  derived and/or modified CDS sequence (wt) from neuraminidase__InfluenzaB__AGX15745

SEQ ID NO: 61120 - RNA, 1401 nt, Artificial Sequence; identical to SEQ ID NO: 60973
  derived and/or modified CDS sequence (wt) from neuraminidase__InfluenzaB__AGX15757

SEQ ID NO: 61121 - RNA, 1401 nt, Artificial Sequence
  derived and/or modified CDS sequence (wt) from neuraminidase__InfluenzaB__AGX15768
augcuaccuucaacuauacaaacguuaacccuauuucucacaucagggggaguauuauuaucacuauaugugucagcuucauuaucauacuuacuauauucggauauauugcuaaaauucucaccaacagaaauaacugcaccaacaaugccauuggauugugcaaacgcaucaaauguucaggcugugaaccguucugcaacaaaaggggugacacuucuucucccagaaccggaguggacauacccgcguuuaucuugcccgggcucaaccuuucagaaagcacuccuaauuagcccucauagauucggagaaaccaaaggaaacucagcucccuugauaauaagggaaccuuuuauugcuuguggaccaaaugaaugcaaacacuuugcucuaacccauuaugcagcccaaccagggggauauuacaauggaacaagaggagacagaaacaagcugaggcaucuaauuucagucaaauugggcaaaaucccaacaguagaaaacuccauuuuccacauggcagcauggagcggguccgcgugccaugaugguaaagaauggacauauaucggaguugauggcccugacaauaaugcauugcucaaaguaaaauauggagaagcauauacugacacauaccauuccuaugcaaacaaaauccuaagaacacaagaaagugccugcaauugcaucgggggaaauuguuaucuuaugauaacugauggcucagcuucagguguuagugaaugcagauuucuuaagauucgagagggccgaauaauaaaagaaauauuuccaacaggaagaguaaaacacacugaggaaugcacaugcggauuugccagcaauaaaaccauagaaugugccuguagagauaacaguuacacagcaaaaagaccuuuugucaaauuaaacguggagacugauacagcagaaauaagauugaugugcacagauacuuauuuggacacccccagaccaaaugauggaagcauaacaggcccuugugaaucuaauggggacaaagggaguggaggcaucaagggaggauuuguucaucaaagaauggaauccaagauuggaaggugguacucucgaacgaugucuaaaacugaaaggauggggaugggacuguaugucaaguaugauggagacccaugggcugacagugaugcccuagcuuuuaguggaguaaugauuucaaugaaagaaccugguugguacuccuuuggcuucgaaauaaaagauaagaaaugcgauguccccuguauugggauagagaugguacaugaugguggaaaagagacuuggcacucagcagcaacagccauuuacuguuuaaugggcucaggacagcugcugugggacacugucacagguguugacauggcucuguaa

SEQ ID NO: 61122 - RNA, 1401 nt, Artificial Sequence
  derived and/or modified CDS sequence (wt) from neuraminidase__InfluenzaB__AGX15801
augcuaccuucaacuauacaaacguuaacccuauuucucacaucagggggaguauuauuaucacuauaugugucagcuucauuaucauacuuacuauauucggauauauugcuaaaauucucaccaacagaaauaacugcaccaacaaugucauuggauuguguaaacgcaucaaauguucaggcugugaaccguucugcaacaaaaggggugacacuucuucucccagaaccggaguggacauacccgcguuuaucuugcccgggcucaaccuuucagaaagcacuccuaauuagcccucauagauucggagaaaccaaaggaaacucagcucccuugauaauaagggaaccuuuuauugcuuguggaccaaaugaaugcaaacacuuugcucuaacccauuaugcagcccaaccagggggauacuacaauggaacaagaggagacagaaacaagcugaggcaucuaauuucagucaaauugggcaaaaucccaacaguagaaaacuccauuuuccacauggcagcauggagcggguccgcgugccaugaugguaaggaauggacauauaucggaguugauggcccugacaauaaugcauugcucaaaguaaaauauggagaagcauauacugacacauaccauuccuaugcaaacaaaauccuaagaacacaagaaagugccugcaauugcaucgggggaaauuguuaucuuaugauaacugauggcucagcuucagguguuagugaaugcagauuucuuaagauucgagagggccgaauaauaaaagaaauauuuccaacaggaagaguaaaacacacugaggaaugcacaugcggauuugccagcaauaaaaccauagaaugugccuguagagauaacaguuacacagcaaaaagaccuuuugucaaauuaaacguggagacugauacagcagaaauaagauugaugugcacagauacuuauuuggacacccccagaccaaacgauggaagcauaacaggcccuugugaaucuaauggggacaaagggaguggaggcaucaagggaggauuuguucaucaaagaauggaauccaagauuggaaggugguacucucgaacgaugucuaaaacugaaaggauggggaugggacuguaugucaaguaugauggagacccaugggcugacagugaugcccuagcuuuuaguggaguaaugguuucaaugaaagaaccugguugguacuccuuuggcuucgaaauaaaagauaagaaaugcgauguccccuguauugggauagagaugguacaugaugguggaaaagagacuuggcacucagcagcaacagccauuuacuguuuaaugggcucaggacagcugcugugggacacugucacagguguugacauggcucuguaa

SEQ ID NO: 61123 - RNA, 1401 nt, Artificial Sequence
  derived and/or modified CDS sequence (wt) from neuraminidase__InfluenzaB__AGX15812
augcuaccuucaacuauacaaacguuaacccuauuucucacaucagggggaguauuauuaucacuauaugugucagcuucauuaucauacuuacuauauucggauauauugcuaaaauucucaccaacagaaauaacugcaccaacaaugccauuggauugugcaaacgcaucaaauguucaggcugugaaccguucugcaacaaaaggggugacacuucuucucccagaaccggaguggacauacccgcguuuaucuugcccgggcucaaccuuucagaaagcacuccuaauuagcccucauagauucggagaaaccaaaggaaacucagcucccuugauaauaagggaaccuuuuauugcuuguggaccaaaugaaugcaaacacuuugcucuaacccauuaugcagcccaaccagggggauacuacaauggaacaagaggagacagaaacaagcugaggcaucuaauuucagucaaauugggcaaaaucccaacaguagaaaacuccauuuuccacauggcagcauggagcggguccgcgugccaugaugguaaggaauggacauauaucggaguugauggcccugacaauaaugcauugcucaaaguaaaauauggagaagcauauacugacacauaccauuccuaugcaaacaaaauccuaagaacacaagaaagugccugcaauugcaucgggggaaauuguuaucuuaugauaacugauggcucagcuucagguguuagugaaugcagauuucuuaagauucgagagggccgaauaauaaaagaaauauuuccaacaggaagaguaaaacacacugaggaaugcacaugcggauuugccagcaauaaaaccauagaaugugccuguagagauaacaguuacacagcaaaaagaccuuuugucaaauuaaacguggagacugauacagcagaaauaagauugaugugcacagauacuuauuuggacacccccagaccaaaugauggaagcauaacaggcccuugugaaucuaauggggacaaagggaguggaggcaucaagggaggauuuguucaucaaagaauggaauccaagauuggaaggugguacucucgaacgaugucuaaaacugaaaggauggggaugggacuguaugucaaguaugauggagacccaugggcugacagugaugcccuagcuuuuaguggaguaaugguuucaaugaaagaaccugguugguacuccuuuggcuucgaaauaaaagauaagaaaugcgauguccccuguauugggauagagaugguacaugaugguggaaaagagacuuggcacucagcagcaacagccauuuacuguuuaaugggcucaggacagcugcuaugggacacugucacagguguugacauggcucuguaa

SEQ ID NO: 61124 - RNA, 1401 nt, Artificial Sequence
  derived and/or modified CDS sequence (wt) from neuraminidase__InfluenzaB__AGX15823
augcuaccuucaacuauacaaacguuaacccuauuucucacaucagggggaguauuauuaucacuauaugugucagcuucauuaucauacuuacuauauucggauauauugcuaaaauucucaccaacagaaauaacugcaccaacaaugccauuggauugugcaaacgcaucaaauguucaggcugugaaccguucugcaacaaaaggggugacacuucuucucccagaaccggaguggacauacccgcguuuaucuugcccgggcucaaccuuucagaaagcacuccuaauuagcccucauagauucggagaaaccaaaggaaacucagcucccuuaauaauaagggaaccuuuuauugcuuguggaccaaaugaaugcaaacacuuugcucuaacccauuaugcagcccaaccagggggauacuacaauggaacaagaggagacagaaacaagcugaggcaucuaauuucagucaaauugggcaaaaucccaacaguagaaaacuccauuuuccacauggcagcauggagcggguccgcgugccaugaugguaaggaauggacauauaucggaguugauggcccugacaauaaugcauugcucaaaguaaaauauggagaagcauauacugacacauaccauucuuaugcaaacaaaauccuaagaacacaagaaagugccugcaauugcaucgggggaaauuguuaucuuaugauaacugauggcucagcuucagguguuagugaaugcagauuucuuaagauucgagagggccgaauaauaaaagaaauauuuccaacaggaagaguaaaacacacugaggaaugcacaugcggauuugccagcaauaaaaccauagaaugugccuguagagauaacaguuacacagcaaaaagaccuuuugucaaauuaaacguggagacugauacagcagaaauaagauugaugugcacagauacuuauuuggacacccccagaccaaaugauggaagcauaacaggcccuugugaaucuaauggggacaaagggaguggaggcaucaagggaggauuuguucaucaaagaauggaauccaagauuggaaggugguacucucgaacgaugucuaaaacugaaaggauggggaugggacuguaugucaaguaugauggagacccaugggcugacagugaugcccuagcuuuuaguggaguaaugguuucaaugaaagaaccugguugguacuccuuuggcuucgaaauaaaagauaagaaaugcgauguccccuguauugggauagagaugguacaugaugguggaaaagagacuuggcacucagcagcaacagccauuuacuguuuaaugggcucaggacagcugcugugggacacugucacagguguugacauggcucuguaa

SEQ ID NO: 61125 - RNA, 1401 nt, Artificial Sequence
  derived and/or modified CDS sequence (wt) from neuraminidase__InfluenzaB__AGX15845
augcuaccuucaacuauacaaacguuaacccuauuucucacaucagggggaguauuauuaucacuauaugugucagcuuuauuaucauacuuacuauauucggauauauugcuaaaauucucaccaacagaaauaacugcaccaacaaugucauuggauugugcaaacgcaucaaauguucaggcugugaaccguucugcaacaaaaggggugacauuucuucucccagaaccggaguggacauacccgcguuuaucuugcccgggcucaaccuuucagaaagcacuccuaauuagcccucauagauucggagaaaccaaaggaaacucagcucccuugauaauaagggaaccuuuuauugcuuguggaccaaaugaaugcaaacacuuugcucuaacccauuaugcagcccaaccagggggauacuacaauggaacaagaggagacagaaacaagcugaggcaucuaauuucagucaaauugggcaaaaucccaacaguagaaaacuccauuuuccacauggcagcauggagcggguccgcgugccaugaugguaaggaauggacauauaucggaguugauggcccugacaaugaugcauugcucaaaguaaaauauggagaagcauauacugacacauaccauuccuaugcaaacaaaauccuaagaacacaagaaagugccugcaauugcaucgggggaaauuguuaucuuaugauaacugauggcucagcuucagguguuagugaaugcagauuucuuaagauucgagagggccgaauaauaaaagaaauauuuccaacaggaagaguaaaacacacugaggaaugcacaugcggauuugccagcaauaaaaccauagaaugugccuguagagauaacaguuacacagcaaaaagaccuuuugucaaauuaaacguggagacugauacagcagaaauaagauugaugugcacagauacuuauuuggacacccccagaccagaugauggaagcauaacaggcccuugugaaucuaauggggacaaagggaguggaggcaucaagggaggauuuguucaucaaagaauggaauccaagauuggaaggugguacucucgaacgaugucuaagacugaaaggauggggaugggacuguaugucaaguaugauggagacccaugggcugacagugaugcccuagcuuuuaguggaguaaugguuucaaugaaagaaccugguugguacuccuuuggcuucgaaauaaaagauaagaaaugcgauguccccuguauugggauagagaugguacaugaugguggaaaagagacuuggcacucagcagcaacagccauuuacuguuugaugggcucaggacagcugcugugggacacugucacaggcguugacauggcucuguaa

SEQ ID NO: 61126 - RNA, 1401 nt, Artificial Sequence
  derived and/or modified CDS sequence (wt) from neuraminidase__InfluenzaB__AGX15856
augcuaccuucaacuauacaaacguuaacccuauuucucacaucagggggaguauuauuaucacuauaugugucagcuuuauuaucauacuuacuauauucggauauauugcuaaaauucucaccaacagaaauaauugcaccaacaaugucauuggauugugcaaacgcaucaaauguucaggcugugaaccguucugcaacaaaaggggugacauuucuucucccagaaccggaguggacauacccgcguuuaucuugcccgggcucaaccuuucagaaagcacuccuaauuagcccucauagauucggagaaaccaaaggaaacucagcucccuugauaauaagggaaccuuuuauugcuuguggaccaaaugaaugcaaacauuuugcucuaacccauuaugcagcccaaccagggggauacuacaauggaacaagaggagacagaaacaagcugaggcaucuaauuucagucaaauuggguaaaaucccaacaguagaaaacuccauuuuccacauggcagcauggagcggguccgcgugccaugaugguaaggaauggacauauaucggaguugauggcccugacaaugaugcauugcucaaaguaaaauauggagaagcauauacugacacauaccauuccuaugcaaacaaaauacuaagaacacaagaaagugccugcaauugcaucgggggaaauuguuaucuuaugauaacugauggcucagcuucagguguuagugaaugcagauuucuuaagauucgagagggccgaauaauaaaagaaauauuuccaacaggaagaguaaaacacacugaggaaugcacaugcggauuugccagcaauaaaaccauagaaugugccuguagagauaacaguuacacagcaaaaagaccuuuugucaaauuaaacguggagacugauacagcagaaauaagauugaugugcacagauacuuauuuggacacccccagaccagaugauggaagcauaacaggcccuugugaaucuaauggggacaaagggaguggaggcaucaagggaggauuuguucaucaaagaauggaauccaagauuggaaggugguacucucgaacgaugucuaagacugaaaggauggggaugggacuguaugucaaguauaauggagacccaugggcugacagugaugcccuagcuuuuaguggaguaaugguuucaaugaaagaaccugguugguacuccuuuggcuucgaaauaaaagauaagaaaugcgauguccccuguauugggauagagaugguacaugaugguggaaaagagacuuggcacucagcagcaacagccauuuacuguuuaaugggcucaggacagcugcugugggacacugucacaggcguugacauggcucuguaa

SEQ ID NO: 61127 - RNA, 1401 nt, Artificial Sequence; identical to SEQ ID NO: 61125
  derived and/or modified CDS sequence (wt) from neuraminidase__InfluenzaB__AGX15867

SEQ ID NO: 61128 - RNA, 1401 nt, Artificial Sequence; identical to SEQ ID NO: 61125
  derived and/or modified CDS sequence (wt) from neuraminidase__InfluenzaB__AGX15889

SEQ ID NO: 61129 - RNA, 1401 nt, Artificial Sequence
  derived and/or modified CDS sequence (wt) from neuraminidase__InfluenzaB__AGX15900
augcuaccuucaacuauacaaacguuaacccuauuucucacaucagggggaguauuauuaucacuauaugugucagcuuuauuaucauacuuacuauauucggauauauugcuaaaauucucaccaacagaaauaacugcaccaacaaugucauuggauugugcaaacacaucaaauguucaggcugugaaccguucugcaacaaaaggggugacauuucuucucccagaaccggaguggacauacccgcguuuaucuugcccgggcucaaccuuucagaaagcacuccuaauuagcccucauagauucggagaaaccaaaggaaacucagcucccuugauaauaagggaaccuuuuauugcuuguggaccaaaugaaugcaaacacuuugcucuaacccauuaugcagcccaaccagggggauacuacaauggaacaagaggagacagaaacaagcugaggcaucuaauuucagucaaauugggcaaaaucccaacaguagaaaacuccauuuuccacauggcagcauggagcggguccgcgugccaugaugguaaggaauggacauauaucggaguugauggcccugacaaugaugcauugcucaaaguaaaauauggagaagcauauacugacacauaccauuccuaugcaaacaaaauccuaagaacacaagaaagugccugcaauugcaucgggggaaauuguuaucuuaugauaacugauggcucagcuucagguguuagugaaugcagauuucuuaagauucgagagggccgaauaauaaaagaaauauuuccaacaggaagaguaaaacacacugaggaaugcacaugcggauuugccagcaauaaaaccauagaaugugccuguagagauaacaguuacacagcaaaaagaccuuuugucaaauuaaacguggagacugauacagcagaaauaagauugaugugcacagauacuuauuuggacacccccagaccagaugauggaagcauaacaggcccuugugaaucuaauggggacaaagggaguggaggcaucaagggaggauuuguucaucaaagaauggaauccaagauuggaaggugguacucucgaacgaugucuaagacugaaaggagggggaugggacuguaugucaaguaugauggagacccaugggcugacagugaugcccuagcuuuuaguggaguaaugguuucaaugaaagaaccugguugguacuccuuuggcuucgaaauaaaagauaagaaaugcgauguccccuguauugggauagagaugguacaugaugguggaaaagagacuuggcacucagcagcaacagccauuuacuguuuaaugggcucaggacagcugcugugggacacugucacaggcguugacauggcucuguaa

SEQ ID NO: 61130 - RNA, 1401 nt, Artificial Sequence; identical to SEQ ID NO: 61125
  derived and/or modified CDS sequence (wt) from neuraminidase__InfluenzaB__AGX15911

SEQ ID NO: 61131 - RNA, 1401 nt, Artificial Sequence
  derived and/or modified CDS sequence (wt) from neuraminidase__InfluenzaB__AGX15933
augcuaccuucaacuauacaaacguuaacccuauuucucacaucagggggaguauuauuaucacuauaugugucagcuucauuaucauacuuacuauauucggauauauugcuaaaauucucaccaacagaaauaacugcaccagcaaugccauuggauugugcaaacgcaucaaauguucaggcugugaaccguucugcaacaaaaggggugacacuucuucucccagaaccggaguggacauacccgcguuuaucuugcccgggcucaaccuuucagaaagcacuccuaauuagcccucauagauucggagaaaccaaaggaaacucagcucccuugauaauaagggaaccuuuuauugcuuguggaccaaaugaaugcaaacacuuugcucuaacccauuaugcagcccaaccagggggauacuacaauggaacaagaggagacagaaacaagcugaggcaucuaauuucagucaaauugggcaaaaucccaacaguagaaaacuccauuuuccacauggcagcauggagcggguccgcgugccaugaugguaaggaauggacauauaucggaguugauggcccugacaauaaugcauugcucaaaguaaaauauggagaagcauauacugacacauaccauuccuaugcaaacaaaauccuaagaacacaagaaagugccugcaauugcaucgggggaaauuguuaucuuaugauaacugauggcucagcuucagguguuagugaaugcagauuucuuaagauucgagagggccgaauaauaaaagaaauauuuccaacaggaagaguaaaacacacugaggaaugcacaugcggauuugccagcaauaaaaccauagaaugugccuguagagauaacaguuacacagcaaaaagaccuuuugucaaauuaaacguggagacugauacagcagaaauaagauugaugugcacagauacuuauuuggacacccccagaccaaaugauggaagcauaacaggcccuugugaaucugauggggacaaagggaguggaggcaucaagggaggauuuguucaucaaagaauggaauccaagauuggaaggugguacucucgaacgaugucuaaaacugaaaggauggggaugggacuguaugucaaguaugauggagacccaugggcugacagugaugcccuagcuuuuaguggaguaaugguuucaaugaaagaaccugguugguacuccuuuggcuucgaaauaaaagauaagaaaugcgauguccccuguauugggauagagaugguacaugaugguggaaaagagacuuggcacucagcagcaacagccauuuacuguuuaaugggcucaggacagcugcugugggacacugucacagguguugacauggcucuguaa

SEQ ID NO: 61132 - RNA, 1401 nt, Artificial Sequence
  derived and/or modified CDS sequence (wt) from neuraminidase__InfluenzaB__AGX15944
augcuaccuucaacuauacaaacauuaacccuauuucucacaucagggggaguauuguuaucacuauaugugucagcuuuauuaucauacuuacuauauucggauauauugcuaaaauucucaccaacagaaauaacugcaccaacaaugucauuggauugugcaaacgcaucaaauguucaggcugugaaccguucugcaacaaaaggggugacauuucuucucccagaaccggaguggacauacccgcguuuaucuugcccgggcucaaccuuucagaaagcacuccuaauuagcccucauagauucggagaaaccaaaggaaacucagcucccuugauaauaagggaaccuuuuauugcuuguggaccaaaugaaugcaaacacuuugcucuaacccauuaugcagcccaaccagggggauacuacaauggaacaagaggagacagaaacaagcugaggcaucuaauuucagucaaauugggcaaaaucccaacaguagaaaacuccauuuuccacauggcagcauggagcggguccgcgugccaugaugguaaggaauggacauauaucggaguugauggcccugacaaugaugcauugcucaaaguaaaauauggagaagcauauacugacacauaccauuccuaugcaaacaaaauccuaagaacacaagaaagugccugcaauugcaucgggggaaauuguuaucuuaugauaacugauggcucagcuucagguguuagugaaugcagauuucuuaagauucgagagggccgaauaauaaaagaaauauuuccaacaggaagaguaaaacacacugaggaaugcacaugcggauuugccagcaauaaaaccauagaaugugccuguagagauaacaguuacacagcaaaaagaccuuuugucaaauuaaacguggagacugauacagcagaaauaagauugaugugcacagauacuuauuuggacacccccagaccagaugauggaagcauaacaggcccuugugaaucuaauggggacaaagggaguggaggcaucaagggaggauuuguucaucaaagaauggaauccaagauuggaaggugguacucucgaacgaugucuaagacugaaaggauggggaugggacuguaugucaaguaugauggagacccaugggcugacagugaugcccuagcuuuuaguggaguaaugguuucaaugaaagaaccugguugguacuccuuuggcuucgaaauaaaagauaagaaaugcgauguccccuguauugggauagagaugguacaugaugguggaaaagagacuuggcacucagcagcaacagccauuuacuguuugaugggcucaggacagcugcugugggacacugucacaggcguugacauggcucuguaa

SEQ ID NO: 61133 - RNA, 1401 nt, Artificial Sequence
  derived and/or modified CDS sequence (wt) from neuraminidase__InfluenzaB__AGX15966
augcuaccuucaacuauacaaauguuaacccuauuucucacaucagggggaguacuauuaucacuauaugugucagcuucauuaucauacuuacuauauucggauauauugcuaaaauucucaccaacagaaauaacugcaccaacaaugccauuggauugugcaaacgcaucaaauguucaugcugugaaccguucugcaacaaaaggggugacauuucuucucccagaaccggaguggacauacccgcguuuaucuugcccgggcucaaccuuucagaaagcacuccuaauuagcccucauagauucggagaaaccaaaggaaacucagcucccuugauaauaagggaaccuuuuauugcuuguggaccaaaugaaugcaaacacuuugcucuaacccauuaugcagcccaaccagggggauacuacaauggaacaagaggagacagaaacaagcugaggcaucuaauuucagucaaauugggcaaaaucccaacaguagaaaacuccauuuuccacauggcagcauggagcggguccgcaugccaugaugguaaggaauggacauauaucggaguugaugguccugacaauaaugcauugcucaaaauaaaauauggagaagcauauacugacacauaucauuccuaugcaaacaacauccuaagaacacaagaaagugccugcaauugcaucgggggaaauuguuaucuuaugauaacugauggcucagcuucagguguuagugaaugcagauuucuuaagauucgagagggccgaauaauaaaagaaauauuuccaacaggaagaguaaaacauacugaggagugcacaugcggauuugccagcaauaaaaccauagaaugugccuguagagauaacaguuacacagcaaaaagacccuuugucaaauuaaacguggaaacugauacagcagaaauaagauugaugugcacagauacuuauuuggacacccccagaccagaugauggaagcauaacaggcccuugugaaucuaauggggacaaagggaguggaggcaucaagggaggauuuguucaucaaagaauggcauccaagauugggaggugguacucucgaacgaugucuaaaacugaaaggaaggggaugggacuguaugucaaguaugauggagacccauggacugacagugaugcccuugcuuuuaggggaguaaugguuucaaugaaagaaccugguugguacuccuuuggcuucgaaauaaaagauaagaaaugcgauguccccuguauugggauagagaugguacaugacgguggaaaagagacuuggcacucagcagcaacagccauuuacuguuuaaugggcucaggacagcugcugugggacacagucacaggugucgacauggcucuauaa

SEQ ID NO: 61134 - RNA, 1401 nt, Artificial Sequence
  derived and/or modified CDS sequence (wt) from neuraminidase__InfluenzaB__AGX15988
augcuaccuucaacuauacaaacguuaacccuauuucucacaucagggggaguauuauuaucacuauaugugucagcuucauuaucauacuuacuauauucggauauauugcuaaaauucucaccaacagaaauaacugcaccaacaaugccauuggauugugcaaacgcaucaaauguucaggcugugaaccguucugcaacaaaaggagugacacuucuucucccagaaccggaguggacauacccgcguuuaucuugcccgggcucaaccuuucagaaagcacuccuaauuagcccucauagauucggagaaaccaaaggaaacucagcucccuugauaauaagggaaccuuuuauugcuuguggaccaaaugaaugcaaacacuuugcucuaacccauuaugcagcccaaccagggggauacuacaauggaacaagaggagacagaaacaagcugaggcaucuaauuucagucaaauugggcaaaaucccaacaguagaaaacuccauuuuccacauggcagcauggagcggguccgcgugccaugaugguaaggaauggacauauaucggaguugauggcccugacaauaaugcauugcucaaaguaaaauauggagaagcauauacugacacauaccauuccuaugcaaacaaaauccuaagaacacaagaaagugccugcaauugcaucgggggaaauuguuaucuuaugauaacugauggcucagcuucagguguuagugaaugcagauuucuuaagauucgagagggccgaauaauaaaagaaauauuuccaacaggaagaguaaaacacacugaggaaugcacaugcggauuugccagcaauaaaaccauagaaugugccuguagagauaacaguuacacagcaaaaagaccuuuugucaaauuaaauguggagacugauacagcagaaguaagauugaugugcacagauacuuauuuggacacccccagaccaaaugauggaagcauaacaggcccuugugaaucugauggggacaaggggaguggaggcaucaagggaggauuuguucaucaaagaauggaauccaagauuggaaggugguacucucgaacgaugucuaaaacugaaaggauggggaugggacuguaugucaaguaugauggagacccaugggcugacagugaugcccuaacuuuuaguggaguaaugguuucaaugaaagaaccugguugguacuccuuuggcuucgaaauaaaagauaagaaaugcgauguccccuguauugggauagagaugguacaugaugguggaaaagagacuuggcacucagcagcaacagccauuuacuguuuaaugggcucaggacagcugcugugggacacugucacagguguugacauggcucuguaa

SEQ ID NO: 61135 - RNA, 1401 nt, Artificial Sequence; identical to SEQ ID NO: 61133
  derived and/or modified CDS sequence (wt) from neuraminidase__InfluenzaB__AGX15999

SEQ ID NO: 61136 - RNA, 1401 nt, Artificial Sequence
  derived and/or modified CDS sequence (wt) from neuraminidase__InfluenzaB__AGX16010
augcuaccuucaacuauacaaauguuaacccuauuucucacaucagggggaguacuauuaucacuauaugugucagcuucauuaucauacuuacuauauucggauauauugcuaaaauucucaccaacagaaauaacugcaccaacaaugccauuggauugugcaaacgcaucaaauguucaugcugugaaccguucugcaacaaaaggggugacauuucuucucccagaaccggaguggacauacccgcguuuaucuugcccgggaucaaccuuucagaaagcacuccuaauuagcccucauagauucggagaaaccaaaggaaacucagcucccuugauaauaagggaaccuuuuauugcuuguggaccaaaugaaugcaaacacuuugcucuaacccauuaugcagcccaaccagggggauacuacaauggaacaagaggagacagaaacaagcugaggcaucuaauuucagucaaauugggcaaaaucccaacaguagaaaacuccauuuuccacauggcagcauggagcggguccgcaugccaugaugguaaggaauggacauauaucggaguugaugguccugacaauaaugcauugcucaaaauaaaauauggagaagcauauacugacacauaucauuccuaugcaaacaacauccuaagaacacaagaaagugccugcaauugcaucgggggaaauuguuaucuuaugauaacugauggcucagcuucagguguuagugaaugcagauuucuuaagauucgagagggccgaauaauaaaagaaauauuuccaacaggaagaguaaaacauacugaggagugcacaugcggauuugccagcaauaaaaccauagaaugugccuguagagauaacaguuacacagcaaaaagacccuuugucaaauuaaacguggaaacugauacagcagaaauaagauugaugugcacagauaccuauuuggacacccccagaccggaugauggaagcauaacaggcccuugugaaucuaauggggacaaagggaguggaggcaucaagggaggauuuguucaucaaagaauggcauccaagauugggaggugguacucucgaacgaugucuaaaacugaaaggaaggggaugggacuguaugucaaguaugauggagacccauggacugacagugaugcccuugcuuuuaggggaguaaugguuucaaugaaagaaccugguugguacuccuuuggcuucgaaauaaaagauaagaaaugcgauguccccuguauugggauagagaugguacaugaugguggaaaagagacuuggcacucagcagcaacagccauuuacuguuuaaugggcucaggacagcugcugugggacacagucacaggugucgacauggcucuauaa

SEQ ID NO: 61137 - RNA, 1401 nt, Artificial Sequence
  derived and/or modified CDS sequence (wt) from neuraminidase__InfluenzaB__AGX16021
augcuaccuucaacuauacaaauguuaacccuauuucucacaucagggggaguacuauuaucacuauaugugucagcuucauuaucauacuuacuauauucggauauauugcuaaaauucucaccaacagaaauaacugcaccaacaaugccauuggauugugcaaacgcaucaaauguucaugcugugaaccguucugcaacaaaaggggugacauuucuucucccagaaccggaguggacauacccgcguuuaucuugcccgggaucaaccuuucagaaagcacuccuaauuagcccucauagauucggagaaaccaaagggaacucagcucccuugauaauaagggaaccuuuuauugcuuguggaccaaaugaaugcaaacacuuugcucuaacccauuaugcagcccaaccagggggauacuacaauggaacaagaggagacagaaacaagcugaggcaucuaauuucagucaaauugggcaaaaucccaacaguagaaaacuccauuuuccacauggcagcauggagcggguccgcaugccaugaugguaaggaauggacauauaucggaguugaugguccugacaauaaugcauugcucaaaauaaaauauggagaagcauauacugacacauaucauuccuaugcaaacaacauccuaagaacacaagaaagugccugcaauugcaucgggggaaauuguuaucuuaugauaacagauggcucagcuucagguguuagugaaugcagauuucuuaagauucgagagggccgaauaauaaaagaaauauuuccaacaggaagaguaaaacauacugaggagugcacaugcggauuugccagcaauaaaaccauagaaugugccuguagagauaacaguuacacagcaaaaagacccuuugucaaauuaaacguggaaacugauacagcagaaauaagauugaugugcacagauaccuauuuggacacccccagaccggaugauggaagcauaacaggcccuugugaaucuaauggggacaaagggaguggaggcaucaagggaggauuuguucaucaaagaauggcauccaagauugggaggugguacucucgaacgaugucuaaaacugaaaggaaggggaugggacuguaugucaaguaugauggagacccauggacugacagugaugcccuugcuuuuaggggaguaaugguuucaaugaaagaaccugguugguacuccuuuggcuucgaaauaaaagauaagaaaugcgauguccccuguauugggauagagaugguacaugaugguggaaaagagacuuggcacucagcagcaacagccauuuacuguuuaaugggcucaggacagcugcugugggacacagucacaggugucgacauggcucuauaa

SEQ ID NO: 61138 - RNA, 1401 nt, Artificial Sequence
  derived and/or modified CDS sequence (wt) from neuraminidase__InfluenzaB__AGX16032
augcuaccuucaacuauacaaacguuaacccuauuucucacaucagggggaguguuauuaucacuauaugugucagcuucauugucauacuuacuauauucggauauauugcuaaaauuuucacaaacagaaauaacugcaccaauaaugccauuggauugugcaaacgcaucaaauguucaggcugugaaccguucugcaacaaaaggggugacacuucuucucccagaaccggaguggacguacccucguuuaucuugcccgggcucaaccuuucagaaagcacuccuaauuagcccccauagauucggagaaaccaaaggaaacucagcucccuugauaauaagggaaccuuuuauugcuuguggaccaaaggaaugcaaacacuuugcucuaacccauuaugcagcucaaccagggggauacuacaauggaacaagagaagacagaaacaagcugaggcaucuaauuucagucaaauugggcaaaaucccaacaguagaaaacuccauuuuccacauggcagcuuggagcggguccgcaugccaugaugguaaagaauggacauauaucggaguugauggccccgacaguaaugcauugcucaaaauaaaauauggagaagcauauacugacacauaccauuccuaugcaaaaaacauccuaaggacacaagaaagugccugcaauugcaucgggggagauuguuaucuuaugauaacugauggcccagcuucagggauuagugaaugcagauuccuuaagauucgagagggccgaauaauaaaagaaauauuuccaacaggaagaguaaaacauacugaggaaugcacaugcggauuugccagcaacaaaaccauagaaugugccuguagagauaacaguuacacagcaaaaagacccuuugucaaauuaaauguggagacugauacagcggaaauaagauugaugugcacagagacuuauuuggacacccccagaccaaaugauggaagcauaacagggccuugcgaaucugauggggacaaagggaguggaggcaucaagggaggauuuguucaucaaagaauggcauccaagauuggaaggugguacucucgaacgaugucuaaaacuaaaagaauggggaugggacuguauguaaaguaugauggagacccauggacugacagugaagcccuugcucuuaguggaguaaugguuucaauggaagaaccugguugguauuccuuuggcuucgaaauaaaagauaagaaaugugauguccccuguauugggauagaaaugguacaugauggugggaaaacgacuuggcacucagcagcaacagccauuuacuguuuaaugggcucaggacaacugcugugggacacugucacagguguugauauggcucuguaa

SEQ ID NO: 61139 - RNA, 1401 nt, Artificial Sequence
  derived and/or modified CDS sequence (wt) from neuraminidase__InfluenzaB__AGX16043
augcuaccuucaacuauacaaacguuaacccuauuucucacaucagggggaguguuauuaucacuauaugugucagcuucauugucauacuuacuauauucggauauauugcuaaaauuuucacaaacagaaauaacugcaccaauaaugccauuggauugugcaaacgcaucaaauguucaggcugugaaccguucugcaacaaaaggggugacacuucuucucccagaaccggaguggacguacccucguuuaucuugcccgggcucaaccuuucagaaagcacuccuaauuagcccccauagauucggagaaaccaaaggaaacucagcucccuugauaauaagggaaccuuuuauugcuuguggaccaaaggaaugcaaacacuuugcucuaacccauuaugcagcucaaccagggggauacuacaauggaacaagagaagacagaaacaagcugaggcaucuaauuucagucaaauugggcaaaaucccaacaguggaaaacucuauuuuccacauggcagcuuggagcggguccgcaugccaugaugguagagaauggacauauaucggaguugauggccccgacaguaaugcauugcucaaaauaaaauauggagaagcauauacugacacauaccauuccuaugcaaaaaacauccuaaggacacaagaaagugccugcaauugcaucgggggagacuguuaucuuaugauaacugauggcccagcuucagggauuagugaaugcagauuccuuaagauucgagagggccgaauaauaaaagaaauauuuccaacaggaaggguaaaacauacugaggaaugcacaugcggauuugccagcaacaaaaccauagaaugugccuguagagauaacaguuacacagcaaaaagacccuuugucaaauuaaauguggagacugauacagcggaaauaagauugaugugcacagagacuuauuuggacacccccaggccaaaugauggaagcauaacagggccuugcgaauccaauggggacaaagggaguggaggcaucaagggaggauuuguucaucaaagaauggcauccaagauuggaaggugguacucucgaacgaugucuaaaacuaaaagaauggggaugggacuguauguaaaguaugauggagacccauggacugacagugaagcccuugcucuuaguggaguaaugguuucaauggaagaaccugguugguauuccuuuggcuucgaaauaaaagauaagaaaugugauguccccuguauugggauagaaaugguacaugauggugggaaaacgacuuggcacucagcagcaacagccauuuacuguuuaaugggcucaggacaacugcugugggacacugucacagguguugauauggcucuguaa

SEQ ID NO: 61140 - RNA, 1401 nt, Artificial Sequence
  derived and/or modified CDS sequence (wt) from neuraminidase__InfluenzaB__AGX16054
augcuacccucaacuauacaaacguuaacccuauuccucacaucagggggaguguuauuaucacuauaugugucagcuucacugucauacuuacuauauucggauauauugcuaaaauuuucaacaacagaaauaacugcaccaacaaugccauuggauugugcaaacgcaucaaauguucaggcugugaaccguucugcaacaaaaggggugacacuucuucucccagaaccggaguggacauacccgcguuuaucuugcccgggcucaaccuuucagaaagcacuccuaauuagcccucauagauucggagaaaccaaaggaaacucagcucccuugauaauaagggaaccuuuuauugcuuguggaccaaaggaaugcaaacacuuugcucuaacccauuaugcagcccaaccagggggauacuacaauggaacaagagaagacagaaacaagcugaggcaucuaauuucagucaaauugggcaaaaucccaacaguagaaaacuccauuuuccacauggcagcauggagcggguccgcaugccaugaugguaaagaauggacauauaucggaguugauggcccugacaguaaugcauugcucaaaauaaaauauggagaagcauauacugacacauaccauuccuaugcaaacaacauccuaagaacacaagaaagugccugcaauugcaucgggggaaauuguuaucuuaugauaacugauggcucagcuucaggcauuagugagugcagauuucuuaagauucgagagggccgaauaauaaaagaaauauuuccaacaggaagaguaaaacauacugaagaaugcacaugcggauuugccagcaauaaaaccauagaaugugccuguagagauaacaguuacacagcaaaaagacccuuugucaaauuaaauguggagacugauacagcagaaauaagauugaugugcacagagacuuauuuggacacccccagaccagaugauggaagcauaacagggccuugugaaucuaaugggaauaaagggaguggaggcaucaagggaggauuuguucaucaaagaauggcauccaaaauuggaaggugguacucucgaacaaugucuaaaaccaaaaggaugggaaugggacuguaugucaaguaugauggagacccauggacugacagugaugcccuugcucuuaguggaguaaugguuucaauggaagaaccugguugguacucauuuggcuucgaaauaaaagauaagaaaugugauguccccuguauugggauagagaugguacaugaugguggaaaggagacuuggcacucagcagcaacagccauuuacuguuuaaugggcucaggacaacuguugugggacacugucacagguguugauauggcucuguaa

SEQ ID NO: 61141 - RNA, 1401 nt, Artificial Sequence
  derived and/or modified CDS sequence (wt) from neuraminidase__InfluenzaB__AGX16087
augcuaccuucaacuauacaaacguuaacccuauuucucacaucagggggaguguuauuaucacuauaugugucagcuucauugucauacuuacuauauucggauauauugcuaaaauuuucacaaacagaaauaacugcaccaauaaugccauuggauugugcaaacgcaucaaauguucaggcugugaaccguucugcaacaaaaggggugacacuucuucucccagaaccggaguggacguauccucguuuaucuugcccgggcucaaccuuucagaaagcacuccuaauuagcccccauagauucggagaaaccaaaggaaacucagcucccuugauaauaagggaaccuuuuauugcuuguggaccaaaggaaugcaaacacuuugcucuaacccauuaugcagcucagccagggggauacuacaauggaacaagagaagacagaaacaagcugaggcaucuaauuucagucaaauugggcaaaaucccaacaguagaaaacucuauuuuccacauggcagcuuggagcggguccgcaugccaugaugguagagaauggacauacaucggaguugauggccccgacaguaaugcauugcucaaaauaaaauauggagaagcauauacugacacauaccauuccuaugcaaaaaacauccuaaggacacaagaaagugccugcaauugcaucgggggagauuguuaucuuaugauaacugauggcccagcuucagggauuagugaaugcagauuccuuaagauucgagagggccgaauaauaaaagaaauauuuccaacaggaagaguaaaacauacugaggaaugcacaugcggauuugccagcaacaaaaccauagaaugugccuguagagauaacaauuacacagcaaaaagacccuuugucaaauuaaauguggagacugauacagcggaaauaagauugaugugcacagagacuuauuuggacacccccagaccaaaugauggaagcauaacagggccuugcgaaucuaauggggacaaagggaguggaggcaucaaaggaggauuuguucaucaaagaauggcauccaagauuggaaggugguacucucgaacgaugucuaaaacuaaaagaauggggaugggacuguauguaaaguaugauggagacccauggacugauagugaagcccuugcucuuaguggaguaaugguuucaauggaagaaccugguugguauuccuuuggcuucgaaauaaaagauaagaaaugugauguccccuguauugggauagaaaugguacaugauggugggaaaacgacuuggcacucagcagcaacagccauuuacuguuuaaugggcucaggacaacugcugugggacacugucacagguguugauauggcucuguaa

SEQ ID NO: 61142 - RNA, 1401 nt, Artificial Sequence
  derived and/or modified CDS sequence (wt) from neuraminidase__InfluenzaB__AGX16109
augcuaccuucaacuauacaaacguuaacccuauuucucacaucagggggaguguuauuaucacuauaugugucagcuucauugucauacuuacuauauucggauauauugcuaaaauuuucacaaacagaaauaacugcaccaacaaugccauuggauugugcaaacgcaucaaauguucaggcugugaaccguucugcaacaaaaggggugacacuucuucucccagaaccggaguggacguacccucguuuaucuugcccgggcucaacuuuucagaaagcacuccuaauuagcccccauagauucggagaaaccaaaggaaacucagcucccuugauaauaagggaaccuuuuauugcuuguggaccaaaggaaugcaaacacuuugcucuaacccauuaugcagcucaaccagggggauacuacaauggaacaagagaagacagaaacaagcugaggcaucuaauuucagucaaauugggcaaaaucccaacaguagaaaacucuauuuuccacauggcagcuuggagcggguccgcaugccaugaugguagagaauggacauaugucggaguugauggccccgacaguaaugcauugcucaaaauaaaauauggagaagcauauacugacacauaccauuccuaugcaaaaaacauccuaaggacacaagaaagugccugcaauugcaucgggggagauuguuaucuuaugauaacugauggcccagcuucagggauuagugaaugcagauuccuuaagauucgagagggccgaauaauaaaagaaauauuuccaacaggaagaguaaaacauacugaggaaugcacaugcggauuugccagcaacaaaaccauagaaugugccuguagagauaacaguuacacagcaaaaagacccuuugucaaauuagauguggagacugauacagcggaaauaagauuaaugugcacagagacuuauuuggacacccccagaccaaaugauggaagcauaacagggccuugcgaagcuaauggggauaaagggaguggaggcaucaaggggggauuuguucaccaaagaauggcauccaagauuggaaggugguacucucgaacgaugucuaaaacuaaaagaauggggaugggacuguaugucaaguaugauggagacccauggacugacagugaagcccuugcucuuaguggaguaaugguuucaauggaagaaccugguugguauuccuuuggcuucgaaauaaaagauaagaaaugugauguccccuguauugggauagaaaugguacaugauggugggaaaacgacuuggcacucagcagcaacagccauuuacuguuuaaugggcucaggacaacugcugugggacacugucacagguguugauauggcucuguaa

SEQ ID NO: 61143 - RNA, 1401 nt, Artificial Sequence
  derived and/or modified CDS sequence (wt) from neuraminidase__InfluenzaB__AGX16120
augcuacccucaacuauacaaacguuaacccuauuccucacaucagggggaguguuauuaucacuauaugugucagcuucacugucauacuuacuauauucggauauauugcuaaaguuuucaacaacagaaauaacugcaccaacaaugccauuggauugugcaaacgcaucaaauguucaggcugugaaccguucugcaacaaaaggggugacauuucuucucccagaaccggaguggacauacccgcguuuaucuugcccgggcucaaccuuucagaaagcacuccuaauuagcccucauagauucggagaaaccaaaggaaacucagcucccuugauaauaagggaaccuuuuauugcuuguggaccaaaggaaugcaaacacuuugcucuaacccauuaugcagcccaaccagggggauacuacaauggaacaagagaagacagaaacaagcugaggcaucuaauuucagucaaauugggcaaaaucccaacaguagaaaacuccauuuuccacauggcagcauggagcggguccgcaugccaugaugguaaagaauggacauauaucggaguugauggcccugacaguaaugcauugcucaaaauaaaauauggagaagcauauacugacacauaccauuccuaugcaaacaacauccuaagaacacaagaaagugccugcaauugcaucgggggaaauuguuaucuuaugauaacugauggcucagcuucagguauuagugagugcagauuucuuaagauucgagagggccgaauaauaaaagaaauauuuccaacaggaagaguaaaacauacugaagaaugcacaugcggauuugccagcaauaaaaccauagaaugugccuguagagauaacaguuacacagcaaaaagacccuuugucaaacuaaauguggagacugauacagcagaaauaagauuaaugugcacagagacuuauuuggacacccccagaccagaugauggaagcauaacagggccuugugaaucuaaugggaacaaagggaguggaggcaucaagggaggauuuguucaucaaagaauggcauccaaaauuggaaggugguacucucgaacaaugucuaaaaccaaaaggaugggaaugggacuguaugucaaguaugauggagacccauggacugacagugaugcccuugcucuuaguggaguaaugguuucaauggaagaaccugguugguacucauuuggcuucgaaauaaaagauaagaaaugugauguccccuguauugggauagagaugguacaugaugguggaaaggagacuuggcacucagcagcaacagccauuuacuguuuaaugggcucaggacaacuguugugggacacugucacagguguugauauggcucuguaa

SEQ ID NO: 61144 - RNA, 1401 nt, Artificial Sequence
  derived and/or modified CDS sequence (wt) from neuraminidase__InfluenzaB__AGX16131
augcuacccucaacuauacaaacguuaacccuauuccucacaucagggggaguguuauuaucacuauaugugucagcuucacugucauacuuacuauauucggauauauugcuaaaguuuucaacaacagaaauaacugcaccaacaaugccauuggauugugcaaacgcaucaaauguucaggcugugaaccguucugcaacaaaaggggugacauuucuucucccagaaccggaguggacauacccgcguuuaucuugcccgggcucaaccuuucagaaagcacuccuaauuagcccucauagauucggagaaaccaaaggaaacucagcucccuugauaauaagggaaccuuuuauugcuuguggaccaaaggaaugcaaacacuuugcucuaacccauuaugcagcccaaccagggggauacuacaauggaacaagagaagacagaaacaagcugaggcaucuaauuucagucaaauugggcaaaaucccaacaguagaaaacuccauuuuccacauggcagcauggagcggguccgcaugccaugaugguaaagaauggacauauaucggaguugauggcccugacaguaaugcauugcucaaaauaaaauauggagaagcauauacugacacauaccauuccuaugcaaacaacauccuaagaacacaagaaagugccugcaauugcaucgggggaaauuguuaucuuaugauaacugauggcucagcuucagguauuagugagugcagauuucuuaagauucgagagggccgaauaauaaaagaaauauuuccaacaggaagaguaaaacauacugaagaaugcacaugcggauuugccagcaauaaaaccauagaaugugccuguagagauaacaguuacacagcaaaaagacccuuugucaaacuaaauguggagacugauacagcagaaauaagauugaugugcacagagacuuauuuggacacccccagaccagaugauggaagcauaacagggccuugugaaucuaaugggaacaaagggaguggaggcaucaagggaggauuuguucaucaaagaauggcauccaaaauuggaaggugguacucucgaacaaugucuaaaaccaaaaggaugggaaugggacuguaugucaaguaugauggagacccauggacugacagugaugcccuugcucuuaguggaguaaugguuucaauggaagaaccugguugguacucauuuggcuucgaaauaaaagauaagaaaugugauguccccuguauugggauagagaugguacaugaugguggaaaggagacuuggcacucagcagcaacagccauuuacuguuuaaugggcucaggacaacuguugugggacacugucacagguguugauauggcucuguaa

SEQ ID NO: 61145 - RNA, 1401 nt, Artificial Sequence; identical to SEQ ID NO: 61144
  derived and/or modified CDS sequence (wt) from neuraminidase__InfluenzaB__AGX16142

SEQ ID NO: 61146 - RNA, 1401 nt, Artificial Sequence
  derived and/or modified CDS sequence (wt) from neuraminidase__InfluenzaB__AGX16153
augcuaccuucaacuauacaaacguuaacccuauuucucacaucagggggaguguuauuaucacuauaugugucagcuucauugucauacuuacuauauucggauauauugcuaaaauuuucacaaacagaaauaacugcaccaauaaugccauuggauugugcaaacgcaucaaauguucaggcugugaaccguucugcaacaagaggggugacacuucuucucccagaaccggaguggacguacccucguuuaucuugcccgggcucaaccuuucagaaagcacuccuaauuagcccccauagauucggagaaaccaaaggaaacucagcucccuugauaauaagggaaccuuuuauugcuuguggaccaaaggaaugcaaacacuuugcucuaacccauuaugcagcucaaccagggggauacuacaauggaacaagagaagacagaaacaagcugaggcaucuaauuucagucaaauugggcaaaaucccaacaguagaaaacucuauuuuccacaugacagcuuggagcggguccgcaugccaugaugguagagaauggacauauaucggaguugauggccccgacaguaaugcauugcucaaaauaaaauauggagaagcauauacugacacauaccauuccuaugcaaaaaacauccuaaggacacaagaaagugccugcaauugcaucgggggagauuguuaucuuaugauaacugauggcccagcuucagggauuagugaaugcagauuccuuaagauucgagagggccgaauaauaaaagaaauauuuccaacaggaagaguaaaacauacugaggaaugcacaugcggauuugccagcaacaaaaccauagaaugugccuguagagauaacaguuacacagcaaaaagacccuuuguuaaauuaaauguggagacugauacagcggaaauaagauugaugugcacagagacuuauuuggacacccccagaccaaaugauggaagcauaacagggccuugcgaaucuaauggggacaaagggaguggaggcaucaagggaggauuuguucaucaaagaauggcauccaagauuggaaggugguacucucgaacgaugucuaaaacuaaaagaauggggauggggcuguauguaaaguaugauggagacccauggacugacagugaagcccuugcucuuaguggaguaaugguuucaauggaagaaccugguugguauuccuuugguuucgaaauaaaagauaagaaaugugauguccccuguauugggauagaaaugguacaugauggugggaaaacgacuuggcacucagcagcaacagccauuuacuguuuaaugggcucaggacaacugcugugggacacugucacagguguugauauggcucuguaa

SEQ ID NO: 61147 - RNA, 1401 nt, Artificial Sequence
  derived and/or modified CDS sequence (wt) from neuraminidase__InfluenzaB__AGX16164
augcuaccuucaacuauacaaacguuaacccuauuucucacaucagggggaguguuauugucacuauaugugucagcuucauugucauacuuacuauauucggauauauugcuaaaauuuucacaaacagaaauaacugcaccaauaaugccauuggauugugcaaacgcaucaaauguucaggcugugaaccguucugcaacaaaaggggugacacuucuucucccagaaccggaguggacguauccucguuuaucuugcccgggcucaacauuucagaaagcacuccuaauuagcccccauagauucggagaaaccaaaggaaacucagcucccuugauaauaagggaaccuuuuauugcuuguggaccaaaggaaugcaaacacuuugcucuaacccauuaugcagcucagccagggggauacuacaauggaacaagagaagacagaaacaagcugaggcaucuaauuucagucaaauugggcaaaaucccaacaguagaaaacucuauuuuccacauggcagcuuggagcggguccgcaugccaugaugguagagaauggacauacaucggaguugauggccccgacaguaaugcauugcucaaaauaaaauauggagaagcauauacugacacauaccauuccuaugcaaaaaacauccuaaggacacaagaaagugccugcaauugcaucgggggagauuguuaucuuaugauaacugauggcccagcuucagggauuagugaaugcagauuccuuaagauucgagagggccgaauaauaaaagaaauauuuccaacaggaagaguaaaacauacugaggaaugcacaugcggauuugccagcaacaaaaccauagaaugugccuguagagauaacaauuacacagcaaaaagacccuuugucaaauuaaauguggagacugauacagcggaaauaagauugaugugcacagagacuuauuuggacacccccagaccaaaugauggaagcauaacagggccuugcgaaucuaauggggacaaagggaguggaggcaucaaaggaggauuuguucaucaaagaauggcauccaagauuggaaggugguacucucgaacgaugucuaaaacuaaaagaauggggaugggacuguauguaaaguaugauggagacccauggacugauagugaagcccuugcucuuaguggaguaaugguuucaauggaagaaccugguugguauuccuuuggcuucgaaauaaaagauaagaaaugugauguccccuguauugggauagaaaugguacaugauggugggaaaacgacuuggcacucagcagcaacagccauuuacuguuuaaugggcucaggacaacugcugugggacacugucacagguguugauauggcucuguaa

SEQ ID NO: 61148 - RNA, 1401 nt, Artificial Sequence; identical to SEQ ID NO: 60865
  derived and/or modified CDS sequence (wt) from neuraminidase__InfluenzaB__AGX16197

SEQ ID NO: 61149 - RNA, 1401 nt, Artificial Sequence
  derived and/or modified CDS sequence (wt) from neuraminidase__InfluenzaB__AGX16208
augcuaccuucaacuauacaaacguuaacccuauuucucacaucagggggaguguuauuaucacuauaugugucagcuucauugucauacuuacuauauucggauauauugcuaaaauuuucacaaacagaaauaacugcaccaauaaugccauuggauugugcaaacgcaucaaauguucaggcugugaaccguucugcagcaaaaggggugacacuucuucucccagaaccggaguggacauacccucguuuaucuugcccgggcucaaccuuucagaaagcacuccuaauuagcccccauagauucggagaaaccaaaggaaacucagcucccuugauaauaagggaaccuuuuauugcuuguggaccaacggaaugcaaacacuuugcucuaacccauuaugcagcucaaccagggggauacuacaauggaacaagagaagacagaaacaagcugaggcaucuaauuucagucaaauugggcaaaaucccaacaguagaaaacuccauuuuccacauggcagcuuggagcggguccgcaugccaugaugguaaagaauggacauauaucggaguugauggccccgacaguaaugcauugcucaaaauaaaauauggagaagcuuauacugacacauaccauuccuaugcaaaaaacauccuaaggacacaagaaagugccugcaauugcaucgggggagauuguuaucuuaugauaacugauggcccagcuucagggauuagugaaugcagauuccuuaagauucgagagggccgaauaauaaaagaaauauuuccaacaggaagaguaaaacauacugaggaaugcacaugcggauuugccagcaacaaaaccauagaaugugcuuguagagauaacaguuacacagcaaaaagacccuuugucaaauuaaauguggagacugauacagcggaaauaagauugaugugcacagagacuuauuuggacacccccagaccaaaugauggaagcauaacagggccuugcgaaucugauggggacaaagggaguggaggcaucaagggaggauuuguucaucaaagaauggcauccaagauuggaaggugguacucucgaacgaugucuaaaacuaaaagaauggggaugggacuguauguaaaguaugauggagacccauggacugacagugaagcccuugcucuuaguggaguaaugguuucaauggaagaaccugguugguauuccuuuggcuucgaaauaaaagauaagaaaugugauguccccuguauugggauagaaaugguacaugauggugggaaaacgacuuggcacucagcagcaacagccauuuacuguuuaaugggcucaggacaacugcugugggacacugucacagguguugauauggcucuguaa

SEQ ID NO: 61150 - RNA, 1401 nt, Artificial Sequence
  derived and/or modified CDS sequence (wt) from neuraminidase__InfluenzaB__AGX16219
augcuaccuucaacuauacaaacguuaacccuauuucucacaucagggggaguguuauuaucacuauaugugucagcuucauugucauacuuacuauauucggauauauugcuaaaauuuucacaaacagaaauaacugcaccaauaaugccauuggauugugcaaacgcaucaaauguucaggcugugaaccguucugcagcaaaaggggugacacuucuucucccagaaccggaguggacauacccucguuuaucuugcccgggcucaaccuuucagaaagcacuccuaauuagcccccauagauucggagaaaccaaaggaaacucagcccccuugauaauaagggaaccuuuuauugcuuguggaccaacggaaugcaaacacuuugcucuaacccauuaugcagcucaaccagggggauacuacaauggaacaagagaagacagaaacaagcugaggcaucuaauuucagucaaauugggcaaaaucccaacaguagaaaacuccauuuuccacauggcagcuuggagcggguccgcaugccaugaugguaaagaauggacauauaucggaguugauggccccgacaguaaugcauugcucaaaauaaaauauggagaagcauauacugacacauaccauuccuaugcaaaaaacauccuaaggacacaagaaagugccugcaauugcaucgggggagauuguuaucuuaugauaacugauggcccagcuucagggauuagugaaugcagauuccuuaagauucgagagggccgaauaauaaaagaaauauuuccaacaggaagaguaaaacauacugaggaaugcacaugcggauuugccagcaacaaaaccauagaaugugcuuguagagauaacaguuacacagcaaaaagacccuuugucaaauuaaauguggagacugauacagcggaaauaagauugaugugcacagagacuuauuuggacacccccagaccaaaugauggaagcauaacagggccuugcgaaucagauggggacaaagggaguggaggcaucaagggaggauuuguucaucaaagaauggcauccaagauuggaaggugguacucucgaacgaugucuaaaacuaaaagaauggggaugggacuguauguaaaguaugauggagacccauggacugacagugaagcccuugcucuuaguggaguaaugguuucaauggaagaaccugguugguauuccuuuggcuucgaaauaaaagauaagaaaugugauguccccuguauugggauagaaaugguacaugauggugggaaaacgacuuggcacucagcagcaacagccauuuacuguuuaaugggcucaggacaacugcugugggacacugucacagguguugauauggcucuguaa

SEQ ID NO: 61151 - RNA, 1401 nt, Artificial Sequence; identical to SEQ ID NO: 60639
  derived and/or modified CDS sequence (wt) from neuraminidase__InfluenzaB__AGX16230

SEQ ID NO: 61152 - RNA, 1401 nt, Artificial Sequence
  derived and/or modified CDS sequence (wt) from neuraminidase__InfluenzaB__AGX16241
augcuaccuucaacuauacaaacguuaacccuauuucucacaucagggggaguguuauuaucacuauaugugucagcuucauugucauacuuacuauauucggauauauugcuaaaauuuucacaaacagaaauaacugcaccaauaaugccauuggauugugcaaacgcaucaaauguucaggccgugaaccauucugcaacaaaaggggugacacuucuucucccagaaccggaguggacguacccucguuuaucuugcccgggcucaaccuuucagaaagcacuccuaauuagcccccauagauucggagaaaccaaaggaaacucagcucccuugauaauaagggaaccuuuuauugcuuguggaccaaaggaaugcaaacacuuugcucuaacccauuaugcagcucaaccagggggauacuacaauggaacaagagaagacagaaacaagcugagacaucuaauuucagucaaauugggcaaaaucccaacaguagaaaacucuauuuuccacauggcagcuuggagcggguccgcaugccaugauggcagagaauggacauauaucggaguugauggccccgacaguaaugcauugcucaaaauaaaauauggagaagcauauacugacacauaccauuccuaugcaaaaaacauccuaaggacacaagaaagugccugcaauugcaucgggggagauuguuaucuuaugauaacugauggcccagcuucagggauuagugaaugcagauuccuuaagauucgagagggccgaauaauaaaagaaauauuuccaacaggaagaguaaaacauacugaggaaugcacaugcggauuugccagcaacaaaaccauagaaugugccuguagagauaacaguuacacagcaaaaagacccuuugucaaauuaaauguggagacugauacagcagaaauaagauugaugugcacagagacuuauuuggacacccccagaccaaaugauggaagcauaauagggccuugcgaaucuaauggggacaaagggaguggaggcaucaagggaggauuuguucaucaaagaauggcauccaagauuggaaggugguacucucgaacgaugucuaaaacuaagagaauggggaugggacuguauguaaaguaugauggagacccauggacugacagugaagcccuuacucuuaguggaguaaugguuucaauggaagaaccugguugguauuccuuuggcuucgaaauaaaagauaagaaaugugauguccccuguauugggauagaaaugguacaugauggugggaaaacgacuuggcacucagcagcaacagccauuuacuguuuaaugggcucaggacaacugcugugggacacugucacagguguugauauggcucuguaa

SEQ ID NO: 61153 - RNA, 1401 nt, Artificial Sequence
  derived and/or modified CDS sequence (wt) from neuraminidase__InfluenzaB__AGX16252
augcuaccuucaacuauacaaacguuaacccuauuucucacaucagggggaguguuauuaucacuauaugugucagcuucauugucauacuuacuauauucggauauauugcuaaaauuuucacaaacagaaauaacugcaccaauaaugccauuggauugugcaaacgcaucaaauguucaggcugugaaccguucugcagcaaaaggggugacacuucuucucccagaaccggagugggcauacccucguuuaucuugcccgggcucaaccuuucagaaagcacuccuaauuagcccccauagauucggagaaaccaaaggaaacucagcucccuugauaauaagagaaccuuuuauugcuuguggaccaacggaaugcaaacacuuugcucuaacccauuaugcagcucaaccagggggauacuacaauggaacaagagaagacagaaacaagcugaggcaucuaauuucagucaaauugggcaaaaucccaacaguagaaaacuccauuuuccacauggcagcuuggagcggguccgcaugccaugaugguaaagaauggacauauaucggaguugauggccccgacaguaaugcauugcucaaaauaaaauauggagaagcauauacugacacauaccauuccuaugcaaaaaacauccuaaggacacaagaaagugccugcaauugcaucgggggagauuguuaucuuaugauaacugauggcccagcuucagggauuagugaaugcagauuccuuaagauucgagagggccgaauaauaaaagaaauauuuccaacaggaagaguaaaacauacugaggaaugcacaugcggauuugccagcaacaaaaccauagaaugugcuuguagagauaaccguuacacagcaaaaagacccuuugucaaauuaaauguggagacugauacagcggaaauaagauugaugugcacagagacuuauuuggacacccccagaccaaaugauggaagcauaacagggccuugcgaaucugauggggacaaagggaguggaggcaucaagggaggauuuguucaucaaagaauggcauccaagauuggaaggugguacucucgaacgaugucuaaaacuaaaagaauggggaugggacuguauguaaaguaugauggagacccauggacugacagugaagcccuugcucuuaguggaguaaugguuucaauggaagaaccugguugguauuccuuuggcuucgaaauaaaagauaagaaaugugauguccccuguauugggauagaaaugguacaugauggugggaaaacgacuuggcacucagcagcgacagccauuuacuguuuaaugggcucaggacaacugcugugggacacugucacagguguugauauggcucuguaa

SEQ ID NO: 61154 - RNA, 1401 nt, Artificial Sequence; identical to SEQ ID NO: 61149
  derived and/or modified CDS sequence (wt) from neuraminidase__InfluenzaB__AGX16274

SEQ ID NO: 61155 - RNA, 1401 nt, Artificial Sequence
  derived and/or modified CDS sequence (wt) from neuraminidase__InfluenzaB__AGX16285
augcuaccuucaacuauacaaacguuaacccuauuucucacaucagggggaguguuauuaucacuauaugugucagcuucauugucauacuuacuauauucggauauauugcuaaaauuuucacaaacagaaauaacugcaccaauaaugccauuggauugugcaaacgcaucaaauguucaggcugugaaccguucugcagcaaaaggggugacacuucuucucccagaaccggaguggacauacccucguuuaucuugcccgggcucaaccuuucagaaagcacuccuaauuagcccccauagauucggagaaaccaaaggaaacucagcucccuugauaauaagggaaccuuuuauugcuuguggaccaacggaaugcaaacacuuugcucuaacccauuaugcagcucaaccagggggauacuacaauggaacaagagaagacagaaacaagcugaggcaucuaauuucagucaaauugggcaaaaucccaacaguagaaaacuccauuuuccacauggcagcuuggagcggguccgcaugccaugaugguaaagaauggacauauaucggaguugauggccccgacaguaaugcauugcucaaaauaaaauauggagaagcuuauacugacacauaccauuccuaugcaaaaaacauccuaaggacacaagaaagugccugcaauugcaucgggggagauuguuaucuuaugauaacugauggcccagcuucagggauuagugaaugcagauuccuuaagauucgagagggccgaauaauaaaagaaauauuuccaacaggaagaguaaaacauacugaggaaugcacaugcggauuugccagcaacaaaaccauagaaugugcuuguagagauaacaguuacacagcaaaaagacccuuugucaaauuaaauguggagacugauacagcggaaauaagauugaugugcacagagacuuauuuggacacccccagaccaaaugauggaagcacaacagggccuugcgaaucugauggggacaaagggaguggaggcaucaagggaggauuuguucaucaaagaauggcauccaagauuggaaggugguacucucgaacgaugucuaaaacuaaaagaauggggaugggacuguauguaaaguaugauggagacccauggacugacagugaagcccuugcucuuaguggaguaaugguuucaauggaagaaccugguugguauuccuuuggcuucgaaauaaaagauaagaaaugugauguccccuguauugggauagaaaugguacaugauggugggaaaacgacuuggcacucagcagcaacagccauuuacuguuuaaugggcucaggacaacugcugugggacacugucacagguguugauauggcucuguaa

SEQ ID NO: 61156 - RNA, 1401 nt, Artificial Sequence
  derived and/or modified CDS sequence (wt) from neuraminidase__InfluenzaB__AGX16296
augcuaccuucaacuauacaaacguuaacccuauuucucacaucagggggaguguuauuaucacuauaugugucagcuucauugucauacuuacuauauucggauauauugcuaaaauuuucacaaacagaaauaacugcaccaauaaugccauuggauugugcaaacgcaucaaauguucaggcugugaaccguucugcagcaaaaggggugacacuucuucucccagaaccggaguggacauacccucguuuaucuugcccgggcucaaccuuucagaaagcacuccuaauuagcccccauagauucggagaaaccaaaggaaacucagcucccuugauaauaagggaaccuuuuauugcuuguggaccaacggaaugcaaacacuuugcucuaacccauuaugcagcucaaccagggggauacuacaauggaacaagagaagacagaaacaagcugaggcaucuaauuucagucaaauugggcaaaaucccaacaguagaaaacuccauuuuccacauggcagcuuggagcggguccgcaugccaugaugguaaagaauggacauauaucggaguugauggccccgacaguaaugcauugcucaaaauaaaauauggagaagcauauacugacacauaccauuccuaugcaaaaaacauccuaaggacacaagaaagugccugcaauugcaucgggggagauuguuaucuuaugauaacugauggcccagcuucaggaauuagugaaugcagauuccuuaagauucgagagggccgaauaauaaaagaaauauuuccaacaggaagaguaaaacauacugaggaaugcacaugcggauuugccagcaacaaaaccauagaaugugcuuguagagauaacaguuacacagcaaaaagacccuuugucaaauuaaauguggagacugauacagcggaaauaagauugaugugcacagagacuuauuuggacacccccagaccaaaugauggaagcauaacagggccuugcgaaucugauggggacaaagggaguggaggcaucaagggaggauuuguucaucaaagaauggcauccaagauuggaaggugguacucucgaacgaugucuaaaacuaaaagaauggggaugggacuguauguaaaguaugauggagacccauggacugacagugaagcccuugcucuuaguggaguaaugguuucaauggaagaaccugguugguacuccuuuggcuucgaaauaaaagauaagaaaugugauguccccuguauugggauagaaaugguacaugauggugggaaaacgacuuggcacucagcagcaacagccauuuacuguuuaaugggcucaggacaacugcugugggacacugucacagguguugauauggcucuguaa

SEQ ID NO: 61157 - RNA, 1401 nt, Artificial Sequence
  derived and/or modified CDS sequence (wt) from neuraminidase__InfluenzaB__AGX16307
augcuaccuucaacuauacaaacguuaacccuauuucucacaucagggggaguauuauuaucacuauaugugucagcuucauuaucauacuuacuauauucggauauauugcuaaaauucucaccaacagaaauaacugcaccaacaaugccauuggauugugcaaacgcaucaaauguucaggcugugaaccguucugcaacaaaaggggugacacuucuucucccagaaccggaguggacauacccgcguuuaucuugcccgggcucaaccuuucagaaagcacuccuaauuagcccucauagauucggagaaaccaaaggaaacucagcucccuugauaauaagggaaccuuuuauugcuuguggaccaaaugaaugcaaacacuuugcucuaacccauuaugcagcccaaccagggggauacuacaauggaacaagaggagacagaaacaagcugaggcaucuaauuucagucaaauugggcaaaaucccaacaguagaaaacuccauuuuccacauggcagcauggagcggguccgcaugccaugaugguaaggaauggacauauaucggaguugauggcccugacaauaaugcauugcucaaaauaaaauauggagaagcauauacugacacauaccauuccuaugcaaacaaaauccuaagaacacaagaaagugccugcaauugcaucgggggaaauuguuaucuuaugauaacugauggcucagcuucagguguuagugaaugcagauuucuuaagauucgagagggccgaauaauaaaagaaauauuuccaacaggaagaguaaaacacacugaggaaugcacaugcggauuugccagcaauaaaaccauagaaugugccuguagagauaacaguuacacagcaaaaagacccuuugucaaauuaaacguggagacugauacagcagaaauaagauugaugugcacagauacuuauuuggacacccccagaccagaugauggaagcauaacaggcccuugugaaucuaauggggacaaagggaguggaggcaucaagggaggauuuguucaucaaagaauggcauccaagauuggaaggugguacucucgaacgaugucuaaaacugaaaggauggggaugggacuguaugucaaguaugauggagauccaugggcugacagugaugcccuagcuuuuaguggaguaaugguuucaaugaaagaaccugguugguacuccuuuggcuucgaaauaaaagauaagaaaugcgauguccccuguauugggauagagaugguacaugaugguggaaaagagacuuggcacucagcagcaacagccauuuacuguuuaaugggcucaggacagcugcugugggacacugucacagguguugacauggcucuguaa

SEQ ID NO: 61158 - RNA, 1401 nt, Artificial Sequence; identical to SEQ ID NO: 61061
  derived and/or modified CDS sequence (wt) from neuraminidase__InfluenzaB__AGX16329

SEQ ID NO: 61159 - RNA, 1401 nt, Artificial Sequence
  derived and/or modified CDS sequence (wt) from neuraminidase__InfluenzaB__AGX16362
augcuaccuucaacuauacaaacguuaacccuauuucucacaucagggggaguguuauuaucacuauaugugucagcuucauugucauacuuacuauauucggauauauugcuaaaauuuucacaaacagaaauaacugcaccaauaaugccauuggauugugcaaacgcaucaaauguucaggcugugaaccguucugcagcaaaaggggugacacuucuucucccagaaccggaguggacauacccucguuuaucuugcccgggcucaaccuuucagaaagcacuccuaauuagcccccauagauucggagaaaccaaaggaaacucagcucccuugauaauaagggaaccuuuuauugccuguggaccaacggaaugcaaacacuuugcucuaacccauuaugcagcucaaccagggggauacuacaauggaacaagagaagacagaaacaagcugaggcaucuaauuucagucaaauugggaaaaaucccaacaguagaaaacuccauuuuccacauggcagcuuggagcggguccgcaugccaugaugguaaagaauggacauauaucggaguugauggccccgacaguaaugcauugcucaaaauaaaauauggagaagcauauacugacacauaccauuccuaugcaaaaaacauccuaaggacacaagaaagugccugcaauugcaucgggggagauuguuaucuuaugauaacugauggcccagcuucagggguuagugaaugcagauuccuuaagauucgagagggcagaauaauaaaagaaauauuuccaacaggaagaguaaaacauacugaggaaugcacaugcggauuugccagcaacaaaaccauagaaugugcuuguagagauaacaguuacacagcaaaaagacccuuugucaaauuaaauguggagacugauacagcggaaauaagauugaugugcacagagacuuauuuggacacccccagaccaaaugauggaagcauaacagggccuugcgaaucugauggggacaaagggaguggaggcaucaagggaggguuuguucaucaaagaauggcauccaagauuggaagaugguacucucgaacgaugucuaaaacuaaaagaauggggaugggacuguauguaaaguaugauggagacccauggacugacagugaagcccuugcucuuaguggaguaaugguuucaauggaagaaccugguugguauuccuuuggcuucgaaauaaaagauaagaaaugugauguccccuguauugggauagaaaugguacaugauggugggaaaacgacuuggcacucagcagcaacagccauuuauuguuuaaugggcucaggacaacugcugugggacacugucacagguguugauauggcucuguaa

SEQ ID NO: 61160 - RNA, 1401 nt, Artificial Sequence
  derived and/or modified CDS sequence (wt) from neuraminidase__InfluenzaB__AGX16373
augcuaccuucaacuauacaaacguuaacccuauuucucacaucagggggaguguuauuaucacuauaugugucagcuucauugucauacuuacuauauucggauauauugcuaaaauuuucacaaacagaaauaacugcaccaauaaugccauuggauuaugcaaacgcaucaaauguucaggcugugaaccauucugcagcaaaaggggugacacuucuucucccagaaccggaguggacauacccucguuuaucuugcccgggcucaaccuuucagaaagcacuccuaauuagcccccauagauucggagaaaccaaaggaaacucagcucccuugauaauaagggaaccuuuuauugcuuguggaccaacggaaugcaaacacuuugcucuaacccauuaugcagcucaaccagggggauacuacaauggaacaagagaagacagaaacaagcugaggcaucuaauuucagucaaauugggcaaaaucccaacaguagaaaacuccauuuuccauauggcagcuuggagcggguccgcaugccaugaugguaaagaauggacauauaucggaguugauggccccgacaguaaugcauuacucaaaauaaaauauggagaagcauauacugacacauaccauuccuaugcaaaaaacauccuaaggacacaagaaagugccugcaauugcaucgggggagauuguuaucuuaugauaacugauggcccagcuucagggauuagugaaugcagauuccuuaagauucgagagggccgaauaauaaaagaaauauuuccaacaggaagaguaaaacauacugaggaaugcacaugcggauuugccagcaacaaaaccauagaaugugcuuguagagauaacaguuacacagcaaaaagacccuuugucaaauuaaauguggagacugauacagcggaaauaagauugaugugcacagagacuuauuuggacacccccagaccaaaugauggaagcauaacagggccuugcgaaucugauggggacaaagggaguggaggcaucaagggaggauuuguucaucaaagaauggcauccaaaauuggaaggugguacucucgaacgaugucuaaaacuaaaagaauggggaugggacuguauguaaaguaugauggagacccauggacugacagugaagcccuugcucuuaguggaguaaugguuucgauggaagaaccugguugguauuccuuuggcuucgaaauaaaagauaagaaaugugauguccccuguauugggauagaaaugguacaugauggugggaaaacgacuuggcacucagcagcaacagccauuuacuguuuaaugggcucaggacaacugcugugggacacugucacagguguugauauggcucuguaa

SEQ ID NO: 61161 - RNA, 1401 nt, Artificial Sequence
  derived and/or modified CDS sequence (wt) from neuraminidase__InfluenzaB__AGX16384
augcuaccuucaacuauacaaacguuaacccuauuucucacaucagggggaguguuauuaucacuauaugugucagcuucauugucauacuuacuauauucggauauauugcuaaaauuuucacaaacagaaauaacugcaccaauaaugccauuggauugugcaaacgcaucaaauguucaggcugugaaccguucugcagcaaaaggggugacacuucuucucccagaaccggaguggacauacccucguuuaucuugcccgggcucaaccuuucagaaagcacuccuaauuagcccccauagauucggagaaaccaaaggaaacucagcucccuugauaauaagggaaccuuuuauugcuuguggaccaacggaaugcaaacacuuugcucuaacccauuaugcagcucaaccagggggauacuacaauggaacaagagaagacagaaacaagcugaagcaucuaauuucagucaaauugggcaaaaucccaacaguagaaaacuccauuuuccauauggcagcuuggagcggguccgcaugccaugaugguaaagaauggacauauaucggaguugauggccccgacaguaaugcauuacucaaaauaaaauauggagaagcauauacugacacauaccauuccuaugcaaaaaacauccuaaggacacaagaaagugccugcaauugcaucgggggagauuguuaucuuaugauaacugauggcccagcuucagggauuagugaaugcagauuccuuaagauucgagagggccgaauaauaaaagaaauauuuccaacaggaagaguaaaacauacugaggaaugcacaugcggauuugccagcaacaaaaccauagaaugugcuuguagagauaacaguuacacagcaaaaagacccuuugucaaauuaaauguggagacugauacagcggaaauaagauugaugugcacagagacuuauuuggacacccccaggccaaaugauggaagcauaacagggccuugcgaaucugauggggacaaagggaguggaggcaucaagggaggauuuguucaucaaagaauggcauccaagauuggaaggugguacucucgaacgaugucuaaaacuaaaagaauggggaugggacuguauguaaaguaugauggagacccauggacugacagugaagcccuugcucuuaguggaguaaugguuucgauggaagaaccugguugguauuccuuuggcuucgaaauaaaagauaagaaaugugauguccccuguauugggauagaaaugguacaugauggugggaaaacgacuuggcacucagcagcaacagccauuuacuguuuaaugggcucaggacaauugcugugggacacugucacagguguugauauggcucuguaa

SEQ ID NO: 61162 - RNA, 1401 nt, Artificial Sequence
  derived and/or modified CDS sequence (wt) from neuraminidase__InfluenzaB__AGX16406
augcuaccuucaacuauacaaacguuaaccuuauuucucacaucaggaggaguguuauuaucacuauaugugucagcuucauugucauacuuacuauauucggauauauugcuaaaauuuucacgaacagaaauaacugcaccaauaaugccauuggauugugcaaacgcaucaaauguucaggcugugaaccguucugcaacaaaaggggugacacuucuucucccagaaccggaguggacguacccucguuuaucuugcccgggcucaaccuuucagaaagcacuccuaauuagcccccauagauucggagaaaccaaaggaaacucagcucccuugauaauaagggaaccuuuuauugcuuguggaccaaaggaaugcaaacauuuugcucuaacccauuaugcagcucaaccagggggauacuacaauggaacaagagaagacagaaacaagcugaggcaucuaauuucagucaaauugggcaaaaucccaacaguagaaaacucuauuuuccacauggcagcuuggagcggguccgcaugccaugaugguagagaauggacuuauaucggaguugauggccccgacaguaaugcauugcucaaaauaaaauauggagaagcauauacugacacauaccauuccuaugcaaaaaacauccuaaggacacaagaaagugccugcaauugcaucgggggugauuguuaucuuaugauaacugauggcccagcuucagggauuagugaaugcagauuccuuaagauucgagagggccgaauaauaaaagaaauauuuccaacaggaagaguaaaacauacugaggaaugcacaugcggauuugccagcaacaaaaccauagaaugugccuguagagauaacaguuacacagcaaaaagacccuuugucaaauuaaauguggagacugauacagcggaaauaagauugaugugcacagagacuuauuuggacacccccagaccaaaugauggaagcauaacagggccuugcgaaucuaauggggacaaagggaguggaggcaucaagggaggauuuguucaccaaagaauggcauccaagauuggaaggugguacucucgaacgaugucuaaaacuaaaagaauggggaugggacuguauguaaaguaugauggagacccauggacugacagugaagcccuugcucuuaguggaguaaugguuucaauggaagaaccugguugguauuccuuuggcuucgaaauaaaagauaagaaaugugauguccccuguauugggauagaaaugguacaugauggugggaaaacgacuuggcacucagcagcaacagccauuuacuguuuaaugggcucaggacaacugcugugggacacugucacagguguuaauaugacucuguaa

SEQ ID NO: 61163 - RNA, 1401 nt, Artificial Sequence
  derived and/or modified CDS sequence (wt) from neuraminidase__InfluenzaB__AGX16427
augcuaccuucaacuauacaaacguuaaccuuauuucucacaucagggggaguguuauuaucacuauaugugucagcuucauugucauacuuacuauauucggauauauugcuaaaauuuucacgaacagaaauaacugcaccaauaaugccauuggauugugcaaacgcaucaaauguucaggcugugaaccguucugcaacaaaaggggugacacuucuucucccagaaccggaguggacguacccucguuuaucuugcccgggcucaaccuuucagaaagcacuccuaauuagcccccauagauucggagaaaccaaaggaaacucagcucccuugauaauaagggaaccuuuuauugcuuguggaccaaaggaaugcaaacacuuugcucuaacccauuaugcagcucaaccagggggauacuacaauggaacaagagaagacagaaacaagcugaggcaucuaauuucagucaaauugggcaaaaucccaacaguagaaaacucuauuuuccacauggcagcuuggagcggguccgcaugccaugaugguagagaauggacuuauaucggaguugauggccccgacaguaaugcauugcucaaaauaaaauauggagaagcauauacugacacauaccauuccuaugcaaaaaacauccuaaggacacaagaaagugccugcaauugcaucgggggagauuguuaucuuaugauaacugauggcccagcuucagggauuagugaaugcagauuccuuaagauucgagagggccgaauaauaaaagaaauauuuccaacaggaagaguaaaacauacugaggaaugcacaugcggauuugccagcaacaaaaccauagaaugugccuguagagauaacaguuacacagcaaaaagacccuuugucaaauuaaauguggagacugauacagcggaaauaagauugaugugcacagagacuuauuuggacacccccagaccaaaugauggaagcauaacagggccuugcgaaucuaauggggacaaagggaguggaggcaucaagggaggauuuguucaccaaagaauggcauccaagauugggaggugguacucucgaacgaugucuaaaacuaaaagaauggggaugggacuguauguaaaguaugauggagacccauggacugacagugaagcccuugcucuuaguggaguaaugguuucaauggaagaaccugguugguauuccuuuggcuucgaaauaaaagauaagaaaugugauguccccuguauugggauagaaaugguacaugauggugggaaaacgacuuggcacucagcagcaacagccauuuacuguuuaaugggcucaggacaacugcugugggacacugucacagguguuaauaugacucuguaa

SEQ ID NO: 61164 - RNA, 1401 nt, Artificial Sequence
  derived and/or modified CDS sequence (wt) from neuraminidase__InfluenzaB__AGX16438
augcuaccuucaacuauacaaacguuaaccuuauuucucacaucagggggaguguuauuaucacuauaugugucagcuucauugucauacuuacuauauucggauauauugcuaaaauuuucacgaacagaaauaacugcaccaauaaugccauuggauugugcaaacgcaucaaauguucaggcugugaaccguucugcaacaaaaggggugacacuucuucucccagaaccggaguggacguacccucguuuaucuugcccgggcucaaccuuucagaaagcacuccuaauuagcccccauagauucggagaaaccaaaggaaacucagcucccuugauaauaagggaaccuuuuauugcuuguggaccaaaggaaugcaaacauuuugcucuaacccauuaugcagcucaaccagggggauacuacaauggaacaagagaagacagaaacaagcugaggcaucuaauuucagucaaauugggcaaaaucccaacaguagaaaacucuauuuuccacauggcagcuuggagcggguccgcaugccaugaugguagagaauggacuuauaucggaguugauggccccgacaguaaugcauugcucaaaauaaaauauggagaagcauauacugacacauaccauuccuaugcaaaaaacauccuaaggacacaagaaagugccugcaauugcaucgggggagauuguuaucuuaugauaacugauggcccagcuucagggauuagugaaugcagauuccuuaagauucgagagggccgaauaauaaaagaaauauuuccaacaggaagaguaaaacauacugaggaaugcacaugcggauuugccagcaacaaaaccauagaaugugccuguagagauaacaguuacacagcaaaaagacccuuugucaaauuaaauguggagacugauacagcggaaauaagauugaugugcacagagacuuauuuggacacccccagaccaaaugauggaagcauaacagggccuugcgaaucuaauggggacaaagggaguggaggcaucaagggaggauuuguucaccaaagaauggcauccaagauuggaaggugguacucucgaacgaugucuaaaacuaaaagaauggggaugggacuguauguaaaguaugauggagauccauggacugacagugaagcccuugcucuuaguggaguaaugguuucaauggaagaaccugguugguauuccuuuggcuucgaaauaaaagauaagaaaugugauguccccuguauugggauagaaaugguacaugauggugggaaaacgaccuggcacucagcagcaacagccauuuacuguuuaaugggcucaggacaacugcugugggacacugucacagguguuaauaugacucuguaa

SEQ ID NO: 61165 - RNA, 1401 nt, Artificial Sequence; identical to SEQ ID NO: 60829
  derived and/or modified CDS sequence (wt) from neuraminidase__InfluenzaB__AGX16449

SEQ ID NO: 61166 - RNA, 1401 nt, Artificial Sequence
  derived and/or modified CDS sequence (wt) from neuraminidase__InfluenzaB__AGX16460
augcuaccuucaacuauacaaacguuaaccuuauuucucacaucagggggaguguuauuaucacuauaugugucagcuucauugucauacuuacuauauucggauauauugcuaaaauuuucacgaacagaaauaacugcaccaauaaugccauuggauugugcaaacgcaucaaauguucaggcugugaaccguucugcaacaaaaggggugacacuucuucucccagaaccggaguggacguacccucguuuaucuugcccgggcucaacuuuucagaaagcacuccuaauuagcccccauagauucggagaaaccaaaggaaacucagcucccuugauaauaagggaaccuuuuauugcuuguggaccaaaggaaugcaaacauuuugcucuaacucauuaugcagcucaaccagggggauacuacaauggaacaagagaagacagaaacaagcugaggcaucuaauuucagucaaauugggcaaaaucccaacaguagaaaacucuauuuuccacauggcagcuuggagcggguccgcaugccaugaugguagagaauggacuuauaucggaguugauggccccgacagcaaugcauugcucaaaauaaaauauggagaagcauauacugacacauaccauuccuaugcaaaaaacauccuaaggacacaagaaagugccugcaauugcaucgggggagauuguuaucuuaugauaacugauggcccagcuucagggauuagugaaugcagauuccuuaagauucgagagggccgaauaauaaaagaaauauuuccaacaggaagaguaaaacauacugaggaaugcacaugcggauuugccagcaacaaaaccauagaaugugccuguagagauaacaguuacacagcaaaaagacccuuugucaaauuaaauguggagacugauacagcggaaauaagauugaugugcacagagacuuauuuggacacccccagaccaaaugauggaagcauaacagggccuugcgaaucuaauggggacaaagggaguggaggcaucaagggaggauuuguucaccaaagaauggcauccaagauuggaaggugguacucucgaacgaugucuaaaacuaaaagaauggggaugggacuguauguaaaguaugauggagacccauggacugacagugaagcccuugcucuuaguggaguaaugguuucaauggaagaaccugguugguauuccuuuggcuucgaaauaaaagauaagaaaugugauguccccuguauugggauagaaaugguacaugauggugggaaaacgacuuggcacucagcagcaacagccauuuacuguuuaaugggcucaggacaacugcugugggacacugucacagguguuaauaugacucuguaa

SEQ ID NO: 61167 - RNA, 1401 nt, Artificial Sequence
  derived and/or modified CDS sequence (wt) from neuraminidase__InfluenzaB__AGX16471
augcuaccuucaacuauacaaacguuaacccuauuucucacaucagggggaguguuauuaucacuauaugugucagcuucauugucauacuuacuauauucggauauauugcuaaaauuuucacaaacagaaauaacugcaccaauaaugccauuggauugugcaaacgcaucaaauguucaggcugugaaccguucugcagcaaaaggggugacacuucuucucccagaaccggaguggacauacccucguuuaucuugcccgggcucaaccuuucagaaagcacuccuaauuagcccccauagauucggagaaaccaaaggaaacucagcucccuugauaauaagggaaccuuuuauugcuuguggaccaacggaaugcaaacacuuugcucuaacccauuaugcagcucaaccagggggauacuacaauggaacaagagaagacagaaacaagcugaggcaucuaauuucagucaaauugggcaaaaucccaacaguagaaaacuccauuuuccauauggcagcuuggagcggguccgcaugccaugaugguaaagaauggacauauaucggaguugauggccccgacaguaaugcauugcucaaaauaaaauauggagaagcauauacugacacauaccauuccuaugcaaaaaacauccuaaggacacaagaaagugccugcaauugcaucgggggagauuguuaucuuaugauaacugauggcccagcuucagggauuagugaaugcagauuccuuaagauucgagagggcagaauaauaaaagaaauauuuccaacaggaagaguaaaacauacugaggaaugcacaugcggauuugccagcaacaaaaccauagaaugugcuuguagagauaauaguuacacagcaaaaagacccuuugucaaauuaaauguggagacugauacagcggaaauaagauugaugugcacaaagacuuauuuggacacccccagaccaaaugauggaagcauaacagggccuugcgaaucugauggggacaaagggaguggaggcaucaagggaggauuuguucaucaaagaauggcauccaagauuggaaggugguacucucgaacgaugucuaaaacuagaagaauggggaugggacuguauguaaaguaugauggagacccauggacugacagugaagcccuugcucuuaguggaguaaugguuucaauggaagaaccugguugguauuccuuuggcuucgaaauaaaagauaagaaaugugauguccccuguauugggauagaaaugguacaugauggugggaaaacgacuuggcacucagcagcaacagccauuuacuguuuaaugggcucaggacaacugcugugggacaccgucacagguguugauauggcucuguaa

SEQ ID NO: 61168 - RNA, 1401 nt, Artificial Sequence
  derived and/or modified CDS sequence (wt) from neuraminidase__InfluenzaB__AGX16482
augcuaccuucaacuauacaaacguuaaccuuauuucucacaucagggggaguguuauuaucacuauaugugucagcuucauugucauacuuacuauauucggauauauugcuaaaauuuucacgaacagaaauaacugcaccaauaaugccauuggauugugcaaacgcaucaaauguucaggcugugaaccguucugcaacaaaaggggugacacuucuucucccagaaccggaguggacguacccucguuuaucuugcccgggcucaaccuuucagaaagcacuccuaauuagcccccauagauucggagaaaccaaaggaaacucagcucccuugauaauaagggaaccuuuuauugcuuguggaccaaaggaaugcaaacacuuugcucuaacccauuaugcagcucaaccagggggauacuacaauggaacaagagaagacagaaacaagcugaggcaucuaauuucagucaaauugggcaaaaucccaacaguagaaaacucuauuuuccacauggcagcuuggagcggguccgcaugccaugaugguagagaauggacuuauaucggaguugauggccccgacaguaaugcauugcucaaaauaaaauauggagaagcauauacugacacauaccauuccuaugcaaaaaacauucuaaggacacaagaaagugccugcaauugcaucgggggagauuguuaucuuaugauaacugauggcccagcuucagggauuagugaaugcagauuccuuaagauucgagagggccgaauaauaaaagaaauauuuccaacaggaagaguaaaacauacugaggaaugcacaugcggauuugccagcaacaaaaccauagaaugugccuguagagauaacaguuacacagccaaaagacccuuugucaaauuaaauguggagacugauacagcggaaauaagauugaugugcacagagacuuauuuggacacccccagaccaaaugauggaagcauaacggggccuugcgaaucuaauggggacaaagggaguggaggcaucaagggaggauuuguucaccaaagaauggcauccaagauugggaggugguacucucgaacgaugucuaaaacuaaaagaauggggaugggacuguauguaaaguaugauggagacccauggacugacagugaagcccuugcucuuaguggaguaaugguuucaauggaagaaccugguugguauuccuuuggcuucgaaauaaaagauaagaaaugugauguccccuguauugggauagaaaugguacaugauggugggaaaacgaccuggcacucagcagcaacagccauuuacuguuuaaugggcucaggacaacugcugugggacacugucacagguguuaauaugacucuguaa

SEQ ID NO: 61169 - RNA, 1401 nt, Artificial Sequence
  derived and/or modified CDS sequence (wt) from neuraminidase__InfluenzaB__AGX16493
augcuaccuucaacuauacaaacguuaacccuauuucucacaucagggggaguguuauuaucacuauaugugucagcuucauugucauacuuacuauauucggauauauugcuaaaauuuucacaaacagaaauaacugcaccaauaaugccauuggauugugcaaacgcaucaaauguucaggcugugaaccguucugcagcaaaaggggugacacuucuucucccagaaccggaguggacauacccucguuuaucuugcccgggcucaaccuuucagaaagcacuccuaauuagcccccauagauucggagaaaccaaaggaaacucagcucccuugauaauaagggaaccuuuuauugcuuguggaccaacggaauguaaacacuuugcucuaacccauuaugcagcucaaccagggggauacuacaauggaacaagagaagacagaaacaagcugaggcaucuaauuucagucaaauuggggaaaaucccaacaguagaaaacuccauuuuccauauggcagcuuggagcggguccgcaugccaugaugguaaagaauggacguauaucggaguugauggccccgacaguaaugcauuacucaaaauaaaauauggagaagcauauacugacacauaccauuccuaugcaaaaaacauccuaaggacacaagaaagugccugcaauugcaucgggggagauuguuaucuuaugauaacugauggcccagcuucagggauuagugaaugcagauuccuuaagauucgagagggccgaauaauaaaagaaauauuuccaacaggaagaguaaaacauacugaggaaugcacaugcggauuugccagcaacaaaaccauagaaugugcuuguagagauaacaguuacacagcaaaaagacccuuugucaaauuaaauguggagacugauacagcggaaauaagauugaugugcacagagacuuauuuggacacccccagaccaaaugauggaagcauaacagggccuugcgaaucugauggggacaaagggaguggaggcaucaagggaggauuuguucaucaaagaauggcauccaagauuggaaggugguacucucgaacgaugucuaaaacuaaaagaauggggaugggacuguauguaaaguaugauggagacccauggacugacagugaagcccuugcucuuaguggaguagugguuucgauggaagaaccugguugguauuccuuugguuucgaaauaaaagauaagaaaugugauguccccuguauugggauagaaaugguacaugauggugggaaaacgacuuggcacucagcagcaacagccauuuacuguuuaaugggcucaggacaacugcugugggacacugucacagguguugauauggcucuguaa

SEQ ID NO: 61170 - RNA, 1401 nt, Artificial Sequence; identical to SEQ ID NO: 60708
  derived and/or modified CDS sequence (wt) from neuraminidase__InfluenzaB__AGX16504

SEQ ID NO: 61171 - RNA, 1401 nt, Artificial Sequence
  derived and/or modified CDS sequence (wt) from neuraminidase__InfluenzaB__AGX16515
augcuaccuucaacuauacaaacauuaacccuauuucucacaucagggggaguauuauuaucacuauaugugucagcuucauugucauacuuacuauauucggauauauugcuaaaauucucaccaacagaaauaacugcaccaacaaugccauuggauugugcaaacgcaucaaauguucaggcugugaaccguucugcaacaaaaggggugacacuucuucucccagaaccggaguggacauacccgcguuuaucuugcccgggcucaaccuuucagaaagcacuccuaauuagcccucauagauucggagaaaccaaaggaaacucagcucccuugauaauaagggaaccuuuuauugcuuguggaccaaaggaaugcaaacacuuugcucuaacccauuaugcagcccaaccagggggauacuacaauggaacaagaggagacagaaacaagcugaggcaucuaauuucagucaaauugggcaaaaucccaacaguagaaaacuccauuuuccacauggcagcauggagcggguccgcaugccaugaugguaaagaauggacauauaucggaguugauggcccugacaauaaugcauugcucaaaauaaaauauggagaagcauauacugacacauaccauuccuaugcaaacaacauccuaagaacacaagaaagugccugcaauugcaucgggggaaauuguuaucuuaugauaacugauggcucagcuucagguauuagugaaugcagauuucuuaagauucgagagggccgaauaauaaaagaaauauuuccaacaggaagaguaaaacauacugaagaaugcacaugcggauuugccagcaauaaaaccauagaaugugccuguagagauaacaguuacacagcaaaaagacccuuugucaaauuaaacguggagacugauacagcagaaauaagauugaugugcacagagacuuauuuggacaccccuagaccagaugauggaagcauaacagggccuugugaaucuaauggggacaaagggaguggaggcaucaagggaggauuuguucaucaaagaauggcauccaagauuggaaggugguacucucgaacgaugucuaaaacuaaaaggauggggaugggacuguaugucaaguaugauggagacccaugggcugacagugaugcccuugcucuuaguggaguaaugguuucaauggaagaaccugguugguacuccuuuggcuucgaaauaaaagauaagaaaugugauguccccuguauugggauagagaugguacaugaugguggaaaagagacuuggcacucagcagcaacagccauuuacuguuuaaugggcucaggacagcugcugugggacacugucacagguguugauauggcucuguaa

SEQ ID NO: 61172 - RNA, 1401 nt, Artificial Sequence
  derived and/or modified CDS sequence (wt) from neuraminidase__InfluenzaB__AGX16548
augcuaccuucaacuauacaaacguuaacccuauuucucacaucagggggaguauuauuaucacuauaugugucagcuucauugucauacuuacuauauucggauauauugcuaaaauucucaccaacagaaauaacugcaccaacaaugccauuggauugugcaaacgcaucaaauguucaggcugugaaccguucugcaacaaaaggggugacacuucuucucccagaaccggaguggacauacccgcguuuaucuugcccgggcucaaccuuucagaaagcacuccuaauuagcccucauagauucggagaaaccaaaggaaacucugcucccuugauaauaagggaaccuuuuauugcuuguggaccaaaggaaugcaaacacuuugcucuaacccauuaugcagcccaaccagggggauacuacaauggaacaagaggagacagaaacaagcugaggcaucuaauuucagucaaauugggcaaaaucccaacaguagaaaacuccauuuuccacauggcagcauggagcggguccgcaugccaugaugguaaagaauggacauauaucggaguugauggcccugacaauaaugcauugcucaaaauaaaauauggagaagcauauacugacacauaccauuccuaugcaaacaacauccuaagaacacaagaaagugccugcaauugcaucgggggaaauuguuaucuuaugauaacugauggcucagcuucagguauuagugaaugcagauuucuuaagauucgagagggccgaauaauaaaagaaauauuuccaacaggaagaguaaaacauacugaagaaugcacaugcggauuugccagcaauaaaaccauagaaugugccuguagagauaacaguuacacagcaaaaagacccuuugucaaauuaaacguggagacugauacagcagaaauaagauugaugugcacagagacuuauuuggacacccccagaccagaugauggaagcauaacagggccuugugaaucuaauggggacaaugggaguggaggcaucaagggaggauuuguucaucaaagaauggcauccaagauuggaaggugguacucucgaacgaugucuaaaacuaaaaggauggggaugggacuguaugucaaguaugauggagacccaugggcugacagugaugcccuugcucuuaguggaguaaugguuucaauggaagaaccugguugguacuccuuuggcuucgaaauaaaagauaagaaaugugauguccccuguauugggauagagaugguacaugaugguggaaaagagacuuggcacucagcagcaacagccauuuacuguuuaaugggcucaggacagcugcugugggacacugucacagguguugauauggcucuguaa

SEQ ID NO: 61173 - RNA, 1401 nt, Artificial Sequence
  derived and/or modified CDS sequence (wt) from neuraminidase__InfluenzaB__AGX16559
augcuaccuucaacuauacaaacguuaacccuauuucucacaucagggggaguauuauuaucacuauaugugucagcuucauugucauacuuacuauauucggauauauugcuaaaauucucaccaacagaaauaauugcaccaacaaugccauuggauugugcaaacgcaucaaauguucaggcugugaaccguucugcaacaaaaggggugacacuucuucucccagaaccggaguggacauacccgcguuuaucuugcccgggcucaaccuuucagaaagcacuccuaauuagcccucauagauucggagaaaccaaaggaaacucagcucccuuaauaauaagggaaccuuuuauugcuuguggaccaaaggaaugcaaacacuuugcucuaacccauuaugcagcccaaccagggggauacuacaauggaacaagaggagacagaaacaagcugaggcaucuaauuucagucaaauugggcaaaaucccaacaguagaaaacuccauuuuccacauggcagcauggagcggguccgcaugccaugaugguaaagaauggacauauaucggaguugauggcccugacaauaaugcauugcucaaaauaaaauauggagaagcauauacugacacauaccauuccuaugcaaacaacauccuaagaacacaagaaagugccugcaauugcaucgggggaaauuguuaucuuaugauaacugauggcucagcuucagguauuagugaaugcagauuucuuaagauucgagagggccgaauaauaaaagaaauauuuccaacaggaagaguaaaacauacugaagaaugcacaugcggauuugccagcaauaaaaccauagaaugugccuguagagauaacaguuacacagcaaaaagacccuuugucaaauuaaacguggagacugauacagcagaaauaagguugaugugcacagagacuuauuuggacacccccagaccagaugauggaagcauaacagggccuugugaaucuaauggggacaaagggaguggaggcaucaagggaggauuuguucaucaaagaauggcauccaagauuggaaggugguacucucgaacgaugucuaaaacuaaaaggauggggaugggacuguaugucaaguaugauggagacccaugggcugacagugaugcccuugcucuuaguggaguaaugguuucaauggaagaaccugguugguacuccuuuggcuucgaaauaagagauaagaaaugugauguccccuguauugggauagagaugguacaugaugguggaaaagagacuuggcacucagcagcaacagccauuuacuguuuaaugggcucaggacagcugcugugggacacugucacagguguugauauggcucuguaa

SEQ ID NO: 61174 - RNA, 1401 nt, Artificial Sequence
  derived and/or modified CDS sequence (wt) from neuraminidase__InfluenzaB__AGX16581
augcuaccuucaacuauacaaacguuaacccuauuucucacaucagggggaguauuauuaucacuauaugugucagcuucauugucauacuuauuauauucggauauauugcuaaaauucucaccaacagaaauaauugcaccaacaaugccauuggauugugcaaacgcaucaaauguucaggcugugaaccguucugcaacaaaaggggugacacuucuucucccagaaccggaguggacauacccgcguuuaucuugcccgggcucaaccuuucagaaagcacuccuaauuagcccucauagauucggagaaaccaaaggaaacucagcucccuugauaauaagggaaccuuuuauugcuuguggaccaaaggaaugcaaacacuuugcucuaacccauuaugcagcccaaccagggggauacuacaauggaacaagaggagacagaaacaagcugaggcaucuaauuucagucaaauugggcaaaaucccaacaguagaaaacuccauuuuccacauggcagcauggagcggguccgcaugccaugaugguaaagaauggacauauaucggaguugauggcccugacaauaaugcauugcucaaaauaaaauauggagaagcauauacugacacauaccauuccuaugcaaacaacauccuaagaacacaagaaagugccugcaauugcaucgggggaaauuguuaucuuaugauaacugauggcucagcuucagguauuagugaaugcagauuucuuaagauucgagagggccgaauaauaaaagaaauauuuccaacaggaagaguaaaacauacugaagaaugcacaugcggauuugccagcaauaaaaccauagaaugugccuguagagauaacaguuacacagcaaaaagacccuuugucaaauuaaacguggagacugauacagcagaaauaagauugaugugcacagagacuuauuuggacacccccagaccagaugauggaagcauaacagggccuugugaaucuaauggggacaaagggaguggaggcaucaagggaggauuuguucaucaaagaauggcauccaagauuggaaggugguacucucgaacgaugucuaaaaccaaaaggauggggaugggacuguaugucaaguaugauggagacccaugggcugacagugaugcccuugcucuuaguggaguaaugguuucaauggaagaaccugguugguacuccuuuggcuucgaaauaaaagauaagaaaugugauguccccuguauugggauagagaugguacaugaugguggaaaggagacuuggcacucagcagcaacagccauuuacuguuuaaugggcucaggacagcugcugugggacacugucacagguguugauauggcucuguaa

SEQ ID NO: 61175 - RNA, 1401 nt, Artificial Sequence; identical to SEQ ID NO: 61174
  derived and/or modified CDS sequence (wt) from neuraminidase__InfluenzaB__AGX16592

SEQ ID NO: 61176 - RNA, 1401 nt, Artificial Sequence
  derived and/or modified CDS sequence (wt) from neuraminidase__InfluenzaB__AGX16603
augcuaccuucaacuauacaaacguuaacccuauuucucacaucagggggaguauuauuaucacuauaugugucagcuucauugucauacuuacuauauucggauauauugcuaaaauucucaccaacagaaauaacugcaccaacaaugccauuggauugugcaaacgcaucaaauguucaggcugugaaccguucugcaacaaaaggggugacacuucuucucccagaaccggaguggacauacccgcguuuaucuugcccgggcucaaccuuucagaaagcacuccuaauuagcccucauagauucggagaaaccaaaggaaacucugcucccuugauaauaagggaaccuuuuauugcuuguggaccaaaggaaugcaaacacuuugcucuaacccauuaugcagcccaaccagggggauacuacaauggaacaagaggagacagaaacaagcugaggcaucuaauuucagucaaauugggcaaaaucccaacaguagaaaacuccauuuuccacauggcagcauggagcggguccgcaugccaugaugguaaagaauggacauauauuggaguugauggcccugacaauaaugcauugcucaaaauaaaauauggagaagcauauacugacacauaccauuccuaugcaaacaacauccuaagaacacaagaaagugccugcaauugcaucgggggaaauuguuaucuuaugauaacugauggcucagcuucagguauuagugaaugcagauuucuuaagauucgagagggccgaauaauaaaagaaauauuuccaacaggaagaguaaaacauacugaagaaugcacaugcggauuugccagcaauaaaaccauagaaugugccuguagagauaacaguuacacagcaaaaagacccuuugucaaauuaaacguggagacugauacagcagaaauaagauugaugugcacagagacuuauuuggacacccccagaccagaugauggaagcauaacagggccuugugagucuaauggggacaaagggaguggaggcaucaagggaggauuuguucaucaaagaauggcauccaagauuggaaggugguacucucgaacgaugucuaaaacuaaaaggauggggaugggacuguaugucaaguaugauggagacccaugggcugacagugaugcccuugcucuuaguggaguaaugguuucaauggaagaaccugguugguacuccuuuggcuucgaaauaaaagauaagaaaugugauguccccuguauugggauagagaugguacaugaugguggaaaagagacuuggcacucagcagcaacagccauuuacuguuuaaugggcucaggacagcugcugugggacacugucacagguguugauauggcucuguaa

SEQ ID NO: 61177 - RNA, 1401 nt, Artificial Sequence; identical to SEQ ID NO: 60694
  derived and/or modified CDS sequence (wt) from neuraminidase__InfluenzaB__AGX16614

SEQ ID NO: 61178 - RNA, 1401 nt, Artificial Sequence; identical to SEQ ID NO: 61172
  derived and/or modified CDS sequence (wt) from neuraminidase__InfluenzaB__AGX16625

SEQ ID NO: 61179 - RNA, 1401 nt, Artificial Sequence
  derived and/or modified CDS sequence (wt) from neuraminidase__InfluenzaB__AGX16636
augcuaccuucaacuauacaaacguuaacccuauuucucacaucagggggaguauuauuaucacuauaugugucagcuucauugucauacuuauuauauucggauauauugcuaaaauucucaccaacagaaauaauugcaccaacaaugccauuggauugugcaaacgcaucaaauguucaggcugugaaccguucugcaacaaaaggggugacacuucuucucccagaaccggaguggacauacccgcguuuaucuugcccgggcucaaccuuucagaaagcacuccuaauuagcccucauagauucggagaaaccaaaggaaacucagcucccuugauaauaagggaaccuuuuauugcuuguggaccaaaggaaugcaaacacuuugcucuaacccauuaugcagcccaaccagggggauacuacaauggaacaagaggagacagaaacaagcugaggcaucuaauuucagucaaauugggcaaaaucccaacaguagaaaacuccauuuuccacauggcagcauggagcggguccgcaugccaugaugguaaagaauggacauauaucggaguugauggcccugacaauaaugcauugcucaaaauaaaauauggagaagcauauacugacacauaccauuccuaugcaaacaacauccuaagaacacaagaaagugccugcaauugcaucgggggaaauuguuaucuuaugauaacugauggcucagcuucagguauuagugaaugcagauuucuuaagauucgagagggccgaauaauaaaagaaauauuuccaacaggaagaguaaaacauacugaagaaugcacaugcggauuugccagcaauaaaaccauagaaugugccuguagagauaacaguuacacagcaaaaagacccuuugucaaauuaaacguggagacugauacagcagaaauaagauugaugugcacagagacuuauuuggacacccccagaccagaugauggaagcauaacagggccuugugaaucuaauggggacaaagggaguggaggcaucaagggaggauuuguucaucaaagaauggcauccaagauuggaaggugguacucucgaacgaugucuaaaaccaaaaggauggggaugggacuguaugucaaguaugauggagacccaugggcugacagugaugcccuugcucuuaguggaguaaugguuucaauggaagaaccugguugguacuccuuuggcuucgaaauaaaagauaagaaaugugauguccccuguauugggauagagaugguacaugaugguggaaaggagacuuggcacucagcagcaacagccauuuacuguuuaaugggcucaggacagcugcuguggaacacugucacagguguugauauggcucuguaa

SEQ ID NO: 61180 - RNA, 1401 nt, Artificial Sequence; identical to SEQ ID NO: 60626
  derived and/or modified CDS sequence (wt) from neuraminidase__InfluenzaB__AGX16647

SEQ ID NO: 61181 - RNA, 1401 nt, Artificial Sequence; identical to SEQ ID NO: 61174
  derived and/or modified CDS sequence (wt) from neuraminidase__InfluenzaB__AGX16658

SEQ ID NO: 61182 - RNA, 1401 nt, Artificial Sequence
  derived and/or modified CDS sequence (wt) from neuraminidase__InfluenzaB__AGX16669
augcuaccuucaacuauacaaacauuaacccuauuucucacaucagggggaguauuauuaucacuauaugugucagcuucauugucauacuuacuauauucggauauauugcuaaaauucucaccaacagaaauaacugcaccaacaaugccauuggauugugcaaacgcaucaaauguucaggcugugaaccguucugcaacaaaaggggugacacuucuucucccagaaccggaguggacauacccgcguuuaucuugcccgggcucaaccuuucagaaagcacuccuaauuagcccucauagauucggagaaaccaaaggaaacucagcucccuugauaauaagggaaccuuuuauugcuuguggaccaaaggaaugcaaacacuuugcucuaacccauuaugcagcccaaccagggggauacuacaauggaacaagaggagacagaaacaagcugaggcaucuaauuucagucaaauugggcaaaaucccaacaguagaaaacuccauuuuccacauggcagcauggagcggguccgcaugccaugaugguaaagaauggacauauaucggaguugauggcccugacaauaaugcauugcucaaaauaaaauauggagaagcauauacugacacauaccauuccuaugcaaacaacauccuaagaacacaagaaagugccugcaauugcaucgggggaaauuguuaucuuaugauaacugauggcucagcuucagguauuagugaaugcagauuucuuaagauucgagagggccgaauaauaaaagaaauauuuccaacaggaagaguaaaacauacugaagaaugcacaugcggauuugccagcaauaaaaccauagaaugugccuguagagauaacaguuacacagcaaaaagacccuuugucaaauuaaacguggagacugauacagcagaaauaagauugaugugcacagagacuuauuuggacacccccagaccagaugauggaagcauaacagggccuugugagucuaauggggacaaagggaguggaggcaucaagggaggauuuguucaucaaagaauggcauccaagauuggaaggugguacucucgaacgaugucuaaaacuaaaaggauggggaugggacuguaugucaaguaugauggagacccaugggcugacagugaugcccuugcucuuaguggaguaaugguuucaauggaagaaccugguugguacuccuuuggcuucgaaauaaaagauaagaaaugugauguccccuguauugggauagagaugguacaugaugguggaaaagagacuuggcacucagcagcaacagccauuuacuguuuaaugggcucaggacagcugcugugggacacugucacagguguugauauggcucuguaa

SEQ ID NO: 61183 - RNA, 1401 nt, Artificial Sequence; identical to SEQ ID NO: 60694
  derived and/or modified CDS sequence (wt) from neuraminidase__InfluenzaB__AGX16680

SEQ ID NO: 61184 - RNA, 1401 nt, Artificial Sequence
  derived and/or modified CDS sequence (wt) from neuraminidase__InfluenzaB__AGX16691
augcuaccuucaacuauacaaacguuaacccuauuucucacaucagggggaguauuauuaucacuauaugugucagcuucauugucauacuuacuauauucggauauauugcuaaaauucucaccaacagaaauaacugcaccaacaaugccauuggauugugcaaacgcaucaaauguucaggcugugaaccguucugcaacaaaaggggugacacuucuucucccagaaccggaguggacauacccgcguuuaucuugcccgggcucaaccuuucagaaagcacuccuaauuagcccucauagauucggagaaaccaaaggaaacucugcucccuugauaauaagggaaccuuuuauugcuuguggaccaaaggaaugcaaacacuuugcucuaacccauuaugcagcccaaccagggggauacuacaauggaacaagaggagacagaaacaagcugaggcaucuaauuucagucaaauugggcaaaaucccaacaguagaaaacuccauuuuccacauggcagcauggagcggguccgcaugccaugaugguaaagaauggacauauaucggaguugauggcccugacaauaaugcauugcucaaaauaaaauauggagaagcauauacugacacauaccauuccuaugcaaacaacauccuaagaacacaagaaagugccugcaauugcaucgggggaaauuguuaucuuaugauaacugauggcucagcuucagguauuagugaaugcagauuucuuaagauucgagagggccgaauaauaaaagaaauauuuccaacaggaagaguaaaacauacugaagaaugcacaugcggauuugccagcaauaaaaccauagaaugugccuguagagauaacaguuacacagcaaaaagacccuuugucaaauuaaacguggagacugauacagcagaaauaagauugaugugcacagagacuuauuuggacacccccagaccagaugauggaagcauaacagggccuugugagucuaauggggacaaagggaguggaggcaucaagggaggauuuguucaucaaagaauggcauccaagauuggaaggugguacucucgaacgaugucuaaaacuaaaaggauggggaugggacuguaugucaaguaugauggagacccaugggcugacagugaugcccuugcucuuaguggaguaaugguuucaauggaagaaccugguugguacuccuuuggcuucgaaauaaaagauaagaaaugugauguccccuguauugggauagagaugguacaugaugguggaaaagagacuuggcacucagcagcaacagccauuuacuguuuaaugggcucaggacagcugcugugggacacugucacagguguugauauggcucuguaa

SEQ ID NO: 61185 - RNA, 1401 nt, Artificial Sequence
  derived and/or modified CDS sequence (wt) from neuraminidase__InfluenzaB__AGX16702
augcuaccuucaacuauacaaacguuaacccuauuucucacaucagggggaguauuauuaucacuauaugugucagcuucauugucauacuuacuauauucggauauauugcuaaaauucucaccaacagaaauaacugcaccaacaaugccauuggauugugcaaacgcaucaaauguucaggcugugaaccguucugcaacaaaaggggugacacuucuucucccagaaccggaguggacauacccgcguuuaucuugcccgggcucaaccuuucagaaagcacuccuaauuagcccucauagauucggagaaaccaaaggaaacucugcucccuugauaauaagggaaccuuuuauugcuuguggaccaaaggaaugcaaacacuuugcucuaacccauuaugcagcccaaccagggggauacuacaauggaaaaagaggagacagaaacaagcugaggcaucuaauuucagucaaauugggcaaaaucccaacaguagaaaacuccauuuuccacauggcagcauggagcggguccgcaugccaugaugguaaagaauggacauauauuggaguugauggcccugacaauaaugcauugcucaaaauaaaauauggagaagcauauacugacacauaccauuccuaugcaaacaacauccuaagaacacaagaaagugccugcaauugcaucgggggaaauuguuaucuuaugauaacugauggcucagcuucagguauuagugaaugcagauuucuuaagauucgagagggccgaauaauaaaagaaauauuuccaacaggaagaguaaaacauacugaagaaugcacaugcggauuugccagcaauaaaaccauagaaugugccuguagagauaacaguuacacagcaaaaagacccuuugucaaauuaaacguggagacugauacagcagaaauaagauugaugugcacagagacuuauuuggacacccccagaccagaugauggaagcauaacagggccuugugagucuaauggggacaaagggaguggaggcaucaagggaggauuuguucaucaaagaauggcauccaagauuggaaggugguacucucgaacgaugucuaaaacuaaaaggauggggaugggacuguaugucaaguaugauggagacccaugggcugacagugaugcccuugcucuuaguggaguaaugguuucaauggaagaaccugguugguacuccuuuggcuucgaaauaaaagauaagaaaugugauguccccuguauugggauagagaugguacaugaugguggaaaagagacuuggcacucagcagcaacagccauuuacuguuuaaugggcucaggacagcugcugugggacacugucacagguguugauauggcucuguaa

SEQ ID NO: 61186 - RNA, 1401 nt, Artificial Sequence
  derived and/or modified CDS sequence (wt) from neuraminidase__InfluenzaB__AGX16713
augcuaccuucaacuauacaaacguuaacccuauuucucacaucagggggaguauuauuaucacuauaugugucagcuucauugucauacuuacuauauucggauauauugcuaaaauucucaccaacagaaauaacugcaccaacaaugccauuggauugugcaaacgcaucaaauguucaggcugugaaccguucugcaacaaaaggggugacacuucuucucccagaaccggaguggacauacccgcguuuaucuugcccgggcucaaucuuucagaaagcacuccuaauuagcccucauagauucggagaaaccaaaggaaacucagcucccuugauaauaagggaaccuuuuauugcuuguggaccaaaggaaugcaaacacuuugcucuaacccauuaugcagcccaaccagggggauacuacaauggaacaagaggagacagaaacaagcugaggcaucuaauuucagucaaauugggcaaaaucccaacaguagaaaacuccauuuuccacauggcagcauggagcggguccgcaugccaugaugguaaagaauggacauauaucggaguugauggcccugacaauaaugcauugcucaaaauaaaauauggagaagcauauacugacacauaccauuccuaugcaaacaacauccuaagaacacaagaaagugccugcaauugcaucgggggaaauuguuaucuuaugauaacugauggcucagcuucagguauuagugaaugcagauuucuuaagauucgagagggccgaauaauaaaagaaauauuuccaacaggaagaguaaaacauacugaagaaugcacaugcggauuugccagcaauaaaaccauagaaugugccuguagagauaacaguuacacagcaaaaagacccuuugucaaauuaaacguggagacugauacagcagaaauaagauugaugugcacagagacuuauuuggacacccccagaccagaugauggaagcauaacagggccuugugaaucuaauggggacaaagggaguggaggcaucaagggaggauuuguucaucaaagaauggcauccaagauuggaaggugguacucucgaacgaugucuaaaacuaaaaggauggggaugggacuguaugucaaguaugauggagacccaugggcugacagugaugcccuugcucuuaguggaguaaugguuucaauggaagaaccugguugguacuccuuuggcuucgaaauaagagauaagaaaugugauguccccuguauugggauagagaugguacaugaugguggaaaagagacuuggcacucagcagcaacagccauuuacuguuuaaugggcucaggacagcugcugugggacacugucacagguguugauauggcucuguaa

SEQ ID NO: 61187 - RNA, 1401 nt, Artificial Sequence
  derived and/or modified CDS sequence (wt) from neuraminidase__InfluenzaB__AGX16724
augcuaccuucaacuauacaaacguuaacccuauuucucacaucagggggaguauuauuaucacuauaugugucagcuucauugucauacuuacuauauucggauauauugcuaaaauucucaccaacagaaauaacugcaccaacaaugccauuggauugugcaaacgcaucaaauguucaggcugugaaccguucugcaacaaaaggggugacacuucuucucccagaaccggaguggacauacccgcguuuaucuugcccgggcucaaccuuucagaaagcacuccuaauuagcccucauagauucggagaaaccaaaggaaacucugcucccuugauaauaagggaaccuuuuauugcuuguggaccaaaggaaugcaaacacuuugcucuaacccauuaugcagcccaaccagggggauacuacaauggaacaagaggagacagaaacaagcugaggcaucuaauuucagucaaauugggcaaaaucccaacaguagaaaacuccauuuuccacauggcagcauggagcggguccgcaugccaugaugguaaagaauggacauauaucggaguugauggcccugacaauaaugcauugcucaaaauaaaauauggagaagcauauacugacacauaccauuccuaugcaaacaacauccuaagaacacaagaaagugccugcaauugcaucgggggaaauuguuaucuuaugauaacugauggcucagcuucagguauuagugaaugcagauuucuuaagauucgagagggccgaauaauaaaagaaauauuuccaacaggaagaguaaaacauacugaagaaugcacaugcggauuugccagcaauaaaaccauagaaugugccuguagagauaacaguuacacagcaaaaagacccuuugucaaauuaaacguggagacugauacagcagaaauaagauugaugugcacagagacuuauuuggacacccccagaccagaugauggaagcauaacagggccuugugaaucuaauggggacaaagggaguggaggcaucaagggaggauuuguucaucaaagaauggcauccaagauuggaaggugguacucucgaacgaugucuaaaacuaaaaggauggggaugggacuguaugucaaguaugauggagacccaugggcugacagugaugcccuugcucuuaguggaguaaugguuucaauggaagaaccugguugguacuccuuuggcuucgaaauaaaagauaagaaaugugauguccccuguauugggauagagaugguacaugaugguggaaaagagacuuggcacucagcagcaacagccauuuacuguuuaaugggcucaggacagcugcugugggacacugucacagguguugauauggcucuguaa

SEQ ID NO: 61188 - RNA, 1401 nt, Artificial Sequence; identical to SEQ ID NO: 61174
  derived and/or modified CDS sequence (wt) from neuraminidase__InfluenzaB__AGX16735

SEQ ID NO: 61189 - RNA, 1401 nt, Artificial Sequence
  derived and/or modified CDS sequence (wt) from neuraminidase__InfluenzaB__AGX16746
augcuaccuucaacuauacaaacguuaacccuauuucuuacaucagggggaguauuauuaucacuauaugugucagcuucauugucauacuuauuauauucggauauauugcuaaaauucucaccaacagaaauaauugcaccaacaaugccauuggauugugcaaacgcaucaaauguucaggcugugaaccguucugcaacaaaaggggugacacuucuucucccagaaccggaguggacauacccgcguuuaucuugcccgggcucaaccuuucagaaagcacuccuaauuagcccucauagauucggagaaaccaaaggaaacucagcucccuugauaauaagggaaccuuuuauugcuuguggaccaaaggaaugcaaacacuuugcucuaacccauuaugcagcccaaccagggggauacuacaauggaacaagaggagacagaaacaagcugaggcaucuaauuucagucaaauugggcaaaaucccaacaguagaaaauuccauuuuccacauggcagcauggagcggguccgcaugccaugaugguaaagaauggacauauaucggaguugauggcccugacaauaaugcauugcucaaaauaaaauauggagaagcauauacugacacauaccauuccuaugcaaacaacauccuaagaacacaagaaagugccugcaauugcaucgggggaaauuguuaucuuaugauaacugauggcucagcuucagguauuagugaaugcagauuucuuaagauucgagagggccgaauaauaaaagaaauauuuccaacaggaagaguaaaacauacugaagaaugcacaugcggauuugccagcaauaaaaccauagaaugugccuguagagauaacaguuacacagcaaaaagacccuuugucaaauuaaacguggagacugauacagcagaaauaagauugaugugcacagagacuuauuuggacacccccagaccagaugauggaagcauaacagggccuugugaaucuaauggggacaaaggaaguggaggcaucaagggaggauuuguucaucaaagaauggcauccaagauuggaaggugguacucucgaacgaugucuaaaaccaaaaggauggggaugggacuguaugucaaguaugauggagacccaugggcugacagugaugcccuugcucuuaguggaguaaugguuucaauggaagaaccugguugguacuccuuuggcuucgaaauaaaagauaagaaaugugauguccccuguauugggauagagaugguacaugaugguggaaaggagacuuggcacucagcagcaacagccauuuacuguuuaaugggcucaggacagcugcugugggacacugucacagguguugauauggcucuguaa

SEQ ID NO: 61190 - RNA, 1401 nt, Artificial Sequence; identical to SEQ ID NO: 61182
  derived and/or modified CDS sequence (wt) from neuraminidase__InfluenzaB__AGX16757

SEQ ID NO: 61191 - RNA, 1401 nt, Artificial Sequence
  derived and/or modified CDS sequence (wt) from neuraminidase__InfluenzaB__AGX16768
augcuaccuucaacuauacaaacguuaacccuauuucucacaucagggggaguauuauuaucacuauaugugucagcuucauugucauacuuauuauauucggauauauugcuaaaauucucaccaacagaaauaauugcaccaacaaugccauuggauugugcaaacgcaucaaauguucaggcugugaaccguucugcaacaaaaggggugacacuucuucucccagaaccggaguggacauacccgcguuuaucuugcccgggcucaaccuuucagaaagcacuccuaauuagcccucauagauucggagaaaccaaaggaaacucagcucccuugauaauaagggaaccuuuuauugcuuguggaccaaaggaaugcaaacacuuugcucuaacccauuaugcagcccaaccagggggauacuacaauggaacaagaggagacagaaacaagcugaggcaucuaauuucagucaaauugggcaaaaucccaacaguagaaaacuccauuuuccacauggcagcauggagcggguccgcaugccaugaugguaaagaauggacauauaucggaguugauggcccugacaauaaugcauugcucaaaauaaaauauggagaagcauauacugacacauaccauuccuaugcaaacaacauccuaagaacacaagaaagugccugcaauugcaucgggggaaauuguuaucuuaugauaacugauggcucagcuucagguauuagugaaugcagauuucuuaagauucgagagggccgaauaauaaaagaaauauuuccaacaggaagaguaaaacauacugaagaaugcacaugcggauuugccagcaauaaaaccauagaaugugccuguagagauaacaguuacacagcaaaaagacccuuugucaaauuaaacguggagacugauacagcagaaauaagauugaugugcacagagacuuauuuggacacccccagaccagaugauggaagcauaacagggccuuguaaaucuaauggggacaaagggaguggaggcaucaagggaggauuuguucaucaaagaauggcauccaagauuggaaggugguacucucgaacgaugucuaaaaccaaaaggauggggaugggacuguaugucaaguaugauggagacccaugggcugacagugaugcccuugcucuuaguggaguaaugguuucaauggaagaaccugguugguacuccuuuggcuucgaaauaaaagauaagaaaugugauguccccuguauugggauagagaugguacaugaugguggaaaggagacuuggcacucagcagcaacagccauuuacuguuuaaugggcucaggacagcugcugugggacacugucacagguguugauauggcucuguaa

SEQ ID NO: 61192 - RNA, 1401 nt, Artificial Sequence; identical to SEQ ID NO: 60694
  derived and/or modified CDS sequence (wt) from neuraminidase__InfluenzaB__AGX16779

SEQ ID NO: 61193 - RNA, 1401 nt, Artificial Sequence
  derived and/or modified CDS sequence (wt) from neuraminidase__InfluenzaB__AGX16790
augcuaccuucaacuauacaaacguuaacccuauuucucacaucagggggaguauuauuaucacuauaugugucagcuucauugucauacuuacuauauucggauauauugcuaaaauucucaccaacagaaauaacugcaccaacaaugccauuggauugugcaaacgcaucaaauguucaggcugugaaccguucugcaacaaaaggggugacacuucuucucccagaaccggaguggacauacccgcguuuaucuugcccgggcucaaccuuucagaaagcacuccuaauuagcccucauagauucggagaaaccaaaggaaacucagcucccuugauaauaagggaaccuuuuauugcuuguggaccaaaggaaugcaaacacuuugcucuaacccauuaugcagcccaaccagggggauacuacaauggaacaagaggaggcagaaacaagcugaggcaucuaauuucagucaaauugggcaaaaucccaacaguagaaaacuccauuuuccacauggcagcauggagcggguccgcaugccaugaugguaaagaauggacauauaucggaguugauggcccugacaauaaugcauugcucaaaauaaaauauggagaagcauauacugacacauaccauuccuaugcaaacaacauccuaagaacacaagaaagugccugcaauugcaucgggggaaauuguuaucuuaugauaacugauggcucagcuucagguauuagugaaugcagauuucuuaagauucgagagggccgaauaauaaaagaaauauuuccaacaggaagaguaaaacauacugaagaaugcacaugcggauuugccagcaauaaaaccauagaaugugccuguagagauaacaguuacacagcaaaaagacccuuugucaaauuaaacguggagacugauacagcagaaauaagauugaugugcacagagacuuauuuggacacccccagaccagaugauggaagcauaacagggccuugugaaucuaauggggacaaagggaguggaggcaucaagggaggauuuguucaucaaagaauggcauccaagauuggaaggugguacucucgaacgaugucuaaaacuaaaaggauggggaugggacuguaugucaaguaugauggagacccaugggcugacagugaugcccuugcucuuaguggaguaaugguuucaauggaagaaccugguugguacuccuuuggcuucgaaauaagagauaagaaaugugauguccccuguauugggauagagaugguacaugaugguggaaaagagacuuggcacucagcagcaacagccauuuacuguuuaaugggcucaggacagcugcugugggacacugucacagguguugauauggcucuguaa

SEQ ID NO: 61194 - RNA, 1401 nt, Artificial Sequence
  derived and/or modified CDS sequence (wt) from neuraminidase__InfluenzaB__AGX16801
augcuaccuucaacuauacaaacguuaacccuauuucucacaucagggggaguauuauuaucacuauaugugucagcuucauugucauacuuauuauauucggauauauugcuaaaauucucaccaacagaaauaauugcaccaacaaugccauuggauugugcaaacgcaucaaauguucaggcugugaaccguucugcaacaaaaggggugacacuucuucucccagaaccggaguggacauacccgcguuuaucuugcccgggcucaaccuuucagaaagcacuccuaauuagcccucauagauucggagaaaccaaaggaaacucagcucccuugauaauaagggaaccuuuuauugcuuguggaccaaaggaaugcaaacacuuugcucuaacccauuaugcagcccaaccagggggauacuacaauggaacaagaggagacagaaacaagcugaggcaucuaauuucagucaaauugggcaaaaucccaacaguagaaaacuccauuuuccacauggcagcauggagcggguccgcaugccaugaugguaaagaauggacauauaucggaguugauggcccugacaauaaugcauugcucaaaauaaaauauggagaagcauauacugacacauaccauuccuaugcaaacaacauccuaagaacacaagaaagugccugcaauugcaucgggggaaauuguuaucuuaugauaacugauggcucagcuucagguauuagugaaugcagauuucuuaagauucgagagggccgaauaauaaaagaaauauuuccaacaggaagaguaaaacauacugaagaaugcacaugcggauuugccagcaauaaaaccauagaaugugccuguagagauaacaguuacacagcaaaaagacccuuugucaaauuaaacguggagacugauacagcagaaauaagauugaugugcacagagacuuauuuggacacccccagaccaaaugauggaagcauaacagggccuugugaaucuaauggggacaaagggaguggaggcaucaagggaggauuuguucaucaaagaauggcauccaagauuggaaggugguacucucgaacgaugucuaaaaccaaaaggauggggaugggacuguaugucaaguaugauggagacccaugggcugacagugaugcccuugcucuuaguggaguaaugguuucaauggaagaaccugguugguacuccuuuggcuucgaaauaaaagauaagaaaugugauguccccuguauugggauagagaugguacaugaugguggaaaggagacuuggcacucagcagcaacagccauuuacuguuuaaugggcucaggacagcugcugugggacacugucacagguguugauauggcucuguaa

SEQ ID NO: 61195 - RNA, 1401 nt, Artificial Sequence
  derived and/or modified CDS sequence (wt) from neuraminidase__InfluenzaB__AGX16812
augcuaccuucaacuauacaaacguuaacccuauuucucacaucagggggaguauuauuaucacuauaugugucagcuucauugucauacuuacuauauucggauauauugcuaaaauucucaccaacagaaauaacugcaccaacaaugccauuggauugugcaaacgcaucaaauguucaggcugugaaccguucugcaacaaaaggggugacacuucuucucccagaaccggaguggacauacccgcguuuaucuugcccgggcucaaccuuucagaaagcacuccuaauuagcccucauagauucggagaaaccaaaggaaacucugcucccuugauaauaagggaaccuuuuauugcuuguggaccaaaggaaugcaaacacuuugcucuaacccauuaugcagcccaaccagggggauacuacaauggaacaagaggagacagaaacaagcugaggcaucuaauuucagucaaauugggcaaaaucccaacaguagaaaacuccauuuuccacauggcagcauggagcggguccgcaugccaugaugguaaagaauggacauauauuggaguugauggcccugacaauaaugcauugcucaaaauaaaauauggagaagcauauacugacacauaccauuccuaugcaaacaacauccuaagaacacaagaaagugccugcaauugcaucgggggaaauuguuaucuuaugauaacugauggcucagcuucagguauuagugaaugcagauuucuuaagauucgagagggucgaauaauaaaagaaauauuuccaacaggaagaguaaaacauacugaagaaugcacaugcggauuugccagcaauaaaaccauagaaugugccuguagagauaacaguuacacagcaaaaagacccuuugucaaauuaaacguggagacugauacagcagaaauaagauugaugugcacagagacuuauuuggacacccccagaccagaugauggaagcauaacagggccuugugagucuaauggggacaaagggaguggaggcaucaagggaggauuuguucaucaaagaauggcauccaagauuggaagaugguacucucgaacgaugucuaaaacuaaaaggauggggaugggacuguaugucaaguaugauggagacccaugggcugacagugaugcccuugcucuuaguggaguaaugguuucaauggaagaaccugguugguacuccuuuggcuucgaaauaaaagauaagaaaugugauguccccuguauugggauagagaugguacaugaugguggaaaagagacuuggcacucagcagcaacagccauuuacuguuuaaugggcucaggacagcugcugugggacacugucacagguguugauauggcucuguaa

SEQ ID NO: 61196 - RNA, 1401 nt, Artificial Sequence
  derived and/or modified CDS sequence (wt) from neuraminidase__InfluenzaB__AGX16823
augcuaccuucaacuauacaaacguuaacccuauuucucacaucagggggaguauuauuaucacuauaugugucagcuucauugucauacuuauuauauucggauauauugcuaaaauucucaccaacagaaauaacugcaccaacaaugccauuggauugugcaaacgcaucaaauguucaagcugugaaccguucugcaacaaaaggggugacacuucuucucccagaaccggaguggacauacccgcguuuaucuugcccgggcucaaccuuucagaaagcacuccuaauuagcccucauagauucggagaaaccaaaggaaacucagcucccuugauaauaagggaaccuuuuauugcuuguggaccaaaagaaugcaaacacuuugcucuaacccauuaugcagcccaaccagggggauacuacaauggaacaagaggagacagaaacaagcugaggcaucuaauuucagucaaauugggcaaaaucccaacaguagaaaacuccauuuuccacauggcagcauggagcggguccgcaugccaugaugguaaagaauggacauauaucggaguugauggcccugacaauaaugcauugcucaaaauaaaauauggagaagcauauacugacacauaccauuccuaugcaaacaacauccuaagaacacaagaaagugccugcaauugcaucgggggaaauuguuaucuuaugauaacugauggcucagcuucagguauuagugaaugcagauuucuuaagauucgagagggccgaauaauaaaagaaauauuuccaacaggaagaguaaaacauacugaagaaugcacaugcggauuugccagcaauaaaaccauagaaugugcuuguagagauaacaguuacacagcaaaaagacccuuugucaaauuaaacguggagacugauacagcagaaauaagauugaugugcacagagacuuauuuggacacccccagaccagcugauggaagcauaacagggccuugugaaucuaauggggacaaagggaguggaggcaucaagggaggauuuguucaucaaagaauggcauccaagauuggaaggugguacucucgaacgaugucuaaaaccaaaaggauggggaugggacuguaugucaaguaugauggagacccaugggcugacagugaugcccuugcucuuaguggaguaaugguuucaauggaagaaccugguugguacuccuuuggcuucgaaauaaaagauaagaaaugugauguccccuguauugggauagagaugguacaugaugguggaaaggagacuuggcacucagcagcaacagccauuuacuguuuaaugggcucaggacagcugcugugggacacugucacagguguugauauggcucuguaa

SEQ ID NO: 61197 - RNA, 1401 nt, Artificial Sequence; identical to SEQ ID NO: 61176
  derived and/or modified CDS sequence (wt) from neuraminidase__InfluenzaB__AGX16834

SEQ ID NO: 61198 - RNA, 1401 nt, Artificial Sequence
  derived and/or modified CDS sequence (wt) from neuraminidase__InfluenzaB__AGX16845
augcuaccuucaacuauacaaacguuaacccuauuucucacaucagggggaguauuauuaucacuauaugugucagcuucauugucauacuuauuauauucggauauauugcuaaaauucucaccaacagaaauaacuacaccaacaaugccauuggauugugcaaacgcaucaaauguucaggcugugaaccguucugcaacaaaaggggugacacuucuucucccagaaccggaguggacauacccgcguuuaucuugcccgggcucaaccuuucagaaagcacuccuaguuagcccucauagauucggagaaaccaaaggaaacucagcucccuugauaauaagggaaccuuuuauugcuuguggaccaaaggaaugcaaacacuuugcucuaacccauuaugcagcccaaccagggggauacuacaauggaacaagaggagacagaaacaagcugaggcaucuaauuucagucaaauugggcaaaaucccaacaguagaaaacuccauuuuccacauggcagcauggagcggguccgcaugccaugaugguaaagaauggacauauaucggaguugauggcccugacaauaaugcauugcucaaaauaaaauauggagaagcauauacugacacauaccauuccuaugcaaacaacauccuaagaacacaagaaagugccugcaauugcaucgggggaaauuguuaucuuaugauaacugauggcucagcuucagguauuagugaaugcagauuucuuaagauucgagagggccgaauaauaaaagaaauauuuccaacaggaagaguaaaacauacugaagaaugcacaugcggauuugccagcaauaaaaccauagaaugugccuguagagauaacaguuacacagcaaaaagacccuuugucaaauuaaacguggagacugauacagcagaaauaagauugaugugcacagagacuuauuuggacacccccagaccagaugauggaagcauaacagggccuugugaaucuaauggggacaaagggaguggaggcaucaagggaggauuuguucaucaaagaauggcauccaagauuggaaggugguauucucgaacgaugucuaaaaccaaaaggauggggaugggacuguaugucaaguaugauggagacccaugggcugacagugaugcccuugcucuuaguggaguaaugguuucaauggaagaaccugguugguacuccuuuggcuucgaaauaaaagauaagaaaugugauguccccuguauugggauagagaugguacaugaugguggaaaggagacuuggcacucagcagcaacagccauuuacuguuuaaugggcucaggacagcugcugugggacacugucacagguguugauauggcucuguaa

SEQ ID NO: 61199 - RNA, 1401 nt, Artificial Sequence
  derived and/or modified CDS sequence (wt) from neuraminidase__InfluenzaB__AGX16856
augcuaccuucaacuauacaaacguuaacccuauuucucacgucagggggaguauuauuaucacuauaugugucagcuucauugucauacuuacuauauucggauauauugcuaaaauucucaccaacagaaauaacugcaccaacagugccauuggauugugcaaacgcaucaaauguucaggcugugaaccguucugcaacaaaaggggugacacuucuucucccagaaccggaguggacauacccgcguuuaucuugcccgggcucaaccuuucagaaagcacuccuaauuagcccucauagauucggagaaaccaaaggaaacucagcucccuugauaauaagagaaccuuuuauugcuuguggaccaaaggaaugcaaacacuuugcucuaacccauuaugcagcccaaccagggggauacuacaguggaacaagaggagacagaaacaagcugaggcaucuaauuucagucaaauugggcaaaaucccaacaguagaaaacuccauuuuccacauggcagcauggagcggguccgcaugccaugaugguaaagaauggacauauaucggaguugauggcccugacaauaaugcauugcucaaaauaaaauauggagaagcauauacugacacauaccauuccuaugcaaacaacauccuaagaacacaagaaagugccugcaauugcaucgggggaaauuguuaucuuaugauaacugauggcucagcuucagguauuagugaaugcagauuucuuaagauucgagagggccgaauaauaaaagaaauauuuccaacaggaagaguaaaacauacugaagaaugcacaugcggauuugccagcaauaaaaccauagaaugugccuguagagauaacaguuacacagcaaaaagacccuuugucaaauuaaacguggagacugauacagcagaaauaagauugaugugcacagagacuuauuuggacacccccagaccagaugauggaagcauaacagggccuugugaaucuaauggggacaaagggaguggaggcaucaagggaggauuuguucaucaaagaauggcauccaagauuggaaggugguacucucgaacgaugucuaaaaauaaaaggauggggaugggacuguaugucaaguaugauggagacccaugggcugacagugaugcccuugcucuuaguggaguaaugguuucaauggaagaaccugguugguacuccuuuggcuucgaaauaaaagauaagaaaugugauguccccuguauugggauagagaugguacaugaugguggaaaagagacuuggcacucagcagcaacagccauuuacuguuuaaugggcucaggacagcugcugugggacacugucacagguguugauauggcucuguaa

SEQ ID NO: 61200 - RNA, 1401 nt, Artificial Sequence; identical to SEQ ID NO: 61176
  derived and/or modified CDS sequence (wt) from neuraminidase__InfluenzaB__AGX16867

SEQ ID NO: 61201 - RNA, 1401 nt, Artificial Sequence
  derived and/or modified CDS sequence (wt) from neuraminidase__InfluenzaB__AGX16878
augcuaccuucaacuauacaaacguuaacccuauuucucacaucagggggaguauuauuaucacuauaugugucagcuucauugucauacuuacuauauucggauauauugcuaaaauucucaccaacagaacuaacugcaccaacaaugccauuggauugugcaaacgcaucaaauguucaggcugugaaccguucugcaacaaaaggggugacacuucuucucccagaaccggaguggacauacccgcguuuaucuugcccgggcucaaccuuucagaaagcacuccuaauuagcccucauagauucggagaaaccaaaggaaacucugcucccuugauaauaagggaaccuuuuauugcuuguggaccaaaggaaugcaaacacuuugcucuaacccauuaugcagcccaaccagggggauacuacaauggaaaaagaggagacagaaacaagcugaggcaucuaauuucagucaaauugggcaaaaucccaacaguagaaaacuccauuuuccacauggcagcauggagcggguccgcaugccaugaugguaaagaauggacauauaucggaguugauggcccugacaauaaugcauugcucaaaauaaaauauggagaagcauauacugacacauaccauuccuaugcaaacaacauccuaagaacacaagaaagugccugcaauugcaucgggggaaauuguuaucuuaugauaacugauggcucagcuucagguauuagugaaugcagauuucuuaaaauucgagagggccgaauaauaaaagaaauauuuccaacaggaagaguaaaacauacugaagaaugcacaugcggauuugccagcaauaaaaccauagaaugugccuguagagauaacaguuacacagcaaaaagacccuuugucaaauuaaacguggagacugauacagcagaaauaagauugaugugcacagagacuuauuuggacacccccagaccagaugauggaagcauaacagggccuugugaaucuaauggggacaaugggaguggaggcaucaagggaggauuuguucaucaaagaauggcauccaagauuggaaggugguacucucgaacgaugucuaaaacuaaaaggauggggaugggacuguaugucaaguaugauggagacccaugggcugacagugaugcccuugcucuuaguggaguaaugguuucaauggaagaaccugguugguacuccuuuggcuucgaaauaaaagauaagaaaugugauguccccuguauugggauagagaugguacaugaugguggaaaagagacuuggcacucagcagcaacagccauuuacuguuuaaugggcucaggacagcugcugugggacacugucacagguguugauauggcucuguaa

SEQ ID NO: 61202 - RNA, 1401 nt, Artificial Sequence; identical to SEQ ID NO: 61174
  derived and/or modified CDS sequence (wt) from neuraminidase__InfluenzaB__AGX16889

SEQ ID NO: 61203 - RNA, 1401 nt, Artificial Sequence
  derived and/or modified CDS sequence (wt) from neuraminidase__InfluenzaB__AGX16900
augcuaccuucaacuauacaaacguuaacccuauuucucacaacagggggaguauuauuaucacuauaugugucagcuucauugucauacuuauuauauucggauauauugcuaaaauucucaccaacagaaauaauugcaccaacaaugccauuggauugugcaaacgcaucaaauguucaggcugugaaccguucugcaacaaaaggggugacacuucuucucccagaaccggaguggacauacccgcguuuaucuugcccgggcucaaccuuucagaaagcacuccuaauuagcccucauagauucggagaaaccaaaggaaacucagcucccuugauaauaagggaaccuuuuauugcuuguggaccaaaggaaugcaaacacuuugcucuaacccauuaugcagcccaaccagggggauacuacaauggaacaagaggagacagaaacaagcugaggcaucuaauuucagucaaauugggcaaaaucccaacaguagaaaacuccauuuuccacauggcagcauggagcggguccgcaugccaugaugguaaagaauggacauauaucggaguugauggcccugacaauaaugcauugcucaaaauaaaauauggagaagcauauacugacacauaccauuccuaugcaaacaacauccuaagaacacaagaaagugccugcaauugcaucgggggaaauuguuaucuuaugauaacugauggcucagcuucagguauuagugaaugcagauuucuuaagauucgagagggccgaauaauaaaagaaauauuuccaacaggaagaguaaaacauacugaagaaugcacaugcggauuugccagcaauaaaaccauagaaugugccuguagagauaacaguuacacagcaaaaagacccuuugucaaauuaaacguggagacugauacagcagaaauaagauugaugugcacagagacuuauuuggacacccccagaccagaugauggaagcauaacagggccuugugaaucuaauggggacaaagggaguggaggcaucaagggaggauuuguucaucaaagaauggcauccaagauuggaaggugguacucucgaacgaugucuaaaaccaaaaggauggggaugggacuguaugucaaguaugauggagacccaugggcugacagugaugcccuugcucuuaguggaguaaugguuucaauggaagaaccugguugguacuccuuuggcuucgaaauaaaagauaagaaaugugauguccccuguauugggauagagaugguacaugaugguggaaaggagacuuggcacucagcagcaacagccauuuacuguuuaaugggcucaggacagcugcugugggacacugucacagguguugauauggcucuguaa

SEQ ID NO: 61204 - RNA, 1401 nt, Artificial Sequence
  derived and/or modified CDS sequence (wt) from neuraminidase__InfluenzaB__AGX16911
augcuaccuucaacuauacaaacguuaacccuauuucucacaucagggggaguauuauuaucacuauaugugucagcuuuauugucauacuuacuauauucggauauauugcuaaaauucucaccaacagaaauaacugcaccaacaaugccauuggauugugcaaacgcaucaaauguucaggcugugaaccguucugcaacaaaaggggugacacuucuucucccagaaccggaguggacauacccgcguuuaucuugcccgggcucaaccuuucagaaagcacuccuaauuagcccucauagauucggagaaaccaaaggaaacucugcucccuugauaauaagggaaccuuuuauugcuuguggaccaaaggaaugcaaacacuuugcucuaacccauuaugcagcccaaccagggggauacuacaauggaacaagaggagacagaaacaagcugaggcaucuaauuucagucaaauugggcaaaaucccaacaguagaaaacuccauuuuccacauggcagcauggagcggguccgcaugccaugaugguaaagaauggacauauauuggaguugauggcccugacaauaaugcauugcucaaaauaaaauauggagaagcauauacugacacauaccauuccuaugcaaacaacauccuaagaacacaagaaagugccugcaauugcaucgggggaaauuguuaucuuaugauaacugauggcucagcuucagguauuagugaaugcagauuucuuaagauucgagagggccgaauaauaaaagaaauauuuccaacaggaagaguaaaacauacugaagaaugcacaugcggauuugccagcaauaaaaccauagaaugugccuguagagauaacaguuacacagcaaaaagacccuuugucaaauuaaacguggagacugauacagcagaaauaagauugaugugcacagagacuuauuuggacacccccagaccagaugauggaagcauaacagggccuugugagucuaauggggacaaagggaguggaggcaucaagggaggauuuguucaucaaagaauggcauccaagauuggaaggugguacucucgaacgaugucuaaaacuaaaaggauggggaugggacuguaugucaaguaugauggagacccaugggcugacagugaugcccuugcucuuaguggaguaaugguuucaauggaagaaccugguugguacuccuuuggcuucgaaauaaaagauaagaaaugugauguccccuguauugggauagagaugguacaugaugguggaaaagagacuuggcacucagcagcaacagccauuuacuguuuaaugggcucaggacagcugcugugggacacugucacagguguugauauggcucuguaa

SEQ ID NO: 61205 - RNA, 1401 nt, Artificial Sequence
  derived and/or modified CDS sequence (wt) from neuraminidase__InfluenzaB__AGX16922
augcuaccuucaacuauacaaacguuaacccuauuucucacaucagggggaguauuauuaucacuauaugugucagcuucauugucauacuuacuauauucggauauauugcuaaaauucucaccaacagaaauaacugcaccaacaaugccauuggauugugcaaacgcaucaaauguucaggcugugaaccguucugcaacaaaaggggugacauuucuucucccagaaccggaguggacauacccgcguuuaucuugcccgggcucaaccuuucagaaagcacuccuaauuagcccucauagauucggagaaaccaaaggaaacucugcucccuugauaauaagggaaccuuuuauugcuuguggaccaaaggaaugcaaacacuuugcucuaacccauuaugcagcccaaccagggggauacuacaauggaacaagaggagacagaaacaagcugaggcaucuaauuucagucaaauugggcaaaaucccaacaguagaaaacuccauuuuccacauggcagcauggagcggguccgcaugccaugaugguaaagaauggacauauauuggaguugauggcccugacaauaaugcauugcucaaaauaaaauauggagaagcauauacugacacauaccauuccuaugcaaacaacauccuaagaacacaagaaagugccugcaauugcaucgggggaaauuguuaucuuaugauaacugauggcucagcuucagguauuagugaaugcagauuucuuaagauucgagagggccgaauaauaaaagaaauauuuccaacaggaagaguaaaacauacugaagaaugcacaugcggauuugccagcaauaaaaccauagaaugugccuguagagauaacaguuacacagcaaaaagacccuuugucaaauuaaacguggagacugauacagcagaaauaagauugaugugcacagagacuuauuuggacacccccagaccagaugauggaagcauaacagggccuugugagucuaauggggacaaagggaguggaggcaucaagggaggauuuguucaucaaagaauggcauccaagauuggaaggugguacucucgaacgaugucuaaaacuaaaaggauggggaugggacuguaugucaaguaugauggagacccaugggcugacagugaugcccuugcucuuaguggaguaaugguuucaauggaagaaccugguugguacuccuuuggcuucgaaauaaaagauaagaaaugugauguccccuguauugggauagagaugguacaugaugguggaaaagagacuuggcacucagcagcaacagccauuuacuguuuaaugggcucaggacagcugcugugggacacugucacagguguugauauggcucuguaa

SEQ ID NO: 61206 - RNA, 1401 nt, Artificial Sequence
  derived and/or modified CDS sequence (wt) from neuraminidase__InfluenzaB__AGX16933
augcuaccuucaacuauacaaacguuaacccuauuucucacaucagggggaguauuauuaucacuauaugugucagcuucauugucauacuuacuauauucggauauauugcuaaaauucucaccaacagaaauaaaugcaccaacaaugccauuggauugugcaaacgcaucaaauguucaggcugugaaccguucugcaacaaaaggggugacacuucuucucccagaaccggaguggacauacccgcguuuaucuugcccgggcucaaccuuucagaaagcacuccuaauuagcccucauagauucggagaaaccaaaggaaacucagcucccuugauaauaagggaacccuuuauugcuuguggaccaaaggaaugcaaacacuuugcucuaacccauuaugcagcccaaccagggggauacuacaauggaacaagaggagacagaaacaaacugaggcaucuaauuucagucaaauugggcaaaaucccaacaguagaaaacuccauuuuccacauggcagcauggagcggguccgcaugccaugaugguaaagaauggacauauaucggaguugauggcccugacaauaaugcauugcucaaaauaaaauauggagaagcauauacugacacauaccauuccuaugcaaacaacauccuaagaacacaagaaagugccugcaauugcaucgggggaaauuguuaucuuaugauaacugauggcucagcuucagguauuagugaaugcagauuucuuaagauucgagagggccgaauaauaaaagaaauauuuccaacaggaagaguaaaacauacugaagaaugcacaugcggauuugccagcaauaaaaccauagaaugugccuguagagauaacaguuacacagcaaaaagacccuuugucaaauuaaacguggagacugauacagcagaaauaagauugaugugcacagagacuuauuuggacacccccagaccagaugauggaagcauaacagggccuugugaaucuaauggggacaaagggaguggaggcaucaagggaggauuuguucaucaaagaauggcauccaagauuggaaggugguacucucgaacgaugucuaaaacuaaaaggauggggaugggacuguaugucaaguaugauggagacccaugggcugacagugaugcccuugcucuuaguggaguaaugguuucaauggaagaaccugguugguacucguuuggcuucgaaauaaaagauaagaaaugugauguccccuguauugggauagagaugguacaugaugguggaaaagagacuuggcacucagcagcaacagccauuuacuguuuaaugggcucaggacagcugcuguuggacacugucacagguguugauauggcucuguaa

SEQ ID NO: 61207 - RNA, 1401 nt, Artificial Sequence
  derived and/or modified CDS sequence (wt) from neuraminidase__InfluenzaB__AGX16944
augcuaccuucaacuauacaaacguuaacccuauuucucacaucagggggaguauuauuaucacuauaugugucagcuucauugucauacuuacuauauucggauauauugcuaaaauucucaccaacagaaauaacugcaccaacaaugccauuggauugugcaaacgcaucaaauguucaggcugugaaccguucugcaacaaaaggggugacacuucuucucccagaaccggaguggacauacccgcguuuaucuugcccgggcucaaccuuucagaaagcacuccuaauuagcccucauagauucggagaaaccaaaggaaacucagcucccuugauaauaagagaaccuuuuauugcuuguggaccaaaggaaugcaaacacuuugcucuaacccauuaugcagcccaaccagggggauacuacaguggaacaagaggagacagaaacaagcugaggcaucuaauuucagucaaauugggcaaaaucccaacaguagaaaacuccauuuuccacauggcagcauggagcggguccgcaugccaugaugguaaagaauggacauauaucggaguugauggcccugacaauaaugcauugcucaaaauaaaauauggagaagcauauacugacacauaccauuccuaugcaaacaacauccuaagaacacaagaaagugccugcaauugcaucgggggaaauuguuaucuuaugauaacugauggcucagcuucagguauuagugaaugcagauuucuuaagauucgagagggccgaauaauaaaagaaauauuuccaacaggaagaguaaaacauacugaagaaugcacaugcggauuugccagcaauaaaaccauagaaugugccuguagagauaacaguuacacagcaaaaagacccuuugucaaauuaaacguggagacugauacagcagaaauaagauugaugugcacagagacuuauuuggacacccccagaccagaugauggaagcauaacagggccuugugaaucuaauggggacaaagggaguggaggcaucaagggaggauuuguucaucaaagaauggcauccaagauuggaaggugguacucucgaacgaugucuaaaaauaaaagaauggggaugggacuguaugucaaguaugauggagacccaugggcugacagugaugcccuugcucuuaguggaguaaugguuucaauggaagaaccugguugguacuccuuuggcuucgaaauaaaagauaagaaaugugauguccccuguauugggauagagaugguacaugaugguggaaaagagacuuggcacucagcagcaacagccauuuacuguuuaaugggcucaggacagcugcugugggacacugucacagguguugauauggcucuguaa

SEQ ID NO: 61208 - RNA, 1401 nt, Artificial Sequence
  derived and/or modified CDS sequence (wt) from neuraminidase__InfluenzaB__AGX16955
augcuaccuucaacuauacaaacguuaacccuauuucucacaucagggggaguauuauuaucacuauaugugucagcuucauugucauacuuauuauauucggauauauugcuaaaauucucaccaacagaaauaacugcaccaacaaugccauuggauugugcaaacgcaucaaauguucaggcugugaaccguucugcaacaaaaggggugacacuucuucucccagaaccggaguggacauacccgcguuuaucuugcccgggcucaaccuuucagaaagcacuccuaauuagcccucauagauucggagaaaccaaaggaaacucagcucccuugauaauaagggaaccuuuuauugcuuguggaccaaaggaaugcaaacacuuugcucuaacccauuaugcagcccaaccagggggauacuacaauggaacaagaggagacagaaacaagcugaggcaucuaauuucagucaaauugggcaaaaucccaacaguagaaaacuccauuuuccacauggcagcauggagcggguccgcaugccaugaugguaaagaauggacauauaucggaguugauggcccugacaauaaugcauugcucaaaauaaaauauggagaagcauauacugacacauaccauuccuaugcaaacaacauccuaagaacacaagaaagugccugcaauugcaucgggggaaauuguuaucuuaugauaacugauggcucagcuucagguauuagugaaugcagauuucuuaagauucgagagggccgaauaauaaaagaaauauuuccaacaggaagaguaaaacauacugaagaaugcacaugcggauuugccagcaauaaaaccauagaaugugccuguagagauaacaguuacacagcaaaaagacccuuugucaaauuaaacguggagacugauacagcagaaauaagauugaugugcacagagacuuauuuggacacccccagaccagaugauggaagcauaacagggccuugugaaucuaauggggacaaagggaguggaggcaucaagggaggauuuguucaucaaagaauggcauccaagauuggaaggugguacucucgaacgaugucuaaaaccaaaaggauggggaugggacuguaugucaaguaugauggagacccaugggcugacagugaugcccuugcucuuaguggaguaaugguuucaauggaagaaccugguugguacuccuuuggcuucgaaauaaaagauaagaaaugugauguccccuguauugggauagagaugguacaugaugguggaaaggagacuuggcacucagcagcaacagccauuuacuguuuaaugggcucaggacagcugcugugggacacugucacagguguugauauggcucuguaa

SEQ ID NO: 61209 - RNA, 1401 nt, Artificial Sequence; identical to SEQ ID NO: 60626
  derived and/or modified CDS sequence (wt) from neuraminidase__InfluenzaB__AGX16966

SEQ ID NO: 61210 - RNA, 1401 nt, Artificial Sequence
  derived and/or modified CDS sequence (wt) from neuraminidase__InfluenzaB__AGX16977
augcuaccuucaacuauacaaacguuaacccuauuucucacaucagggggaguauuauuaucacuauaugugucagcuucauugucauacuuacuauauucggauauauugcuaaaauucucaccaacagaaauaacugcaccaacaaugccauuggauugugcaaacgcaucaaauguucaggcugugaaccguucugcaacaaaaggggugacacuucuucucccagaaccggaguggacauacccgcguuuaucuugcccgggcucaaccuuucagaaagcacuccuaauuagcccucauagauucggagaaaccaaaggaaacucugcucccuugauaauaagggaaccuuuuauugcuuguggaccaaaggaaugcaaacacuuugcucuaacccauuaugcagcccaaccagggggauacuacaauggaacaagaggagacagaaacaagcugaggcaucuaauuucagucaaauugggcaaaaucccaacaguagaaaacuccauuuuccacauggcagcauggagcggguccgcaugccaugaugguaaagaauggacauauauuggaguugauggcccugacaauaaugcauugcucaaaauaaaauauggagaagcauauacugacacauaccauuccuaugcaaacaacauccuaagaacacaagaaagugccugcaauugcaucgggggaaauuguuaucuuaugauaacugauggcucagcuucagguauuagugaaugcagauuucuuaagauucgagagggccgaauaauaaaagaaauauuuccaacaggaagaguaaaacauacugaagaaugcacaugcggauuugccagcaauaaaaccauagaaugugccuguagagauaacaguuacacagcaaaaagacccuuugucaaauuaaacguggagacugauacagcagaaauaagauugaugugcacagagacuuauuuggacacccccagaccagaugauggaagcauaacagggccuugugagucuaauggggacaaagggaguggaggcaucaagggaggauuuguucaucaaagaauggcauccaagauuggaaggugguacucucgaacgaugucuaaaacuaaaaggauggggaugggacuguaugucaaguaugauggagacccaugggcugacagugaugcccuugcucuuaguggaguaaugguuucaauggaagaaccugguugguacuccuuuggcuucgaaauaaaagauaagaaaugugauguccccuguauugggauagagaugguacaugaugguggaaaagagacuuggcacucagcagcaacagccauuuacuguuuaaugggcucaggacagcugcugugggacacugucaccgguguugauauggcucuguaa

SEQ ID NO: 61211 - RNA, 1401 nt, Artificial Sequence
  derived and/or modified CDS sequence (wt) from neuraminidase__InfluenzaB__AGX16988
augcuaccuucaacuauacaaacguuaacccuauuucucacaucagggggaguauuauuaucacuauaugugucagcuucauugucauacuuacuauauucggauauauugcuaaaauucucaccaacagaaauaacugcaccaacaaugccauuggauugugcaaacgcaucaaauguucaggcugugaaccguucugcaacaaaagggguaacacuucuucucccagaaccagaguggacauacccgcguuuaucuugcccgggcucaaccuuucagaaagcacuccuaauuagcccucauagauucggagaaaccaaaggaaacucagcucccuugauaauaagggaacccuuuauugcuuguggaccaaaggaaugcaaacacuucgcucuaacccauuaugcagcccaaccagggggauacuacaauggaacaagaggagacagaaacaagcugaggcaucuaauuucagucaaauugggcaaaaucccaacaguagaaaacuccauuuuccacauggcagcauggagcggguccgcaugccaugaugguaaagaauggacauauaucggaguugauggcccugacaauaaugcauugcucaaaauaaaauauggagaagcauauacugacacauaccauuccuaugcaaacaacauccuaagaacacaagaaagugccugcaauugcaucgggggaaauuguuaucuuaugauaacugauggcucagcuucagguauuagugaaugcagauuucuuaagauucgagagggccgaauaauaaaagaaauauuuccaacaggaagaguaaaacauacugaagaaugcacaugcggauuugccagcaauaagaccauagaaugugccuguagagauaacaguuacacagcaaaaagacccuuugucaaauuaaacguggagacugauacagcagaaauaagauugaugugcacagagacuuauuuggacacccccagaccagaugauggaagcauaacagggccuugugaaucuaauggggacaaagggaguggaggcaucaagggaggauuuguucaucaaagaauggcauccaagauuggaaggugguacucucgaacgaugucuaaaacuaaaaggauggggaugggacuguaugucaaguaugauggagacccaugggcugacagugaugcccuugcucuuaguggaguaaugguuucaauggaagaaccugguugguacuccuuuggcuucgaaauaaaagauaagaaaugugauguccccuguauuggaauagagaugguacaugaugguggaaaagagacuuggcacucagcagcaacagccauuuacuguuuaaugggcucaggacagcugcugugggacacugucacagguguugauauggcucuguaa

SEQ ID NO: 61212 - RNA, 1401 nt, Artificial Sequence; identical to SEQ ID NO: 61172
  derived and/or modified CDS sequence (wt) from neuraminidase__InfluenzaB__AGX16999

SEQ ID NO: 61213 - RNA, 1401 nt, Artificial Sequence; identical to SEQ ID NO: 61176
  derived and/or modified CDS sequence (wt) from neuraminidase__InfluenzaB__AGX17010

SEQ ID NO: 61214 - RNA, 1401 nt, Artificial Sequence; identical to SEQ ID NO: 61174
  derived and/or modified CDS sequence (wt) from neuraminidase__InfluenzaB__AGX17021

SEQ ID NO: 61215 - RNA, 1401 nt, Artificial Sequence
  derived and/or modified CDS sequence (wt) from neuraminidase__InfluenzaB__AGX17032
augcuaccuucaacuauacaaacguuaacccuauuucucacaucagggggaguauuauuaucacuauaugugucagcuucauugucauacuuacuauauucggauauauugcuaaaauucucaccaacagaaauaacugcaccaacaaugccauuggauugugcaaacgcaucagauguucaggcugugaaccguucugcaacaaaaggggugacacuucuucucccagaaccagaguggacauacccgcguuuaucuugcccgggcucaaccuuucagaaagcacuccuaauuagcccucauagauucggagaaaccaaaggaaacucagcucccuugauaauaagggaaccuuuuauugcuuguggaccaaaggaaugcaaacacuuugcucuaacccauuaugcagcccaaccagggggauacuacaauagaacaagaggagacagaaacaagcugaggcaucuaauuucagucaaauugggcaaaaucccaacaguagaaaacuccauuuuccacauggcagcauggagcggguccgcaugccaugaugguaaagaauggacauauaucggaguugauggcccugacaauaaugcauugcucaaaauaaaauauggagaagcauauacugacacauaccauuccuaugcaaacaacauccuaagaacacaagaaagugccugcaauugcaucgggggaaauuguuaucuuaugauaacugauggcucagcuucagguauuagugaaugcagauuucuuaagauucgagagggccgaauaauaaaagaaauauuuccaacaggaagaguaaaacauacugaagaaugcacaugcggauuugccagcaauaagaccauagaaugugccuguagagauaacaguuacacagcaaaaagacccuuugucaaauuaaacguggagacugauacagcagaaauaagauugaugugcacagagacuuauuuggacacccccagaccagaugauggaagcauaacagggccuugugaaucuaauggggacaaagggaguggaggcaucaagggaggauuuguucaucaaagaauggcauccaagauuggaaggugguacucucgaacgaugucuaaaacuaaaaggauggggaugggacuguaugucaaguaugauggagacccaugggcugacagugaugcccuugcucuuaguggaguaaugguuucaauggaagaaccugguugguacuccuuuggcuucgaaauaaaagauaagaaaugugauguccccuguauuggaauagagaugguacaugaugguggaaaagagacuuggcacucagcagcaacagccauuuacuguuuaaugggcucaggacagcugcugugggacacugucacagguguugauauggcucuguaa

SEQ ID NO: 61216 - RNA, 1401 nt, Artificial Sequence; identical to SEQ ID NO: 60626
  derived and/or modified CDS sequence (wt) from neuraminidase__InfluenzaB__AGX17043

SEQ ID NO: 61217 - RNA, 1401 nt, Artificial Sequence
  derived and/or modified CDS sequence (wt) from neuraminidase__InfluenzaB__AGX17054
augcuaccuucaacuauacaaacguuaacccuauuucucacaucagggggaguauuauuaucacuauaugugucagcuucauugucauacuuacuauauucggauauauugcuaaaauucucaccaacagaaauaacugcaccaacaaugccauuggauugugcaaacgcaucaaauguucaggcugugaaccguucugcaacaaaaggggugacacuucuucucccagaaccggaguggacauacccgcguuuaucuugcccgggcucaaccuuucagaaagcacuccuaauuagcccucauagauucggagaaaccaaaggaaacucugcucccuugauaauaagggaaccuuuuauugcuuguggaccaaaggaaugcaaacacuuugcucuaacccauuaugcagcccaaccagggggauacuacaauggaacaagaggagacagaaacaagcugaggcaucuaauuucagucaaauugggcaaaaucccaacaguagaaaacuccauuuuccacauggcagcauggagcggguccgcaugccaugaugguaaagaauggacauauaucggaguugauggcccugacaauaaugcauugcucaaaauaaaauauggagaagcauauacugacacauaccauuccuaugcaaacaacauccuaagaacacaagaaagugccugcaauugcaucgggggaaauuguuaucuuaugauaacugauggcucagcuucagguauuagugaaugcagauuucuuaagauucgagagggccgaauaauaaaagaaauauuuccaacaggaagaguaaaacauacugaagaaugcacaugcggauuugccagcaauaaaaccauagaaugugccuguagagauaacaguuacacagcaaaaagacccuuugucaaauuaaacguggagacugauacagcagaaauaagauugaugugcacagagacuuauuuggacacccccagaccagaugauggaagcauaacagggccuugugaaucuaauggggacaaugggaauggaggcaucaagggaggauuuguucaucaaagaauggcauccaagauuggaaggugguacucucgaacgaugucuaaaacuaaaaggauggggaugggacuguaugucaaguaugauggagacccaugggcugacagugaugcccuugcucuuaguggaguaaugguuucaauggaagaaccugguugguacuccuuuggcuucgaaauaaaagauaagaaaugugauguccccuguauugggauagagaugguacaugaugguggaaaagagacuuggcacucagcagcaacagccauuuacuguuuaaugggcucaggacagcugcugugggacacugucacagguguugauauggcucuguaa

SEQ ID NO: 61218 - RNA, 1401 nt, Artificial Sequence
  derived and/or modified CDS sequence (wt) from neuraminidase__InfluenzaB__AGX17065
augcuacccucaacuauacaaacguuaacccuauuucucacaucagggggaguguuauuaucacuauaugugucagccuuacugucauacuuacuguauucggauauauugcuaaaauuuucaccaacaaaaauaauugcaccaacaacgucguuggacuccgcgaacgcaucaaauuuucaggccgugaaccauucugcaacaaaagagaugacauuucuucucccagaaccggaguggacauacccucguuuaucuugccaggguucaaccuuucaaaaagcacuccuaauuagcccucauagauucggagaagccaaaggaaacucagcucccuugauaauaagggaaccuuuuauugcuuguggaccaaaggaguguaaacacuuugcucuaacccauuaugcagcucaaccagggggauacuacaauggaacaagagaggacagaaacaagcugaggcaucugauuucagucaacuuaggcaaaauaccaacuguagaaaacuccauuuuccacauggcagcuuggaguggguccgcaugccaugaugguagagaauggacuuauaucggaguugauggcccugacaguaaugcauugaucaaaauaaaauauggagaagcauacacugacacauaccauuccuaugcaaacaacauccuaagaacacaagaaagugccugcaacugcaucggaggagauuguuaucuuaugauaacugauggcucagcuucaggaauuaguaaaugcagauuccuuaagauucgagagggucgaauaauaaaagaaauauuuccaacaggaagaguagagcauacugaagaaugcacaugcggauuugccagcaauaaaaccauagaaugugccuguagagauaacaguuacacagcaaaaagacccuuugucaaauuaaauguggaaacugauacagcagaaauaagauuaaugugcacagagacuuauuuggacacccccagaccagaugauggaagcauaacagggccuugcgaaucuaauggggacaaagggaguggagguaucaagggaggauuuguccaucaaagaauggcauccaagauuggaagaugguacucucgaacgauaucuaaaacuaaaagaauggggauggaacuguaugucaaguaugauggagacccauggacugacagugaugcccuugcuccuaguggaguaauggucucaauagaagaaccugguugguauucuuucggcuucgaaauaaaagauaagaaaugcgauguccccuguauugggauagagaugguacacgaugguggaaaaacaacuuggcacucagcagcaacagccauuuacuguuuaaugggcucaggacaguugcuaugggacacugucacagguguugauauggcucuguaa

SEQ ID NO: 61219 - RNA, 1401 nt, Artificial Sequence
  derived and/or modified CDS sequence (wt) from neuraminidase__InfluenzaB__AGX17076
augcuaccuucaacuauacaaacguuaacccuauuucucacaucagggggaguauuauuaucacuauaugugucagcuucauugucauacuuacuauauucggauauauugcuaaaauucucaccaacagaaauaacugcaccaacaaugccauuggauugugcaaacgcaucaaauguucaggcugugaaccguucugcaacaaaaggggugacacuucuucucccagaaccggaguggacauacccgcguuuaucuugcccgggcucaaccuuucagaaagcacuccuaauuagcccucauagauucggagaaaccaaaggaaacucagcucccuugauaauaagggaaccuuuuauugcuuguggaccaaaggaaugcaaacacuuugcucuaacccauuaugcagcccaaccagggggauacuacaauggaacaagaggagacagaaacaagcugaggcaucuaauuucagucaaauugggcaaaaucccaacaguagaaaacuccauuuuccacauggcagcauggagcggguccgcaugccaugaugguaaagaauggacauauaucggaguugauggcccugacaauaaugcauugcucaaaauaaaauauggagaagcauauacugacacauaccauuccuaugcaaacaacauccuaagaacacaagaaagugccugcaauugcaucgggggaaauuguuaucuuaugauaacugauggcucagcuucagguauuagugaaugcagauuucuuaagauucgagagggccgaauaauaaaagaaauauuuccaacaggaagaguaaaacauacugaagaaugcacaugcggauuugccagcaauaaaaccauagaaugugccuguagagauaacaguuacacagcaaaaagacccuuugucaaauuaaacguggagacugauacagcagaaauaagauugaugugcacagagacuuauuuggacacccccagaccagaugauggaagcauaacagggccuugugaaucuaauggggacaaagggaguggaggcaucaagggaggauuuguucaucaaagaauggcauccaagauuggaaggugguacucucgaacgaugucuaaaacuaaaaggauggggaugggacuguaugucaaguaugauggagacccaugggcugacagugaugcccuugcucuuaguggaguaaugguuucaauggaagaaccugguugguacuccuuuggcuucgaaauaagagauaagaaaugugauguccccuguauugggauagagauaguacaugaugguggaaaagagacuuggcacucagcagcaacagccauuuacuguuuaaugggcucaggacagcugcugugggacacugucacagguguugauauggcucuguaa

SEQ ID NO: 61220 - RNA, 1401 nt, Artificial Sequence; identical to SEQ ID NO: 61174
  derived and/or modified CDS sequence (wt) from neuraminidase__InfluenzaB__AGX17087

SEQ ID NO: 61221 - RNA, 1401 nt, Artificial Sequence; identical to SEQ ID NO: 61174
  derived and/or modified CDS sequence (wt) from neuraminidase__InfluenzaB__AGX17098

SEQ ID NO: 61222 - RNA, 1401 nt, Artificial Sequence; identical to SEQ ID NO: 61174
  derived and/or modified CDS sequence (wt) from neuraminidase__InfluenzaB__AGX17109

SEQ ID NO: 61223 - RNA, 1401 nt, Artificial Sequence; identical to SEQ ID NO: 61174
  derived and/or modified CDS sequence (wt) from neuraminidase__InfluenzaB__AGX17120

SEQ ID NO: 61224 - RNA, 1401 nt, Artificial Sequence
  derived and/or modified CDS sequence (wt) from neuraminidase__InfluenzaB__AGX17131
augcuaccuucaacuauacaaacguuaacccuauuucucacaucagggggaguauuauuaucacuauaugugucagcuucauugucauacuuacuauauucggauauauugcuaaaauucucaccaacagaaauaacugcaccaacaaugccauuggauugugcaaacgcaucaaauguucaggcugugaaccguucugcaacaaaaggggugacacuucuucucccagaaccggaguggacauacccgcguuuaucuugcccgggcucaaccuuucagaaagcacuccuaauuagcccucauagauucggagaaaccaaaggaaacucagcucccuugauaauaagggaaccuuuuauugcuuguggaccaaaggaaugcaaacacuuugcucuaacccauuaugcagcccaaccagggggauacuacaauggaacaagaggagacagaaacaagcugaggcaucuaauuucagucaaauugggcaaaaucccaacaguagaaaacuccauuuuccacauggcagcauggagcggguccgcaugccaugaugguaaagaauggacauauaucggaguugauggcccugacaauaaugcauugcucaaaauaaaauauggagaagcauauacugacacauaccauuccuaugcaaacaacauccuaagaacacaagaaagugccugcaauugcaucgggggaaauuguuaucuuaugauaacugauggcucagcuucagguauuagugaaugcagauuucuuaagauucgagagggccgaauaauaaaagaaauauuuccaacaggaagaguaaaacauacugaagaaugcacaugcggauuugccagcaauaaaaccauagaaugugccuguagagauaacaguuacacagcaaaaagacccuuugucaaguuaaacguggagacugauacagcagaaauaagauugaugugcacagagacuuauuuggacacccccagaccagaugauggaagcauaacagggccuugugaaucuaauggggacaaagggaguggaggcaucaagggaggauuuguucaucaaagaauggcauccaagauuggaaggugguacucucgaacgaugucuaaaacuaaaaggauggggaugggacuguaugucaaguaugauggagacccaugggcugacagugaugcccuugcucuuaguggaguaaugguuucaauggaagaaccugguugguacuccuuuggcuucgaaauaagagauaagaaaugugauguccccuguauugggauagagaugguacaugaugguggaaaagagacuuggcacucagcagcaacagccauuuacuguuuaaugggcucaggacagcugcugugggacacugucacagguguugauauggcucuguaa

SEQ ID NO: 61225 - RNA, 1401 nt, Artificial Sequence; identical to SEQ ID NO: 61187
  derived and/or modified CDS sequence (wt) from neuraminidase__InfluenzaB__AGX17142

SEQ ID NO: 61226 - RNA, 1401 nt, Artificial Sequence
  derived and/or modified CDS sequence (wt) from neuraminidase__InfluenzaB__AGX17153
augcuaccuucaacuauacaaacauuaacccuauuucucacaucagggggaguauuauuaucacuauaugugucagcuucauugucauacuuacuauauucggauauauugcuaaaauucucaccaacagaaauaacugcaccaacaaugccauuggauugugcaaacgcaucaaauguucaggcugugaaccguucugcaacaaaaggggugacacuucuucucccagaaccggaguggacauacccgcguuuaucuugcccgggcucaaccuuucagaaagcacuccuaauuagcccucauagauucggagaaaccaaaggaaacucagcucccuugauaauaagggaaccuuuuauugcuuguggaccaaaggaaugcaaacacuuugcucuaacccauuaugcagcccaaccagggggauacuacaauggaacaagaggagacagaaacaagcugaggcaucuaauuucagucaaauugggcaaaaucccaacaguagaaaacuccauuuuccacauggcagcauggagcggguccgcaugccaugaugguaaagaauggacauauaucggaguugauggcccugacaauaaugcauugcucaaaauaaaauauggagaagcauauacugacacauaccauuccuaugcaaacaacauccuaagaacacaagaaagugccugcaauugcaucgggggaaauuguuaucuuaugauaacugauggcucagcuucagguauuagugaaugcagauuucuuaagauucgagagggccgaauaauaaaagaaauauuuccaacaggaagaguaaaacauacugaagaaugcacaugcggauuugccagcaauaaaaccauagaaugugccuguagagauaacaguuacacagcaaaaagacccuuugucaaauuaaacguggagacugauacagcagaaauaagauugaugugcacagagacuuauuuggacacccccagaccagaugauggaagcauaauagggccuugugagucuaauggggacaaagggaguggaggcaucaagggaggauuuguucaucaaagaauggcauccaagauuggaaggugguacucucgaacgaugucuaaaacuaaaaggauggggaugggacuguaugucaaguaugauggagacccaugggcugacagugaugcccuugcucuuaguggaguaaugguuucaauggaagaaccugguugguacuccuuuggcuucgaaauaaaagauaagaaaugugauguccccuguauugggauagagaugguacaugaugguggaaaagagacuuggcacucagcagcaacagccauuuacuguuuaaugggcucaggacagcugcugugggacacugucacagguguugauauggcucuguaa

SEQ ID NO: 61227 - RNA, 1401 nt, Artificial Sequence; identical to SEQ ID NO: 61174
  derived and/or modified CDS sequence (wt) from neuraminidase__InfluenzaB__AGX17164

SEQ ID NO: 61228 - RNA, 1404 nt, Artificial Sequence
  derived and/or modified CDS sequence (wt) from neuraminidase__InfluenzaB__AGX17175
augcuaccuucaacuauacaaacguuaacccuauuucucacaucagggggaguauuauuaucacuauaugugucagcuucauugucauacuuacuauauucggauauauugcuaaaauucucaccaacagaaauaacugcaccaacaaugccauuggauugugcaaacgcaucaaauguucaggcugugaaccguucugcaacaaaaggggugacacuucuucuucucccagaaccggaguggacauacccgcguuuaucuugcccgggcucaaccuuucagaaagcacuccuaauuagcccucauagauucggagaaaccaaaggaaacucagcucccuugauaauaagggaaccuuuuauugcuuguggaccaaaggaaugcaaacacuuugcucuaacccauuaugcagcccaaccagggggauacuacaauggaacaagaggagacagaaacaagcugaggcaucuaauuucagucaaauugggcaaaaucccaacaguagaaaacuccauuuuccacauggcagcauggagcggguccgcaugccaugaugguaaagaauggacauauaucggaguugauggcccugacaauaaugcauugcucaaaauaaaauauggagaagcauauacugacacauaccauuccuaugcaaacaacauccuaagaacacaagaaagugccugcaauugcaucgggggaaauuguuaucuuaugauaacugauggcucagcuucagguauuagugaaugcagauuucuuaagauucgagagggccgaauaauaaaagaaauauuuccaacaggaagaguaaaacauacugaagaaugcacaugcggauuugccagcaauaaaaccauagaaugugccuguagagauaacaguuacacagcaaaaagacccuuugucaaauuaaacguggagacugauacagcagaaauaagauugaugugcacagagacuuauuuggacacccccagaccagaugauggaagcauaacagggccuugugaaucuaauggggacaaagggaguggaggcaucaagggaggauuuguucaucaaagaauggcauccaagauuggaaggugguacucucgaacgaugucuaaaacuaaaaggauggggaugggacuguaugucaaguaugauggagacccaugggcugacagugaugcccuugcucuuaguggaguaaugguuucaauggaagaaccugguugguacuccuuuggcuucgaaauaagagauaagaaaugugauguccccuguauugggauagagaugguacaugaugguggaaaagagacuuggcacucagcagcaacagccauuuacuguuuaaugggcucaggacagcugcugugggacacugucacagguguugauauggcucuguaa

SEQ ID NO: 61229 - RNA, 1401 nt, Artificial Sequence
  derived and/or modified CDS sequence (wt) from neuraminidase__InfluenzaB__AGX17186
augcuaccuucaacuauacaaacguuaacccuauuucucacaucagggggaguauuauuaucacuauaugugucagcuucauugucauacuuacuauauucggauauauugcuaaaauucucaccaacagaaauaacuacaccaacaaugccauuggauugugcaaacgcaucaaauguucaggcugugaaccguucugcaacaaaaggggugacacuucuucucccagaaccggaguggacauacccgcguuuaucuugcccgggcucaaccuuucagaaagcacuccuaauuagcccucauagauucggagaaaccaaaggaaacucagcucccuugauaauaagggaaccuuucauugcuuguggaccaaaggaaugcaaacacuuugcucuaacccauuaugcagcccaaccagggggauacuacaauggaacaagaggagacagaaacaagcugaggcaucuaauuucagucaaauugggcaaaaucccaacaguagaaaacuccauuuuccacauggcagcauggagcggguccgcaugccaugaugguaaagaauggacauauaucggaguugauggcccugacaauaaugcauugcucaaaauaaaauauggagaagcauauacugacacauaccauuccuaugcaaacaacauccuaagaacacaagaaagugccugcaauugcaucgggggaaauuguuaucuuaugauaacugauggcucagcuucagguauuagugaaugcagauuucuuaagauucgagagggccgaauaauaaaagaaauauuuccaacaggaagaguaaaauauacugaagaaugcacaugcggauuugccagcaauaaaaccauagaaugugccuguagagauaacaguuacacagcaaaaagacccuuugucaaauuaaacguggagacugauacagcagaaauaagauugaugugcacagagacuuauuuggacacccccagaccagaugauggaagcauaacagggccuugugaaucuaauggggacaaagggaguggaggcaucaagggaggauuuguucaucaaagaauggcauccaagauuggaaggugguacucucgaacgaugucuaaaacuagaaggauggggaugggacuguaugucaaguaugauggagacccaugggcugacagugaugcccuugcucuuaguggaguaaugguuucaauggaagaaccugguugguacuccuuuggcuucgaaauaaaagauaagaaaugugauguccccuguauugggauagagaugguacaugaugguggaaaagagacuuggcacucagcagcaacagccauuuacuguuuaaugggcucaggacagcugcugugggacacugucacagguguugauauggcucuguaa

SEQ ID NO: 61230 - RNA, 1401 nt, Artificial Sequence
  derived and/or modified CDS sequence (wt) from neuraminidase__InfluenzaB__AGX17197
augcuaccuucaacuauacaaacauuaacccuauuucucacaucagggggaguauuauuaucacuauaugugucagcuucauugucauacuuacuauauucggauauauugcuaaaauucucaccaacagaaauaacugcaccaacaaugccauuggauugugcaaacgcaucaaauguucaggcugugaaccguucugcaacaaaaggggugacauuucuucucccagaaccggaguggacauacccgcguuuaucuugcccgggcucaaccuuucagaaagcacuccuaauuagcccucauagauucggagaaaccaaaggaaacucagcucccuugauaauaagggaaccuuuuauugcuuguggaccaaaggaaugcaaacacuuugcucuaacccauuaugcagcccaaccagggggauacuacaauggaacaagaggagacagaaacaagcugaggcaucuaauuucagucaaauugggcaaaaucccaacaguagaaaacuccauuuuccacauggcagcauggagcggguccgcaugccaugaugguaaagaauggacauauaucggaguugauggcccugacaauaaugcauugcucaaaauaaaauauggagaagcauauacugacacauaccauuccuaugcaaacaacauccuaagaacacaagaaagugccugcaauugcaucgggggaaauuguuaucuuaugauaacugauggcucagcuucagguauuagugaaugcagauuucuuaagauucgagagggccgaauaauaaaagaaauauuuccaacaggaagaguaaaacauacugaagaaugcacaugcggauuugccagcaauaaaaccauagaaugugccuguagagauaacaguuacacagcaaaaagacccuuugucaaauuaaacguggagacugauacagcagaaauaagauugaugugcacagagacuuauuuggacacccccagaccagaugauggaagcauaacagggccuugugaaucuaauggggacaaagggaguggaggcaucaagggaggauuuguucaucaaagaauggcauccaagauuggaaggugguacucucgaacgaugucuaaaacuaaaaggauggggaugggacuguaugucaaguaugauggagacccaugggcugacagugaugcccuugcucuuaguggaguaaugguuucaauggaagaaccugguugguacuccuuuggcuucgaaauaaaagauaagaaaugugauguccccuguauugggauagagaugguacaugaugguggaaaagagacuuggcacucagcagcaacagccauuuacuguuuaaugggcucaggacagcugcugugggacacugucacagguguugauauggcucuguaa

SEQ ID NO: 61231 - RNA, 1401 nt, Artificial Sequence
  derived and/or modified CDS sequence (wt) from neuraminidase__InfluenzaB__AGX17208
augcuaccuucaacuauacaaacguuaacccuauuucucacaucagggggaguauuauuaucacuauaugugucagcuucauugucauacuuacuauauucggauauauugcuaaaauucucaccaacagaaauaacuacaccaacaaugccauuggauugugcaaacgcaucaaauguucaggcugugaaccguucugcaacaaaaggggugacacuucuucucccagaaccggaguggacauacccgcguuuaucuugcccgggcucaaccuuucagaaagcacuccuaauuagcccucauagauucggagaaaccaaaggaaacucagcucccuugauaauaagggaaccuuuuauugcuuguggaccaaaggaaugcaaacacuuugcucuaacccauuaugcagcccaaccagggggauacuacaauggaacaagaggagacagaaacaagcugaggcaucuaauuucagucaaauugggcaaaaucccaacaguagaaaacuccauuuuccacauggcagcauggagcggguccgcaugccaugaugguaaagaauggacauauaucggaguugauggcccugacaauaaugcauugcucaaaauaaaauauggagaagcauauacugacacauaccauuccuaugcaaacaacauccuaagaacacaagaaagugccugcaauugcaucgggggaaauuguuaucuuaugauaacugauggcucagcuucagguauuagugaaugcagauuucuuaagauucgagagggccgaauaauaaaagaaauauuuccaacaggaagaguaaaacauacugaagaaugcacaugcggauuugccagcaauaaaaccauagaaugugccuguagagauaacaguuacacagcaaaaagacccuuugucaaauuaaacguggagacugauacagcagaaauaagauugaugugcacagagacuuauuuggacacccccagaccagaugauggaagcauaacagggccuugugaaucuaauggggacaaagggaguggaggcaucaagggaggauuuguucaucaaagaauggcauccaagauuggaaggugguacucucgaacgaugucuaaaacuagaaggauggggaugggacuguaugucaaguaugauggagacccaugggcugacagugaugcccuugcucuuaguggaguaaugguuucaauggaagaaccugguugguacuccuuuggcuucgaaauaaaagauaagaaaugugauguccccuguauugggauagagaugguacaugaugguggaaaagagacuuggcacucagcagcaacagccauuuacuguuuaaugggcucaggacagcugcugugggacacugucacagguguugauauggcucuguaa

SEQ ID NO: 61232 - RNA, 1401 nt, Artificial Sequence; identical to SEQ ID NO: 61174
  derived and/or modified CDS sequence (wt) from neuraminidase__InfluenzaB__AGX17219

SEQ ID NO: 61233 - RNA, 1401 nt, Artificial Sequence; identical to SEQ ID NO: 61211
  derived and/or modified CDS sequence (wt) from neuraminidase__InfluenzaB__AGX17230

SEQ ID NO: 61234 - RNA, 1401 nt, Artificial Sequence; identical to SEQ ID NO: 61174
  derived and/or modified CDS sequence (wt) from neuraminidase__InfluenzaB__AGX17241

SEQ ID NO: 61235 - RNA, 1401 nt, Artificial Sequence
  derived and/or modified CDS sequence (wt) from neuraminidase__InfluenzaB__AGX17252
augcuaccuucaacuauacaaacguuaacccuauuucucacaucagggggaguauuauuaucacuauaugugucagcuucauugucauacuuauuauauucggauauauugcuaaaauucucaccaacagaaauaacugcaccaacaaugccauuggauugugcaaacgcaucaaauguucaagcugugaaccguucugcaacaaaaggggugacacuucuucucccagaacuggaguggacauacccgcguuuaucuugcccgggcucaaccuuucagaaagcacuccuaauuagcccucauagauucggagaaaccaaaggaaacucagcucccuugauaauaagggaaccuuuuauugcuuguggaccaaaggaaugcaaacacuuugcucuaaccuauuaugcagcccaaccagggggauacuacaauggaacaagaggagacagaaacaagcugaggcaucuaauuucagucaaauugggcaaaaucccaacaguagaaaacuccauuuuccacauggcagcauggagcggguccgcaugccaugaugguaaagaauggacauauaucggaguugauggcccugacaauaaugcauugcucaaaauaaaauauggagaagcauauacugacacauaccauuccuaugcaaacaacauccuaagaacacaagaaagugccugcaauugcaucgggggaaauuguuaucuuaugauaacugauggcucagcuucagguauuagugaaugcagauuucuuaagauucgagagggccgaauaauaaaagaaauauuuccaacaggaagaguaaaacauacugaagaaugcacaugcggauuugccagcaauaaaaccauagaaugugccuguagagauaacaguuacacagcaaaaagacccuuugucaaauuaaacguggagacugauacagcagaaauaagauugaugugcacagagacuuauuuggacacccccagaccagcugauggaagcauaacagggccuugugaaucuaauggggacaaagggaguggaggcaucaagggaggauuuguucaucaaagaauggcauccaagauuggaaggugguacucucgaacgaugucuaaaaccaaaaggauggggaugggacuguaugucaaguaugauggagacccaugggcugacagugaugcccuugcucuuaguggaguaaugguuucaauggaagaaccugguugguacuccuuuggcuucgaaauaaaagauaagaaaugugauguccccuguauugggauagagaugguacaugaugguggaaaggagacuuggcacucagcagcaacagccauuuacuguuuaaugggcucaggacagcugcugugggacacugucacagguguugauauggcucuguaa

SEQ ID NO: 61236 - RNA, 1401 nt, Artificial Sequence
  derived and/or modified CDS sequence (wt) from neuraminidase__InfluenzaB__AGX17263
augcuaccuucaacuauacaaacguuaacccuauuucucacaucagggggaguauuauuaucacuauaugugucagcuucauugucauacuuacuauauucggauauauuacuaaaacucucaccaacagaaauaacugcaccaacaaugccauuggauugugcaaacgcaucaaauguucaggcugugaaccguucugcaacaaaaggggugacacuucuucucccagaaccggaguggacauacccgcguuuaucuugcccgggcucaaccuuucagaaagcacuccuaauuagcccucacagauucggagaaaccaaaggaaacucagcucccuugauaauaagggaaccuuuuauugcuuguggaccaaaggaaugcaaacacuuugcucuaacccauuaugcagcccaaccagggggauacuacaauggaacaagaggagacagaaacaagcugaggcaucuaauuucagucaaauugggcaaaaucccaacaguagaaaacuccauuuuccacauggcagcauggagcggguccgcaugccaugaugguaaagaauggacauauaucggaguugauggcccugacaauaaugcauugcucaaaauaaaauauggagaagcauauacugacacauaccauuccuaugcaaacaacauccuaagaacacaagaaagugccugcaauugcaucgggggaaauuguuaucuuaugauaacugauggcucagcuucagguauuagugaaugcagauuucuuaagauucgagagggccgaauaauaaaagaaauauuuccaacaggaagaguaaaacauacugaagaaugcacaugcggauuugccagcaauaaaaccauagaaugugccuguagagauaacaguuacacagcaaaaagacccuuugucaaauuaaacguggagacugauacagcagaaauaagauugaugugcacagagacuuauuuggacacccccagaccagaugauggaagcauaacagggccuugugaaucuaauggggacaaagggaguggaggcaucaagggaggauuuguucaucaaagaauggcauccaagauuggaaggugguacucucgaacgaugucuaaaacuaaaaggauggggaugggacuguaugucaaguaugauggagacccaugggcugacagugaugcccuugcucuuaguggaguaaugguuucaauggaagaaccugguugguacuccuuuggcuucgaaauaaaagauaagaaaugugauguccccuguauugggauagagaugguacaugaugguggaaaagagacuuggcacucagcagcaacagccauuuacuguuuaaugggcucaggacagcugcugugggacacugucacagguguugauauggcucuguaa

SEQ ID NO: 61237 - RNA, 1401 nt, Artificial Sequence
  derived and/or modified CDS sequence (wt) from neuraminidase__InfluenzaB__AGX17274
augcuaccuucaacuauacaaacguuaacccuauuucucacaucagggggaguauuauuaucacuauaugugucagcuucauugucauacuuacuauauucggauauauugcuaaaauucucaccaacagaaauaaaugcaccaacaaugccauuggauugugcaaacgcaucaaauguucaggcugugaaccguucugcaacaaaaggggugacacuucuucucccagaaccggaguggacauacccgcguuuaucuugcccgggcucaaccuuucagaaagcacuccuaauuagcccucauagauucggagaaaccaaaggaaacucagcucccuugauaauaagggaacccuuuauugcuuguggaccaaaggaaugcaaacacuuugcucuaacccauuaugcagcccaaccagggggauacuacaauggaacaagaggagacagaaacaaacugaggcaucuaauuucagucaaauugggcaaaaucccaacaguagaaaacuccauuuuccacauggcagcauggagcggguccgcaugccaugaugguaaagaauggacauauaucggaguugauggcccugacaauaaugcauugcucaaaauaaaauauggagaagcauauacugacacauaccauuccuaugcaaacaacauccuaagaacacaagaaagugccugcaauugcaucgggggaaauuguuaucuuaugauaacugauggcucagcuucagguauuagugaaugcagauuucuuaagauucgagagggccgaauaauaaaagaaauauuuccaacaggaagaguaaaacauacugaagaaugcacaugcggauuugccagcaauaaaaccauagaaugugccuguagagauaacaguuacacagcaaaaagacccuuugucaaauuaaacguggagacugauacagcagaaauaagauugaugugcacagagacuuauuuggacacccccagaccagaugauggaagcauaacagggccuugugaaucuaauggggacaaagggaguggaggcaucaagggaggauuuguucaucaaagaauggcauccaagauuggaaggugguacucucgaacgaugucuaaaacuaaaaggauggggaugggacuguaugucaaguaugauggagacccaugggcugacagugaugcccuugcucuuaguggaguaaugguuucaauggaagaaccugguugguacucguuuggcuucgaaauaaaagauaagaaaugugauguccccuguauugggauagagaugguacaugaugguggaaaagagacuuggcacucagcagcaacagccauuuacuguuuaaugggcucaggacagcugcugugggacacugucacagguguugauauggcucuguaa

SEQ ID NO: 61238 - RNA, 1401 nt, Artificial Sequence
  derived and/or modified CDS sequence (wt) from neuraminidase__InfluenzaB__AGX17285
augcuaccuucaacuauacaaacguuaacccuauuucucacaucagggggaguauuauuaucacuauauaugucagcuucauugucauacuuacuauauucggauauauugcuaaaauucucaccaacagaaauaacugcaccaacaaugccauuggauugugcaaacgcaucaaauguucaggcugugaaccguucugcaacaaaaggggugacacuucuucucccagaaccggaguggacauacccgcguuuaucuugcccgggcucaaccuuucagaaagcacuccuaauuagcccucauagauucggagaaaccaaaggaaacucugcucccuugauaauaagggaaccuuuuauugcuuguggaccaaaggaaugcaaacacuuugcucuaacccauuaugcagcccaaccagggggauacuacaauggaacaagaggagacagaaacaagcugaggcaucuaauuucagucaaauugggcaaaaucccaacaguagaaaacuccauuuuccacauggcagcauggagcggguccgcaugccaugaugguaaagaauggacauauaucggaguugauggcccugacaauaaugcauugcucaaaauaaaauauggagaagcauauacugacacauaccauuccuaugcaaacaacauccuaagaacacaagaaagugccugcaauugcaucgggggaaauuguuaucuuaugauaacugauggcucagcuucagguauuagugaaugcagauuucuuaagauucgagagggccgaauaauaaaagaaauauuuccaacaggaagaguaaaacauacugaagaaugcacaugcggauuugccagcaauaaaaccauagaaugugccuguagagauaacaguuacacagcaaaaagacccuuugucaaauuaaacguggagacugauacagcagaaauaagauugaugugcacagagacuuauuuggacacccccagaccagaugauggaagcauaacagggccuugugagucuaauggggacaaagggaguggaggcaucaagggaggauuuguucaucaaagaauggcauccaagauuggaaggugguacucucgaacgaugucuaaaacuaaaaggauggggaugggacuguaugucaaguaugauggagacccaugggcugacagugaugcccuugcucuuaguggaguaaugguuucaauggaagaaccugguugguacuccuuuggcuucgaaauaaaagauaagaaaugugauguccccuguauugggauagagaugguacaugaugguggaaaagagacuuggcacucagcagcaacagccauuuacuguuuaaugggcucaggacagcugcugugggacacugucacagguguugauauggcucuguaa

SEQ ID NO: 61239 - RNA, 1401 nt, Artificial Sequence
  derived and/or modified CDS sequence (wt) from neuraminidase__InfluenzaB__AGX17296
augcuaccuucaacuauacaaacguuaacccuauuucucacaucagggggaguauuauuaucacuauaugugucagcuucauugucauacuuacuauauucggauauauugcuaaaauucucaccaacagaaauaacugcaccaacaaugccauuggauugugcaaacgcaucaaauguucaggcugugaaccguucugcaacaaaaggggugacacuucuucucccagaaccggaguggacauacccgcguuuaucuugcccgggcucaaccuuucagaaagcacuccuaauuagcccucauagauucggagaagccaagggaaacucugcucccuugauaauaagggaaccuuuuauugcuuguggaccaaaggaaugcaaacacuuugcucuaacccauuaugcagcccaaccagggggauacuacaauggaacaagaggagacagaaacaagcugaggcaucuaauuucagucaaauugggcaaaaucccaacaguagaaaacuccauuuuccacauggcagcauggagcggguccgcaugccaugaugguaaagaauggacauauaucggaguugauggcccugacaauaaugcauugcucaaaauaaaauauggagaagcauauacugacacauaccauuccuaugcaaacaacauccuaagaacacaagaaagugccugcaauugcaucgggggaaauuguuaucuuaugauaacugauggcucagcuucagguauuagugaaugcagauuucuuaagauucgagagggccgaauaauaaaagaaauauuuccaacaggaagaguaaaacauacugaagaaugcacaugcggauuugccagcaauaaaaccauagaaugugccuguagagauaacaguuacacagcaaaaagacccuuugucaaauuaaacguggagacugauacagcagaaauaagauugaugugcacagagacuuauuuggacacccccagaccagaugauggaagcauaacagggccuugugagucuaauggggacaaagggaguggaggcaucaagggaggauuuguucaucaaagaauggcauccaagauuggaaggugguacucucgaacgaugucuaaaacuaaaaggauggggaugggacuguaugucaaguaugauggagacccaugggcugacagugaugcccuugcucuuaguggaguaaugguuucaauggaagaaccugguugguacuccuuuggcuucgaaauaaaagauaagaaaugugauguccccuguauugggauagagaugguacaugaugguggaaaagagacuuggcacucagcagcaacagccauuuacuguuuaaugggcucaggacagcugcugugggacacugucacagguguugauauggcucuguaa

SEQ ID NO: 61240 - RNA, 1401 nt, Artificial Sequence; identical to SEQ ID NO: 61172
  derived and/or modified CDS sequence (wt) from neuraminidase__InfluenzaB__AGX17307

SEQ ID NO: 61241 - RNA, 1401 nt, Artificial Sequence; identical to SEQ ID NO: 60626
  derived and/or modified CDS sequence (wt) from neuraminidase__InfluenzaB__AGX17318

SEQ ID NO: 61242 - RNA, 1401 nt, Artificial Sequence
  derived and/or modified CDS sequence (wt) from neuraminidase__InfluenzaB__AGX17329
augcuaccuucaacuauacaaacguuaacccuauuucucacaucagggggaguauuauuaucacuauaugugucagcuucauugucauacuuacuauauucggauauguugcuaaaauucucaccaacagaaauaacugcaccaacaaugccauuggauugugcaaacgcaucaaauguucaggcugugaaccguucugcaacaaaaggggugacacuucuucucccagaaccggaguggacauacccgcguuuaucuugcccgggcucaaccuuucagaaagcacuccuaauuagcccucauagauucggagaaaccaaaggaaacucagcucccuugauaauaagagaaccuuuuauugcuuguggaccaaaggaaugcaaacacuuugcucuaacccauuaugcagcccaaccagggggauacuacaguggaacaagaggagacagaaacaagcugaggcaucuaauuucagucaaauugggcaaaaucccaacaguagaaaacuccauuuuccacauggcagcauggagcggguccgcaugccaugaugguaaagaauggacauauaucggaguugauggcccugacaauaaugcauugcucaaaauaaaauauggagaagcauauacugacacauaccauuccuaugcaaacaacauccuaagaacacaagaaagugccugcaauugcaucgggggaaauuguuaucuuaugauaacugauggcucagcuucagguauuagugaaugcagauuucuuaagauucgagagggccgaauaauaaaagaaauauuuccaacaggaagaguaaaacauacugaagaaugcacaugcggauuugccagcaauaaaaccauagaaugugccuguagagauaacaguuacacagcaaaaagacccuuugucaaauuaaacguggagacugauacagcagaaauaagauugaugugcacagagacuuauuuggacacccccagaccagaugauggaagcauaacagggccuugugaaucuaauggggacaaagggaguggaggcaucaagggaggauuuguccaucaaagaauggcauccaagauuggaaggugguacucucgaacgaugucuaaaaauaaaaggauggggaugggacuguaugucaaguaugauggagacccaugggcugacagugaugcccuugcucuuaguggaguaaugguuucaauggaagaaccugguugguacuccuuuggcuucgaaauaaaagauaagaaaugugauguccccuguauugggauagagaugguacaugaugguggaaaagagacuuggcacucagcagcaacagccauuuacuguuuaaugggcucaggacagcugcugugggacacugucacagguguugauauggcucuguaa

SEQ ID NO: 61243 - RNA, 1401 nt, Artificial Sequence; identical to SEQ ID NO: 61174
  derived and/or modified CDS sequence (wt) from neuraminidase__InfluenzaB__AGX17340

SEQ ID NO: 61244 - RNA, 1401 nt, Artificial Sequence
  derived and/or modified CDS sequence (wt) from neuraminidase__InfluenzaB__AGX17351
augcucccuucaacuauacaaacguuaacccuauuucucacaucagggggaguauuauuaucacuauaugugucagcuucauugucauacuuacuauauucggauauauugcuaaaauucucaccaacagaaauaacugcaccaacaaugccauuggauugugcaaacgcaucaaauguucaggcugugaaccguucugcaacaaaagggguaacacuucuucucccagaaccagaguggacauacccgcguuuaucuugcccgggcucaaccuuucagaaagcacuccuaauuagcccucauagauucggagaaaccaaaggaaacucagcucccuugauaauaagggaacccuuuauugcuuguggaccaaaggaaugcaaacacuuugcucuaacccauuaugcagcccaaccagggggauacuacaauggaacaagaggagacagaaacaagcugaggcaucuaauuucagucaaauugggcaaaaucccaacaguagaaaacuccauuuuccacauggcagcauggagcggguccgcaugccaugaugguaaagaauggacauauaucggaguugauggcccugacaauaaugcauugcucaaaauaaaauauggagaagcauauacugacacauaccauuccuaugcaaacaacauccuaagaacacaagaaagugccugcaauugcaucgggggaaauuguuaucuuaugauaacugauggcucagcuucagguauuagugaaugcagauuucuuaagauucgagagggccgaauaauaaaagaaauauuuccaacaggaagaguaaaacauacugaagaaugcacaugcggauuugccagcaauaagaccauagaaugugccuguagagauaacaguuacacagcaaaaagacccuuugucaaauuaaacguggagacugauacagcagaaauaagauugaugugcacagagacuuauuuggacacccccagaccagaugauggaagcauaacagggccuugugaaacuaauggggacaaagggaguggaggcaucaagggaggauuuguucaucaaagaauggcauccaagauuggaaggugguacucucgaacgaugucuaaaacuaaaaggauggggaugggacuguaugucaaguaugauggagacccaugggcugacagugaugcccuugcucuuaguggaguaaugguuucaauggaagaaccugguugguacuccuuuggcuucgaaauaaaagauaagaaaugugauguccccuguauuggaauagagaugguacaugaugguggaaaagagacuuggcacucagcagcaacagccauuuacuguuuaaugggcucaggacagcugcugugggacacugucacagguguugauauggcucuguaa

SEQ ID NO: 61245 - RNA, 1401 nt, Artificial Sequence
  derived and/or modified CDS sequence (wt) from neuraminidase__InfluenzaB__AGX17362
augcuaccuucaacuauacaaacauuaacccuauuucucacaucagggggaguauuauuaucacuauaugugucagcuucauugucauacuuacuauauucggauauauugcuaaaauucucaccaacagaaauaacugcaccaacaauaccauuggauugugcaaacgcaucaaauauucaggcugugaaccguucugcaacaaaaggggugacacuucuucucccagaaccggaguggacauacccgcguuuaucuugcccgggcucaaccuuucagaaagcacuccuaauuagcccucauagauucggagaaaccaaaggaaacucagcucccuugauaauaagggaaccuuuuauugcuuguggaccaaaggaaugcaaacacuuugcucuaacccauuaugcagcccaaccagggggauacuacaauggaacaagaggagacagaaacaagcugaggcaucuaauuucagucaaauugggcaaaaucccaacaguagaaaacuccauuuuccacauggcagcauggagcggguccgcaugccaugaugguaaagaauggacauauaucggaguugauggcccugacaauaaugcauugcucaaaauaaaauauggagaagcauauacugacacauaccauuccuaugcaaacaacauccuaagaacacaagaaagugccugcaauugcaucgggggaaauuguuaucuuaugauaacugauggcucagcuucagguauuagugaaugcagauuucuuaagauucgagagggccgaauaauaaaagaaauauuuccaacaggaagaguaaaacauacugaagaaugcacaugcggauuugccagcaauaaaaccauagaaugugccuguagagauaacaguuacacagcaaaaagacccuuugucaaauuaaacguggagacugauacagcagaaauaagauugaugugcacagagacuuauuuggacacccccagaccagaugauggaagcauaacagggccuugugaaucuaauggggacaaagggaguggaggcaucaagggaggauuuguucaucaaagaauggcauccaagauuggaaggugguacucucgaacgaugucuaaaacuaaaaggauggggaugggacuguaugucaaguaugauggagacccaugggcugacagugaugcccuugcucuuaguggaguaaugguuucaauggaagaaccugguugguacuccuuuggcuucgaaauaaaagauaagaaaugugauguccccuguauugggauagagaugguacaugaugguggaaaagagacuuggcacucagcagcaacagccauuuacuguuuaaugggcucaggacagcugcugugggacacugucacagguguugauauggcucuguaa

SEQ ID NO: 61246 - RNA, 1401 nt, Artificial Sequence
  derived and/or modified CDS sequence (wt) from neuraminidase__InfluenzaB__AGX17373
augcuaccuucaacuauacaaacguuaacccuauuucucacaucagggggaguguuauuaucacuauaugugucagcuucauugucauacuuacuauauucggauauauugcuaaaauucucaccaacagaaauaacugcaccaacaaugccauuggauugugcaaacgcaucaaauguucaggcugugaaccguucugcaacaaaaggggugacacuucuucucccagaaccggaguggacauacccgcguuuauccugcccgggcucaaccuuucagaaagcacuccuaauuagcccucauagauucggagaaaccaaaggaaacucagcucccuugauaauaagggaaccuuucauugcuuguggaccaaaggaaugcaaacacuuugcucuaacccauuaugcagcccaaccagggggauacuacaauggaacaagaggagacagaaacaagcugaggcaucuaauuucagucaaauugggcaaaaucccaacaguagaaaacuccauuuuccauauggcagcauggagcggguccgcaugccaugaugguaaggaauggacauauaucggaguugauggcccugacaauaaugcauugcucaaaauaaaauauggagaagcauauacugacacauaccauuccuaugcaaacaacauccuaagaacacaagaaagugccugcaauugcaucgggggaaauuguuaucuuaugauaacugauggcucagcuucagguguuagugaaugcagauuucuuaagauucgagagggccgaauaauaaaagaaauauuuccaacaggaagaguaaaacauacugaagaaugcacaugcggauuugccaacaauaaaaccauagaaugugccuguagagauaacaguuacacagcaaaaagacccuuugucaaauuaaacguggagacugauacagcagaaauaagauugaugugcacagagacuuauuuggacacccccagaccagaugauggaagcauaacagggccuugugaaucuaauggggacaaagggaguggaggcaucaagggaggauuuguucaucaaagaauggcauccaagauuggaaggugguacucucgaacgaugucuaaaacuaaaaggauggggaugggacuguaugucaaguaugauggagacccaugggcugacagugaugcccuugcucuuaguggaguaaugguuucaauggaagaaccugguugguacuccuuuggcuucgaaauaaaagauaagaaaugugauguccccuguauugggauagagaugguacaugaugguggaaaagagacuuggcacucagcagcaacagccauuuacuguuuaaugggcucaggacagcugcugugggacacugucacagguguuaauauggcucuguaa

SEQ ID NO: 61247 - RNA, 1401 nt, Artificial Sequence; identical to SEQ ID NO: 60626
  derived and/or modified CDS sequence (wt) from neuraminidase__InfluenzaB__AGX17384

SEQ ID NO: 61248 - RNA, 1401 nt, Artificial Sequence; identical to SEQ ID NO: 61102
  derived and/or modified CDS sequence (wt) from neuraminidase__InfluenzaB__AGX17395

SEQ ID NO: 61249 - RNA, 1401 nt, Artificial Sequence
  derived and/or modified CDS sequence (wt) from neuraminidase__InfluenzaB__AGX17404
augcuaccuucaacuauacaaacguuaacccuauuucucacaucagggggaguauuauuaucacuauaugugucagcuucauugucauacuuacuauauucggauauauugcuaaaauucucaccaacagaaauaacugcaccaacaaugccauuggauugugcaaacgcaucaaauguucaggcugugaaccguucugcaacaaaaggggugacacuucuucucccagaaccagaguggacauacccgcguuuaucuugcccgggcucaaccuuucagaaagcacuccuaauuagcccucauagauucggagaaaccaaaggaaacucagcucccuugauaauaagggaaccuuuuauugcuuguggaccaaaggaaugcaaacacuuugcucuaacccauuaugcagcccaaccagggggauacuacaauggaacaagaggagacagaaacaagcugaggcaucuaauuucagucaaauugggcaaaaucccaacaguagaaaacuccauuuuccacauggcagcauggagcggguccgcaugccaugaugguaaagaauggacauauaucggaguugauggcucugacaauaaugcauugcucaaaauaaaauauggagaagcauauacugacacauaccauuccuaugcaaacaacauccuaagaacacaagaaagugccugcaauugcaucgggggaaauuguuaucuuaugauaacugauggcucagcuucagguauuagugaaugcagauuucuuaagauucgagagggccgaauaauaaaagaaauauuuccaacaggaagaguaaaacauacugaagaaugcacaugcggauuugccagcaauaagaccauagaaugugccuguagagauaacaguuacacagcaaaaagacccuuugucaaauuaaacguggagacugauacagcagaaauaagauugaugugcacagagacuuauuuggacacccccagaccagaugauggaagcauaacagggccuugugaaucuaauggggacaaagggaguggaggcaucaagggaggauuuguucaucaaagaauggcauccaagauuggaaggugguacucucgaacgaugucuaaaacuaaaaggauggggaugggacuguaugucaaguaugauggagacccaugggcugacagugaugcccuugcucuuaguggaauaaugguuucaauggaagaaccugguugguacuccuuuggcuucgaaauaaaagauaagaaaugugauguccccuguauuggaauagagaugguacaugaugguggaaaagagacuuggcacucagcagcaacagccauuuacuguuuaaugggcucaggacagcugcugugggacacugucacagguguugauauggcucuguaa

SEQ ID NO: 61250 - RNA, 1401 nt, Artificial Sequence
  derived and/or modified CDS sequence (wt) from neuraminidase__InfluenzaB__AGX17415
augcuaccuucaacuauacaaacauuaacccuauuucucacaucagggggaguauuauuaucacuauaugugucagcuucauugucauacuuacuauauucggauauauugcuaaaauucucaccaacagaaauaacugcaccaacaaugccauuggauugugcaaacgcaucaaauguucaggcugugaaccguucugcaacaaaaggggugacacuucuucucccagaaccggacuggacauacccgcguuuaucuugcccgggcucaaccuuucagaaagcacuccuaauuagcccucauagauucggagaaaccaaaggaaacucagcucccuugauaauaagggaaccuuuuauugcuuguggaccaaaggaaugcaaacacuuugcucuaacccauuaugcagcccaaccagggggauacuacaauggaacaagaggagacagaaacaagcugaggcaucuaauuucagucaaauugggcaaaaucccaacaguagaaaacuccauuuuccacauggcagcauggagcggguccgcaugccaugaugguaaagaauggacauauaucggaguugauggcccugacaauaaugcauugcucaaaauaaaauauggagaagcauauacugacacauaccauuccuaugcaaacaacauccuaagaacacaagaaagugccuguaauugcaucgggggaaauuguuaucuuaugauaacugauggcucagcuucagguauuagugaaugcagauuucuuaagauucgagagggccgaauaauaaaagaaauauuuccaacaggaagaguaaaacauacugaagaaugcacaugcggauuugccagcaauaaaaccauagaaugugccuguagagauaacaguuacacagcaaaaagacccuuugucaaauuaaacguggagacugauacagcagaaauaagauugaugugcacagagacuuauuuggacaccccuagaccagaugauggaagcauaacagggccuugugaaucuaauggggacaaagggaguggaggcaucaagggaggauuuguucaucaaagaauggcauccaagauuggaaggugguacucucgaacgaugucuaaaacuaaaaggauggggaugggacuguaugucaaguaugauggagacccaugggcugacagugaugcccuugcucuuaguggaguaaugguuucaauggaagaaccugguugguacuccuuuggcuucgaaauaaaagauaagaaaugugauguccccuguauugggauagagaugguacaugaugguggaaaagagacuuggcacucagcagcaacagccauuuacuguuuaaugggcucaggacagcugcugugggacacugucacagguguugauauggcucuguaa

SEQ ID NO: 61251 - RNA, 1401 nt, Artificial Sequence
  derived and/or modified CDS sequence (wt) from neuraminidase__InfluenzaB__AGX17426
augcuaccuucaacuauacaaacguuaacccuauuucucacaucagggggaguauuauuaucacuauaugugucagcuucauugucauacuuacuauauucggauauauugcuaaaauucucaccaacagaaauaacugcaccaacaaugccauuggauugugcaaacgcaucaaauguucaggcugugaaccguucugcaacaaaaggggugacauuucuucucccagaaccggaguggacauacccgcguuuaucuugcccgggcucaaccuuucagaaagcacuccuaauuagcccucauagauucggagaaaccaaaggaaacucagcucccuugauaauaagggaaccuuuuauugcuuguggaccaaaggaaugcaaacacuuugcucuaacccauuaugcagcccaaccagggggauacuacaauggaacaagaggagacagaaacaagcugaggcaucuaauuucagucaaauugggcaaaaucccaacaguagaaaacuccauuuuccacauggcagcauggagcggguccgcaugccaugaugguaaagaauggacauauaucggaguugauggcccugacaauaaugcauugcucaaaauaaaauauggagaagcauauacugacacauaccauuccuaugcaaacaacauccuaagaacacaagaaagugccugcaauugcaucgggggaaauuguuaucuuaugauaacugauggcucagcuucagguauuagugaaugcagauuucuuaagauucgagagggccgaauaauaaaagaaauauuuccaacaggaagaguaaaacauacugaagaaugcacaugcggauuugccagcaauaaaaccauagaaugugccuguagagauaacaguuacacagcaaaaagacccuuugucaaauuaaacguggagacugauacagcagaaauaagauugaugugcacagagacuuauuuggacacccccagaccagaugauggaagcauaacagggccuugugaaucuaauggggacaaagggaguggaggcaucaagggaggauuuguucaucaaagaauggcauccaagauuggaaggugguacucucgaacgaugucuaaaacuaaaaggauggggaugggacuguaugucaaguaugauggagacccaugggcugacagugaugcccuugcucuuaguggaguaaugguuucaauggaagaaccugguugguacuccuuuggcuucgaaauaagagauaagaaaugugauguccccuguauugggauagagaugguacaugaugguggaaaagagacuuggcacucagcagcaacagccauuuacuguuuaaugggcucaggacagcugcugugggacacugucacagguguugauauggcucuguaa

SEQ ID NO: 61252 - RNA, 1401 nt, Artificial Sequence
  derived and/or modified CDS sequence (wt) from neuraminidase__InfluenzaB__AGX17437
augcuaccuucaacuauacaaacguuaacccuauuucucacaucagggggaguauuauuaucacuauaugugucaguuucauugucauacuuacuauauucggauauauugcuaaaauucucaccaacagaaauaacugcacaaacaaugccauuggauuuugcaaacgcaucaaauguucaggcugugaaccguucugcaacaaaaggggugacacuucuucucccagaaccggaguggacauacccgcguuuaucuugcccgggcucaaccuuucagaaagcacuccuaauuagcccucauagauucggagaaaccaaaggaaacucagcucccuugauaauaagggaaccuuuuauugcuuguggaccaaaggaaugcaaacacuuugcucuaacccauuaugcagcccaaccagggggauacuacaauggaacaagaggagacagaaacaagcugaggcaucuaauuucagucaaauugggcaaaaucccaacaguagaaaacuccauuuuccacauggcagcauggagcggguccgcaugccaugaugguaaagaauggacauauaucggaguugauggcccugacaauaaugcauuacucaaaauaaaauauggagaagcauauacugacacauaccauuccuaugcaaacaacauccuaagaacacaagaaagugccugcaauugcaucgggggaaauuguuaucuuaugauaacugauggcucagcuucagguauuagugaaugcagauuucuuaagauucgagagggccgaauaauaaaagaaauauuuccaacaggaagaguaaaacauacugaagaaugcacaugcggauuugccagcaauaaaaccauagaaugugccuguagagauaacaguuacacagcaaaaagacccuuugucaaauuaaacguggagacugauacagcagaaauaagauugaugugcacagagacuuauuuggacacccccagaccagaugauggaagcauaacagggccuugugaaucuaauggggacaaagggaguggaggcaucaagggaggauuuguucaucaaagaauggcauccaagauuggaaggugguacucucgaacgaugucuaaaacuaaaaggauggggaugggacuguaugucaaguaugauggagacccaugggcugacagugaugcccuugcucuuaguggaguaaugguuucaauggaagaaccugguugguacuccuuuggcuucgaaauaagagauaagaaaugugauguccccuguauugggauagagaugguacaugaugguggaaaagagacuuggcacucagcagcaacagccauuuacuguuuaaugggcucaggacagcugcugugggacacugucacagguguugauauggcucuguaa

SEQ ID NO: 61253 - RNA, 1401 nt, Artificial Sequence
  derived and/or modified CDS sequence (wt) from neuraminidase__InfluenzaB__AGX17448
augcucccuucaacuauacaaacguuaacccuauuucucacaucagggggaguauuauuaucacuauaugugucagcuucauugucauacuuacuauauucggauauauugcuaaaauucucaccaacagaaauaacugcaccaacaaugccauuggauugugcaaacgcaucaaauguucaggcugugaaccguucugcaacaaaagggguaacacuucuucucccagaaccagaguggacauacccgcguuuaucuugcccgggcucaaccuuucagaaagcacuccuaauuagcccucauagauucggagaaaccaaaggaaacucagcucccuugauaauaagggaacccuuuauugcuuguggaccaaaggaaugcaaacacuuugcucuaacccauuaugcagcccaaccagggggauacuacaauggaacaagaggagacagaaacaagcugaggcaucuaauuucagucaaauugggcaaaaucccaacaguagaaaacuccauuuuccacauggcagcauggagcggguccgcaugccaugaugguaaagaauggacauauaucggaguugauggcccugacaauaaugcauugcucaaaauaaaauauggagaagcauauacugacacauaccauuccuaugcaaacaacauccuaagaacacaagaaagugccugcaauugcaucgggggaaauuguuaucuuaugauaacugauggcucagcuucagguauuagugaaugcagauuucuuaagauucgagagggccgaauaauaaaagaaauauuuccaacaggaagaguaaaacauacugaagaaugcacaugcggauuugccagcaauaagaccauagaaugugccuguagagauaacaguuacacagcaaaaagacccuuugucaaauuaaacguggagacugauacagcagaaauaagauugaugugcacagagacuuauuuggacacccccagaccagaugauggaagcauaacagggccuugugaaacuaauggggacaaagggaguggaggcaucaagggaggauuuguucaucaaagaauggcauccaagauuggaaggugguacucucgaacgaugucuaaaacuaaaaggauggggaugggacuguaugucaaguaugauggagacccaugggcugacagugaugcccuuguucuuaguggaguaaugguuucaauggaagaaccugguugguacuccuuuggcuucgaaauaaaagauaagaaaugugauguccccuguauuggaauagagaugguacaugaugguggaaaagagacuuggcacucagcagcaacagccauuuacuguuuaaugggcucaggacagcugcugugggacacugucacagguguugauauggcucuguaa

SEQ ID NO: 61254 - RNA, 1401 nt, Artificial Sequence
  derived and/or modified CDS sequence (wt) from neuraminidase__InfluenzaB__AGX17459
augcuaccuucaacuauacaaacauuaacccuauuucucacaucagggggaguauuauuaucacuauaugugucagcuucauugucauacuuacuauauucggauauauugcuaaaauucucaccaacagaaauaacugcaucaacaaugccauuggauugugcaaacgcaucaaauguucaggcugugaaccguucugcaacaaaaggggugacacuucuucucccagaaccggacuggacauacccgcguuuaucuugcccgggcucaaccuuucagaaagcacuccuaauuagcccucauagauucggagaaaccaaaggaaacucagcucccuugauaauaagggaaccuuuuauugcuuguggaccaaaggaaugcaaacacuuugcucuaacccauuaugcagcccaaccagggggauacuacaauggaacaagaggagacagaaacaagcugaggcaucuaauuucagucaaauugggcaaaaucccaacaguagaaaacuccauuuuccacauggcagcauggagcggguccgcaugccaugaugguaaagaauggacauauaucggaguugauggcccugacaauaaugcauugcucaaaauaaaauauggagaagcauauacugacacauaccauuccuaugcaaacaacauccuaagaacacaagaaagugccuguaauugcaucgggggaaauuguuaucuuaugauaacugauggcucagcuucagguauuagugaaugcagauuucuuaagauucgagagggccgaauaauaaaagaaauauuuccaacaggaagaguaaaacauacugaagaaugcacaugcggauuugccagcaauaaaaccauagaaugugccuguagagauaacaguuacacagcaaaaagacccuuugucaaauuaaacguggagacugauacagcagaaauaagauugaugugcacagagacuuauuuggacaccccuagaccagaugauggaagcauaacagggccuugugaaucuaauggggacaaagggaguggaggcaucaagggaggauuuguucaucaaagaauggcauccaagauuggaaggugguacucucgaacgaugucuaaaacuaaaaggauggggaugggacuguaugucaaguaugauggagacccaugggcugacagugaugcccuugcucuuaguggaguaaugguuucaauggaagaaccugguugguacuccuuuggcuucgaaauaaaagauaagaaaugugauguccccuguauugggauagagaugguacaugaugguggaaaagagacuuggcacucagcagcaacagccauuuacuguuuaaugggcucaggacagcugcugugggacacugucacagguguugauauggcucuguaa

SEQ ID NO: 61255 - RNA, 1401 nt, Artificial Sequence
  derived and/or modified CDS sequence (wt) from neuraminidase__InfluenzaB__AGX17470
augcuaccuucaacuauacaaacguuaacccuauuucucacaucagggggaguauuauuaucacuauaugugucagcuucauugucauacuuacuauauucggauauauugcuaaaauucucaccaacagaaauaacugcaccaacaaugccauuggauugugcgaacgcaucaaauguucaggcugugaaccguucugcaacaaaaggggugacacuucuucucccagaaccggaguggacauacccgcguuuaucuugcccgggcucaaccuuucagaaagcacuccuaauuagcccucauagauucggagaaaccaaaggaaacucagcucccuugauaauaagggaaccuuuuauugcuuguggaccaaaggaaugcaaacacuuugcucuaacccauuaugcagcccaaccagggggauacuacaauggaacaagaggagacagaaacaagcugaggcaucuaauuucagucaaauugggcaaaaucccaacaguagaaaacuccauuuuccacauggcagcauggagcggguccgcaugccaugaugguaaagaauggacauauaucggaguugauggcccugacaauaaugcauugcucaaaauaaaauauggagaagcauauacugacacauaccauuccuaugcaaacaacauccuaagaacacaagaaagugccugcaauugcaucgggggaaauuguuaucuuaugauaacugauggcucagcuucagguauuagugaaugcagauuucuuaagauucgagagggccgaauaauaaaagaaauauuuccaacaggaagaguaaaacauacugaagaaugcacaugcggauuugccagcaauaaaaccauagaaugugccuguagagauaacaguuacacagcaaaaagacccuuugucaaauuaaacguggagacugauacagcagaaauaagauugaugugcacagagacuuauuuggacacccccagaccagaugauggaagcauaacagggccuugugaaucuaauggggacaaagggaguggaggcaucaagggaggauuuguucaucaacgaauggcauccaagauuggaaggugguacucucgaacgaugucuaaaacuaaaaggauggggaugggacuguaugucaaguaugauggagacccaugggcugacagugaugcccuugcucuuaguggaguaaugguuucaauggaagaaccugguugguacuccuuuggcuucgaaauaagagauaagaaaugugauguccccuguauugggauagagaugguacaugaugguggaaaagagacuuggcacucagcagcaacagccauuuacuguuuaaugggcucaggacagcugcugugggacacugucacagguguugauauggcucuguaa

SEQ ID NO: 61256 - RNA, 1401 nt, Artificial Sequence
  derived and/or modified CDS sequence (wt) from neuraminidase__InfluenzaB__AGX17481
augcuaccuucaacuauacaaacguuaacccuauuucucacaucagggggaguauuauuaucacuauaugugucagcuucauugucauacuuacuauauucggauauauugcuaaaauucucaccaacagaaauaacugcaccaacaaugccauuggauugugcaaacgcaucaaauguucaggcugugaaccguucugcaacaaaaggggugacacuuauucucccagaaccggaguggacauacccgcguuuaucuugcccgggcucaaccuuucagaaagcacuccuaauuagcccucauagauucggagaaaccaaaggaaacucagcucccuugauaauaagggaaccuuuuauugcuuguggaccaaaggaaugcaaacacuuugcucuaacccauuaugcagcccaaccagggggauacuacaauggaacaagaggagacagaaacaagcugaggcaucuaauuucagucaaauugggcaaaaucccaacaguagaaaacuccauuuuccauauggcagcauggagcgggucugcaugccaugaugguaaagaauggacauauaucggaguugauggcccugacaauaaugcauugcucaaaauaaaauauggagaagcauauacugacacauaccauuccuaugcaaacaacauccuaagaacacaagaaagugccugcaauugcaucgggggaaauuguuaucuuaugauaacugauggcucagcuucagguauuagugaaugcagauuucuuaagauucgagagggccgaauaauaaaagaaauauuuccaacaggaagaguaaaacauacugaagaaugcacaugcggauuugccagcaauaaaaccauagaaugugccuguagagauaacaguuacacagcaaaaagacccuuugucaaauuaaacguagagacugauacagcagaaauaagauugaugugcacagagacuuauuuggacacccccagaccagaugauggaagcauaacagggccuugugaauccaauggggacaaagggaguggaggcaucaagggaggauuuguucaucaaagaauggcauccaagauuggaaggugguacucucgaacgaugucuaaaacuaaaaggauggggaugggacuguaugucaaguaugauggagacccaugggcugacagugaugcccuugcucuuaguggaguaaugguuucaguggaagaaccugguugguacuccuuuggcuucgaaauaaaagauaagaaaugugauguccccuguauugggauagagaugguacaugaugguggaaaagagacuuggcacucagcagcaacagccauuuacuguuuaaugggcucaggacagcugcugugggacacugucacagguguugauauggcucuguaa

SEQ ID NO: 61257 - RNA, 1401 nt, Artificial Sequence
  derived and/or modified CDS sequence (wt) from neuraminidase__InfluenzaB__AGX17492
augcuaccuucaacuauacaaacguuaacccuauuucucacaucagggggaguauuauuaucacuauaugugucagcuucauugucauacuuacuauauucggauauauugcuaaaauucucaccaacagaaauaacugcaccaacaaugccauuggauugugcaaacgcaucaaauguucaggcugugaaccguucugcaacaaaaggggugacacuucuucucccagaaccggaguggacauacccgcguuuaucuugcccgggcucaaccuuucagaaagcacuccuaauuagcccucauagauucggagaaaccaaaggaaacucugcucccuugauaauaagggaaccuuuuauugcuuguggaccaaaggaaugcaaacacuuugcucuaacccauuaugcagcccaaccagggggauacuacaauggaacaagaggagacagaaacaagcugaggcaucuaauuucagucaaauugggcaaaaucccaacaguagaaaacuccauuuuccacauggcagcauggagcggguccgcaugccaugaugguaaagaauggacauauauuggaguugauggcccugacaauaaugcauugcucaaaauaaaauauggagaagcauauacugacacauaccauuccuaugcaaacaacauccuaagaacacaagaaagugccugcaauugcaucgggggaaauuguuaucuuaugauaacugauggcucagcuucagguauuagugaaugcagauuucuuaagauucgagagggccgaauaauaaaagaaauauuuccaacaggaagaguaaaacauacugaagaaugcacaugcggauuugccagcaauaaaaccauagaaugugccuguagagauaacaguuacacagcaaaaagacccuuugucaaauuaaacguggagacugauacagcagaaauaagauugaugugcacagagacuuauuuggacacccccagaccagaugauggaagcauaacagggccuugugagucuaauggggacaaagggaguggaggcaucaagggaggauuuguucaucaaagaauggcauccaagauuggaaggugguacucucgaacgaugucuaaaacuaaaaggauggggaugggacuguaugucaaguaugauggagacccaugggcugacagugaugcccuugcucuuaguggaguaaugguuucaauggaagaaccugguugguacuccuuuggcuucgaaauaaaagauaagaaaugugauguccccuguauugggauagagaugguacaugaugguggaaaagagacuuggcacucagcagcaacagccauuuacuguuuaaugggcucaggacagcugcugugggacacugucacagguguugauauagcucuguaa

SEQ ID NO: 61258 - RNA, 1401 nt, Artificial Sequence
  derived and/or modified CDS sequence (wt) from neuraminidase__InfluenzaB__AGX17503
augcuaccuucaacuauacaaacguuaacccuauuucucacaucagggggaguauuauuaucacuauaugugucagcuucauugucauacuuacuauauucggauauauuacuaaaauuuucaccaacagaaauaacugcaccaacaaugccauuggauugugcaaacgcaucaaacguucaggcugugaaccguucugcaacaaaaggggugacacuucuucucccagaaccggaguggacauacccgcguuuaucuugcccuggcuuaaccuuucagaaagcacuccuaauuagcccucauagauucggagaaaccaaaggaaacucagcucccuugauaauaagggaacccuuuauugcuuguggaccaaaggaaugcaaacacuuugcucuaacccauuaugcagcccaaccagggggauacuacaauggaacaagaggagacagaaacaagcugaggcaucuaauuucagucaaauugggcaaaaucccaacaguagaaaacuccauuuuccacauggcagcauggagcggguccgcaugccaugaugguaaagaauggacauauaucggaguugauggcccugacaauaaugcauugcucaaaauaaaauauggagaagcauauacugacacauaccauuccuaugcaaacaacauccuaagaacacaagaaagugccugcaauugcaucgggggaaauuguuaucuuaugauaacugauggcucagcuucagguauuagugaaugcagauuucuuaagauucgagagggccgaauaauaaaagaaauauuuccaacaggaagaguaaaacauacugaagaaugcacaugcggauuugccagcaauaaaaccauagaaugugccuguagagauaacaguuacacagcaaaaagacccuuugucaaauuaaacguggagacugauacagcagaaauaagauugaugugcacagaaacuuauuuggacacccccagaccagaugauggaagcauaacagggccuugugaaucuaauggggacaaagggaguggaggcaucaagggaggauuuguucaucaaagaauggcauccaagauuggaaggugguacucucgaacgaugucuaaaacuaaaaggauggggaugggacuguaugucaaguaugauggagacccaugggcugacagugaugcccuugcucuuaguggaguaaugguuucaauggaagaaccugguugguacuccuuuggcuucgaaauaaaagauaagaaaugugauguccccuguauugggauagagaugguacaugaugguggaaaagagacuuggcacucagcagcaacagccauuuacuguuuaaugggcucaggacagcugcugugggacacugucacagguguugauauggcucuguaa

SEQ ID NO: 61259 - RNA, 1401 nt, Artificial Sequence; identical to SEQ ID NO: 60626
  derived and/or modified CDS sequence (wt) from neuraminidase__InfluenzaB__AGX17514

SEQ ID NO: 61260 - RNA, 1401 nt, Artificial Sequence
  derived and/or modified CDS sequence (wt) from neuraminidase__InfluenzaB__AGX17525
augcuaccuucaacuauacaaacguuaacccuauuucucacaucagggggaguauuauuaucacuauaugugucagcuucauugucauacuuacuauauucggauauauugcuaaaauucucaccaacagaaauaacugcaccaacaaugccauuggauugugcaaacgcaucaaauguucaggcugugaaccguucugcaacaaaaggggugacacuucuucucccagaaccggaguggacauacccgcguuuaucuugcccgggcucaaccuuucagaaagcacuccuaauuagcccucauagauucggagaaaccaaaggaaacucagcucccuugauaauaagggaaccuuuuauugcuuguggaccaaaggaaugcaaacacuuugcucuaacccauuaugcagcccaaccagggggauacuacaauggaaaaagaggagacagaaacaagcugaggcaucuaauuucagucaaauugggcaaaaucccaacaguagaaaacuccauuuuccacauggcagcauggagcggguccgcaugccaugaugguaaagaauggacauauaucggaguugauggcccugacaauaaugcauugcucaaaauaaaauauggagaagcauauacugacacauaccauuccuaugcaaacaacauccuaagaacacaagaaagugccugcaauugcaucgggggaaauuguuaucuuaugauaacugauggcucagcuucagguauuagugaaugcagauuucuuaagauucgagagggccgaauaauaaaagaaauauuuccaacaggaagaguaaaacauacugaagaaugcacaugcggauuugccagcaauaaaaccauagaaugugccuguagagauaacaguuacacagcaaaaagacccuuugucaaauuaaacguggagacugauacagcagaaauaagauugaugugcacagagacuuauuuggacacccccagaccagaugauggaagcauaacagggccuugugaaucuaauggggacaaagggaguggaggcaucaagggaggauuuguucaucaaagaauggcauccaagauuggaaggugguacucucgaacgaugucuaaaacuaaaaggauggggaugggacuguaugucaaguaugauggagacccaugggcugacagugaugcccuugcucuuaguggaguaaugguuucaauggaagaaccugguugguacuccuuuggcuucgaaauaagagauaagaaaugugauguccccuguauugggauagagaugguacaugaugguggaaaagagacuuggcacucagcagcaacagccauuuacuguuuaaugggcucaggacagcugcugugggacacugucacagguguugauauggcucuguaa

SEQ ID NO: 61261 - RNA, 1401 nt, Artificial Sequence
  derived and/or modified CDS sequence (wt) from neuraminidase__InfluenzaB__AGX17536
augcuaccuucaacuauacaaacguuaacccuauuucucacaucagggggaguauuauuaucacuauaugugucagcuucauugucauacuuacuauauucggauauauugcuaaaauucucaccaacagaaauaacugcaccaacaaugccauuggauugugcaaacgcaucaaauguucaggcugugaaccguucugcaacaaaaggggugacauuucuucucccagaaccggaguggacauacccgcguuuaucuugcccgggcucaaccuuucagaaagcacuccuaauuagcccucauagauucggagaaaccaaaggaaacucugcucccuugauaauaagggaaccuuuuauugcuuguggaccaaaggaaugcaaacacuuugcucuaacccauuaugcagcccaaccagggggauacuacaauggaacaagaggagacagaaacaagcugaggcaucuaauuucagucaaauugggcaaaaucccaacaguagaaaacuccauuuuccacauggcagcauggagcggguccgcaugccaugaugguaaagaauggacauauauuggaguugauggcccugacaauaaugcauugcucaaaauaaaauauggagaagcauauacugacacauaccauuccuaugcaaacaacauccuaagaacacaagaaagugccugcaauugcaucgggggaaauuguuaucuuaugauaacugauggcucagcuucagguauuagugaaugcagauuucuuaagauucgagagggccgaauaauaaaagaaauauuuccaacaggaagaguaaaacauacugaagaaugcacaugcggauuugccagcaauaaaaccauagaaugugccuguagagauaacaguuacacagcaaaaagacccuuugucaaauuaaacguggagacugauacagcagaaauaagauugaugugcacagagacuuauuuggacacccccagaccagaugauggaagcauaacagggccuugugagucuaauggggacaaagggaguggaggcaucaagggaggauuuguucaucaaagaauggcauccaagauuggaaggugguacucucgaacgaugucuaaaacuaaaaggauggggaugggacuguauguuaaguaugauggagacccaugggcugacagugaugcccuugcucuuaguggaguaaugguuucaauggaagaaccugguugguacuccuuuggcuucgaaauaaaagauaagaaaugugauguccccuguauugggauagagaugguacaugaugguggaaaagagacuuggcacucagcagcaacagccauuuacuguuuaaugggcucaggacagcugcugugggacacugucacagguguugauauggcucuguaa

SEQ ID NO: 61262 - RNA, 1401 nt, Artificial Sequence
  derived and/or modified CDS sequence (wt) from neuraminidase__InfluenzaB__AGX17547
augcuaccuucaacuauacaaacguuaacccuauuucucacaucagggggaguauuauuaucacuauaugugucagcuucauugucauacuuacuauauucggauauauuacuaaaacucucaccaacagaaauaacugcaccaacaaugccauuggauugugcaaacgcaucaaauguucaggcugugaaccguucugcaacaaaaggggugacacuucuucucccagaaccggaguggacauacccgcguuuaucuugcccgggcucaaccuuucagaaagcacuccuaauuagcccucacagauucggagaaaccaaaggaaacucagcucccuugauaauaagggaaccuuuuauugcuuguggaccaaaggaaugcaaacacuuugcucuaacccauuaugcagcccaaccagggggauacuacaauggaacaagaggagacagaaacaagcugaggcaucuaauuucagucaaauugggcaaaaucccaacaguagaaaacuccauuuuccacauggcagcauggagcggguccgcaugccaugaugguaaagaauggacauauaucggaguugauggcccugacaauaaugcauugcucaaaauaaaauauggagaagcauauacugacacauaccauuccuaugcaaacaacauccuaagaacacaagaaagugccugcaauugcaucgggggaaauuguuaucuuaugauaacugauggcucagcuucagguauuagugaaugcagauuucuuaagauucgagagggccgaauaauaaaagaaauauuuccaacaggaagaguaaaacauacugaagaaugcacaugcggauuugccagcaauaaaaccauagaaugugccuguagagauaacaguuacacagcaaaaagacccuuugucaaauuaaacguggagacugauacagcagaaauaagauugaugugcacagagacuuauuuggacacccccagaccagaugauggaagcauaacagggccuugugaaucuaauggggacaaagggaguggaggcaucaagggaggauuuguucaucaaagaauggcauccaagauuggaaggugguacucucgaacgaugucuaaaacuaaaaggauggggaugggacuguaugucaaguacgauggagacccaugggcugacagugaugcccuugcucuuaguggaguaaugguuucaauggaagaaccugguugguacuccuuuggcuucgaaauaaaagauaagaaaugugauguccccuguauugggauagagaugguacaugaugguggaaaagagacuuggcacucagcagcaacagccauuuacuguuuaaugggcucaggacagcugcugugggacacugucacagguguugauauggcucuguaa

SEQ ID NO: 61263 - RNA, 1401 nt, Artificial Sequence
  derived and/or modified CDS sequence (wt) from neuraminidase__InfluenzaB__AGX17558
augcuaccuucaacuauacaaacguuaacccuauuucucacaucagggggaguauuauuaucacuauaugugucagcuucauugucauacuuacuauauucggauguauugcuaaaauucucaccagcagaaauaacugcaccaacaaugccauuggauugugcaaacgcaucaaauguucaggcugugaaccguucugcaacaaaaggggugacacuucuucucccagaaccggaguggacauacccgcguuuaucuugcccgggcucaaccuuucagaaagcacuccuaauuagcccucauagauucggagaaaccaaaggaaacucagcucccuugauaauaagggaaccuuuuauugcuuguggaccaaaggaaugcaaacacuuugcucuaacccauuaugcagcccaaccagggggauacuacaauggaacaagaggagacagaaacaagcugaggcaucuaauuucagucaaauugggcaaaaucccaacaguagaaaacuccauuuuccacauggcagcauggagcggguccgcaugccaugaugguaaggaauggacauauaucggaguugauggcccugacaauaaugcauugcucaaaauaaaauauggagaagcauauacugacacauaccauuccuaugcaaacaacauccuaagaacacaagaaagugccugcaauugcaucgggggaaauuguuaucuuaugauaacugauggcucagcuucagguguuagugaaugcagauuucuuaagauucgagagggccgaauaauaaaagaaauauuuccaacaggaagaguaaaacauacugaagaaugcacaugcggauuugccagcaauaaaaccauagaaugugccuguagagauaacaguuacacagcaaaaagacccuuugucaaauuaaacguggagacugauacagcagaaauaagauugaugugcacagagacuuauuuggacacccccagaccagaugauggaagcauaacagggccuugugaaucuaauggggacaaagggaguggaggcaucaagggaggauuuguucaucaaagaauggcauccaagauuggaaggugguacucucgaacgaugucuaaaacuaaaaggauggggaugggacuguaugucaaguaugauggagacccaugggcugacagugaugcccuugcucuuaguggaguaaugguuucaauggaagaaccugguugguacuccuuuggcuucgaaauaaaagauaagaaaugugauguccccuguauugggauagagaugguacaugaugguggaaaagagacuuggcacucagcagcaacagccauuuacuguuuaaugggcucaggacagcugcugugggacacugucacagguguugauauggcucuguaa

SEQ ID NO: 61264 - RNA, 1401 nt, Artificial Sequence
  derived and/or modified CDS sequence (wt) from neuraminidase__InfluenzaB__AGX17569
augcuaccuucaacuauacaaacguuaacccuauuucucacaucagggggaguguuauuaucacuauaugugucagcuucauugucauacuuacuauauucggauauauugcuaaaauuuucacaaacagaaauaacugcaccaauaaugccauuggauugugcaaacgcaucaaauguucaggcugugaaccguucugcaacaaaaggggugacacuucuucucccagaaccggaguggacguacccucguuuaucuugcccgggcucaaccuuucagaaagcacuccuaauuagcccccauagauucggagaaaccaaaggaaacucagcucccuugauaauaagggaaccuuuuauugcuuguggaccaaaggaaugcaaacacuuugcucuaacccauuaugcagcucaaccagggggauacuacaauggaacaagagaagacagaaacaagcugaggcaucuaauuucagucaaauugggcaaaaucccaacaguagaaaacucuauuuuccacauggcagcuuggagcggguccgcaugccaugaugguagagaauggacauauaucggaguugauggccccgacaguaaugcauugcucaaaauaaaauauggagaagcauauacugacacauaccauuccuaugcaaaaaacauccuaaggacacaagaaagugccugcaauugcaucgggggagauuguuaucuuaugauaacugauggcccagcuucagggauuagugaaugcagauuccuuaagauucgagagggccgaauaauaaaagaaauauuuccaacaggaagaguaaaacauacugaggaaugcacaugcggauuugccagcaacaaaaccauagaaugugccuguagagauaacaguuacacagcaaaaagacccuuuguuaaauuaaauguggagacugauacagcggaaauaagauugaugugcacagagacuuauuuggacacccccagaccaaaugauggaagcauaacagggccuugcgaaucuaauggggacaaagggaguggaggcaucaagggaggauuuguucaucaaagaauggcauccaagauuggaaggugguacucucgaacgaugucuaaaacuaaaagaauggggauggggcuguauguaaaguaugauggagacccauggacugacagugaagcccuugcucuuaguggaguaaugguuucaauggaagaaccugguugguauuccuuugguuucgaaauaaaagauaagaaaugugauguccccuguauugggauagaaaugguacaugauggugggaaaacgacuuggcacucagcagcaacagccauuuacuguuuaaugggcucaggacaacugcugugggacacugucacagguguugauauggcucuguaa

SEQ ID NO: 61265 - RNA, 1401 nt, Artificial Sequence
  derived and/or modified CDS sequence (wt) from neuraminidase__InfluenzaB__AGX17580
augcuaccuucaacuauacaaacguuaacccuauuucucacaucagggggaguauuauuaucacuauaugugucagcuucauuaucauacuuacuauauucggauauauugcuaaaauucucaccaacagagauaacugcaccaacaaugccauuagauugugcaaacgcaucaaauguucaggcugugaaccguucugcaacaaaaggggugacacuucuucucccagaaccggaguggacauacccgcguuuaucuugcccgggcucaaccuuucagaaagcacuccuaauuagcccucauagauucggagaaaccaaaggaaacucagcucccuugauaauaagggaaccuuuuauugcuuguggaccaaaugaaugcaaacacuuugcucuaacccauuaugcagcccaaccagggggauacuacaauggaacaagaggagacagaaacaagcugaggcaucuaauuucagucaaauugggcaaaaucccaacaguagaaaacuccauuuuccacauggcagcauggagcggguccgcaugccaugaugguaaggaauggacauauaucggaguugauggcccugacaauaaugcauugcucaaaauaaaauauggagaagcauauacugacacauaccauuccuaugcaaacaacauccuaagaacacaagaaagugccugcaauugcaucgggggaaauuguuaucuuaugauaacugauggcucagcuucagguguuagugaaugcagauuucuuaagauucgagagggccgaauaauaaaagaaauauuuccaacaggaagaguaaaacauacugaggaaugcacaugcggauuugccagcaauaaaaccauagaaugugccuguagagauaacaguuacacagcaaaaagacccuuugucaaauuaaacguggagacugauacagcagaaauaagauugaugugcacagauacuuauuuggacacccccagaccagaugauggaagcauaacaggcccuugugaaucuaauggggacaaagggaguggaggcaucaagggaggauuuguucaucaaagaauggcauccaagauuggaaggugguacucucgaacgaugucuaaaacugaaaggauggggaugggacuguaugucaaguaugauggagacccaugggcugacagugaugcccuugcuuuuaguggaguaaugguuucaaugaaagaaccugguugguacuccuuuggcuucgaaauaaaagauaagaaaugcgauguccccuguauugggauagagaugguacaugaugguggaaaagagacuuggcacucagcagcaacagccauuuacuguuuaaugggcucaggacaguugcugugggacacugucacagguguugacauggcucuguaa

SEQ ID NO: 61266 - RNA, 1401 nt, Artificial Sequence
  derived and/or modified CDS sequence (wt) from neuraminidase__InfluenzaB__AGX17591
augcuaccuucaaccauacaaacguuaacccuauuucucacaucagggggaguauuauuaucacuauaugugucagcuucauugucauacuuacuauauucggauauauugcuaaaauucccaccaacagaaauuacugcaccaacaaugccauuggauugugcaaacgcaucaaauguucaggcugugaaccguucugcaacaaaaggggugacacuucuucucccagaaccggaguggacauacccgcguuuaucuugcccgggcucaaccuuucagaaagcacuccuaauuagcccucauagauucggagaaaccaaaggaaacucagcucccuugauaauaagggaaccuuuuauugcuuguggaccaaaggaaugcaaacacuuugcucuaacccacuaugcagcccaaccagggggauacuacaauggaacaagaggagacagaaacaagcugaggcaucuaauuucagucaaauugggcaaaaucccaacaguagaaaacuccauuuuccacauggcagcauggagcggguccgcaugccaugaugguaaggaauggacauauaucggaguugauggcccugacaauaaugcauugcucaaaauaaaauauggagaagcauauacugacacauaccauuccuaugcaaacaacauccuaagaacacaagaaagugccugcaauugcaucgggggaaauuguuaucuuaugauaacugauggcucagcuucagguguuagugaaugcagauuucuuaagauucgagagggccgaauaauaaaagaaauauuuccaacaggaagaguaaaacauacugaagaaugcacaugcggauuugcuagcaauaaaaccauagaaugugccuguagagauaacaguuacacagcaaaaagacccuuugucaaauuaaacguggagacugauacagcagaaauaagauugaugugcacagagacuuauuuggacacccccagaccagaugauggaagcauaacagggccuugugaaucuaauggggacaaagggaguggaggcaucaagggaggauuuguccaucaaagaauggcauccaagauuggaaggugguacucucgaacgaugucuaaaacuaaaaggauggggauggggcuguaugucaaguaugauggagacccaugggcugacagugaugcccuugcuuuuaguggaguaaugguuucaauggaagaaccugguugguacuccuuuggcuucgaaauaaaagacaagaaaugugauguccccuguauugggauagagaugguacaugaugguggaaaagagacuuggcacucagcagcuacagccauuuacuguuuaaugggcucaggacagcugcugugggacacugucacagguguuaauauggcucuguaa

SEQ ID NO: 61267 - RNA, 1401 nt, Artificial Sequence
  derived and/or modified CDS sequence (wt) from neuraminidase__InfluenzaB__AGX17602
augcuaccuucaacuauacaaacguuaacccuauuucucacaucagggggaguauuauuaucacuauaugugucagcuucauugucauacuuacuauauucggauauauugcuaaaauucccaucaacagaaauuacugcaccaacaaugccauuggauugugcaaacgcaucaaauguucaggcugugaaccguucugcaacaaaaggggugacacuucuucucccagaaccggaguggacauauccgcguuuaucuugcccgggcucaaccuuucagaaagcacuccuaauuagcccucauagauucggagaaaccaaaggaaacucagcucccuugauaauaagggaaccuuuuauugcuuguggaccaaaggaaugcaaacacuuugcucuaacccacuaugcagcccaaccagggggauacuacaauggaacaaggggagacagaaacaagcugaggcaucuaauuucagucaaauugggcaaaaucccaacaguagaaaacuccauuuuccacauggcagcauggagcggguccgcaugccaugaugguaaggaauggacauauaucggaguugauggcccugacaauaaugcauugcucaaaauaaaauauggagaagcauauacugacacauaccauuccuaugcaaacaacauccuaagaacacaagaaagugccugcaauugcaucgggggaaauuguuaucuuaugauaacugauggcucagcuucagguguuagugaaugcagauuucuuaagauucgagagggccgaauaauaaaagaaauauuuccaacaggaagaauaaaacauacugaagaaugcacaugcggauuugcuagcaauaaaaccauagaaugugccuguagagauaacaguuacacagcaaaaagacccuuugucaaauuaaacguggagacugauacagcagaaauaagauugaugugcacagagacuuauuuggacacccccagaccagaugauggaagcauaacagggccuugugaaucuaauggggacaaagggaguggaggcaucaagggaggauuuguccaucaaagaauggcauccaagauuggaaggugguacucucgaacgaugucuaaaacuaaaaggauggggauggggcuguaugucaaguaugauggagacccaugggcugacagugaugcccuugcuuuuaguggaguaaugguuucaauggaagaaccugguugguacuccuuuggcuucgaaauaaaagacaagaaaugugauguccccuguauugggauagagaugguacaugaugguggaaaagagacuuggcacucagcagcuacagccauuuacuguuuaaugggcucaggacagcugcugugggacacugucacagguguuaauauggcucuguaa

SEQ ID NO: 61268 - RNA, 1401 nt, Artificial Sequence; identical to SEQ ID NO: 61266
  derived and/or modified CDS sequence (wt) from neuraminidase__InfluenzaB__AGX17613

SEQ ID NO: 61269 - RNA, 1401 nt, Artificial Sequence
  derived and/or modified CDS sequence (wt) from neuraminidase__InfluenzaB__AGX17624
augcuaccuucaacuauacaaacguuaacccuauuucucacaucagggggaguauuauuaucacuauaugugucagcuucauuaucauacuuacuauauucggauauauugcuaaaauucucaccaacagaaauaacugcaccaacaaugccauuggauugugcaaacgcaucaaauguucaugcugugaaccguucugcaacaaaaggggugacacuucuucucccagaaccggaguggacauacccgcguuuaucuugcccgggcucaaccuuucagaaagcacuccuaauuagcccucauagauucggagaaaccaaaggaaacucagcucccuugauaauaagggaaccuuuuauugcuuguggaccaaaugaaugcaaacacuuugcucuaacccauuaugcagcccaaccagggggauacuacaauggaacaagaggagacagaaacaagcugaggcaucuaauuucagucaaauugggcaaaaucccaacaguagaaaacuccauuuuccacauggcagcauggagcggguccgcaugccaugaugguaaggaauggacauauaucggaguugauggcccugacaauaaugcauugcucaaaauaaaauauggagaagcauauacugacacauaccauuccuaugcaaacaacauccuaagaacacaagaaagugccugcaauugcaucgggggaaauuguuaucuuaugauaacugauggcucagcuucagguguuagugaaugcagauuucuuaagauucgagagggccgaauaauaaaagaaauauuuccaacaggaagaguaaaacauacugaggaaugcacaugcggauuugccagcaauaaaaccauagaaugugccuguagagauaacaguuacacagcaaaaagacccuuugucaaauuaaacguggaaacugauacagcagaaauaagauugaugugcacagauacuuauuuggacacccccagaccagaugauggaagcauaacaggcccuugugaaucuaauggggacaaagggaguggaggcaucaagggaggauuuguucaucaaagaauggcauccaagauuggaaggugguacucucgaacgaugucuaaaacugaaaggauggggaugggacuguaugucaaguaugauggagacccaugggcugacagugaugcccuugcuuuuaguggaguaaugguuucaaugaaagaaccugguugguacuccuuuggcuucgaaauaaaagauaagaaaugcgauguccccuguauugggauagagaugguacaugaugguggaaaagagacuuggcacucagcagcaacagccauuuacuguuuaaugggcucaggacagcugcugugggacacugucacagguguugacauggcucuguaa

SEQ ID NO: 61270 - RNA, 1401 nt, Artificial Sequence
  derived and/or modified CDS sequence (wt) from neuraminidase__InfluenzaB__AGX17635
augcuaccuucaaccauacaaacguuaacccuauuucucacaucagggggaguauuauuaucacuauaugugucagcuucauugucauacuuacuauauucggauauauugcuaaaauucccaccaacagaaauuacugcaccaacaaugccauuggauugugcaaacgcaucaaauguucaggcugugaaccguucugcaacaaaaggggugacacuucuucucccagaaccggaguggacauacccgcguuuaucuugcccgggcucaaccuuucagaaagcacuccuaauuagcccucauagauucggagaaaccaaaggaaacucagcucccuugauaauaagggaaccuuuuauugcuuguggaccaaaggaaugcaaacacuuugcucuaacccacuaugcagcccaaccagggggauacuacaauggaacaagaggagacagaaacaagcugaggcaucuaauuucagucaaauugggcaaaaucccaacaguagaaaacuccauuuuccacauggcagcauggagcggguccgcaugccaugaugguaaggaauggacauauaucggaguugauggcccugacaauaaugcauugcucaaaauaaaauauggagaagcauauacugacacauaccauuccuaugcaaacaacauccuaagaacacaagaaagugccugcaauugcaucgggggaaauuguuaucuuaugauaacugauggcucagcuucagguauuagugaaugcagauuucuuaagauucgagagggccgaauaauaaaagaaauauuuccaacaggaagaguaaaacauacugaagaaugcacaugcggauuugcuagcaauaaaaccauagaaugugccuguagagauaacaguuacacagcaaaaagacccuuugucaaauuaaacguggagacugauacagcagaaauaagauugaugugcacagagacuuauuuggacacccccagaccagaugauggaagcauaacagggccuugugaaucuaauggggacaaagggaguggaggcaucaagggaggauuuguccaucaaagaauggcauccaagauuggaaggugguacucucgaacgaugucuaaaacuaaaaggauggggauggggcuguaugucaaguaugauggagacccaugggcugacagugaugcccuugcuuuuaguggaguaaugguuucaauggaagaaccugguugguacuccuuuggcuucgaaauaaaagacaagaaaugugauguccccuguauugggauagagaugguacaugaugguggaaaagagacuuggcacucagcagcuacagccauuuacuguuuaaugggcucaggacagcugcugugggacacugucacagguguuaauauggcucuguaa

SEQ ID NO: 61271 - RNA, 1401 nt, Artificial Sequence; identical to SEQ ID NO: 61269
  derived and/or modified CDS sequence (wt) from neuraminidase__InfluenzaB__AGX17657

SEQ ID NO: 61272 - RNA, 1401 nt, Artificial Sequence
  derived and/or modified CDS sequence (wt) from neuraminidase__InfluenzaB__AGX17668
augcuaccuucaaccauacaaacguuaacccuauuucucacaucagggggaguauuauuaucacuauaugugucagcuucauugucauacuuacuauauucggauauauugcuaaaauucccaccaacagaaauuacugcaccaacaaugccauuggauugugcaaacgcaucaaauguucaggcugugaaccguucugcaacaaaaggggugacacuucuucucccagaaccggaguggacauacccgcguuuaucuuguccgggcucaaccuuucagaaagcacuccuaauuagcccucauagauucggagaaaccaaaggaaacucagcucccuugauaauaagggaaccuuuuauugcuuguggaccaaaggaaugcaaacacuuugcucuaacccacuaugcagcccaaccagggggauacuacaauggaacaagaggagacagaaacaagcugaggcaucuaauuucagucaaauugggcaaaaucccaacaguagaaaacuccauuuuccacauggcagcauggagcggguccgcaugccaugaugguaaggaauggacauauaucggaguugauggcccugacaauaaugcauugcucaaaauaaaauauggagaagcauauacugacacauaccauuccuaugcaaacaacauccuaagaacacaagaaagugccugcaauugcaucgggggaaauuguuaucuuaugauaacugauggcucagcuucagguguuagugaaugcagauuucuuaagauucgagagggccgaauaauaaaagaaauauuuccaacaggaagaguaaaacauacugaagaaugcacaugcggauuugcuagcaauaaaaccauagaaugugccuguagagauaacaguuacacagcaaaaagacccuuugucaaauuaaacguggagacugauacagcagaaauaagauugaugugcacagagacuuauuuggacacccccagaccagaugauggaagcauaacagggccuugugaaucuaauggggacaaagggaguggaggcaucaagggaggauuuguccaucaaagaauggcauccaagauuggaaggugguacucucgaacgaugucuaaaacuaaaaggauggggauggggcuguaugucaaguaugauggagacccaugggcugacagugaugcccuugcuuuuaguggaguaaugguuucaauggaagaaccugguugguacuccuuuggcuucgaaauaaaagacaagaaaugugauguccccuguauugggauagagaugguacaugaugguggaaaagagacuuggcacucagcagcuacagccauuuacuguuuaaugggcucaggacagcugcugugggacacugucacagguguuaauauggcucuguaa

SEQ ID NO: 61273 - RNA, 1401 nt, Artificial Sequence
  derived and/or modified CDS sequence (wt) from neuraminidase__InfluenzaB__AGX17679
augcuaccuucaacuauacaaacguuaacccuauuucucacaucagggggaguauuauuaucacuauaugugucagcuucauuaucauacuuacuauauucggauauauugcuaaaauucucaccaacagaaauaacugcaccaacaaugccauuggauugugcaaacgcaucaaauguucaggcugugaaccguucugcaacaaaaggggugacacuucuucucccagaaccggaguggacauacccgcguuuaucuugcccgggcucaaccuuucagaaagcacuccuaauuagcccucauagauucggagaaaccaaaggaaacucagcucccuugauaauaagggaaccuuuuauugcuuguggaccaaaugaaugcaaacacuuugcucuaacccauuaugcagcccaaccagggggauacuacaauggaacaagaggagacagaaacaagcugaggcaucuaauuucagucaaauugggcaaaaucccaacaguagaaaacuccauuuuccacauggcagcauggagcggguccgcaugccaugaugguaaggaauggacauauaucggaguugauggcccugacaauaaugcauugcucaaaauaaaauauggagaagcauauacugacacauaccauuccuaugcaaacaacauccuaagaacacaagaaagugccugcaauugcaucgggggaaauuguuaucuuaugauaacugauggcucagcuucagguguuagugaaugcagauuucuuaagauucgagagggccgaauaauaaaagaaauauuuccaacaggaagaguaaaacauacugaggaaugcacaugcggauuugccagcaauaaaaccauagaaugugccuguagagauaacaguuacacagcaaaaagacccuuugucaaauuaaacguggagauugauacagcagaaauaagauugaugugcacagauacuuauuuggacacccccagaccagaugauggaagcauaacaggcccuugugaaucuaauggggacaaagggaguggaggcaucaagggaggauuuguucaucaaagaauggcauccaagauuggaaggugguacucucgaacgaugucuaaaacugaaaggauggggaugggacuguaugucaaguaugauggagacccaugggcugacagugaugcccuugcuuuuaguggaguaaugguuucaaugaaagaaccugguugguacuccuuuggcuucgaaauaaaagauaagaaaugcgauguccccuguauugggauagagaugguacaugaugguggaaaagagacuuggcacucagcagcaacagccauuuacuguuuaaugggcucaggacagcugcugugggacacugucacagguguugacauggcucuguaa

SEQ ID NO: 61274 - RNA, 1401 nt, Artificial Sequence; identical to SEQ ID NO: 61269
  derived and/or modified CDS sequence (wt) from neuraminidase__InfluenzaB__AGX17690

SEQ ID NO: 61275 - RNA, 1401 nt, Artificial Sequence
  derived and/or modified CDS sequence (wt) from neuraminidase__InfluenzaB__AGX17701
augcuaccuucaaccauacaaacguuaacccuauuucucacaucagggggaguauuauuaucacuauaugugucagcuucauugucauacuuacuauauucggauauauugcuaaaauucccaccaacagaaauuacugcaccaacaaugccauuggauugugcaaacgcaucaaauguucaggcugugaaccguucugcaacaaaaggggugacacuucuucucccagaaccggaguggacauacccgcguuuaucuugcccgggcucaaccuuucagaaagcacuccuaauuagcccucauagauucggagaaaccaaaggaaacucagcucccuugauaauaagggaaccuuuuauugcuuguggaccaaaggaaugcaaacacuuugcucuaacccacuaugcagcccaaccagggggauacuacaauggaaaaagaggagacagaaacaagcugaggcaucuaauuucagucaaauugggcaaaaucccaacaguagaaaacuccauuuuccacauggcagcauggagcggguccgcgugccaugaugguaaggaauggacauauaucggaguugauggcccugacaauaaugcauugcucaaaauaaaauauggagaagcauauacugacacauaccauuccuaugcaaacaacauccuaagaacacaagaaagugccugcaauugcaucgggggaaauuguuaucuuaugauaacugauggcucagcuucagguguuagugaaugcagauuucuuaagauucgagagggccgaauaauaaaagaaauauuuccaacaggaagaguaaaacauacugaagaaugcacaugcggauuugcuagcaauaaaaccauagaaugugccuguagagauaacaguuacacagcaaaaagacccuuugucaaauuaaacguggagacugauacagcagaaauaagauugaugugcacagagacuuauuuggacacccccagaccagaugauggaagcauaacagggccuugugaaucuaauggggacaaagggaguggaggcaucaagggaggauuuguccaucaaagaauggcauccaagauuggaaggugguacucucgaacgaugucuaaaacuaaaaggauggggauggggcuguaugucaaguaugauggagacccaugggcugacagugaugcccuugcuuuuaguggaguaaugguuucaauggaagaaccugguugguacuccuuuggcuucgaaauaaaagacaagaaaugugauguccccuguauugggauagagaugguacaugaugguggaaaagagacuuggcacucagcagcuacagccauuuacuguuuaaugggcucaggacagcugcugugggacacugucacagguguuaauauggcucuguaa

SEQ ID NO: 61276 - RNA, 1401 nt, Artificial Sequence; identical to SEQ ID NO: 61269
  derived and/or modified CDS sequence (wt) from neuraminidase__InfluenzaB__AGX17723

SEQ ID NO: 61277 - RNA, 1401 nt, Artificial Sequence; identical to SEQ ID NO: 61273
  derived and/or modified CDS sequence (wt) from neuraminidase__InfluenzaB__AGX17734

SEQ ID NO: 61278 - RNA, 1401 nt, Artificial Sequence
  derived and/or modified CDS sequence (wt) from neuraminidase__InfluenzaB__AGX17745
augcuaccuucaaccauacaaacguuaacccuauuucucacaucagggggaguauuauuaucacuauaugugucagcuucauugucauacuuacuauauucggauauauugcuaaaauucccaccaacagaaauuacugcaccaacaaugccauuggauugugcaaacgcaucaaauguucaggcugugaaccguucugcaacaaaaggggugacacuucuucucccagaaccggaguggacauacccgcguuuaucuugcucgggcucaaccuuucagaaagcacuccuaauuagcccucauagauucggagaaaucaaaggaaacucagcucccuugauaauaagggaaccuuuuauugcuuguggaccaaaggaaugcaaacacuuugcucuaacucacuaugcagcccaaccagggggauacuacaauggaacaagaggagacagaaacaagcugaggcaucuaauuucagucaaauugggcaaaaucccaacaguagaaaacuccauuuuccacauggcagcauggagcggguccgcaugccaugaugguaaggaauggacauauaucggaguugauggcccugacaauaaugcauugcucaaaauaaaauauggagaagcauauacugacacauaccauuccuaugcaaacaacauccuaagaacacaagaaagugccugcaauugcaucgggggaaauuguuaucuuaugauaacugauggcucagcuucagguguuagugaaugcagauuucuuaagauucgagagggccgaauaauaaaagaaauauuuccaacaggaagaguaaaacauacugaagaaugcacaugcggauuugcuagcaauaaaaccauagaaugugccuguagagauaacaguuacacagcaaaaagacccuuugucaaauuaaacguggagacugauacagcagaaauaagauugaugugcacagagacuuauuuggacacccccagaccagaugauggaagcauaacagggccuugugaaucuaauggggacaaagggaguggaggcaucaagggaggauuuguccaucaaagaauggcauccaagauuggaaggugguacucucgaacgaugucuaaaacuaaaaggauggggauggggcuguaugucaaguaugauggagacccaugggcugacagugaugcccuugcuuuuaguggaguaaugguuucaauggaagaaccugguugguacuccuuuggcuucgaaauaaaagacaagaaaugugauguccccuguauugggauagagaugguacaugaugguggaaaagagacuuggcacucagcagcuacagccauuuacuguuuaaugggcucaggacagcugcugugggacacugucacagguguuaauauggcucuguaa

SEQ ID NO: 61279 - RNA, 1401 nt, Artificial Sequence
  derived and/or modified CDS sequence (wt) from neuraminidase__InfluenzaB__AGX17756
augcuaccuucaacuauacaaacguuaacccuauuucucacaucagggggaguauuauuaucacuauaugugucagcuucauuaucauacuuacuauauucggauauauugcuaaaauucucaccaacagaaauaacugcaccaacaaugccauuggauugugcaaacgcaucaaauguucaugcugugaaccguucugcaacaaaaggggugacacuucuucucccagaaccggaguggacauacccgcguuuaucuugcccgggcucaaccuuucagaaagcacuccuaauuagcccucauagauucggagaaaccaaaggaaacucagcucccuugauaauaagggaaccuuuuauugcuuguggaccaaaugaaugcaaacacuuugcucuaacccauuaugcagcccgaccagggggauacuacaauggaacaagaggagacagaaacaagcugaggcaucuaauuucagucaaauugggcaaaaucccaacaguagaaaacuccauuuuccacauggcagcauggagcggguccgcaugccaugaugguaaggaauggacauauaucggaguugauggcccugacaauaaugcauugcucaaaauaaaauauggagaagcauauacugacacauaccauuccuaugcaaacaacauccuaagaacacaagaaagugccugcaauugcaucgggggaaauuguuaucuuaugauaacugauggcucagcuucagguguuagugaaugcagauuucuuaagauucgagagggccgaauaauaaaagaaauauuuccaacaggaagaguaaaacauacugaggaaugcacaugcggauuugccagcaauaaaaccauagaaugugccuguagagauaacaguuacacagcaaaaagacccuuugucaaauuaaacguggaaacugauacagcagaaauaagauugaugugcacagauacuuauuuggacacccccagaccagaugauggaagcauaacaggcccuugugaaucuaauggggacaaagggaguggaggcaucaagggaggauuuguucaucaaagaauggcauccaagauuggaaggugguacucucgaacgaugucuaaaacugaaaggauggggaugggacuguaugucaaguaugauggagacccaugggcugacagugaugcccuugcuuuuaguggaguaaugguuucaaugaaagaaccugguugguacuccuuuggcuucgaaauaaaagauaagaaaugcgauguccccuguauugggauagagaugguacaugaugguggaaaagagacuuggcacucagcagcaacagccauuuacuguuuaaugggcucaggacagcugcugugggacacugucacagguguugacauggcucuguaa

SEQ ID NO: 61280 - RNA, 1401 nt, Artificial Sequence
  derived and/or modified CDS sequence (wt) from neuraminidase__InfluenzaB__AGX17767
augcuaccuucaacuauacaaacguuaacccuauuucucacaucagggggaguauuauuaucacuauaugugucagcuucauuaucauacuuacuauauucggauauauugcuaaaauucucaccaacagagauaacugcaccaacaaugccauuggauugugcaaacgcaucaaauguucaggcugugaaccguucugcaacaaaaggggugacacuucuucucccagaaccggaguggacauacccgcguuuaucuugcccgggcucaaccuuucagaaagcacuccuaauuagcccucauagauucggagaaaccaaaggaaacucagcucccuugauaauaagggaaccuuuuauugcuuguggaccaaaugaaugcaaacacuuugcucuaacccauuaugcagcccaaccagggggauacuacaauggaacaagaggagacagaaacaagcugaggcaucuaauuucagucaaauugggcaaaaucccaacaguagaaaacuccauuuuccacauggcagcauggagcggguccgcaugccaugaugguaaggaauggacauauaucggaguugauggcccugacaauaaugcauugcucaaaauaaaauauggagaagcauauacugacacauaccauuccuaugcaaacaacauccuaagaacacaagaaagugccugcaauugcaucgggggaaauuguuaucuuaugauaacugauggcucagcuucagguguuagugaaugcagauuucuuaagauucgagagggccgaauaauaaaagaaauauuuccaacaggaagaguaaaacauacugaggaaugcacaugcggauuugccagcaauaaaaccauagaaugugccuguagagauaacaguuacacagcaaaaagacccuuugucaaauuaaacguggagacugauacagcagaaauaagauugaugugcacagauacuuauuuggacacccccagaccagaugauggaagcauaacaggcccuugugaaucuaauggggacaaagggaguggaggcaucaagggaggauuuguucaucaaagaauggcauccaagguuggaaggugguacucucgaacgaugucuaaaacugaaaggauggggaugggacuguaugucaaguaugauggagacccaugggcugacagugaugcccuugcuuuuaguggaguaaugguuucaaugaaagaaccugguugguacuccuuuggcuucgaaauaaaagauaagaaaugcgauguccccuguauugggauagagaugguacaugaugguggaaaagagacuuggcacucagcagcaacagccauuuacuguuuaaugggcucaggacaguugcugugggacacugucacagguguugacauggcucuguaa

SEQ ID NO: 61281 - RNA, 1401 nt, Artificial Sequence
  derived and/or modified CDS sequence (wt) from neuraminidase__InfluenzaB__AGX17778
augcuaccuucaacuauacaaacguuaacccuauuucucacaucagggggaguauuauuaucacuauaugugucagcuucauuaucauacuuacuauauucggauauauugcuaaaauucucaccaacagaaauaacugcaccaacaaugccauuggauugugcaaacgcaucaaauguucaugcugugaaccguucugcaacaaaaggggugacacuucuucucccagaaccggaguggacauacccgcguuuaucuugcccgggcucaaccuuucagaaagcacuccuaauuagcccucauagauucggagaaaccaaaggaaacucagcucccuugauaauaagggaaccuuuuauugcuuguggaccaaaugaaugcaaacacuuugcucuaacccauuaugcagcccaaccagggggauacuacaauggaacaagaggagacagaaacaagcugaggcaucuaauuucagucaaauugggcaaaaucccaacaguagaaaacuccauuuuccacauggcagcauggagcggguccgcaugccaugaugguaaggaauggacauauaucggaguugauggcccugacaauaaugcauugcucaaaauaaaauauggagaagcauauacugacacauaccauuccuaugcaaacaacauccuaagaacacaagaaagugccugcaauugcaucgggggaaauuguuaucuuaugauaacugauggcucagcuucagguguuagugaaugcagauuucuuaagauucgagagggccgaauaauaaaagaaauauuuccaacaggaagaguaaaacauacugaggaaugcacaugcggauuugccagcaauaaaaccauagaaugugccuguagagauaacaguuacacagcaaaaagacccuuugucaaauuaaacguggaaacugauacagcagaaauaagauugaugugcacagauacuuauuuggacacccccagaccagaugauggaagcauaacaggcccuugugaaucuaauggggacaaagggaguggaggcaucaagggaggauuuguucaucaaagaauggcauccaagauuggaaggugguacucucgaacgaugucuaaaacugaaaggauggggaugggacuguaugucaaguaugauggagacccaugggcugaaagugaugcccuugcuuuuaguggaguaaugguuucaaugaaagaaccugguugguacuccuuuggcuucgaaauaaaagauaagaaaugcgauguccccuguauugggauagagaugguacaugaugguggaaaagagacuuggcacucagcagcaacagccauuuacuguuuaaugggcucaggacagcugcugugggacacugucacagguguugacauggcucuguaa

SEQ ID NO: 61282 - RNA, 1401 nt, Artificial Sequence
  derived and/or modified CDS sequence (wt) from neuraminidase__InfluenzaB__AGX17789
augcuaccuucaacuauacaaacguuaacccuauuucucacaucagggggaguauuauuaucacuauaugugucagcuucauuaucauacuuacuauauucggauauauugcuaaaauucucaccaacagaaauaacugcaccaacaaugccauuggauugugcaaacgcaucaaauguucaggcugugaaccguucugcaacaaaaggggugacacuucuucucccagaaccggaguggacauacccgcguuuaucuugcccgggcucaaccuuucagaaagcacuccuaauuagcccucauagauucggagaaaccaaaggaaacucagcucccuugauaauaagggaaccuuuuauugcuuguggaccaaaugaaugcaaacacuuugcucuaacccauuaugcagcccaaccagggggauacuacaauggaacaagaggagacagaaacaagcugaggcaucuaauuucagucaaauugggcaaaaucccaacaguagaaaacuccauuuuccacauggcagcauggagcggguccgcaugccaugaugguaaggaauggacauauaucggaguugauggcccugacaauaaugcauugcucaaaauaaaauauggagaagcauauacugacacauaccauuccuaugcaaacaacauccuaagaacacaagaaagugccugcaauugcaucgggggaaauuguuaucuuaugauaacugauggcucagcuucagguguuagugaaugcagauuucuuaagauucgagagggccgaauaauaaaagaaauauuuccaacaggaagaguaaaacauacugaggaaugcacaugcggauuugccagcaauaaaaccauagaaugugccuguagagauaacaguuacacagcaaaaagacccuuugucaaauuaaacguggagauugauacagcagaaauaagauugaugugcacagauacuuauuuggacacccccagaccagaugauggaagcauaacaggcccuugugaaucuaauggggacaaagggaguggaggcaucaagggaggauuuguucaucaaagaauggcauccaagauuggaaggugguacucucgaacgaugucuaaaacugaaaggauggggaugggacuguaugucaaguaugauggagacccaugggcugacagugaugcccuuguuuuuaguggaguaaugguuucaaugaaagaaccugguugguacuccuuuggcuucgaaauaaaagauaagaaaugcgauguccccuguauugggauagagaugguacaugaugguggaaaagagacuuggcacucagcagcaacagccauuuacuguuuaaugggcucaggacagcugcugugggacacugucacagguguugacauggcucuguaa

SEQ ID NO: 61283 - RNA, 1401 nt, Artificial Sequence; identical to SEQ ID NO: 61269
  derived and/or modified CDS sequence (wt) from neuraminidase__InfluenzaB__AGX17800

SEQ ID NO: 61284 - RNA, 1401 nt, Artificial Sequence
  derived and/or modified CDS sequence (wt) from neuraminidase__InfluenzaB__AGX17811
augcuaccuucaaccauacaaacguuaacccuauuucucacaucagggggaguauuauuaucacuauaugugucagcuucauugucauacuuacuauauucggauauauugcuaaaauucccaccaacagaaauuacugcaccaacaaugccauuggauugugcaaacgcaucaaauguucaggcugugaaccguucugcaacaaaaggggugacacuucuucucccagaaccggaguggacauacccgcguuuaucuugcccgggcucaaccuuucagaaagcacuccuaauuagcccucauagauucggagaaaccaaaggaaacucagcucccuugauaauaagggaaccuuuuauugcuuguggaccaaaggaaugcaaacacuuugcucuaacccacuaugcagcccaaccagggggauacuacaauggaacaagaggagacagaaacaagcugaggcaucuaauuucagucaaauugggcaaaaucccaacaguagaaaacuccauuuuccacauggcagcauggagcggguccgcaugccaugaugguaaggaauggacauauaucggaguugauggcccugacaauaaugcauugcucaaaauaaaauauggagaagcauauacugacacauaccauuccuaugcaaacaacauccuaagaacacaagaaagugccugcaauugcaucgggggaaauuguuaucuuaugauaacugauggcucagcuucagguguuagugaaugcagauuucuuaagauucgagagggccgaauaauaaaagaaauauuuccaacaggaagaguaaaacauacugaagaaugcacaugcggauuugcuagcaauaaaaccauagaaugugccuguagagauaacaguuacacagcaaaaagacccuuugucaaauuaaacguggagacugauacagcagaaauaagauugaugugcacagagacuuauuuggacacccccagaccagaugauggaagcauaacagggccuugugaaucuaauggggacaaagggaguggaggcaucaagggaggauuuguccaucaaagaauggcauccaagauuggaaggugguacucucgaacgaugucuaaaacuaaaaggauggggauggggcuguaugucaaguaugauggagacccaugggcugacagugaugcccuugcuuuuaguggaguaaugguuucaauggaagaaccugguugguacuccuuuggcuucgaaauaaaagacaagaaaugugauguccccuguauugggauagagaugguacaugaugguggaaaagagacuuggcacucagcagcuacagccauuuacuguuuaaugggcucaggacagcugcugugggacacugucacagguguuaauauggcucaguaa

SEQ ID NO: 61285 - RNA, 1401 nt, Artificial Sequence; identical to SEQ ID NO: 61266
  derived and/or modified CDS sequence (wt) from neuraminidase__InfluenzaB__AGX17822

SEQ ID NO: 61286 - RNA, 1401 nt, Artificial Sequence
  derived and/or modified CDS sequence (wt) from neuraminidase__InfluenzaB__AGX17833
augcuaccuucaaccauacaaacguuaacccuauuucucacaucagggggaguauuauuaucacuauaugugucagcuucauugucauacuuacuauauucggauauauugcuaaaauucccaccaacagaaauuacugcaccaacaaugccauuggauugugcaaacgcaucaaauguucaggcugugaaccguucugcaacaaaaggggugacacuucuucucccagaaccggaguggacauacccgcguuuaucuugcccgggcucaaccuuucagaaagcacuccuaauuagcccucauagauucggagaaaccaaaggaaacucagcucccuugauaauaagggaaccuuuuauugcuuguggaccaaaggaaugcaaacacuuugcucuaacccacuaugcagcccaaccagggggauacuacaauggaacaagaggagacagaaacaagcugaggcaucuaauuucaaucaaauugggcaaaaucccaacaguagaaaacuccauuuuccacauggcagcauggagcggguccgcaugccaugaugguaaggaauggacauauaucggaguugauggcccugacaauaaugcauugcucaaaauaaaauauggagaagcauauacugacacauaccauuccuaugcaaacaacauccuaagaacacaagaaagugccugcaauugcaucgggggaaauuguuaucuuaugauaacugauggcucagcuucagguguuagugaaugcagauuucuuaagauucgagagggccgaauaauaaaagaaauauuuccaacaggaagaguaaaacauacugaagaaugcacaugcggauuugcuagcaauaaaaccauagaaugugccuguagagauaacaguuacacagcaaaaagacccuuugucaaauuaaacguggagacugauacagcagaaauaagauugaugugcacagagacuuauuuggacacccccagaccagaugauggaagcauaacagggccuugugaaucuaauggggacaaagggaguggaggcaucaagggaggauuuguccaucaaagaauggcauccaagauuggaaggugguacucucgaacgaugucuaaaacuaaaaggauggggauggggcuguaugucaaguaugauggagacccaugggcugacagugaugcccuugcuuuuaguggaguaaugguuucaauggaagaaccugguugguacuccuuuggcuucgaaauaaaagacaagaaaugugauguccccuguauugggauagagaugguacaugaugguggaaaagagacuuggcacucagcagcuacagccauuuacuguuuaaugggcucaggacagcugcugugggacacugucacagguguuaauauggcucuguaa

SEQ ID NO: 61287 - RNA, 1401 nt, Artificial Sequence; identical to SEQ ID NO: 61273
  derived and/or modified CDS sequence (wt) from neuraminidase__InfluenzaB__AGX17844

SEQ ID NO: 61288 - RNA, 1401 nt, Artificial Sequence; identical to SEQ ID NO: 61281
  derived and/or modified CDS sequence (wt) from neuraminidase__InfluenzaB__AGX17855

SEQ ID NO: 61289 - RNA, 1401 nt, Artificial Sequence; identical to SEQ ID NO: 61280
  derived and/or modified CDS sequence (wt) from neuraminidase__InfluenzaB__AGX17866

SEQ ID NO: 61290 - RNA, 1401 nt, Artificial Sequence; identical to SEQ ID NO: 61266
  derived and/or modified CDS sequence (wt) from neuraminidase__InfluenzaB__AGX17877

SEQ ID NO: 61291 - RNA, 1401 nt, Artificial Sequence
  derived and/or modified CDS sequence (wt) from neuraminidase__InfluenzaB__AGX17888
augcuaccuucaacuauacaaacguuaacccuauuucucacaucagggggaguauuauuaucacuauaugugucagcuucauuaucauacuuacuauauucggauauauugcuaaaauucucaccaacagaaauaacugcaccaacaaugccauuggauugugcaaacgcaucaaauguucaggcugugaaccguucugcaacaaaaggggugacacuucuucucccagaaccggaguggacauacccgcguuuaucuugcccgggcucaaccuuucagaaagcacuacuaauuagcccucauagauucggagaaaccaaaggaaacucagcucccuugauaauaagggaaccuuuuauugcuuguggaccaaaugaaugcaaacacuuugcucuaacccauuaugcagcccaaccagggggauacuacaauggaacaagaggagacagaaacaagcugaggcaucuaauuucagucaaauugggcaaaaucccaacaguagaaaacuccauuuuccacauggcagcauggagcggguccgcaugccaugaugguaaggaauggacauauaucggaguugauggcccugacaauaaugcauugcucaaaauaaaauauggagaggcauauacugacacauaccauuccuaugcaaacaacauccuaagaacacaagaaagugccugcaauugcaucgggggaaauuguuaucuuaugauaacugauggcucagcuucagguguuagugaaugcagauuucuuaagauucgagagggccgaauaauaaaagaaauauuuccaacaggaagaguaaaacauacugaggaaugcacaugcggauuugccagcaauaaaaccauagaaugugccuguagagauaacaguuacacagcaaaaagacccuuugucaaauuaaacguggagauugauacagcagaaauaagauugaugugcacagauacuuauuuggacacccccagaccagaugauggaagcauaacaggcccuugugaaucuaauggggacaaagggaguggaggcaucaagggaggauuuguucaucaaagaauggcauccaagauuggaaggugguacucucgaacgaugucuaaaacugaaaggauggggaugggacuguaugucaaguaugauggagacccaugggcugacagugaugcccuugcuuuuaguggaguaaugguuucaaugaaagaaccugguugguacuccuuuggcuucgaaauaaaagauaagaaaugcgauguccccuguauugggauagagaugguacaugaugguggaaaagagacuuggcacucagcagcaacagccauuuacuguuuaaugggcucaggacagcugcugugggacacugucacagguguugacauggcucuguaa

SEQ ID NO: 61292 - RNA, 1401 nt, Artificial Sequence; identical to SEQ ID NO: 61266
  derived and/or modified CDS sequence (wt) from neuraminidase__InfluenzaB__AGX17899

SEQ ID NO: 61293 - RNA, 1401 nt, Artificial Sequence; identical to SEQ ID NO: 61273
  derived and/or modified CDS sequence (wt) from neuraminidase__InfluenzaB__AGX17910

SEQ ID NO: 61294 - RNA, 1401 nt, Artificial Sequence; identical to SEQ ID NO: 61291
  derived and/or modified CDS sequence (wt) from neuraminidase__InfluenzaB__AGX17921

SEQ ID NO: 61295 - RNA, 1401 nt, Artificial Sequence; identical to SEQ ID NO: 61280
  derived and/or modified CDS sequence (wt) from neuraminidase__InfluenzaB__AGX17932

SEQ ID NO: 61296 - RNA, 1401 nt, Artificial Sequence
  derived and/or modified CDS sequence (wt) from neuraminidase__InfluenzaB__AGX17943
augcuaccuucaaccauacaaacguuaacccuauuucucacaucagggggaguauuauuaucacuauaugugucagcuucauugucauacuuacuauauucggauauauugcuaaaauucccaccaacagaaauuacugcaccaacaaugccauuggauugugcaaacgcaucaaauguucaggcugugaaccguucugcaacaaaaggggugacacuucuucucccagaaccggaguggacauacccgcguuuaucuugcccgggcucaaccuuucagaaagcacuccuaauuagcccucauagauucggagaaaccaaaggaaacucagcucccuugauaauaagggaaccuuuuauugcuuguggaccaaaggaaugcaaacacuuugcucuaacccacuaugcagcccaaccagggggauacuacaauggaacaagaggagacagaaacaagcugaggcaucuaauuucagucagauugggcaaaaucccaacaguagaaaacuccauuuuccacauggcagcauggagcggguccgcaugccaugaugguaaggaauggacauauaucggaguugauggcccugacaauaaugcauugcucaaaauaaaauauggagaagcauauacugacacauaccauuccuaugcaaacaacauccuaagaacacaagaaagugccugcaauugcaucgggggaaauuguuaucuuaugauaacugauggcucagcuucagguguuagugaaugcagauuucuuaagauucgagagggccgaauaauaaaagaaauauuuccaacaggaagaguaaaacauacugaagaaugcacaugcggauuugcuagcaauaaaaccauagaaugugccuguagagauaacaguuacacagcaaaaagacccuuugucaaauuaaacguggagacugauacagcagaaauaagauugaugugcacagagacuuauuuggacacccccagaccagaugauggaagcauaacagggccuugugaaucuaauggggacaaagggaguggaggcaucaagggaggauuuguccaucaaagaauggcauccaagauuggaaggugguacucucgaacgaugucuaaaacuaaaaggauggggauggggcuguaugucaaguaugauggagacccaugggcugacagugaugcccuugcuuuuaguggaguaaugguuucaauggaagaaccugguugguacuccuuuggcuucgaaauaaaagacaagaaaugugauguccccuguauugggauagagaugguacaugaugguggaaaagagacuuggcacucagcagcuacagccauuuacuguuuaaugggcucaggacagcugcugugggacacugucacagguguuaauauggcucuguaa

SEQ ID NO: 61297 - RNA, 1401 nt, Artificial Sequence; identical to SEQ ID NO: 61266
  derived and/or modified CDS sequence (wt) from neuraminidase__InfluenzaB__AGX17954

SEQ ID NO: 61298 - RNA, 1401 nt, Artificial Sequence
  derived and/or modified CDS sequence (wt) from neuraminidase__InfluenzaB__AGX17976
augcuaccuucaacuauacaaacguuaacccuauuucucacaucagggggaguauuauuaucacuauaugugucagcuucauuaucauacuuacuauauucggauauauugcuaaaauucucaccaacagaaauaacugcaccaacaaugccauuggauugugcaaacgcaucaaauguucaugcugugaaccguucugcaacaaaaggggugacaccucuucucccagaaccggaguggacauacccgcguuuaucuugcccgggcucaaccuuucagaaagcacuccuaauuagcccucauagauucggagaaaccaaaggaaacucagcucccuugauaauaagggaaccuuuuauugcuuguggaccaaaugaaugcaaacacuuugcucuaacccauuaugcagcccaaccagggggauacuacaauggaacaagaggagacagaaacaagcugaggcaucuaauuucagucaaauugggcaaaaucccaacaguagaaaacuccauuuuccacauggcagcauggagcggguccgcaugccaugaugguaaggaauggacauauaucggaguugauggcccugacaauaaugcauugcucaaaauaaaauauggagaagcauauacugacacauaccauuccuaugcaaacaacauccuaagaacacaagaaagugccugcaauugcaucgggggaaauuguuaucuuaugauaacugauggcucagcuucagguguuagugaaugcagauuucuuaagauucgagagggccgaauaauaaaagaaauauuuccaacaggaagaguaaaacauacugaggaaugcacaugcggauuugccagcaauaaaaccauagaaugugccuguagagauaacaguuacacagccaaaagacccuuugucaaauuaaacguggaaacugauacagcagaaauaagauugaugugcacagauacuuauuuggacacccccagaccagaugauggaagcauaacaggcccuugugaaucuaauggggacaaagggaguggaggcaucaagggaggauuuguucaucaaagaauggcauccaagauuggaaggugguacucucgaacgaugucuaaaacugaaaggauggggaugggacuguaugucaaguaugauggagacccaugggcugacagugaugcccuugcuuuuaguggaguaaugguuucaaugaaagaaccugguugguacuccuuuggcuucgaaauaaaagauaagaaaugcgauguccccuguauugggauagagaugguacaugaugguggaaaagagacuuggcacucagcagcaacagccauuuacuguuuaaugggcucaggacagcugcuaugggacacugucacagguguugacauggcucuguaa

SEQ ID NO: 61299 - RNA, 1401 nt, Artificial Sequence
  derived and/or modified CDS sequence (wt) from neuraminidase__InfluenzaB__AGX17987
augcuaccuucaaccauacaaacguuaacccuauuucucacaucagggggaguauuauuaucacuauaugugucaguuucauugucauacuuacuauauucggauauauugcuaaaauucccaccaacagaaauuacugcaccaacaaugccauuggauugugcaaacgcaucaaauguucaggcugugaaccguucugcaacaaaaggggugacacuucuucucccagaaccggaguggacauacccgcguuuaucuugcccgggcucaaccuuucagaaagcacuccuaauuagcccucauagauucggagaaaccaaaggaaacucagcucccuugauaauaagggaaccuuuuauugcuuguggaccaaaggaaugcaaacacuuugcucuaacccacuaugcagcccaaccagggggauacuacaauggaacaagaggagacagaaacaagcugaggcaucuaauuucagucaaauugggcaaaaucccaacaguagaaaacuccauuuuccacauggcagcauggagcggguccgcaugccaugaugguaaggaauggacauauaucggaguugauggcccugacaauaaugcauugcucaaaauaaaauauggagaagcauauacugacacauaccauuccuaugcaaacaacauccuaagaacacaagaaagugccugcaauugcaucgggggaaauuguuaucuuaugauaacugauggcucagcuucagguguuagugaaugcagauuucuuaagauucgagagggccgaauaauaaaagaaauauuuccaacaggaagaguaaaacauacugaagaaugcacaugcggauuugcuagcaauaaaaccauagaaugugccuguagagauaacaguuacacagcaaaaagacccuuugucaaauuaaacguggagacugauacagcagaaauaagauugaugugcacagagacuuauuuggacacccccagaccagaugauggaagcauaacagggccuugugaaucuaauggggacaaagggaguggaggcaucaagggaggauuuguccaucaaagaauggcauccaagauuggaaggugguacucucgaacgaugucuaaaacuaaaaggauggggauggggcuguaugucaaguaugauggagacccaugggcugacagugaugcccuugcuuuuaguggaguaaugguuucaauggaagaaccugguugguacuccuuuggcuucgaaauaaaagacaagaaaugugauguccccuguauugggauagagaugguacaugaugguggaaaagagacuuggcacucagcagcuacagccauuuacuguuuaaugggcucaggacagcugcugugggacacugucacagguguuaauauggcucuguaa

SEQ ID NO: 61300 - RNA, 1401 nt, Artificial Sequence
  derived and/or modified CDS sequence (wt) from neuraminidase__InfluenzaB__AGX17998
augcuaccuucaacuauacaaacguuaacccuauuucucacaucagggggaguauuauuaucacuauaugugucagcuucauuaucauacuuacuauauucggauauauugcuaaaauucucaccaacagaaauaacugcaccaacaaugccauuggauugugcaaacgcaucaaauguucaggcugugaaccguucugcaacaaaaggggugacacuucuucucccagaaccggaguggacauacccgcguuuaucuugcccgggcucaaccuuucagaaagcacuccuaauuagcccucauagauucggagaaaccaaaggaaacucagcucccuugauaauaagggaaccuuuuauugcuuguggaccaaaugaaugcaaacacuuugcucuaacccauuaugcagcccaaccagggggauacuacaauggaacaagaggagacagaaacaagcugaggcaucuaauuucagucaaauugggcaaaaucccaacaguagaaaacuccauuuuccacauggcagcauggagcggguccgcaugccaugacgguaaggaauggacauauaucggaguugauggcccugacaauaaugcauugcucaaaauaaaauauggagaagcauauacugacacauaccauuccuaugcaaacaacauccuaagaacacaagaaagugccugcaauugcaucgggggaaauuguuaucuuaugauaacugauggcucagcuucagguguuagugaaugcagauuucuuaagauucgagagggccgaauaauaaaagaaauauuuccaacaggaagaguaaaacauacugaggaaugcacaugcggauuugccagcaauaaaaccauagaaugugccuguagagauaacaguuacacagcaaaaagacccuuugucaaauuaaacguggagauugauacagcagaaauaagauugaugugcacagauacuuauuuggacacccccagaccagaugauggaagcauaacaggcccuugugaaucuaauggggacaaagggaguggaggcaucaagggaggauuuguucaucaaagaauggcauccaagauuggaaggugguacucucgaacgaugucuaaaacugaaaggauggggaugggacuguaugucaaguaugauggagacccaugggcugacagugaugcccuugcuuuuaguggaguaaugguuucaaugaaagaaccugguugguacuccuuuggcuucgaaauaaaagauaagaaaugcgauguccccuguauugggauagagaugguacaugaugguggaaaagagacuuggcacucagcagcaacagccauuuacuguuuaaugggcucaggacagcugcugugggacacugucacagguguugacauggcucuguaa

SEQ ID NO: 61301 - RNA, 1401 nt, Artificial Sequence
  derived and/or modified CDS sequence (wt) from neuraminidase__InfluenzaB__AGX18009
augcuaccuucaaccauacaaacguuaacccuauuucucacaucagggggaguauuauuaucacuauaugugucagcuucauugucauacuuacuauauucggauauauugcuaaaauucccaccaacagaaauuacugcaccaacaaugccauuggauugugcaaacgcaucaaauguucaggcugugaaccguucugcaacaaaaggggugacacuucuucucccagaaccggaguggacauacccgcguuuaucuugcccgggcucaaccuuucagaaagcacuccuaauuagcccucauagauucggagaaaccaaaggaaacucagcucccuugauaauaagggaaccuuuuauugcuuguggaccaaaggaaugcaaacacuuugcucuaacccacuaugcagcccaaccagggggauacuacaauggaacaagaggagacagaaacaagcugaggcaucuaauuucagucaaauugggcaaaaucccaacaguagaaaacuccauuuuccacauggcagcauggagcggguccgcaugccaugaugguaaggaauggacauauaucggaguugauggcccugacaauaaugcauugcucaaaauaaaauauggagaagcauauacugacacauaccauuccuaugcaaacaacauccuaagaacacaagaaagugccugcaauugcaucgggggaaauuguuaucuuaugauaacugauggcucagcuucagguguuagugaaugcagauuucuuaagauucgagagggccgaauaauaaaagaaauauuuccaacaggaagaguaaaacauacugaagaaugcacaugcggauuugcuaguaauaaaaccauagaaugugccuguagagauaacaguuacacagcaaaaagacccuuugucaaauuaaacguggagacugauacagcagaaauaagauugaugugcacagagacuuauuuggacacccccagaccagaugauggaagcauaacagggccuugugaaucuaauggggacaaagggaguggaggcaucaagggaggauuuguccaucaaagaauggcauccaagauuggaaggugguacucucgaacgaugucuaaaacuaaaaggauggggauggggcuguaugucaaguaugauggagacccaugggcugacagugaugcccuugcuuuuaguggaguaaugguuucaauggaagaaccugguugguacuccuuuggcuucgaaauaaaagacaagaaaugugauguccccuguauugggauagagaugguacaugaugguggaaaagagacuuggcacucagcagcuacagccauuuacuguuuaaugggcucaggacagcugcugugggacacugucacagguguuaauauggcucuguaa

SEQ ID NO: 61302 - RNA, 1401 nt, Artificial Sequence; identical to SEQ ID NO: 61299
  derived and/or modified CDS sequence (wt) from neuraminidase__InfluenzaB__AGX18020

SEQ ID NO: 61303 - RNA, 1401 nt, Artificial Sequence
  derived and/or modified CDS sequence (wt) from neuraminidase__InfluenzaB__AGX18031
augcuaccuucaaccauacaaacguuaacccuauuucucacaucagggggaguauuauuaucacuauaugugucagcuucauugucauacuuacuauauucggauauauugcuaaaauucccaccaacagaaauuacugcaccaacaaugccauuggauugugcaaacgcaucaaauguucaggcugugaaccguucugcaacaaaaggggugacacuucuucucccagaaccggaguggacauacccgcguuuaucuugcccgggcucaaccuuucagaaagcacuccuaauuagcccucauagauucggagaaaccaaaggaaacucagcucccuugauaauaagggaaccuuuuauugcuuguggaccaaaggaaugcaaacacuuugcucuaacccacuaugcagcccaaccagggggauacuacaauggaacaagaggagacagaaacaagcugaggcaucuaauuucagucaaauugggcaaaaucccaacaguagaaaacuccauuuuccacauggcagcauggagcggguccgcaugccaugaugguaaggaauggacauauaucggaguugauggcccugacaauaaugcauugcucaaaauaaaauauggagaagcauauacugacacauaccauuccuaugcaaacaacauccuaagaacacaagaaagugccugcaauugcaucgggggaaauuguuaucuuaugauaacugauggcucagcuucagguguuagugaaugcagauuucuuaagauucgagagggccgaauaauaaaagaaauauuuccaacaggaagaguaaaacauacugaagaaugcacaugcggauuugcuagcaauaaaaccauagaaugugccuguagagauaacaguuacacagcaaaaagacccuuugucaaauuaaacguggagacugauacagcagaaauaagauugaugugcacagagacuuauuuggacacccccagaccagaugauggaagcauaacagggccuugugaaucuaauggggacaaagggaguggaggcaucaagggaggauuuguccaucaaagaauggcauccaagauuggaaggugguacucucgaacgaugucuaaaacuaaaaggauggggauggggcuguaugucaaguaugauggagacccaugggcugacagugaugcccuugcuuuuaguggaguaaugguuucaauggaagaaccugguugguacuccuuuggcuucgaaauaaaagacaagaaaugugauguccccuguauugggauagagaugguacaugaugguggaaaagagacuuggcacucagcagcuacagccauuuacuguuuaaugggcucaggacaguugcugugggacacugucacagguguuaauauggcucuguaa

SEQ ID NO: 61304 - RNA, 1401 nt, Artificial Sequence
  derived and/or modified CDS sequence (wt) from neuraminidase__InfluenzaB__AGX18042
augcuaccuucaacuauacaaacguuaacccuauuucucacaucagggggaguauuauuaucacuauaugugucagcuucauuaucauacuuacuauauucggauauauugcuaaaauucucaccaacagaaauaacugcaccaacaaugccauugaauugugcaaacgcaucaaauguucaggcugugaaccguucugcaacaaaaggggugacacuucuucucccagaaccggaguggacauacccgcguuuaucuugcccgggcucaaccuuucagaaagcacuacuaauuagcccucauagauucggagaaaccaaaggaaacucagcucccuugauaauaagggaaccuuuuauugcuuguggaccaaaugaaugcaaacacuuugcucuaacccauuaugcagcccaaccagggggauacuacaauggaacaagaggagacagaaacaagcugaggcaucuaauuucagucaaauugggcaaaaucccaacaguagaaaacuccauuuuccacauggcagcauggagcggguccgcaugccaugaugguaaggaauggacauauaucggaguugauggcccugacaauaaugcauugcucaaaauaaaauauggagaggcauauacugacacauaccauuccuaugcaaacaacauccuaagaacacaagaaagugccugcaauugcaucgggggaaauuguuaucuuaugauaacugauggcucagcuucagguguuagugaaugcagauuucuuaagauucgagagggccgaauaauaaaagaaauauuuccaacaggaagaguaaaacauacugaggaaugcacaugcggauuugccagcaauaaaaccauagaaugugccuguagagauaacaguuacacagcaaaaagacccuuugucaaauuaaacguggagauugauacagcagaaauaagauugaugugcacagauacuuauuuggacacccccagaccagaugauggaagcauaacaggcccuugugaaucuaauggggacaaagggaguggaggcaucaagggaggauuuguucaucaaagaauggcauccaagauuggaaggugguacucucgaacgaugucuaaaacugaaaggauggggaugggacuguaugucaaguaugauggagacccaugggcugacagugaugcccuugcuuuuaguggaguaaugguuucaaugaaagaaccugguugguacuccuuuggcuucgaaauaaaagauaagaaaugcgauguccccuguauugggauagagaugguacaugaugguggaaaagagacuuggcacucagcagcaacagccauuuacuguuuaaugggcucaggacagcugcugugggacacugucacagguguugacauggcucuguaa

SEQ ID NO: 61305 - RNA, 1401 nt, Artificial Sequence
  derived and/or modified CDS sequence (wt) from neuraminidase__InfluenzaB__AGX18053
augcuaccuucaacuauacaaacguuaacccuauuucucacaucagggggaguauuauuaucacuauaugugucagcuucauuaucauacuuacuauauucggauauauugcuaaaauucucaccaacagaaauaacugcaccaacaaugccauuggauugugcaaacgcaucaaauguucaggcugugaaccguucugcaacaaaaggggugacacuucuucucccagaaccggaguggacauacccgcguuuaucuugcccgggcucaaccuuucagaaagcacuacuaauuagcccucauagauucggagaaaccaaaggaaacucagcucccuugauaauaagggaaccuuuuauugcuuguggaccaaaugaaugcaaacacuuugcucuaacccauuaugcagcccaaccagggggauacuacaauggaacaagaggagacagaaacaagcugaggcaucuaauuucagucaaauugggcaaaaucccaacaguggaaaacuccauuuuccacauggcagcauggagcggguccgcaugccaugaugguaaggaauggacauauaucggaguugauggcccugacaauaaugcauugcucaaaauaaaauauggagaggcauauacugacacauaccauuccuaugcaaacaacauccuaagaacacaagaaagugccugcaauugcaucgggggaaauuguuaucuuaugauaacugauggcucagcuucagguguuagugaaugcagauuucuuaagauucgagagggccgaauaauaaaagaaauauuuccaacaggaagaguaaaacauacugaggaaugcacaugcggauuugccagcaauaaaaccauagaaugugccuguagagauaacaguuacacagcaaaaagacccuuugucaaauuaaacguggagauugauacagcagaaauaagauugaugugcacagauacuuauuuggacacccccagaccagaugauggaagcauaacaggcccuugugaaucuaauggggacaaagggaguggaggcaucaagggaggauuuguucaucaaagaauggcauccaagauuggaaggugguacucucgaacgaugucuaaaacugaaaggauggggaugggacuguaugucaaguaugauggagacccaugggcugacagugaugcccuugcuuuuaguggaguaaugguuucaaugaaagaaccugguugguacuccuuuggcuucgaaauaaaagauaagaaaugcgauguccccuguauugggauagagaugguacaugaugguggaaaagagacuuggcacucagcagcaacagccauuuacuguuuaaugggcucaggacagcugcugugggacacugucacagguguugacauggcucuguaa

SEQ ID NO: 61306 - RNA, 1401 nt, Artificial Sequence; identical to SEQ ID NO: 61273
  derived and/or modified CDS sequence (wt) from neuraminidase__InfluenzaB__AGX18064

SEQ ID NO: 61307 - RNA, 1401 nt, Artificial Sequence
  derived and/or modified CDS sequence (wt) from neuraminidase__InfluenzaB__AGX18075
augcuaccuucaaccauacaaacguuaacccuauuucucacaucagggggaguauuauuaucacuauaugugucagcuucauugucauacuuacuauauucggauauauugcuaaaauucccaccaacagaaauuacugcaccaacaaugccauuggauugugcaaacgcaucaaauguucaggcugugaaccguucugcaacaaaaggggugacacuucuucucccagaaccggaguggacauacccgcguuuaucuugcccgggcucaaccuuucagaaagcacuccuaauuagcccucauagauucggagaaaccaaagggaacucagcucccuugauaauaagggaaccuuuuauugcuuguggaccaaaggaaugcaaacacuuugcucuaacccacuaugcagcccaaccagggggauacuacaauggaacaagaggagacagaaacaagcugaggcaucuaauuucagucaaauugggcaaaaucccaacaguagaaaacuccauuuuccacauggcagcauggagcggguccucaugccaugaugguaaggaauggacauauaucggaguugauggcccugacaauaaugcauugcucaaaauaaaauauggagaagcauauacugacacauaccauuccuaugcaaacaacauccuaagaacacaagaaagugccugcaauugcaucgggggaaauuguuaucuuaugauaacugauggcucagcuucagguguuagugaaugcagauuucuuaagauucgagagggccgaauaauaaaagaaauauuuccaacaggaagaguaaaacauacugaagaaugcacaugcggauuugcuagcaauaaaaccauagaaugugccuguagagauaacaguuacacagcaaaaagacccuuugucaaauuaaacguggagacugauacagcagaaauaagauugaugugcacagagacuuauuuggacacccccagaccagaugauggaagcauaacagggccuugugaaucuaauggggacaaagggaguggaggcaucaagggaggauuuguccaucaaagaauggcauccaagauuggaaggugguacucucgaacgaugucuaaaacuaaaaggauggggauggggcuguaugucaaguaugauggagacccaugggcugacagugaugcccuugcuuuuaguggaguaaugguuucaauggaagaaccugguugguacuccuuuggcuucgaaauaaaagacaagaaaugugauguccccuguauugggauagagaugguacaugaugguggaaaagagacuuggcacucagcagcuacagccauuuacuguuuaaugggcucaggacagcugcugugggacacugucacagguguuaauauggcucuguaa

SEQ ID NO: 61308 - RNA, 1401 nt, Artificial Sequence; identical to SEQ ID NO: 61280
  derived and/or modified CDS sequence (wt) from neuraminidase__InfluenzaB__AGX18086

SEQ ID NO: 61309 - RNA, 1401 nt, Artificial Sequence
  derived and/or modified CDS sequence (wt) from neuraminidase__InfluenzaB__AGX18097
augcuaccuucaacuauacaaacguuaacccuauuucucacaucagggggaguauuauuaucacuauaugugucagcuucauuaucauacuuacuauauucggauauauuacuaaaauucucaccaacagagauaacugcaccaacaaugccauuggauugugcaaacgcaucaaauguucaggcugugaaccguucugcaacaaaaggggugacacuucuucucccagaaccggaguggacauacccgcguuuaucuugcccgggcucaaccuuucagaaagcacuccuaauuagcccucauagauucggagaaaccaaaggaaacucagcucccuugauaauaagggaaccuuuuauugcuuguggaccaaaugaaugcaaacacuuugcucuaacccauuaugcagcccaaccagggggauacuacaauggaacaagaggagacagaaacaagcugaggcaucuaauuucagucaaauugggcaaaaucccaacaguagaaaacuccauuuuccacauggcagcauggagcggguccgcaugccaugaugguaaggaauggacauauaucggaguugauggcccugacaauaaugcauugcucaaaauaaaauauggagaagcauauacugacacauaccauuccuaugcaaacaacauccuaagaacacaagaaagugccugcaauugcaucgggggaaauuguuaucuuaugauaacugauggcucagcuucagguguuagugaaugcagauuucuuaagauucgagagggccgaauaauaaaagaaauauuuccaacaggaagaguaaaacauacugaggaaugcacaugcggauuugccagcaauaaaaccauagaaugugccuguagagauaacaguuacacagcaaaaagacccuuugucaaauuaaacguggagacugauacagcagaaauaagauugaugugcacagauacuuauuuggacacccccagaccagaugauggaagcauaacaggcccuugugaaucuaauggggacaaagggaguggaggcaucaagggaggauuuguucaucaaagaauggcauccaagguuggaaggugguacucucgaacgaugucuaaaacugaaaggauggggaugggacuguaugucaaguaugauggagacccaugggcugacagugaugcccuugcuuuuaguggaguaaugguuucaaugaaagaaccugguugguacuccuuuggcuucgaaauaaaagauaagaaaugcgauguccccuguauugggauagagaugguacaugaugguggaaaagagacuuggcacucagcagcaacagccauuuacuguuuaaugggcucaggacaguugcugugggacacugucacagguguugacauggcucuguaa

SEQ ID NO: 61310 - RNA, 1401 nt, Artificial Sequence; identical to SEQ ID NO: 61269
  derived and/or modified CDS sequence (wt) from neuraminidase__InfluenzaB__AGX18108

SEQ ID NO: 61311 - RNA, 1401 nt, Artificial Sequence
  derived and/or modified CDS sequence (wt) from neuraminidase__InfluenzaB__AGX18119
augcuaccuucaacuauacaaacguuaacccuauuucucacaucagggggaguauuauuaucacuauaugugucagcuucauuaucauacuuacuauauucggauauauugcuaaaauucucaccaacagaaauaacugcaccaacaaugccauuggauugugcaaacacaucaaauguucaggcugugaaccguucugcaacaaaaggggugacacuucuucucccagaaccggaguggacauacccgcguuuaucuugcccgggcucaaccuuucagaaagcacuccuaauuagcccucauagauucggagaaaccaaaggaaacucagcucccuugauaauaagggaaccuuuuauugcuuguggaccaaaugaaugcaaacacuuugcucuaacccauuaugcagcccaaccagggggauacuacaauggaacaagaggagacagaaacaagcugaggcaucuaauuucagucaaauugggcaaaaucccaacaguagaaaacuccauuuuccacauggcagcauggagcggguccgcaugccaugaugguaaggaauggacauauaucggaguugauggcccugacaauaaugcauugcucaaaauaaaauauggagaagcauauacugacacauaccauuccuaugcaaacaacauccuaagaacacaagaaagugccugcaauugcaucgggggaaauuguuaucuuaugauaacugauggcucagcuucagguguuagugaaugcagauuucuuaagauucgagagggccgaauaauaaaagaaauauuuccaacaggaagaguaaaacauacugaggaaugcacaugcggauuugccagcaauaaaaccauagaaugugccuguagagauaacaguuacacagcaaaaagacccuuugucaaauuaaacauggagacugauacagcagaaauaaaauugaugugcacagauacuuauuuggacacccccagaccagaugauggaagcauaacaggcccuugugaaucuaauggggacaaagggaguggaggcaucaagggaggauuuguucaucaaagaauggcauccaagauuggaaggugguacucucgaacgaugucuaaaacugaaaggauggggaugggacuguaugucaaguaugauggagacccaugggcugacagugaugcccuugcuuuuagugggguaaugguuucaaugaaagaaccugguugguacuccuuuggcuucgaaauaaaagauaagaaaugcgauguccccuguauugggauagagaugguacaugaugguggaaaagagacuuggcacucagcagcaacagccauuuacuguuuaaugggcucaggacagcugcugugggacacugucacagguguugacauggcucuguaa

SEQ ID NO: 61312 - RNA, 1401 nt, Artificial Sequence
  derived and/or modified CDS sequence (wt) from neuraminidase__InfluenzaB__AGX18130
augcuaccuucaacuauacaaacguuaacccuauuucucacaucagggggaguauuauuaucacuauaugugucagcuucauuaucauacuuacuauauucggauauauugcuaaaauucucaccaacagaaauaacugcaccaacaaugccauuggauugugcaaacgcaucaaauguucaggcugugaaccguucugcaacaaaaggggugacacuucuucucccagaaccggaguggacauacccgcguuuaucuugcccgggcucaaccuuucagaaagcacuccuaauuagcccucauagauucggagaaaccaaaggaaacucagcucccuugauaauaagggaaccuuuuauugcuuguggaccaaaugaaugcaaacacuuugcucuaacccauuaugcagcccaaccagggggauacuacaauggaacaagaggagacagaaacaagcugaggcaucuaauuucagucaaauugggcaaaaucccaacaguagaaaacuccauuuuccacauggcagcauggagcggguccgcaugccaugaugguaaggaauggacauauaucggaguugauggcccugacaauaaugcauugcucaaaauaaaauauggagaagcauauacugacacauaccauuccuaugcaaacaacauccuaagaacacaagaaagugccugcaauugcaucgggggaaauuguuaucuuaugauaacugauggcucagcuucagguguuagugaaugcagauuucuuaagauucgagagggccgaauaauaaaagaaauauuuccaacaggaagaguaaaacauacugaggaaugcacaugcggauuugccagcaauaaaaccauagaaugugccuguagagauaacaguuacacagcaaaaagacccuuugucaaauuaaacguggagauugauacagcagaaauaagauugaugugcacagauacuuauuuggacacccccagaccagaugauggaagcauaacaggcccuugugaaucuaauggggacaaagggaguggaggcaucaagggaggauuuguucaucaaagaauggcauccaagauuggaaggugguacucucgaacgaugucuagaacugaaaggauggggaugggacuguaugucaaguaugauggagacccaugggcugacagugaugcccuugcuuuuaguggaguaaugguuucaaugaaagaaccugguugguacuccuuuggcuucgaaauaaaagauaagaaaugcgauguccccuguauugggauagagaugguacaugaugguggaaaagagacuuggcacucagcagcaacagccauuuacuguuuaaugggcucaggacagcugcugugggacacugucacagguguugacauggcucuguaa

SEQ ID NO: 61313 - RNA, 1401 nt, Artificial Sequence
  derived and/or modified CDS sequence (wt) from neuraminidase__InfluenzaB__AGX18141
augcuaccuucaacuauacaaacguuaacccuauuucucacaucagggggaguauuauuaucacuauaugugucagcuucauugucauacuuacuauauucggauauauugcuaaaauucccaucaacagaaauuacugcaccaacaaugccauuggauugugcaaacgcaucaaauguucaggcugugaaccguucugcaacaaaagggaugacacuucuucucccagaaccggaguggacauacccgcguuuaucuugcccgggcucaaccuuucagaaagcacuccuaauuagcccucauagauucggagaaaccaaaggaaacucagcucccuugauaauaagggaaccuuuuauugcuuguggaccaaaggaaugcaaacacuuugcucuaacccacuaugcagcccaaccagggggauacuacaauggaacaagaggagacagaaacaagcugaggcaucuaauuucagucaaauugggcaaaaucccaacaguagaaaacuccauuuuccacauggcagcauggagcggguccgcaugccaugaugguaaggaauggacauauaucggaguugauggcccugacaauaaugcauugcucaaaauaaaauauggagaagcauauacugacacauaccauuccuaugcaaacaacauccuaagaacacaagaaagugccugcaauugcaucgggggaaauuguuaucuuaugauaacugauggcucagcuucagguguuagugaaugcagauuucuuaagauucgagagggccgaauaauaaaagaaauauuuccaacaggaagaauaaaacauacugaagaaugcacaugcggauuugcuagcaauaaaaccauagaaugugccuguagagauaacaguuacacagcaaaaagacccuuugucaaauuaaacguggagacugauacagcagaaauaagauugaugugcacagagacuuauuuggacacccccagaccagaugauggaagcauaacagggccuugugaaucuaauggggacaaagggagugguggcaucaagggaggauuuguccaucaaagaauggcauccaagauuggaaggugguacucucgaacgaugucuaaaacugaaaggauggggauggggcuguaugucaaguaugauggagacccaugggcugaaagugaugcccuugcuuuuaguggaguaaugguuucaauggaagaaccugguugguacuccuuuggcuucgaaauaaaagacaagaaaugugauguccccuguauugggauagagaugguacaugaugguggaaaagagacuuggcacucagcagcuacagccauuuacuguuuaaugggcucaggacagcugcugugggacacugucacagguguuaauauggcucuguaa

SEQ ID NO: 61314 - RNA, 1401 nt, Artificial Sequence; identical to SEQ ID NO: 61280
  derived and/or modified CDS sequence (wt) from neuraminidase__InfluenzaB__AGX18152

SEQ ID NO: 61315 - RNA, 1401 nt, Artificial Sequence
  derived and/or modified CDS sequence (wt) from neuraminidase__InfluenzaB__AGX18163
augcuaccuucaacuauacaaacguuaacccuauuucucacaucagggggaguauuauuaucacuauaugugucagcuucauugucauacuuacuauauucggauauauugcuaaaauucccaucaacagaaauuacugcaccaacaaugccauuggauugugcaaacgcaucaaauguucaggcugugaaccguucugcaacaaaaggggugacacuucuucucccagaaccggaguggacauacccgcguuuaucuugcccgggcucaaccuuucagaaagcacuccuaauuagcccucauagauucggagaaaccaaaggaaacucagcucccuugauaauaagggaaccuuuuauugcuuguggaccaaaggaaugcaaacacuuugcucuaacccacuaugcagcccaaccagggggauacuacaauggaaaaagaggagacagaaacaagcugaggcaucuaauuucagucaaauugggcaaaaucccaacaguagaaaacuccauuuuccacauggcagcauggagcggguccgcaugccaugaugguaaggaauggacauauaucggaguugauggcccugacaauaaugcauugcucaaaauaaaauauggagaagcauauacugacacauaccauuccuaugcaaacaacauccuaagaacacaagaaagugccugcaauugcaucgggggaaauuguuaucuuaugauaacugauggcucagcuucagguguuagugaaugcagauuucuuaagauucgagagggccgaauaauaaaagaaauauuuccaacaggaagaauaaaacauacugaagaaugcacaugcggauuugcuagcaauaaaaccauagaaugugccuguagagauaacaguuacacagcaaaaagacccuuugucaaauuaaacguggagacugauacagcagaaauaagauugaugugcacagagacuuauuuggacacccccagaccagaugauggaagcauaacagggccuugugaaucuaauggggacaaagggagugguggcaucaagggaggauuuguccaucaaagaauggcauccaagauuggaaggugguacucucgaacgaugucuaaaacugaaaggauggggauggggcuguaugucaaguaugauggagacccaugggcugacagugaugcccuugcuuuuaguggaguaaugguuucaauggaagaaccugguugguacuccuuuggcuucgaaauaaaagacaagaaaugugauguccccuguauugggauagagaugguacaugaugguggaaaagagacuuggcacucagcagcuacagccauuuacuguuuaaugggcucaggacagcugcugugggacacugucacagguguuaauauggcucuguaa

SEQ ID NO: 61316 - RNA, 1401 nt, Artificial Sequence; identical to SEQ ID NO: 61266
  derived and/or modified CDS sequence (wt) from neuraminidase__InfluenzaB__AGX18174

SEQ ID NO: 61317 - RNA, 1401 nt, Artificial Sequence
  derived and/or modified CDS sequence (wt) from neuraminidase__InfluenzaB__AGX18185
augcuaccuucaacuauacaaacguuaacccuauuucucacaucagggggaguauuauuaucacuauaugugucagcuucauuaucauacuuacuauauucggauauauugcuaaaauucucaccaacagagauaacugcaccaacaaugccauuggauugugcaaacgcaucaaauguucaggcugugaaccguucugcaacaaaaggggugacacuucuucucccagaaccggaguggacauacccgcguuuaucuugcccgggcucaaccuuucagaaagcacuucuaauuagcccucauagauucggagaaaccaaaggaaacucagcucccuugauaauaagggaaccuuuuauugcuuguggaccaaaugaaugcaaacacuuugcucuaacccauuaugcagcccaaccagggggauacuacaauggaacaagaggagacagaaacaagcugaggcaucuaauuucagucaaauugggcaaaaucccaacaguagaaaacuccauuuuccacauggcagcauggagcggguccgcaugccaugaugguaaggaauggacauauaucggaguugauggcccugacaauaaugcauugcucaaaauaaaauauggagaagcauauacugacacauaccauuccuaugcaaacaacauccuaagaacacaagaaagugccugcaauugcaucgggggaaauuguuaucuuaugauaacugauggcucagcuucagguguuagugaaugcagauuucuuaagauucgagagggccgaauaauaaaagaaauauuuccaacaggaagaguaaaacauacugaggaaugcacaugcggauuugccagcaauaaaaccauagaaugugccuguagagauaacaguuacacagcaaaaagacccuuugucaaauuaaacguggagacugauacagcagaaauaagauugaugugcacagauacuuauuuggacacccccagaccagaugauggaagcauaacaggcccuugugaaucuaauggggacaaagggaguggaggcaucaagggaggauuuguucaucaaagaauggcauccaagguuggaaggugguacucucgaacgaugucuaaaacugaaaggauggggaugggacuguaugucaaguaugauggagacccaugggcugacagugaugcccuugcuuuuaguggaguaaugguuucaaugaaagaaccugguugguacuccuuuggcuucgaaauaaaagauaagaaaugcgauguccccuguauugggauagagaugguacaugaugguggaaaagagacuuggcacucagcagcaacagccauuuacuguuuaaugggcucaggacaguugcugugggacacugucacagguguugacauggcucuguaa

SEQ ID NO: 61318 - RNA, 1401 nt, Artificial Sequence
  derived and/or modified CDS sequence (wt) from neuraminidase__InfluenzaB__AGX18196
augcuaccuucaacuauacaaacguuaacccuauuucucacaucagggggaguauuauuaucacuauaugugucagcuucauuaucauacuuacuauauucggauauauugcuaaaauucucaccaacagaaauaacugcaccaacaaugccauuggauugugcaaacgcaucaaauguucaugcugugaaccguucugcaacaaaaggggugacacuucuucucccagaaccggaguggacauacccgcguuuaucuugcccgggcucaaccuuucagaaagcacuccuaauuagcccucauagauucggagaaaccaaaggaaacucagcucccuugauaauaagggaaccuuuuauugcauguggaccaaaugaaugcaaacacuuugcucuaacccauuaugcagcccaaccagggggauacuacaauggaacaagaggagacagaaacaagcugaggcaucuaauuucagucaaauugggcaaaaucccaacaguagaaaacuccauuuuccacauggcagcauggagcggguccgcaugccaugaugguaaggaauggacauauaucggaguugauggcccugacaauaaugcauugcucaaaauaaaauauggagaagcauauacugacacauaccauuccuaugcaaacaacauccuaagaacacaagaaagugccugcaauugcaucgggggaaauuguuaucuuaugauaacugauggcucagcuucagguguuagugaaugcagauuucuuaagauucgagagggccgaauaauaaaagaaauauuuccaacaggaagaguaaaacauacugaggaaugcacaugcggauuugccagcaauaaaaccauagaaugugccuguagagauaacaguuacacagcaaaaagacccuuugucaaauuaaacguggaaacugauacagcagaaauaagauugaugugcacagauacuuauuuggacacccccagaccagaugauggaagcauaacaggcccuugugaaucuaauggggacaaagggaguggaggcaucaagggaggauuuguucaucaaagaauggcauccaagauuggaaggugguacucucgaacgaugucuaaaacugaaaggauggggaugggacuguaugucaaguaugauggagacccaugggcugacagugaugcccuugcuuuuaguggaguaaugguuucaaugaaagaaccugguugguacuccuuuggcuucgaaauaaaagauaagaaaugcgauguccccuguauugggauagagaugguacaugaugguggaaaagagacuuggcacucagcagcaacagccauuuacuguuuaaugggcucaggacagcugcugugggacacugucacagguguugacauggcucuguaa

SEQ ID NO: 61319 - RNA, 1401 nt, Artificial Sequence
  derived and/or modified CDS sequence (wt) from neuraminidase__InfluenzaB__AGX18207
augcuaccuucaaccauacaaacguuaacccuauuucucacaucagggggaguauuauuaucacuauaugugucagcuucauugucauacuuacuauauucggauauauugcuaaaauucccaccaacagaaauuacugcaccaacaaugccauuggauugugcaaacgcaucaaauguucaggcugugaaccguucugcaacaaaaggggugacacuucuucucccagaaccggaguggacauacccgcguuuaucuugcccgggcucaaccuuucagaaagcacuccuaauuagcccucauagauucggagaaaccaaaggaaacucagcucccuugauaauaagggaaccuuuuauugcuuguggaccaaaggaaugcaaacacuuugcucuaacccacuaugcagcccaaccagggggauacuacaauggaacaagaggagacagaaacaagcugaggcaucuaauuucagucaaauugggcaaaaucccaacaguagaaaccuccauuuuccacauggcagcauggagcggguccgcaugccaugaugguaaggaauggacauauaucggaguugauggcccugacaauaaugcauugcucaaaauaaaauauggagaagcauauacugacacauaccauuccuaugcaaacaacauccuaagaacacaagaaagugccugcaauugcaucgggggaaauuguuaucuuaugauaacugauggcucagcuucagguguuagugaaugcagauuucuuaagauucgagagggccgaauaauaaaagaaauauuuccaacaggaagaguaaaacauacugaagaaugcacaugcggauuugcuagcaauaaaaccauagaaugugccuguagagauaacaguuacacagcaaaaagacccuuugucaaauuaaacguggagacugauacagcagaaauaagauugaugugcacagagacuuauuuggacacccccagaccagaugauggaagcauaacagggccuugugaaucuaacggggacaaagggaguggaggcaucaagggaggauuuguccaucaaagaauggcauccaagauuggaaggugguacucucgaacgaugucuaaaacuaaaaggauggggauggggcuguaugucaaguaugauggagacccaugggcugacagugaugcccuugcuuuuaguggaguaaugguuucaauggaagaaccugguugguacuccuuuggcuucgaaauaaaagacaagaaaugugauguccccuguauugggauagagaugguacaugaugguggaaaagagacuuggcacucagcagcuacagccauuuacuguuuaaugggcucaggacagcugcugugggacacugucacagguguuaauauggcucuguaa

SEQ ID NO: 61320 - RNA, 1401 nt, Artificial Sequence
  derived and/or modified CDS sequence (wt) from neuraminidase__InfluenzaB__AGX18218
augcuaccuucaacuauacaaacguuaacccuauuucucacaucagggggaguauuauuaucacuauaugugucagcuucauuaucauacuuacuauauucggauauauugcuaaaacucucaccaacagaaauaacugcaccaacaaugccauuggauugugcaaacacaucaaauguucaggcugugaaccguucugcaacaaaaggggugacacuucuucucccagaaccggaguggacauacccgcguuuaucuugcccgggcucaaccuuucagaaagcacuccuaauuagcccucauagauucggagaaaccaaaggaaacucagcucccuugauaauaagggaaccuuuuauugcuuguggaccaaaugaaugcaaacacuuugcucuaacccauuaugcagcccaaccagggggauacuauaauagaacaagaggagacagaaacaagcugaggcaucuaauuucagucaaauugggcaaaaucccaacaguagaaaacuccauuuuccacauggcagcauggagcggguccgcaugccaugaugguaaggaauggacauauaucggaguugauggcccugacaauaaugcauugcucaaaauaaaauauggagaagcauauacugacacauaccauuccuaugcaaacaacauccuaagaacacaagaaagugccugcaauugcaucgggggaaauuguuaucuuaugauaacugauggcucagcuucagguguuagugaaugcagauuucuuaagauucgagagggccgaauaauaaaagaaauauuuccaacaggaagaguaaaacauacugaggaaugcacaugcggauuugccagcaauaaaaccauagaaugugccuguagagauaacaguuacacagcaaaaagacccuuugucaaauuaaacauggagacugauacagcagaaauaagauugaugugcacagauacuuauuuggacacccccagaccagaugauggaagcauaacaggcccuugugaaucuaauggggacaaagggaguggaggcaucaagggaggauuuguucaucaaagaauggcauccaagauuggaaggugguacucucgaacgaugucuaaaacugaaaggauggggaugggacuguaugucaaguaugauggagacccaugggcugacagugaugcccuugcuuuuagugggguaaugguuucaaugaaagaaccugguugguacuccuuuggcuucgaaauaaaagauaagaaaugcgauguccccuguauugggauagagaugguacaugaugguggaaaagagacuuggcacucagcagcaacagccauuuacuguuuaaugggcucaggacagcugcugugggacacugucacagguguugacauggcucuguaa

SEQ ID NO: 61321 - RNA, 1401 nt, Artificial Sequence
  derived and/or modified CDS sequence (wt) from neuraminidase__InfluenzaB__AGX18229
augcuaccuucaacuauacaaacguuaacccuauuucucacaucagggggaguauuauuaucacuauaugugucagcuucauuaucauacuuacuauauucggauauauugcuaaaauucucaccaacagaaauaacugcaccaacaaugccauuggauugugcaaacgcaucaaauguucaggcugugaaccguucugcaacaaaaggggugacgcuucuucucccagaaccggaguggacauacccgcguuuaucuugcccgggcucaaccuuucagaaagcacuccuaauuagcccucauagauucggagaaaccaaaggaaacucagcucccuugauaauaagggaaccuuuuauugcuuguggaccaaaugaaugcaaacacuuugcucuaacccauuaugcagcccaaccagggggauacuacaauggaacaagaggagacagaaacaagcugaggcaucuaauuucagucaaauugggcaaaaucccaacaguagaaaacuccauuuuccacauggcagcauggagcggguccgcaugccaugaugguaaggaauggacauauaucggaguugauggcccugacaauaaugcauugcucaaaauaaaauauggagaagcauauacugacacauaccauuccuaugcaaacaacauccuaagaacacaagaaagugccugcaauugcaucgggggaaauuguuaucuuaugauaacugauggcucagcuucagguguuagugaaugcagauuucuuaagauucgagagggccgaauaauaaaagaaauauuuccaacaggaagaguaaaacauacugaggaaugcacaugcggauuugccagcaauaaaaccauagaaugugccuguagagauaacaguuacacagcaaaaagacccuuugucaaauuaaacguggagauugauacagcagaaauaagauugaugugcacagauacuuauuuggacacccccagaccagaugauggaagcauaacaggcccuugugaaucuaauggggacaaagggaguggaggcaucaagggaggauuuguucaucaaagaauggcauccaagauuggaaggugguacucucgaacgaugucuaaaacugaaaggauggggaugggacuguaugucaaguaugauggagacccaugggcugacagugaugcccuugcuuuuaguggaguaaugguuucaaugaaagaaccugguugguacuccuuuggcuucgaaauaaaagauaagaaaugcgauguccccuguauugggauagagaugguacaugaugguggaaaagagacuuggcacucagcagcaacagccauuuacuguuuaaugggcucaggacagcugcugugggacacugucacagguguugacauggcucuguaa

SEQ ID NO: 61322 - RNA, 1401 nt, Artificial Sequence
  derived and/or modified CDS sequence (wt) from neuraminidase__InfluenzaB__AGX18240
augcuaccuucaacuauacaaacguuaacccuauuucucacaucagggggaguauuauuaucacuauaugugucagcuucauuaucauacuuacuauauucggauauauugcuaaaauucucaccaacagaaauaacugcaccaacaaugccauuggauugugcaaacgcaucaaauguucagacugugaaccguucugcaacaaaaggggugacacuucuucucccagaaccggaguggacauacccgcguuuaucuugcccgggcucaaccuuucagaaagcacuccuaauuagcccucauagauucggagaaaccaaaggaaacucagcucccuugauaauaagggaaccuuuuauugcuuguggaccaaaugaaugcaaacacuuugcucuaacccauuaugcagcccaaccagggggauacuacaauggaacaagaggagacagaaacaagcugaggcaucuaaucucagucaaauugggcaaaaucccaacaguagaaaacuccauuuuccacauggcagcauggagcggguccgcaugccaugaugguaaggaauggacauauaucggaguugauggcccugacaauaaugcauugcucaaaauaaaauauggagaagcauauacugacacauaccauuccuaugcaaacaacauccuaagaacacaagaaagugccugcaauugcaucgggggaaauuguuaucuuaugauaacugauggcucagcuucagguguuagugaaugcagauuucuuaagauucgagagggccgaauaauaaaagaaauauuuccaacaggaagaguaaaacauacugaggaaugcacaugcggauuugccagcaauaaaaccauagaaugugccuguagagauaacaguuacacagcaaaaagacccuuugucaaauuaaacguggagauugauacagcagaaauaagauugaugugcacagauacuuauuuggacacccccagaccagaugauggaagcauaacaggcccuugugaaucuaauggggacaaagggaguggaggcaucaagggaggauuuguucaucaaagaauggcauccaagauuggaaggugguacucucgaacgaugucuaaaacugaaaggauggggaugggacuguaugucaaguaugauggagacccaugggcugacagugaugcccuugcuuuuaguggaguaaugguuucaaugaaagaaccugguugguacuccuuuggcuucgaaauaaaagauaagaaaugcgauguccccuguauugggauagagaugguacaugaugguggaaaagagacuuggcacucagcagcaacagccauuuacuguuuaaugggcucaggacagcugcugugggacacugucacagguguugacauggcucuguaa

SEQ ID NO: 61323 - RNA, 1401 nt, Artificial Sequence; identical to SEQ ID NO: 61266
  derived and/or modified CDS sequence (wt) from neuraminidase__InfluenzaB__AGX18251

SEQ ID NO: 61324 - RNA, 1401 nt, Artificial Sequence
  derived and/or modified CDS sequence (wt) from neuraminidase__InfluenzaB__AGX18262
augcuaccuucaacuauacaaacguuaacccuauuucucacaucagggggaguauuauuaucacuauaugugucagcuucauuaucauacuuacuauauucgaauauauugcuaaaauucucaccaacagagauaacugcaccaacaaugccauuggauugugcaaacgcaucaaauguucaggcugugaaccguucugcaacaaaaggggugacacuucuucucccagaaccggaguggacauacccgcguuuaucuugcccgggcucaaccuuucagaaagcacuccuaauuagcccucauagauucggagaaaccaaaggaaacucagcucccuugauaauaagggaaccuuuuauugcuuguggaccaaaugaaugcaaacacuuugcucuaacccauuaugcagcccaaccagggggauacuacaauggaacaagaggagacagaaacaagcugaggcaucuaauuucagucaaauugggcaaaaucccaacaguagaaaacuccauuuuccacauggcagcauggagcggguccgcaugccaugaugguaaggaauggacauauaucggaguugauggcccugacaauaaugcauugcucaaaauaaaauauggagaagcauauacugacacauaccauuccuaugcaaacaacauccuaagaacacaagaaagugccugcaauugcaucgggggaaauuguuaucuuaugauaacugauggcucagcuucagguguuagugaaugcagauuucuuaagauucgagagggccgaauaauaaaagaaauauuuccaacaggaagaguaaaacauacugaggaaugcacaugcggauuugccagcaauaaaaccauagaaugugccuguagagauaacaguuacacagcaaaaagacccuuugucaaauuaaacguggagacugauacagcagaaauaagauugaugugcacagauacuuauuuggacacccccagaccagaugauggaagcauaacaggcccuugugaaucuaauggggacaaagggaguggaggcaucaagggaggauuuguucaucaaagaauggcauccaagguuggaaggugguacucucgaacgaugucuaaaacugaaaggauggggaugggacuguaugucaaguaugauggagacccaugggcugacagugaugcccuugcuuuuaguggaguaaugguuucaaugaaagaaccugguugguacuccuuuggcuucgaaauaaaagauaagaaaugcgauguccccuguauugggauagagaugguacaugaugguggaaaagagacuuggcacucagcagcaacagccauuuacuguuuaaugggcucaggacaguugcugugggacacugucacagguguugacauggcucuguaa

SEQ ID NO: 61325 - RNA, 1401 nt, Artificial Sequence
  derived and/or modified CDS sequence (wt) from neuraminidase__InfluenzaB__AGX18273
augcuaccuucaacuauacaaacguuaacccuauuucucacaucagggggaguauuauuaucacuauaugugucagcuucauuaucauacuuacuauauucggauauauugcuaaaauucucaccaacagaaauaacugcaccaacaaugccauuggauugugcaaacgcaucaaauguucaggcugugaaccguucugcaacaaaaggggugacacuucuucucccagaaccggaguggacauacccgcguuuaucuugcccgggcucaaccuuucagaaagcacuacuaauuagcccucauagauucggagaaaccaaaggaaacucagcucccuugauaauaagggaaccuuuuauugcuuguggaccaaaugaaugcaaacacuuugcucuaacccauuaugcagcccaaccagggggauacuacaauggaacaagaggagacagaaacaagcugaggcaucuaauuucagucaaauugggcaaaaucccaacaguagaaaacuccauuuuccacauggcagcauggagcggauccgcaugccaugaugguaaggaauggacauauaucggaguugauggcccugacaauaaugcauugcucaaaauaaaauauggagaggcauauacugacacauaccauuccuaugcaaacaacauccuaagaacacaagaaagugccugcaauugcaucgggggaaauuguuaucuuaugauaacugauggcucagcuucagguguuagugaaugcagauuucuuaagauucgagagggccgaauaauaaaagaaauauuuccaacaggaagaguaaaacauacugaggaaugcacaugcggauuugccagcaauaaaaccauagaaugugccuguagagauaacaguuacacagcaaaaagacccuuugucaaauuaaacguggagauugauacagcagaaauaagauugaugugcacagauacuuauuuggacacccccagaccagaugauggaagcauaacaggcccuugugaaucuaauggggacaaagggaguggaggcaucaagggaggauuuguucaucaaagaauggcauccaagauuggaaggugguauucucgaacgaugucuaaaacugaaaggauggggaugggacuguaugucaaguaugauggagacccaugggcugacagugaugcccuugcuuuuaguggaguaaugguuucaaugaaagaaccugguugguacuccuuuggcuucgaaauaaaagauaagaaaugcgauguccccuguauugggauagagaugguacaugaugguggaaaagagacuuggcacucagcagcaacagccauuuacuguuuaaugggcucaggacagcugcugugggacacugucacagguguugacauggcucuguaa

SEQ ID NO: 61326 - RNA, 1401 nt, Artificial Sequence
  derived and/or modified CDS sequence (wt) from neuraminidase__InfluenzaB__AGX18284
augcuaccuucaacuauacaaacguuaacccuauuucucacaucagggggaguauuauuaucacuauaugugucagcuucauuaucauacuuacuauauucggauauauugcuaaaauucucaccaacagaaauaacugcaccaacaaugccauuggauugugcaaacgcaucaaauguucaugcugugaaccguucugcaacaaaaggggugacaccucuucucccagaaccggaguggacauacccgcguuuaucuugcccgggcucaaccuuucagaaagcacuccuaauuagcccucauagauucggagaaaccaaaggaaacucagcucccuugauaauaagggaaccuuuuauugcuuguggaccaaaugaaugcaaacacuuugcucuaacccauuaugcagcccaaccagggggauacuacaauggaacaagaggagacagaaacaagcugaggcaucuaauuucagucaaauugggcaaaaucccaacaguagaaaacuccauuuuccacauggcagcauggagcggguccgcaugccaugaugguaaggaauggacauauaucggaguugauggcccugacaauaaugcauugcucaaaauaaaauauggagaagcauauacugacacauaccauuccuaugcaaacaacauccuaagaacacaagaaagugccugcaauugcaucgggggaaauuguuaucuuaugauaacugauggcucagcuucagguguuagugaaugcagauuucuuaagauucgagagggccgaauaauaaaagaaauauuuccaacaggaagaguaaaacauacugaggaaugcacaugcggauuugccagcaauaaaaccauagaaugugccuguagagauaacaguuacacagcaaaaagacccuuugucaaauuaaacguggaaacugauacagcagaaauaagauugaugugcacagauacuuauuuggacacccccagaccagaugauggaagcauaacaggcccuugugaaucuaauggggacaaagggaguggaggcaucaagggaggauuuguucaucaaagaauggcauccaagauuggaaggugguacucucgaacgaugucuaaaacugaaaggauggggaugggacuguaugucaaguaugauggagacccaugggcugacagugaugcccuugcuuuuaguggaguaaugguuucaaugaaagaaccugguugguacuccuuuggcuucgaaauaaaagauaagaaaugcgauguccccuguauugggauagagaugguacaugaugguggaaaagagacuuggcacucagcagcaacagccauuuacuguuuaaugggcucaggacagcugcuaugggacacugucacagguguugacauggcucuguaa

SEQ ID NO: 61327 - RNA, 1401 nt, Artificial Sequence; identical to SEQ ID NO: 61291
  derived and/or modified CDS sequence (wt) from neuraminidase__InfluenzaB__AGX18295

SEQ ID NO: 61328 - RNA, 1401 nt, Artificial Sequence
  derived and/or modified CDS sequence (wt) from neuraminidase__InfluenzaB__AGX18306
augcuaccuucaacuauacaaacguuaacccuauuucucacaucagggggaguauuauuaucacuauaugugucagcuucauuaucauacuuacuauauucggauauauugcuaaaauucucaccaacagagauaacugcaccaacaaugccauuggauugugcaaacgcaucaaauguucaggcugugaaccguucugcaacaaaaggggugacacuucuucucccagaaccggaguggacauacccgcguuuaucuugcccgggcucaaccuuucagaaagcacuccuaauuagcccucauagauucggagaaaccaaaggaaacucagcucccuugauaauaagggaaccuuuuauugcuuguggaccaaaugaaugcaaacacuuugcucuaacccauuaugcagcccaaccagggggauacuacaauggaacaagaggagacagaaacaagcugaggcaucuaauuucagucaaauugggcaaaaucccaacaguagaaaacuccauuuuccacauggcagcauggagcggguccgcaugccaugaugguaaggaauggacauauaucggaguugauggcccugacaauaaugcauugcucaaaauaaaauauggagaagcauauacugacacauaccauuccuaugcaaacaacauccuaagaacacaagaaagugccugcaauugcaucgggggaaauuguuaucuuaugauaacugauggcucagcuucagguguuagugaaugcagauuucuuaagauucgagaaggccgaauaauaaaagaaauauuuccaacaggaagaguaaaacauacugaggaaugcacaugcggauuugccagcaauaaaaccauagaaugugccuguagagauaacaguuacacagcaaaaagacccuuugucaaauuaaacguggagacugauacagcagaaauaagauugaugugcacagauacuuauuuggacacccccagaccagaugauggaagcauaacaggcccuugugaaucuaauggggacaaagggaguggaggcaucaagggaggauuuguucaucaaagaauggcauccaaaguuggaaggugguacucucgaacgaugucuaaaacugaaaggauggggaugggacuguaugucaaguaugauggagacccaugggcugacagugaugcccuugcuuuuaguggaguaaugguuucaaugaaagaaccugguugguacuccuuuggcuucgaaauaaaagauaagaaaugcgauguccccuguauugggauagagaugguacaugaugguggaaaagagacuuggcacucagcagcaacagccauuuacuguuuaaugggcucaggacaguugcugugggacacugucacagguguugacauggcucuguaa

SEQ ID NO: 61329 - RNA, 1401 nt, Artificial Sequence
  derived and/or modified CDS sequence (wt) from neuraminidase__InfluenzaB__AGX18317
augcuaccuucaacuauacaaacguuaacccuauuucucacaucagggggaguauuauuaucacuauaugugucagcuucauugucauacuuacuauauucggauauauugcuaaaauucccaucaacagaaauuacugcaccaacaaugccauuggauugugcaaacgcaucaaauguucaggcugugaaccguucugcaacaaaaggggugacacuucuucucccagaaccggaguggacauauccgcguuuaucuugcccgggcucaaccuuucagaaagcacuccuaauuagcccucauagauucggagaaaccaaaggaaacucagcucccuugauaauaagggaaccuuuuauugcuuguggaccaaaggaaugcaaacacuuugcucuaacccacuaugcagcccaaccagggggauacuacaaugaaacaaggggagacagaaacaagcugaggcaucuaauuucagucaaauugggcaaaaucccaacaguagaaaacuccauuuuccacauggcagcauggagcggguccgcaugccaugaugguaaggaauggacauauaucggaguugauggcccugacaauaaugcauugcucaaaauaaaauauggagaagcauauacugacacauaccauuccuaugcaaacaacauccuaagaacacaagaaagugccugcaauugcaucgggggaaauuguuaucuuaugauaacugauggcucagcuucagguguuagugaaugcagauuucuuaagauucgagagggccgaauaauaaaagaaauauuuccaacaggaagaauaaaacauacugaagaaugcacaugcggauuugcuagcaauaaaaccauagaaugugccuguagagauaacaguuacacagcaaaaagacccuuugucaaauuaaacguggagacugauacagcagaaauaagauugaugugcacagagacuuauuuggacacccccagaccagaugauggaagcauaacagggccuugugaaucuaauggggacaaagggaguggaggcaucaagggaggauuuguccaucaaagaauggcauccaagauuggaaggugguacucucgaacgaugucuaaaacuaaaaggauggggauggggcuguaugucaaguaugauggagacccaugggcugacagugaugcccuugcuuuuaguggaguaaugguuucaauggaagaaccugguugguacuccuuuggcuucgaaauaaaagacaagaaaugugauguccccuguauugggauagagaugguacaugaugguggaaaagagacuuggcacucagcagcuacagccauuuacuguuuaaugggcucaggacagcugcugugggacacugucacagguguuaauauggcucuguaa

SEQ ID NO: 61330 - RNA, 1401 nt, Artificial Sequence
  derived and/or modified CDS sequence (wt) from neuraminidase__InfluenzaB__AGX18328
augcuaccuucaacuauacaaacguuaacccuauuucucacaucagggggaguauuauuaucacuauaugugucagcuucauuaucauacuuacuauauucggauauauugcuaaaauucucaccaacagaaauaacugcaccaacaaugccauuggauugugcaaacgcaucaaauguucaggcugugaaccguucugcaacaaaaggggugacacuucuucucccagaaccggaguggacauacccgcguuuaucuugcccgggcucaaccuuucagaaagcacuccuaauuagcccucauagauucggagaaaccaaaggaaacucagcucccuugauaauaagggaaccuuuuauugcuuguggaccaaaugaaugcaaacacuuugcucuaacccauuaugcagcccaaccagggggauacuacaauggaacaagaggagacagaaacaagcugaggcaucuaauuucagucaaauugggcaaaaucccaacaguagaaaacuccauuuuccacauggcagcauggagcggguccgcaugccaugaugguaaggaauggacauauaucggaguugauggcccugacaauaaugcauugcucaaaauaaaauauggagaagcauauacugacacauaccauuccuaugcaaacaacauccuaagaacacaagaaagugcuugcaauugcaucgggggaaauuguuaucuuaugauaacugauggcucagcuucagguguuagugaaugcagauuucuuaagauucgagagggccgaauaauaaaagaaauauuuccaacaggaagaguaaaacauacugaggaaugcacaugcggauuugccagcaauaaaaccauagaaugugccuguagagauaacaguuacacagcaaaaagacccuuugucaaauuaaacguggagauugauacagcagaaauaagauugaugugcacagauacuuauuuggacacccccagaccagaugauggaagcauaacaggcccuugugaaucuaauggggacaaagggaguggaggcaucaagggaggauuuguucaucaaagaauggcauccaagauuggaaggugguacucucgaacgaugucuaaaacugaaaggauggggaugggacuguaugucaaguaugauggagacccaugggcugacagugaugcccuugcuuuuaguggaguaaugguuucaaugaaagaaccugguugguacuccuuuggcuucgaaauaaaagauaagaaaugcgauguccccuguauugggauagagaugguacaugaugguggaaaagagacuuggcacucagcagcaacagcuauuuacuguuuaaugggcucaggacagcugcugugggacacugucacagguguugacauggcucuguaa

SEQ ID NO: 61331 - RNA, 1401 nt, Artificial Sequence
  derived and/or modified CDS sequence (wt) from neuraminidase__InfluenzaB__AGX18339
augcuaccuucaacuauacaaacguuaacccuauuucucacaucagggggaguauuauuaucacuauaugugucagcuucauuaucauacuuacuauauucggauauauugcuaaaauucucaccaacagagauaacugcaccaacaaugccauuggauugugcaaacgcaucaaauguucaggcugugaaccguucugcaacaaaaggggugacacuucuucucccagaaccggaguggacauacccgcguuuaucuugcccgggcucaaccuuucagaaagcacuccuaauuagcccucauagauucggagaaaccaaaggaaacucagcucccuugauaauaagggaaccuuuuauugcuuguggaccaaaugaaugcaaacacuuugcucuaacccauuaugcagcccaaccagggggauacuacaauggaacaagaggagacagaaacaagcugaggcaucuaauuucagucaaauugggcaaaaucccaacaguagaaaacuccauuuuccacauggcagcauggagcggguccgcaugccaugaugguaaggaauggacauauaucggaguugauggcccugacaauaaugcauugcucaaaauaaaauauggagaagcauauacugacacauaccauuccuaugcaaacaacauccuaagaacacaagaaagugccugcaauugcaucgggggaaauuguuaucuuaugauaacugauggcucagcuucagguguuagugaaugcagauuucuuaagauucgagagggccgaauaauaaaagaaauauuuccaacaggaagaguaaaacauacugaggaaugcacaugcggauuugccagcaauaaaaccauagaaugugccuguagagauaacaguuacacagcaaaaagacccuuugucaaauuaaacguggagacugauacagcagaaauaagauugaugugcacagauacuuauuuggacacccccagaccagaugauggaagcauaacaggcccuugugaaucuaauggggacaaagggaguggaggcaucaagggaggauuuguucaucaaagaauggcauccaagguuggaaggugguacucucgaacgaugucuaaaacugaaaggauggggaugggacuguaugucaaguaugauggagacccaugggcugacagugaugcccuugcuuuugguggaguaaugguuucaaugaaagaaccugguugguacuccuuuggcuucgaaauaaaagauaagaaaugcgauguccccuguauugggauagagaugguacaugaugguggaaaagagacuuggcacucagcagcaacagccauuuacuguuuaaugggcucaggacaguugcugugggacacugucacagguguugacauggcucuguaa

SEQ ID NO: 61332 - RNA, 1401 nt, Artificial Sequence
  derived and/or modified CDS sequence (wt) from neuraminidase__InfluenzaB__AGX18350
augcuaccuucaacuauacaaacguuaacccuauuucucacaucagggggaguauuauuaucacuauaugugucagcuucauuaucauacuuacuauauucggauauauugcuaaaauucucaccaacagaaauaacugcaccaacaaugccauuggauugugcaaacgcaucaaauguucaggcuaugaaccguucugcaacaaaaggggugacacuucuucucccagaaccggaguggacauacccgcguuuaucuugcccgggcucaaccuuucagaaagcacuccuaauuagcccucauagauucggagaaaccaaaggaaacucagcucccuugauaauaagggaaccuuuuauugcuuguggaccaaaugaaugcaaacacuuugcucuaacccauuaugcagcccaaccagggggauacuacaauggaacaagaggagacagaaacaagcugaggcaucuaauuucagucaaauugggcaaaaucccaacaguagaaaacuccauuuuccacauggcagcauggagcggguccgcaugccaugaugguaaggaauggacauauaucggaguugauggcccugacaauaaugcauugcucaaaauaaaauauggagaagcauauacugacacauaccauuccuaugcaaacaacauccuaagaacacaagaaagugccugcaauugcaucgggggaaauuguuaucuuaugauaacugauggcucagcuucagguguuagugaaugcagauuucuuaagauucgagagggccgaauaauaaaagaaauauuuccaacaggaagaguaaaacauacugaggaaugcacaugcggauuugccagcaauaaaaccauagaaugugccuguagagauaacaguuacacagcaaaaagacccuuugucaaauuaaacguggagauugauacagcagaaauaagauugaugugcacagauacuuauuuggacacccccagaccagaugauggaagcauaacaggcccuugugaaucuaauggggacaaagggaguggaggcaucaagggaggauuuguucaucaaagaauggcauccaagauuggaaggugguacucucgaacgaugucuaaaacugaaaggauggggaugggacuguaugucaaguaugauggagacccaugggcugacagugaugcccuugcuuuuaguggaguaaugguuucaaugaaagaaccugguugguacuccuuuggcuucgaaauaaaagauaagaaaugcgauguccccuguauugggauagagaugguacaugaugguggaaaagagacuuggcacucagcagcaacagccauuuacuguuuaaugggcucaggacagcugcugugggacacugucacagguguugacauggcucuguaa

SEQ ID NO: 61333 - RNA, 1401 nt, Artificial Sequence; identical to SEQ ID NO: 61326
  derived and/or modified CDS sequence (wt) from neuraminidase__InfluenzaB__AGX18361

SEQ ID NO: 61334 - RNA, 1401 nt, Artificial Sequence
  derived and/or modified CDS sequence (wt) from neuraminidase__InfluenzaB__AGX18383
augcuaccuucaacuauacaaacguuaacccuauuucucacaucagggggaguauuauuaucacuauaugugucagcuucauuaucauacuuacuauauucggauauauugcuaaaauucucaccaacagaaauaacugcaccaacaaugccauuggauugugcaaacacaucaaauguucaggcugugaaccguucugcaacaaaaggggugacacuucuucucccagaaccggaguggacauacccgcguuuaucuugcccggguucaaccuuucagaaagcacuccuaauuagcccucauagauucggagaaaccaaaggaaacucagcucccuugauaauaagggaaccuuuuauugcuuguggaccaaaugaaugcaaacacuuugcucuaacccauuaugcagcccaaccagggggauacuacaauggaacaagaggagacagaaacaagcugaggcaucuaauuucagucaaauugggcaaaaucccaacaguagaaaacuccauuuuccacauggcagcauggagcggguccgcaugccaugaugguaaggaauggacauauauuggaguugauggcccugacaauaaugcauugcucaaaauaaaauauggagaagcauauacugacacauaccauuccuaugcaaacaacauccuaagaacacaagaaagugccugcaauugcaucgggggaaauuguuaucuuaugauaacugauggcucagcuucagguguuagugaaugcagauuucuuaagauucgagagggccgaauaauaaaagaaauauuuccaacaggaagaguaaaacauacugaggaaugcacaugcggauuugccagcaauaaaaccauagaaugugccuguagagauaacaguuacacagcaaaaagacccuuugucaaauuaaacauggagacugauacagcagaaauaagauugaugugcacagauacuuauuuggacacccccagaccagaugauggaagcauaacaggcccuugugaaucuaauggggacaaagggaguggaggcaucaagggaggauuuguucaucaaagaauggcauccaagauuggaaggugguacucucgaacgaugucuaaaacugaaaggauggggaugggacuguaugucaaguaugauggagacccaugggcugacagugaugcccuuguuuuuagugggguaaugguuucaaugaaagaaccugguugguacuccuuuggcuucgaaauaaaagauaagaaaugcgauguccccuguauugggauagagaugguacauggugguggaaaagagacuuggcacucagcagcaacagccauuuacuguuuaaugggcucaggacagcugcugugggacacugucacagguguugacauggcucuguaa

SEQ ID NO: 61335 - RNA, 1401 nt, Artificial Sequence; identical to SEQ ID NO: 61280
  derived and/or modified CDS sequence (wt) from neuraminidase__InfluenzaB__AGX18394

SEQ ID NO: 61336 - RNA, 1401 nt, Artificial Sequence
  derived and/or modified CDS sequence (wt) from neuraminidase__InfluenzaB__AGX18405
augcuaccuucaacuauacaaacguuaacccuauuucucacaucagggggaguauuauuaucacuauaugugucagcuucauuaucauacuuacuauauucggauauauugcuaaaauucucaccaacagaaauaacugcaccaacaaugccauuggauugugcaaacgcaucaaauguucaugcugugaaccguucugcaacaaaaggggugacaccucuucucccagaaccggaguggacauacccgcguuuaucuugcccgggcucaaccuuucagaaagcacuccuaauuagcccucauagauucggagaaaccaaaggaaacucagcucccuugauaauaagggaaccuuuuauugcuuguggaccaaaugaaugcaaacacuuugcucuaacccauuaugcagcccaaccagggggauacuacaauggaacaagaggagacagaaacaagcugaggcaucuaauuucagucaaauugggcaaaaucccaacaguagaaaacuccauuuuccacauggcagcauggagcggguccgcaugccaugaugguaaggaauggacauauaucggaguugauggcccugacaauaaugcauugcucaaaauaaaauauggagaagcauauacugacacauaccauuccuaugcaaacaacauccuaagaacacaagaaagugccugcaauugcaucgggggaaauuguuaucuuaugauaacugauggcucagcuucagguguuagugaaugcagauuucuuaagauucgagagggccgaauaauaaaagaaauauuuccaacaggaagaguaaaacauacugaggaaugcacaugcggauuugccagcaauaaaaccauagaaugugucuguagagauaacaguuacacagcaaaaagacccuuugucaaauuaaacguggaaacugauacagcagaaauaagauugaugugcacagauacuuauuuggacacccccagaccagaugauggaagcauaacaggcccuugugaaucuaauggggacaaagggaguggaggcaucaagggaggauuuguucaucaaagaauggcauccaagauuggaaggugguacucucgaacgaugucuaaaacugaaaggauggggaugggacuguaugucaaguaugauggagacccaugggcugacagugaugcccuugcuuuuaguggaguaaugguuucaaugaaagaaccugguugguacuccuuuggcuucgaaauaaaagauaagaaaugcgauguccccuguauugggauagagaugguacaugaugguggaaaagagacuuggcacucagcagcaacagccauuuacuguuuaaugggcucaggacagcugcuaugggacacugucacagguguugacauggcucuguaa

SEQ ID NO: 61337 - RNA, 1401 nt, Artificial Sequence
  derived and/or modified CDS sequence (wt) from neuraminidase__InfluenzaB__AGX18416
augcuaccuucaacuauacaaacguuaacccuauuucucacaucagggggaguauuauuaucacuauaugugucagcuucauuaucauacuuacuauauucggauauauugcuaaaauucucaccaacagaaauaacugcaccaacaaugccauuggauugugcaaacgcaucaaauguucaggcugugaaccguucugcaacaaaaggggugacacuucuucucccagaaccggaguggacauacccgcguuuaucuugcccgggcucaaccuuucagaaagcacuccuaauuagcccucauagauucggagaaaccaaaggaaacucagcucccuugauaauaagggaaccuuuuauugcuuguggaccaaaugaaugcaaacacuuugcucuaacccauuaugcagcccaaccagggggauacuacaauggaacaagaggagacagaaacaagcugaggcaucuaauuucagucaaauugggcaaaaucccaacaguagaaaacuccauuuuccacauggcagcauggagcggguccgcaugccaugaugguaaggaauggacauauaucggaguugauggcccugacaauaaugcauugcucaaaauaaaauauggagaagcauauacugacacauaccauuccuaugcaaacaacauccuaagaacacaagaaagugccugcaauugcaucgggggaaauuguuaucuuaugauaacugauggcucagcuucagguguuagugaaugcagauuucuuaagauucgagagggccgaauaauaaaagaaauauuuccaacaggaagaguaaaacauacugaggaaugcacaugcggauuugccagcaauaaaaccauagaaugugccuguagagauaacaguuacacagcaaaaagacccuuugucaaauuaaacguggagauugauacagcagaaauaagauugaugugcacagauacuuauuuggacacccccagaccagaugauggaagcauaacaggcucuugugaaucuaauggggacaaagggaguggaggcaucaagggaggauuuguucaucaaagaauggcauccaagauuggaaggugguacucucgaacgaugucuaaaacugaaaggauggggaugggacuguaugucaaguaugauggagacccaugggcugacagugaugcccuugcuuuuaguggaguaaugguuucaaugaaagaaccugguugguacuccuuuggcuucgaaauaaaagauaagaaaugcgauguccccuguauugggauagagaugguacaugaugguggaaaagagacuuggcacucagcagcaacagccauuuacuguuuaaugggcucaggacagcugcugugggacacugucacagguguugacauggcucuguaa

SEQ ID NO: 61338 - RNA, 1401 nt, Artificial Sequence
  derived and/or modified CDS sequence (wt) from neuraminidase__InfluenzaB__AGX18428
augcuacccucaacuauacaaacguuaacccuauuccucacaucagggggaguguuauuaucacuauaugugucagcuucacugucauacuuacuauauucggauauauugcuaaaauuuucaacaacagaaauaacugcaccaacaaugccauuggauugugcaaacgcaucaaauguucaggcugugaaccguucugcaacaaaaggggugacacuucuucucccagaaccggaguggacauacccgcguuuaucuugcccgggcucaaccuuucagaaagcacuccuaauuagcccucauagauucggagaaaccaaaggaaacucagcucccuugauaauaagggaaccuuuuauugcuuguggaccaaaggaaugcaaacacuuugcucuaacccauuaugcagcccaaccagggggauacuacaauggaacaagagaagacaggaacaagcugaggcaucuaauuucagucaaauugggcaaaaucccaacaguagaaaacuccauuuuccacauggcagcauggagcggguccgcaugccaugaugguaaagaauggacauauaucggaguugauggcccugacaguaaugcauugcucaaaauaaaauauggagaagcauauacugacacauaccauuccuaugcaaacaacauccuaagaacacaagaaagugccugcaauugcaucgggggaaauuguuaucuuaugauaacugauggcucagcuucagguauuagugagugcagauuucuuaagauucgagagggccgaauaauaaaagaaauauuuccaacaggaagaguaaaacauacugaagaaugcacaugcggauuugccagcaauaaaaccauagaaugugccuguagggauaacaguuacacagcaaaaagacccuuugucaaauuaaauguggagacugauacagcagaaauaagauugaugugcacagagacuuauuuggacacccccagaccagaugauggaagcauaacagggccuugugaaucuaaugggaauaaagggaguggaggcaucaagggaggauuuguucaucaaagaauggcauccaaaauuggaaggugguacucucgaacaaugucuaaaaccaaaaggaugggaaugggacuguaugucaaguaugauggagacccauggauugacagugaugcccuugcucuuaguggaguaaugguuucaauggaagaaccugguugguacucauuuggcuucgaaauaaaagauaagaaaugugauguccccuguauugggauagagaugguacaugaugguggaaaggagacuuggcacucagcagcaacagccauuuacuguuuaaugggcucaggacagcugcugugggacacugucacagguguugauauggcucuguaa

SEQ ID NO: 61339 - RNA, 1401 nt, Artificial Sequence
  derived and/or modified CDS sequence (wt) from neuraminidase__InfluenzaB__AGX18439
augcuaccuucaacuauacaaacguuaacccuauuucucacaucagggggaguauuauuaucacuauaugugucagcuucauuaucauacuuacuauauucggauauauugcuaaaauucucaccaacagaaauaacugcaccaacaaugccauuggauugugcaaacgcaucaaauguucaggcugugaaccguucugcaacaaaaggggugacacuucuucucccagaaccggaguggacauacccgcguuuaucuugcccgggcucaaccuuucagaaagcacuccuaauuagcccucauagauucggagaaaccaaaggaaacucagcucccuugauaauaagggaaccuuuuauugcuuguggaccaaaugaaugcaaacacuuugcucuaacccauuaugcagcccaaccagggggauacuacaauggaacaagaggagacagaaacaagcugaggcaucuaauuucagucaaauugggcaaaaucccaacaguagaaaacuccauuuuccacauggcagcauggagcggguccgcaugccaugaugguaaggaauggacauauaucggaguugauggcccugacaauaaugcauugcucaaaauaaaauauggagaagcauauacugacacauaccauuccuaugcaaacaacauccuaagaacacaagaaagugccugcaauugcaucgggggaaauuguuaucuuaugauaacugauggcucagcuucagguguuagugaaugcagauuucuuaagauucgagagggccgaauaauaaaagaaauauuuccaacaggaagaguaaaacauacugaggaaugcacaugcggauuugccagcaauaaaaccauagaaugugccuguagagauaacaguuacacagcaaaaagacccuuugucaaauuaaacguggagauugauacagcagaaauaagauugaugugcacagauacuuauuuggacaccccuagaccagaugauggaagcauaacaggcccuugugaaucuaauggggacaaagggaguggaggcaucaagggaggauuuguucaucaaagaauggcauccaagauuggaaggugguacucucgaacgaugucuaaaacugaaaggauggggaugggacuguaugucaaguaugauggagacccaugggcugacagugaugcccuugcuuuuaguggauuaaugguuucaaugaaagaaccugguugguacuccuuuggcuucgaaauaaaagauaagaaaugcgauguccccuguauugggauagagaugguacaugaugguggaaaagagacuuggcacucagcagcaacagccauuuacuguuuaaugggcucaggacagcugcugugggacacugucacagguguugacauggcucuguaa

SEQ ID NO: 61340 - RNA, 1401 nt, Artificial Sequence
  derived and/or modified CDS sequence (wt) from neuraminidase__InfluenzaB__AGX18450
augcuaccuucaacuauacaaacguuaacccuauuucucacaucagggggaguauuauuaucacuauaugugucagcuucauuaucauacuuacuauauucggauauauugcuaaaauucucaccaacagaaauaacugcaucaacaaugccauuggauugugcaaacgcaucaaauguucaggcugugaaccguucugcaacaaaaggggugacacuucuucucccagaaccggaguggacauacccgcguuuaucuugcccgggcucaaccuuucagaaagcacuccuaauuagcccucauagauucggagaaaccaaaggaaacucagcucccuugauaauaagggaaccuuuuauugcuuguggaccaaaugaaugcaaacacuuugcucuaacccauuaugcagcccaaccagggggauacuacaauggaacaagaggagacagaaacaagcugaggcaucuaauuucagucaaauugggcaaaaucccaacaguagaaaacuccauuuuccacauggcagcauggagcggguccgcaugccaugaugguaaggaauggacauauaucggaguugauggcccugacaauaaugcauugcucaaaauaaaauauggagaagcauauacugacacauaccauuccuaugcaaacaacauccuaagaacacaagaaagugccugcaauugcaucgggggaaauuguuaucuuaugauaacugauggcucagcuucagguguuagugaaugcagauuucuuaagauucgagagggccgaauaauaaaagaaauauuuccaacaggaagaguaaaacauacugaggaaugcacaugcggauuugccagcaauaaaaccauagaaugugccuguagagauaacaguuacacagcaaaaagacccuuugucaaauuaaacguggagauugauacagcagaaauaagauugaugugcacagauacuuauuuggacacccccagaccagaugauggaagcauaacaggcccuugugaaucuaauggggacaaagggaguggaggcaucaagggaggguuuguucaucaaagaauggcauccaagauuggaaggugguacucucgaacgaugucuaaaacugaaaggauggggaugggacuguaugucaaguaugauggagacccaugggcugacagugaugcccuugcuuuuaguggaguaaugguuucaaugaaagaaccugguugguacuccuuuggcuucgaaauaaaagauaagaaaugcgauguccccuguauugggauagagaugguacaugaugguggaaaagagacuuggcacucagcagcaacagccauuuacuguuuaaugggcucaggacagcugcugugggacacugucacagguguugacauggcucuguaa

SEQ ID NO: 61341 - RNA, 1401 nt, Artificial Sequence
  derived and/or modified CDS sequence (wt) from neuraminidase__InfluenzaB__AGX18461
augcuaccuucaacuauacaaacguuaacccuauuucucacaucagggggaguauuauuaucacuauaugugucagcuucauuaucauacuuacuauauucggauauauugcuaaaauucucaccaacagagauaacugcaccaacaaugccauuggauugugcaaacgcaucaaauguucaggcugugaaccguucugcaacaaaaggggugacacuucuucucccagaaccggaguggacauacccgcguuuaucuugcccgggcucaaccuuucagaaagcacuccuaauuagcccucauagauucggagaaaccaaaggaaacucagcucccuugauaauaagggaaccuuuuauugcuuguggaccaaaugaaugcaaacacuuugcucuaacccauuaugcagcccaaccagggggauacuacaauggaacaagaggagacagaaacaagcugaggcaucuaauuucagucaaauugggcaaaaucccaacaguagaaaacuccauuuuccacauggcagcauggagcggguccgcaugccaugaugguaaggaauggacauauaucggaguugauggcccugacaauaaugcauugcucaaaauaaaauauggagaagcauauacugacacauaccauuccuaugcaaacaacauccuaagaacacaagaaagugccugcaauugcaucgggggaaauuguuaucuuaugauaacugauggcucagcuucagguguuagugaaugcagauuucuuaagauucgagagggccgaauaauaaaagaaauauuuccaacaggaagaguaaaacauacugaggaaugcacaugcggauuugccagcaauaaaaccauagaaugugccuguagagauaacaguuacacagcaaaaagacccuuugucaaauuaaacguggagacugauacagcagaaauaagauugaugugcacagauacuuauuuggacacccccagaccagaugauggaagcauaacaggcccuugugaaucuaauggggacaaagggaguggaggcaucaagggaggauuuguucaucaaagaauggcauccaaaguuggaaggugguacucucgaacgaugucuaaaacugaaaggauggggaugggacuguaugucaaguaugauggagacccaugggcugacagugaugcccuugcuuuuaguggaguaaugguuucaaugaaagaaccugguugguacuccuuuggcuucgaaauaaaagauaagaaaugcgauguccccuguauugggauagagaugguacaugaugguggaaaagagacuuggcacucagcagcaacagccauuuacuguuuaaugggcucaggacaguugcugugggacacugucacagguguugacauggcucuguaa

SEQ ID NO: 61342 - RNA, 1401 nt, Artificial Sequence
  derived and/or modified CDS sequence (wt) from neuraminidase__InfluenzaB__AGX18472
augcuaccuucaacuauacaaacguuaacccuauuucucacaucagggggaguauuauuaucacuauaugugucagcuucauuaucauacuuacuauauucggauauauugcuaaaauucucaccaacagaaauaacugcaccaacaaugccauuggauugugcaaacgcaucaaauguucaugcugugaaccauucugcaacaaaaggggugacaccucuucucccagaaccggaguggacauacccgcguuuaucuugcccgggcucaaccuuucagaaagcacuccuaauuagcccucauagauucggagaaaccaaaggaaacucagcucccuugauaauaagggaaccuuuuauugcuuguggaccaaaugaaugcaaacacuuugcucuaacccauuaugcagcccaaccagggggauacuacaauggaacaagaggagacagaaacaagcugaggcaucuaauuucagucaaauugggcaaaaucccaacaguagaaaacuccauuuuccacauggcagcauggagcggguccgcaugccaugaugguaaggaauggacauauaucggaguugauggcccugacaauaaugcauugcucaaaauaaaauauggagaagcauauacugacacauaccauuccuaugcaaacaacauccuaagaacacaagaaagugccugcaauugcaucgggggaaauuguuaucuuaugauaacugauggcucagcuucagguguuagugaaugcagauuucuuaagauucgagagggccgaauaauaaaagaaauauuuccaacaggaagaguaaaacauacugaggaaugcacaugcggauuugccagcaauaaaaccauagaaugugccuguagagauaacaguuacacagcaaaaagacccuuugucaaauuaaacguggaaacugauacagcagaaauaagauugaugugcacagauacuuauuuggacacccccagaccagaugauggaagcauaacaggcccuugugaaucuaauggggacaaagggaguggaggcaucaagggaggauuuguucaucaaagaauggcauccaagauuggaaggugguacucucgaacgaugucuaaaacugaaaggauggggaugggacuguaugucaaguaugauggagacccaugggcugacagugaugcccuugcuuuuaguggaguaaugguuucaaugaaagaaccugguugguacuccuuuggcuucgaaauaaaagauaagaaaugcgauguccccuguauugggauagagaugguacaugaugguggaaaagagacuuggcacucagcagcaacagccauuuacuguuuaaugggcucaggacagcugcuaugggacacugucacagguguugacauggcucuguaa

SEQ ID NO: 61343 - RNA, 1401 nt, Artificial Sequence; identical to SEQ ID NO: 61280
  derived and/or modified CDS sequence (wt) from neuraminidase__InfluenzaB__AGX18483

SEQ ID NO: 61344 - RNA, 1401 nt, Artificial Sequence
  derived and/or modified CDS sequence (wt) from neuraminidase__InfluenzaB__AGX18494
augcuaccuucaacuauacaaacguuaacccuauuucucacaucagggggaguauuauuaucacuauaugugucagcuucauuaucauacuuacuauauucggauauauugcuaaaauucucaccaacagaaauaacugcaccaacaaugccauuggauugugcaaacgcaucaaauguucaggcugugaaccguucugcaacaaaaggggugacacuucuucucccagaaccggaguggacauacccgcguuuaucuugcccgggcucaaccuuucagaaagcacuccuaauuagcccucauagauucggagaaaccaaaggaaacucagcucccuugauaauaagggaaccuuuuauugcuuguggaccaaaugaaugcaaacacuuugcucuaacccauuaugcagcccaaccagggggauacuacaauggaacaagaggagacagaaacaagcugaggcaucuaauuucagucaaauugggcaaaaucccaacaguagaaaacuccauuuuccacauggcagcauggagcggguccgcaugccaugaugguaaggaauggacauauaucggaguugauggcccugacaauaaugcauugcucaaaauaaaauauggagaagcauauacugacacauaccauuccuaugcaaacaaaauccuaagaacacaagaaagugccugcaauugcaucgggggaaauuguuaucuuaugauaacugauggcucagcuucagguguuagugaaugcagauuucuuaagauucgagagggccgaauaauaaaagaaauauuuccaacaggaagaguaaaacacacugaggaaugcacaugcggauuugccagcaauaaaaccauagaaugugccuguagagauaacaguuacacagcaaaaagacccuuugucaaauugaacguggagacugauacagcagaaauaagauugaugugcacagauacuuauuuggacacccccagaccagaugauggaagcauaacaggcccuugugaaucuaauggggacaaagggaguggaggcaucaagggaggauuuguucaucaaagaauggcauccaagauuggaaggugguacucucgaacgaugucuaaaacugaaaggauggggaugggacuguaugucaaguaugauggagacccaugggcugacagugaugcccuagcuuuuaguggaguaaugguuucaaugaaagaaccugguugguacuccuuuggcuucgaaauaaaagauaagaaaugcgauguccccuguauugggauagagaugguacaugaugguggaaaagagacuuggcacucagcagcaacagccauuuacuguuuaaugggcucaggacagcugcugugggacacugucacagguguugacauggcucuguaa

SEQ ID NO: 61345 - RNA, 1401 nt, Artificial Sequence
  derived and/or modified CDS sequence (wt) from neuraminidase__InfluenzaB__AGX18505
augcuaccuucaacuauacaaacguuaacccuauuucucacaucagggggaguauuauuaucacuauaugugucagcuucauuaucauacuuacuauauucggauauauugcuaaaauucucaccaacagaaauaacugcaccaacaaugccauuggauugugcaaaugcaucaaauguucaggcugugaaccguucugcaacaaaaggggugacacuucuucucccagaaccggaguggacauacccgcguuuaucuugcccgggcucaaccuuucagaaagcacuccuaauuagcccucauagauucggagaaaccaaaggaaacucagcucccuugauaauaagggaaccuuuuauugcuuguggaccaaaugaaugcaaacacuuugcucuaacccauuaugcagcccaaccagggggauacuacaauggaacaagaggagacagaaacaagcugaggcaucuaauuucagucaaauugggcaaaaucccaacaguagaaaacuccauuuuccacauggcagcauggagcggguccgcaugccaugaugguaaggaauggacauauaucggaguugauggcccugacaauaaugcauugcucaaaauaaaauauggagaagcauauacugacacauaccauuccuaugcaaacaaaauccuaagaacacaagaaagugccugcaauugcaucgggggaaauuguuaucuuaugauaacugauggcucagcuucagguguuagugaaugcagauuucuuaagauucgagagggccgaauaauaaaagaaauauuuccaacaggaagaguaaaacacacugaggaaugcacaugcggauuugccagcaauaaaaccauagaaugugccuguagagauaacaguuacacagcaaaaagacccuuugucaaauuaaacguggagacugauacagcagaaauaagauugaugugcacagauacuuauuuggacacccccagaccagaugauggaagcauaacaggcccuugugaaucuaauggggacaaagggaguggaggcaucaagggaggauuuguucaucaaagaauggcauccaagauuggaaggugguacucucgaacgauaucuaaaacugaaaggauggggaugggacuguaugucaaguaugauggagacccaugggcugacagugaugcccuagcuuuuaguggaguaaugguuucaaugaaagaaccugguugguacuccuuuggcuucgaaauaaaagauaagaaaugcgauguccccuguauugggauagagaugguacaugaugguggaaaagagacuuggcacucagcagcaacagccauuuacuguuuaaugggcucaggacagcugcugugggacacugucacagguguugacauggcucuguaa

SEQ ID NO: 61346 - RNA, 1401 nt, Artificial Sequence
  derived and/or modified CDS sequence (wt) from neuraminidase__InfluenzaB__AGX18516
augcuaccuucaacuauacaaacguuaacccuauuucucacaucagggggaguauuauuaucacuauaugugucagcuucauuaucauacuuacuauauucggauauauugcuaaaauucucaccaacagaaauaacugcaccaacaaugccauuggauugugcaaaugcaucaaauguucaggcugugaaccguucugcaacaaaaggggugacacuucuucucccagaaccggaguggacauacccgcguuuaucuugcccgggcucaaccuuucagaaagcacuccuaauuagcccucauagauucggagaaaccaaaggaaacucagcucccuugauaauaagggaaccuuuuauugcuuguggaccaaaugaaugcaaacacuuugcucuaacccauuaugcagcccaaccagggggauacuacaauggaacaagaggagacagaaacaagcugaggcaucuaauuucagucaaauugggcaaaaucccaacaguagaaaacuccauuuuccacauggcagcauggagcggguccgcaugccaugaugguaaggaauggacauauaucggaguugauggcccugacaauaaugcauugcucaaaauaaaauauggagaagcauauacugacacauaccauuccuaugcaaacaaaauccuaagaacacaagaaagugccugcaauugcaucgggggaaauuguuaucuuaugauaacugauggcucagcuucagguguuagugaaugcagauuucuuaagauucgagagggccgaauaauaaaagaaauauuuccaacaggaagaguaaaacacacugaggaaugcacaugcggauuugccagcaauaaaaccauagaaugugccuguagagauaacaguuacacagcaaaaagacccuuugucaaauuaaacguggagacugauacagcagaaauaagauugaugugcacagauacuuauuuggacacccccagaccagaugauggaagcauaacaggcccuugugaaucuaauggggacaaagggaguggaggcaucaagggaggauuuguucaucaaagaauggcauccaagauuggaaggugguacucucgaacgauaucuaaaacugaaaggauggggaugggacuguaugucaaguaugauggagacccaugggcugacagugaugcccuagcuuuuaguggaguaaugguuucaaugaaagaaccugguugguacuccuuuggcuucgaaauaaaagauaagaaaugcgauguccccuguauugggauagagaugguacauggugguggaaaagagacuuggcacucagcagcaacagccauuuacuguuuaaugggcucaggacagcugcugugggacacugucacagguguugacauggcucuguaa

SEQ ID NO: 61347 - RNA, 1401 nt, Artificial Sequence; identical to SEQ ID NO: 60748
  derived and/or modified CDS sequence (wt) from neuraminidase__InfluenzaB__AGX18527

SEQ ID NO: 61348 - RNA, 1401 nt, Artificial Sequence; identical to SEQ ID NO: 60746
  derived and/or modified CDS sequence (wt) from neuraminidase__InfluenzaB__AGX18538

SEQ ID NO: 61349 - RNA, 1401 nt, Artificial Sequence; identical to SEQ ID NO: 60746
  derived and/or modified CDS sequence (wt) from neuraminidase__InfluenzaB__AGX18549

SEQ ID NO: 61350 - RNA, 1401 nt, Artificial Sequence
  derived and/or modified CDS sequence (wt) from neuraminidase__InfluenzaB__AGX18560
augcuaccuucaacuauacaaacguuaacccuauuucucacaucagggggaguauuauuaucacuauaugugucagcuucauuaucauacuuacuauauucggauauauugcuaaaauucucaccaacagaaauaacugcaccaacaaugccauuggauugugcaaacgcaucaaauguucaggcugugaaccguucugcaacaaaaggggugacacuucuucucccagaaccggaguggacauacccgcguuuaucuugcccgggcucaaccuuucagaaagcacuccuaauuagcccucauagauucggagaaaccaaaggaaacucagcucccuugauaauaagggaaccuuuuauugcuuguggaccaaaugaaugcaaacacuuugcucuaacccauuaugcagcccaaccagggggauacuacaauggaacaagaggagacagaaacaagcugaggcaucuaauuucagucaaauugggcaaaaucccaacaguagaaaacuccauuuuccacauggcagcauggagcggguccgcaugccaugaugguaaggaauggacauauaucggaguugauggcccugacaauaaugcauugcucaaaauaaaauauggagaagcauauacugacacauaccauuccuaugcaaacaaaauccuaagaacacaagaaagugccugcaauugcaucgggggaaauuguuaucuuaugauaacugauggcucagcuucagguguuagugaaugcagauuucuuaagauucgagagggccgaauaauaaaagaaauauuuccaacaggaagaguaaaacacacugaggaaugcacaugcggauuugccagcaauaaaaccauagaaugugccuguagagauaacaguuauacagcaaaaagacccuuugucaaauuaaacguggagacugauacagcagaaauaagauugaugugcacagauacuuauuuggacacccccagaccagaugauggaagcauaacaggcccuugugaaucuaauggggacaaagggaguggaggcaucaagggaggauuuguucaucaaagaauggcauccaagauuggaaggugguacucucgaacgaugucuaaaacugaaaggauggggaugggacuguaugucaaguaugauggagacccaugggcugacagugaugcccuagcuuuuaguggaguaaugguuucaaugaaagaaccugguugguacuccuuuggcuucgaaauaaaagauaagaaaugcgauguccccuguauugggauagagaugguacaugaugguggaaaagagacuuggcacucagcagcaacagccauuuacuguuuaaugggcucaggacagcugcugugggacacugucacagguguugacauggcucuguaa

SEQ ID NO: 61351 - RNA, 1401 nt, Artificial Sequence; identical to SEQ ID NO: 61344
  derived and/or modified CDS sequence (wt) from neuraminidase__InfluenzaB__AGX18571

SEQ ID NO: 61352 - RNA, 1401 nt, Artificial Sequence
  derived and/or modified CDS sequence (wt) from neuraminidase__InfluenzaB__AGX18582
augcuaccuucaacuauacaaacguuaacccuauuucucacaucagggggaguauuauuaucacuauauguguuagcuucauuaucauacuuacuauauucggauauauugcuaaaauucucaccaacagaaauaacugcaccaacaaugccauuggauugugcaaacgcaucaaauguucaugcugugaaccguucugcaacaaaaggggugacacuucuucucccagaaccggagugggcauacccgcguuuaucuugcccgggcucaaccuuucagaaagcacuccuaauuagcccucauagauucggagaaaccaaaggaaacucagcucccuugauaauaagggaaccuuuuauugcuuguggaccaaaugaaugcaaacacuuugcucuaacccauuaugcagcccaaccagggggauacuacaauggaacaagaggagacagaaacaagcugaggcaucuaauuucagucaaauugggcaaaaucccaacaguagaaaacuccauuuuccacauggcagcauggagcggguccgcaugccaugaugguaaggaauggacauauaucggaguugauggcccugacaauaaugcauugcucaaaauaaaauauggagaagcauauacugacacauaccauuccuaugcaaacaacauccuaagaacacaagaaagugccugcaauugcaucgggggaaauuguuaucuuaugauaacugauggcucagcuucagguguuagugaaugcagauuucuuaagauucgagagggccgaauaauaaaagaaauauuuccaacaggaagaguaaaacauacugaggaaugcacaugcggauuugccagcaauaaaaccauagaaugugccuguagagauaacaguuacacagcaaaaagacccuuugucaaauuaaacguggaaacugauacagcagaaauaagauugaugugcacagauacuuauuuggacacccccagaccagaugauggaagcauaacaggcccuugugaaucuaauggggacaaagggaguggaggcaucaagggaggauuuguucaucaaagaauggcauccaagauuggaaggugguacucucgaacgaugucuaaaacugaaaggauggggaugggacuguaugucaaguaugauggagacccaugggcugacagugaugcccuugcuuuuaguggaguaaugguuucaaugaaagaaccugguugguacuccuuuggcuucgaaauaaaagauaagaaaugcgauguccccuguauugggauagagaugguacaugaugguggaaaagagacuuggcacucagcagcaacagccauuuacuguuuaaugggcucaggacagcugcugugggacacugucacagguguugacauggcucuguaa

SEQ ID NO: 61353 - RNA, 1401 nt, Artificial Sequence; identical to SEQ ID NO: 60748
  derived and/or modified CDS sequence (wt) from neuraminidase__InfluenzaB__AGX18593

SEQ ID NO: 61354 - RNA, 1401 nt, Artificial Sequence
  derived and/or modified CDS sequence (wt) from neuraminidase__InfluenzaB__AGX18604
augcuaccuucaacuauacaaacguuaacccuauuucucacaucagggggaguauuauuaucacuauaugugucagcuucauuaucauacuuacuauauucggauauauuacuaaaauucucaccaacagaaauaacugcaccaacaaugccauuggauugugcaaacgcaucaaauguucaggcugugaaccguucugcaacaaaaggggugacacuucuucucccagaaccggaguggacauacccgcguuuaucuugcccgggcucaaccuuucagaaagcacuccuaauuagcccucauagauucggagaaaccaaaggaaacucagcucccuugauaauaagggaaccuuuuauugcuuguggaccaaaugaaugcaaacacuuugcucuaacccauuaugcagcccaaccagggggauacuacaauggaacaagaggagacagaaacaagcugaggcaucuaauuucagucaaauugggcaaaaucccaacaguagaaaacuccauuuuccacauggcagcauggagcggguccgcaugccaugaugguaaggaauggacauauaucggaguugauggcccugacaauaaugcauugcucaaaauaaaauauggagaagcauauacugacacauaccauuccuaugcaaacaaaauccuaagaacacaagaaagugccugcaauugcaucgggggaaauuguuaucuuaugauaacugauggcucagcuucagguguuagugaaugcagauuucuuaagauucgagagggccgaauaauaaaagaaauauuuccaacaggaagaguaaaacacacugaggaaugcacaugcggauuugccagcaauaaaaccauagaaugugccuguagagauaacaguuacacagcaaaaagacccuuugucaaauuaaacguggagacugauacagcagaaauaagauugaugugcacagauacuuauuuggacacccccagaccagaugauggaagcauaacaggcccuugugaaucuaauggggacaaagggaguggaggcaucaagggaggauuuguucaucaaagaauggcauccaagauuggaaggugguacucucgaacgaugucuaaaacugaaaggauggggaugggacuguaugucaaguaugauggagacccaugggcugacagugaugcccuagcuuuuaguggaguaaugguuucaaugaaagaaccugguugguacuccuuuggcuucgaaauaaaagauaagaaaugcgauguccccuguauugggauagagaugguacaugaugguggaaaagagacuuggcacucagcagcaacagccauuuacuguuuaaugggcucaggacagcugcugugggacacugucacagguguugacauggcucuguaa

SEQ ID NO: 61355 - RNA, 1401 nt, Artificial Sequence
  derived and/or modified CDS sequence (wt) from neuraminidase__InfluenzaB__AGX18615
augcuaccuucaacuauacaaacguuaacccuauuucucacaucagggggaguauuauuaucacuauaugugucagcuucauuaucauacuuacuauauucggauauauugcuaaaauucucaccaacagaaauaacugcaccaacaaugccauuggauugugcaaaugcaucaaauguucaggcugugaaccguucugcaacaaaaggggugacacuucuucucccagaaccggaguggacauacccgcguuuaucuugcccgggcucaaccuuucagaaagcacuccuaauuagcccucauagauucggagaaaccaaaggaaacucagcucccuugauaauaagggaaccuuuuauugcuuguggaccaaaugaaugcaaacacuuugcucuaacccauuaugcagcccaaccagggggauacuacaauggaacaagaggagacagaaacaagcugaggcaucuaauuucagucaaauugggcaaaaucccaacaguagaaaacuccauuuuccacauggcagcauggagcggguccgcaugccaugaugguaaggaauggacauauaucggaguugauggcccugacaauaaugcauugcucaaaauaaaauauggagaagcauauacugacacauaccauuccuaugcaaacaaaauccuaagaacacaagaaagugccugcaauugcaucgggggaaauuguuaucuuaugauaacugauggcucagcuucagguguuagugaaugcagauuucuuaagauucgagagggccgaauaauaaaagaaauauuuccaacaggaagaguaaaacacacugaggaaugcacaugcggauuugccagcaauaaaaccauagaaugugccuguagagauaacaguuacacagcaaaaagacccuuugucaaauuaaacguggagacugauacagcagaaauaagauugaugugcacagauacuuauuuggacacccccagaccagaugauggaagcauaacaggcccuugugaaucuaaugggaacaaagggaguggaggcaucaagggaggauuuguucaucaaagaauggcauccaagauuggaaggugguacucucgaacgaugucuaaaacugaaaggauggggaugggacuguaugucaaguaugauggagacccaugggcugacagugaugcccuagcuuuuaguggaguaaugguuucaaugaaagaaccugguugguacuccuuuggcuucgaaauaaaagauaagaaaugcgauguccccuguauugggauagagaugguacaugaugguggaaaagagacuuggcacucagcagcaacagccauuuacuguuuaaugggcucaggacagcugcugugggacacugucacagguguugacauggcucuguaa

SEQ ID NO: 61356 - RNA, 1401 nt, Artificial Sequence
  derived and/or modified CDS sequence (wt) from neuraminidase__InfluenzaB__AGX18626
augcuaccuucaacuauacaaacguuaacccuauuucucacaucagggggaguauuauuaucacuauaugugucagcuucauuaucauacuuacuauauucggauauauugcuaaaauucucaccaacagaaauaacugcaccaacaaugccauuggauugugcaaacgcaucaaauguucaggcugugaaccguucugcaacaaaaggggugacacuucuucucccagaaccggaguggacauacccgcguuuaucuugcccgggcucaaccuuucagaaagcacuccuaauuagcccucauagauucggagaaaccaaaggaaacucagcucccuugauauuaagggaaccuuuuauugcuuguggaccaaaugaaugcaaacacuuugcucuaacccauuaugcagcccaaccagggggauacuacaauggaacaagaggagacagaaacaagcugaggcaucuaauuucagucaaauugggcaaaaucccaacaguagaaaacuccauuuuccacauggcagcauggagcggguccgcaugccaugaugguaaggaauggacauauaucggaguugauggcccugacaauaaugcauugcucaaaauaaaauauggagaagcauauacugacacauaccauuccuaugcaaacaaaauccuaagaacacaagaaagugccugcaauugcaucgggggaaauuguuaucuuaugauaacugauggcucagcuucagguguuagugaaugcagauuucuuaagauucgagagggccgaauaauaaaagaaauauuuccaacaggaagaguaaaacacacugaggaaugcacaugcggauuugccagcaauaaaaccauagaaugugccuguagagauaacaguuacacagcaaaaagaccuuuugucaaauuaaacguggagacugauacagcagaaauaagauugaugugcacagauacuuauuuggacacccccagaccagaugacggaagcauaacaggcccuugugaaucuaauggggacaaagggaguggaggcaucaagggaggauuuguucaucaaagaauggcauccaagauuggaaggugguacucucgaacgaugucuaaaacugaaaggauggggaugggacuguaugucaaguaugauggagacccaugggcugacagugaugcccuagcuuuuaguggaguaaugguuucaaugaaagaaccugguugguacuccuuuggcuucgaaauaaaagauaagaaaugcgauguccccuguauugggauagagaugguacaugaugguggaaaagagacuuggcacucagcagcaacagccauuuacuguuuaaugggcucaggacagcugcugugggacacugucacagguguugacauggcucuguaa

SEQ ID NO: 61357 - RNA, 1401 nt, Artificial Sequence; identical to SEQ ID NO: 60748
  derived and/or modified CDS sequence (wt) from neuraminidase__InfluenzaB__AGX18637

SEQ ID NO: 61358 - RNA, 1401 nt, Artificial Sequence; identical to SEQ ID NO: 60748
  derived and/or modified CDS sequence (wt) from neuraminidase__InfluenzaB__AGX18648

SEQ ID NO: 61359 - RNA, 1401 nt, Artificial Sequence; identical to SEQ ID NO: 60748
  derived and/or modified CDS sequence (wt) from neuraminidase__InfluenzaB__AGX18659

SEQ ID NO: 61360 - RNA, 1401 nt, Artificial Sequence; identical to SEQ ID NO: 60748
  derived and/or modified CDS sequence (wt) from neuraminidase__InfluenzaB__AGX18670

SEQ ID NO: 61361 - RNA, 1401 nt, Artificial Sequence
  derived and/or modified CDS sequence (wt) from neuraminidase__InfluenzaB__AGX18681
augcuaccuucaacuauacaaacguuaacccuauuucucacaucagggggaguauuauuaucacuauaugugucagcuucauuaucauacuuacuauauucggauauauugcuaaaauucucaccaacagaaauaacugcaccaacaaugccauuggauugugcaaaugcaucaaauguucaggcugugaaccguucugcaacaaaaggggugacacuucuucucccagaaccggaguggacauacccgcguuuaucuugcccgggcucaaccuuucagaaagcacuccuaauuagcccucauagauucggagaaaccaaaggaaacucagcucccuugauaguaagggaaccuuuuauugcuuguggaccaaaugaaugcaaacacuuugcucuaacccauuaugcagcccaaccagggggauacuacaauggaacaagaggagacagaaacaagcugaggcaucuaauuucagucaaauugggcaaaaucccaacaguagaaaacuccauuuuccacauggcagcauggagcggguccgcaugccaugaugguaaggaauggacauauaucggaguugauggcccugacaauaaugcauugcucaaaauaaaauauggagaagcauauacugacacauaccauuccuaugcaaacaaaauccuaagaacacaagaaagugccugcaauugcaucgggggaaauuguuaucuuaugauaacugauggcucagcuucagguguuagugaaugcagauuucuuaagauucgagagggccgaauaauaaaagaaauauuuccaacaggaagaguaaaacacacugaggaaugcacaugcggauuugccagcaauaaaaccauagaaugugccuguagagauaacaguuacacagcaaaaagacccuuugucaaauuaaacguggagacugauacagcagaaauaagauugaugugcacagauacuuauuuggacacccccagaccagaugauggaagcauaacaggcccuugugaaucuaauggggacaaagggaguggaggcaucaagggaggauuuguucaucaaagaauggcauccaagauuggaaggugguacucucgaacgaugucuaaaacugaaaggauggggaugggacuguaugucaaguaugauggagacccaugggcugacagugaugcccuagcuuuuaguggaguaaugguuucaaugaaagaaccugguugguacuccuuuggcuucgaaauaaaagauaagaaaugcgauguccccuguauugggauagagaugguacaugaugguggaaaagagacuuggcacucagcagcaacagccauuuacuguuuaaugggcucaggacagcugcugugggacacugucacagguguugacauggcucuguaa

SEQ ID NO: 61362 - RNA, 1401 nt, Artificial Sequence; identical to SEQ ID NO: 60748
  derived and/or modified CDS sequence (wt) from neuraminidase__InfluenzaB__AGX18692

SEQ ID NO: 61363 - RNA, 1401 nt, Artificial Sequence
  derived and/or modified CDS sequence (wt) from neuraminidase__InfluenzaB__AGX18703
augcuaccuucaacuauacaaacguuaacccuauuucucacaucagggggaguauuauuaucacuauaugugucagcuucauugucauacuuacuauauucggauauauugcuaaaauucccaucaacagaaauuacugcaccaacaaugccauuggauugugcaaacgcaucaaauguucaggcugugaaccuuucugcaacaaaaggggugacacuucuucucccagaaccggaauggacauacccgcguuuaucuugcccgggcucaaccuuucagaaagcacuccuaauuagcccucauagauucggagaaaccaaaggaaacucagcucccuugauaauaagggaaccuuuuauugcuuguggaccaaaggaaugcaaacacuuugcucuaacccacuaugcagcccaaccagggggauacuacaauggaacaagaggagacagaaacaagcugaggcaucuaauuucagucaaauugggcaaaaucccaacaguagaaaacuccauuuuccacauggcagcauggagcggguccgcaugccaugaugguaaggaauggacauauaucggaguugauggcccugacaauaaugcauugcucaagauaaaauauggagaagcauauacugacacauaccauuccuaugcaaacaacauccuaagaacacaagaaagugcuugcaauugcaucgggggaaauuguuaucuuaugauaacugauggcucagcuucagguguuagugaaugcagauuucuuaagauucgagagggccgaauaauaaaagaaauauuuccaacaggaagaauaaaacauacugaagaaugcacaugcggauuugcuagcaauaaaaccauagaaugugccuguagagauaacaguuacacagcaaaaagacccuuugucaaauuaaacguggagacugauacagcagaaauaagauugaugugcacagagacuuauuuggacacccccagaccagaugauggaagcauaacagggccuugugaaucuaauggggacaaagggaguggaggcaucaagggaggauuuguccaucaaagaauggcauccaagauuggaaggugguacucucgaacgauguccaaaacugaaaggauggggauggggcuguaugucaaguaugauggagacccaugggcugacagugaugcccuugcuuuuaguggaguaaugguuucaauggaagaaccugguugguacuccuuuggcuucgaaauaaaagacaagaaaugugauguccccuguauugggauagagaugguacaugaugguggaaaagagacuuggcacucagcagcuacagccauuuacuguuuaaugggcucaggacaguugcugugggacacugucacagguguuaauauggcucuguaa

SEQ ID NO: 61364 - RNA, 1401 nt, Artificial Sequence; identical to SEQ ID NO: 60746
  derived and/or modified CDS sequence (wt) from neuraminidase__InfluenzaB__AGX18714

SEQ ID NO: 61365 - RNA, 1401 nt, Artificial Sequence; identical to SEQ ID NO: 60746
  derived and/or modified CDS sequence (wt) from neuraminidase__InfluenzaB__AGX18725

SEQ ID NO: 61366 - RNA, 1401 nt, Artificial Sequence
  derived and/or modified CDS sequence (wt) from neuraminidase__InfluenzaB__AGX18736
augcuaccuucaacuauacaaacguuaacccuauuucucacaucagggggaguauuauuaucacuauaugugucagcuucauuaucauacuuacuauauucggauauauugcuaaaauucucaccaacagaaauaacugcaccaacaaugccauuggauugugcaaacgcaucaaauguucaggcugugaaccguucugcaacaaaaggggugacacuucuucucccagaaccggaguggacauacccgcguuuaucuugcccgggcucaaccuuucagaaagcacuccuaauuagcccucauagauucggagaaaccaaaggaaacucagcucccuugauaauaagggaaccuuuuauugcuuguggaccaaaugaaugcaaacacuuugcucuaacccauuaugcagcccaaccagggggauacuacaauggaacaggaggagacagaaacaagcugaggcaucuaauuucagucaaauugggcaaaaucccaacaguagaaaacuccauuuuccacauggcagcauggagcggguccgcaugccaugaugguaaggaauggacauauaucggaguugauggcccugacaauaaugcauugcucaaaauaaaauauggagaagcauauacugacacauaccauuccuaugcaaacaaaauccuaagaacacaagaaagugccugcaauugcaucgggggaaauuguuaucuuaugauaacugauggcucagcuucagguguuagugaaugcagauuucuuaagauucgagagggccgaauaauaaaagaaauauuuccaacaggaagaguaaaacacacugaggaaugcacaugcggauuugccagcaauaaaaccauagaaugugccuguagagauaacaguuacacagcaaaaagacccuuugucaaauuaaacguggagacugauacagcagaaauaagauugaugugcacagauacuuauuuggacacccccagaccagaugauggaagcauaacaggccccugugaaucuaauggggacaaagggaguggaggcaucaagggaggauuuguucaucaaagaauggcauccaagauuggaaggugguacucucgaacgaugucuaaaacugaaaggauggggaugggacuguaugucaaguaugauggagacccaugggcugacagugaugcccuagcuuuuaguggaguaaugguuucaaugaaagaaccugguugguacuccuuuggcuucgaaauaaaagauaagaaaugcgauguccccuguauugggauagagaugguacaugaugguggaaaagagacuuggcacucagcagcaacagccauuuacuguuuaaugggcucaggacagcugcugugggacacugucacagguguugacauggcucuguaa

SEQ ID NO: 61367 - RNA, 1401 nt, Artificial Sequence
  derived and/or modified CDS sequence (wt) from neuraminidase__InfluenzaB__AGX18758
augcuaccuucaacuauacaaacguuaacccuauuucucacaucagggggaguauuauuaucacuauaugugucagcuucauuaucauacuuacuauauucggauauauugcuaaaauucucaccaacagaaauaacugcaccaacaaugccauuggauugugcaaacgcaucaaauguucaggcugugaaccguucugcaacaaaaggggugacacuucuucucccagaaccggaguggacauacccgcguuuaucuugcccgggcucaaccuuucagaaagcacuccuaauuagcccucauagauucggagaaaccaaaggaaacucagcucccuugauaauaagggaaccuuuuauugcuuguggaccaaaugaaugcaaacacuuugcucuaacccauuaugcagcccaaccagggggauacuacaauggaacaagaggagacagaaacaagcugaggcaucuaauuucagucaaauugggcaaaaucccaacaguagaaaacuccauuuuccacauggcagcauggagcggguccgcaugccaugaugguaaggaauggacauauaucggaguugauggcccugacaauaaugcauugcucaaaauaaaauauggagaagcauauacugacacauaccauuccuaugcaaacaaaauccuaagaacacaagaaagugccugcaauugcaucgggggaaauuguuaucuuaugauaacugauggcucagcuucagguguuagugaaugcagauuucuuaagauucgagagggccgaauaauaaaagaaauauuuccaacaggaagaguaaaacacacugaggaaugcacaugcggauuugccagcaauaaaaccauagaaugugccuguagagauaacaguuacacagcaaaaagacccuuugucaaauuaaacguggagacugauacagcagaaauaagauugaugugcacagauacuuauuuggacacccccagaccagaugauggaagcauaacaggcccuugugaaucuaauggggacaaagggaguggaggcaucaagggaggauuuguucaucaaagaauggcauccaagauuggaaggugguacucucgaacgaugucuaaaacugaaaggauggggaugggacuguaugucaaguaugauggagacccaugggcugacagugaugcccuagcuuuuaguggaguaaugguuucaaugaaagaaccugguugguacuccuuuggcuucgaaauaaaagauaagaaaugcgauguccccugcauugggauagagaugguacaugaugguggaaaagagacuuggcacucagcagcaacagccauuuacuguuuaaugggcucaggacagcugcugugggacacugucacagguguugacauggcucuguaa

SEQ ID NO: 61368 - RNA, 1401 nt, Artificial Sequence; identical to SEQ ID NO: 60746
  derived and/or modified CDS sequence (wt) from neuraminidase__InfluenzaB__AGX18769

SEQ ID NO: 61369 - RNA, 1401 nt, Artificial Sequence; identical to SEQ ID NO: 61106
  derived and/or modified CDS sequence (wt) from neuraminidase__InfluenzaB__AGX18780

SEQ ID NO: 61370 - RNA, 1401 nt, Artificial Sequence; identical to SEQ ID NO: 60748
  derived and/or modified CDS sequence (wt) from neuraminidase__InfluenzaB__AGX18791

SEQ ID NO: 61371 - RNA, 1401 nt, Artificial Sequence; identical to SEQ ID NO: 60748
  derived and/or modified CDS sequence (wt) from neuraminidase__InfluenzaB__AGX18802

SEQ ID NO: 61372 - RNA, 1401 nt, Artificial Sequence
  derived and/or modified CDS sequence (wt) from neuraminidase__InfluenzaB__AGX18813
augcuaccuucaacuauacaaacguuaacccuauuucucacaucagggggaguauuauuaucacuauaugugucagcuucauugucauacuuacuauauucggauauauugcuaaaauucccaucaacagaaauuacugcaccaacaaugccauuggauugugcaaacgcaucaaauguucaggcugugaaccguucugcaacaaaaggggugacacuucuucucccagaaccggaauggacauacccgcguuuaucuugcccgggcucaaccuuucagaaagcacuccuaauuagcccucauagauucggagaaaccaaaggaaacucagcucccuugauaauaagggaaccuuuuauugcuuguggaccaaaggaaugcaaacacuuugcucuaacccacuaugcagcccaaccagggggauacuacaauggaacaagaggagacagaaacaagcugaggcaucuaauuucagucaaauugggcaaaaucccaacaguagaaaacuccauuuuccacauggcagcauggagcggguccgcaugccaugaugguaaggaauggacauauaucggaguugauggcccugacaauaaugcauugcucaaaauaaaauauggagaagcauauacugacacauaccauuccuaugcaaacaacauccuaagaacacaagaaagugcuugcaauugcaucgggggaaauuguuaucuuaugauaacugauggcucagcuucagguguuagugaaugcagauuucuuaagauucgagagggccgaauaauaaaagaaauauuuccaacaggaagaauaaaacauacugaagaaugcacaugcggauuugcuagcaauaaaaccauagaaugugccuguagagauaacaguuacacagcaaaaagacccuuugucaaauuaaacguggagacugauacagcagaaauaagauugaugugcacagagacuuauuuggacacccccagaccagaugauggaagcauaacagggccuugugaaucuaauggggacaaagggaguggaggcaucaagggaggauuuguccaucaaagaauggcauccaagauuggaaggugguacucucgaacgauguccaaaacugaaaggauggggauggggcuguaugucaaguaugauggagacccaugggcugacagugaugcccuuguuuuuaguggaguaaugguuucaauggaagaaccugguugguacuccuuuggcuucgaaauaaaagacaagaaaugugauguccccuguauugggauagagaugguacaugaugguggaaaagagacuuggcacucagcagcuacagccauuuacuguuuaaugggcucaggacaguugcugugggacacugucacagguguuaauauggcucuguaa

SEQ ID NO: 61373 - RNA, 1401 nt, Artificial Sequence
  derived and/or modified CDS sequence (wt) from neuraminidase__InfluenzaB__AGX18824
augcuaccuucaacuauacaaacguuaacccuauuucucacaucagggggaguauuauuaucacuauaugugucagcuucauugucauacuuacuauauucggauauauugcuaaaauucccaucaacagaaauuacugcaccaacaaugccauuggauugugcaaacgcaucaaauguucaggcugugaaccguucugcaacaaaaggggugacacuucuucucccagaaccggaauggacauacccgcguuuaucuugcccgggcucaaccuuucagaaagcacuccuaauuagcccucauagauucggagaaaccaaaggaaacucagcucccuugauaauaagggaaccuuuuauugcuuguggaccaaaggaaugcaaacacuuugcucuaacccacuaugcagcccaaccagggggauacuacaauggaacaagaggagacagaaacaagcugaggcaucuaauuucagucaaauugggcaaaaucccaacaguagaaaacuccauuuuccacauggcagcauggagcggguccgcaugccaugaugguaaggaauggacauauaucggaguugauggcccugacaauaaugcauugcucaagauaaaauauggagaagcauauacugacacauaccauuccuaugcaaacaacauccuaagaacacaagaaagugcuugcaauugcaucgggggaaauuguuaucuuaugauaacugauggcucagcuucagguguuagugaaugcagauuucuuaagauucgagagggccgaauaauaaaagaaauauuuccaacaggaagaauaaaacauacugaagaaugcacaugcggauuugcuagcaauaaaaccauagaaugugccuguagagauaacaguuacacagcaaaaagacccuuugucaaauuaaacguggagacugauacagcagaaauaagauugaugugcacagagacuuauuuggacacccccagaccagaugauggaagcauaacagggccuugugaaucuaauggggacaaagggaguggaggcaucaagggaggauuuguccaucaaagaauggcauccaagauuggaaggugguacucucgaacgauguccaaaacugaaaggauggggauggggcuguaugucaaguaugauggagacccaugggcugacagugaugcccuugcuuuuaguggaguaaugguuucaauggaagaaccugguugguacuccuuuggcuucgaaauaaaagacaagaaaugugauguccccuguauugggauagagaugguacaugaugguggaaaagagacuuggcacucagcagcuacagccauuuacuguuuaaugggcucaggacaguugcugugggacacugucacagguguuaauauggcucuguaa

SEQ ID NO: 61374 - RNA, 1401 nt, Artificial Sequence
  derived and/or modified CDS sequence (wt) from neuraminidase__InfluenzaB__AGX18846
augcuaccuucaacuauacaaacguuaacccuauuucucacaucagggggaguauuauuaucacuauaugugucagcuucauuaucauacuuacuauauucggauauauugcuaaaauucucaccaacagaaauaacugcaccaacaaugccauuggauugugcaaacgcaucaaauguucaggcugugaaccguucugcaacaaaaggggugacacuucuucucucagaaccggaguggacauacccgcguuuaucuugcccgggcucaaccuuucagaaagcacuccuaauuagcccucauagauucggagaaaccaaaggaaacucagcucccuugauaauaagggaaccuuuuauugcuuguggaccaaaugaaugcaaacacuuugcucuaacccauuaugcagcccaaccagggggauacuacaauggaacaagaggagacagaaacaagcugaggcaucuaauuucagucaaauugggcaaaaucccaacaguagaaaacuccauuuuccacauggcagcauggagcggguccgcaugccaugaugguaaggaauggacauauaucggaguugauggcccugacaauaaugcauugcucaaaauaaaauauggagaagcauauacugacacauaccauuccuaugcaaacaaaauccuaagaacacaagaaagugccugcaauugcaucgggggaaauuguuaucuuaugauaacugauggcucagcuucagguguuagugaaugcagauuucuuaagauucgagagggccgaauaauaaaagaaauauuuccaacaggaagaguaaaacacacugaggaaugcacaugcggauuugccagcaauaaaaccauagaaugugccuguagagauaacaguuacacagcaaaaagacccuuugucaaauuaaacguggagacugauacagcagaaauaagauugaugugcacagauacuuauuuggacacccccagaccagaugauggaagcauaacaggcccuugugaaucuaauggggacaaagggaguggaggcaucaagggaggauuuguucaucaaagaauggcauccaagauuggaaggugguacucucgaacgaugucuaaaacugaaaggauggggaugggacuguaugucaaguaugauggagacccaugggcugacagugaugcccuagcuuuuaguggaguaaugguuucaaugaaagaaccugguugguacuccuuuggcuucgaaauaaaagauaagaaaugcgauguccccuguauugggauagagaugguacaugaugguggaaaagagacuuggcacucagcagcaacagccauuuacuguuuaaugggcucaggacagcugcugugggacacugucacagguguugacauggcucuguaa

SEQ ID NO: 61375 - RNA, 1401 nt, Artificial Sequence; identical to SEQ ID NO: 60748
  derived and/or modified CDS sequence (wt) from neuraminidase__InfluenzaB__AGX18857

SEQ ID NO: 61376 - RNA, 1401 nt, Artificial Sequence; identical to SEQ ID NO: 61374
  derived and/or modified CDS sequence (wt) from neuraminidase__InfluenzaB__AGX18868

SEQ ID NO: 61377 - RNA, 1401 nt, Artificial Sequence; identical to SEQ ID NO: 61374
  derived and/or modified CDS sequence (wt) from neuraminidase__InfluenzaB__AGX18879

SEQ ID NO: 61378 - RNA, 1401 nt, Artificial Sequence
  derived and/or modified CDS sequence (wt) from neuraminidase__InfluenzaB__AGX18890
augcuaccuucaacuauacaaacguuaacccuauuucucacaucagggggaguauuauuaucacuauaugugucagcuucauugucauacuuacuauauucggauauauugcuaaaauucccaucaacagaaauuacugcaccaacaaugccauuggauugugcaaacgcaucaaauguucaggcugugaaccguucugcaacaaaaggggugacacuucuucucccagaaccggaauggacauacccgcguuuaucuugcccgggcucaaccuuucagaaagcacuccuaauuagcccucauagauucggagaaaccaaaggaaacucagcucccuugauaauaagggaaccuuuuauugcuuguggaccaaaggaaugcaaacacuuugcucuaacccacuaugcagcccaaccagggggauacuacaauggaacaagaggagacagaaacaagcugaggcaucuaauuucagucaaauugggcaaaaucccaacaguagaaaacuccauuuuccacauggcagcauggagcggguccgcaugccaugaugguaaggaauggacauauaucggaguugauggcccugacaauaaugcauugcucaaaauaaaauauggagaagcauauacugacacauaccauuccuaugcaaacaacauccuaagaacacaagaaagugcuugcaauugcaucgggggaaauuguuaucuuaugauaacugauggcucagcuucagguguuagugaaugcagauuucuuaagauucgagagggccgaauaauaaaagaaauauuuccaacaggaagaauaaaacauacugaagaaugcacaugcggauuugcuagcaauaaaaccauagaaugugccuguagagauaacaguuacacagcaaaaagacccuuugucaaauuaaacguggagacugauacagcagaaauaagauugaugugcacagagacuuauuuggacacccccagaccagaugauggaagcauaacagggccuugugaaucuaauggggacaaagggaguggaggcaucaagggaggauuuguccaucaaagaauggcauccaagauuggaaggugguacucucgaacgauguccaaaacugaaaggauggggauggggcuguaugucaaguaugauggagacccaugggcugacagugaugcccuugcuuuuaguggaguaaugguuucaauggaagaaccugguugguacuccuuuggcuucgaaauaaaagacaagaaaugugauguccccuguauugggauagagaugguacaugaugguggaaaagagacuuggcacucagcagcuacaaccauuuacuguuuaaugggcucaggacaguugcugugggacacugucacagguguuaauauggcucuguaa

SEQ ID NO: 61379 - RNA, 1401 nt, Artificial Sequence
  derived and/or modified CDS sequence (wt) from neuraminidase__InfluenzaB__AGX18912
augcuaccuucaacuauacaaacguuaacccuauuucucacaucagggggaguauuauuaucacuauaugugucagcuucauuaucauacuuacuauauucggauauauugcuaaaauucucaccaacagaaauaacugcaccaacaaugccauuggauugugcaaaugcaucaaauguucaggcugugaaccguucugcaacaaaaggggugacacuucuucucccagaaccggaauggacauacccgcguuuaucuugcccgggcucaaccuuucagaaagcacuccuaauuagcccucauagauucggagaaaccaaaggaaacucagcucccuugauaauaagggaaccuuuuauugcuuguggaccaaaugaaugcaaacacuuugcucuaacccauuaugcagcccaaccagggggauacuacaauggaacaagaggagacagaaacaagcugaggcaucuaauuucagucaaauugggcaaaaucccaacaguagaaaacuccauuuuccacauggcagcauggagcggguccgcaugccaugaugguaaggaauggacauauaucggaguugauggcccugacaauaaugcauugcucaaaauaaaauauggagaagcauauacugacacauaccauuccuaugcaaacaaaauccuaagaacacaagaaagugccugcaauugcaucgggggaaauuguuaucuuaugauaacugauggcucagcuucagguguuagugaaugcagauuucuuaagauucgagagggccgaauaauaaaagaaauauuuccaacaggaagaguaaaacacacugaggaaugcacaugcggauuugccagcaauaaaaccauagaaugugccuguagagauaacaguuacacagcaaaaagacccuuugucaaauuaaacguggagacugauacagcagaaauaagauugaugugcacagauacuuauuuggacacccccagaccagaugauggaagcauaacaggcccuugugaaucuaauggggacaaagggaguggaggcaucaagggaggauuuguucaucaaagaauggcauccaagauuggaaggugguacucucgaacgaugucuaaaacugaaaggauggggaugggacuguaugucaaguaugauggagacccaugggcugacagugaugcccuagcuuuuaguggaguaaugguuucaaugaaagaaccugguugguacuccuuuggcuucgaaauaaaagauaagaaaugcgauguccccuguauugggauagagaugguacaugaugguggaaaagagacuuggcacucagcagcaacagccauuuacuguuuaaugggcucaggacagcugcugugggacacugucacagguguugacauggcucuguaa

SEQ ID NO: 61380 - RNA, 1401 nt, Artificial Sequence
  derived and/or modified CDS sequence (wt) from neuraminidase__InfluenzaB__AGX18923
augcuaccuucaacuauacaaacguuaacccuauuucucacaucagggggaguauuauuaucacuauaugugucagcuucauuaucauacuuacuauauucggauauauugcuaaaauucucaccaacagaaauaacugcaccaacaaugccauuggauugugcaaacgcaucaaauguucaggcugugaaccguucugcaacaaaaggggugacacuucuucucccagaaccggaguggacauacccgcguuuaucuugcccgggcucaaccuuucagaaagcacuccuaauuagcccucauagauucggagaaaccaaaggaaacucagcucccuugauaauaagggaaccuuuuauugcuuguggaccaaaugaaugcaaacacuuugcucuaacccauuaugcagcccaaccagggggauacuacaauagaacaagaggagacagaaacaagcugaggcaucuaauuucagucaaauugggcaaaaucccaacaguagaaaacuccauuuuccacauggcagcauggagcggguccgcaugccaugaugguaaggaauggauauauaucggaguugauggcccugacaauaaugcauugcucaaaauaaaauauggagaagcauauacugacacauaccauuccuaugcaaacaaaauccuaagaacacaagaaagugccugcaauugcaucgggggaaauuguuaucuuaugauaacugauggcucagcuucagguguuagugaaugcagauuucuuaagauucgagagggccgaauaauaaaagaaauauuuccaacaggaagaguaaaacacacugaggaaugcacaugcggauuugccagcaauaaaaccauagaaugugccuguagagauaacaguuacacagcaaaaagacccuuugucaaauuaaacguggagacugauacagcagaaauaagauugaugugcacagauacuuauuuggacacccccagaccagaugauggaagcauaacaggcccuugugaaucuaauggggacaaagggaguggaggcaucaagggaggauuuguucaucaaagaauggcauccaagauuggaaggugguacucucgaacgaugucuaaaacugaaaggauggggaugggacuguaugucaaguaugauggagacccaugggcugacagugaugcccuagcuuuuaguggaguaaugguuucaaugaaagaaccugguugguacuccuuuggcuucgaaauaaaagauaagaaaugcgauguccccuguauugggauagagaugguacaugaugguggaaaagagacuuggcacucagcagcaacagccauuuacuguuuaaugggcucaggacagcugcugugggacacugucacagguguugacauggcucuguaa

SEQ ID NO: 61381 - RNA, 1401 nt, Artificial Sequence; identical to SEQ ID NO: 60748
  derived and/or modified CDS sequence (wt) from neuraminidase__InfluenzaB__AGX18934

SEQ ID NO: 61382 - RNA, 1401 nt, Artificial Sequence
  derived and/or modified CDS sequence (wt) from neuraminidase__InfluenzaB__AGX18956
augcuaccuucaacuauacaaacguuaacccuauuucucacaucagggggaguauuauuaucacuauaugugucagcuucauuaucauacuuacuauauucggauauauugcuaaaauucucaccaacagaaauaacugcaccaacaaugccauuggauugugcaaacgcaucaaauguucaggcugugaaccguucugcaacaaaaggggugacacuucuucucccagaaccggaguggacauacccgcguuuaucuugcccgggcucaaccuuucagaaagcacuccuaauuagcccucauagauucggagaaaccaaaggaaacucagcucccuugauaauaagggaaccuuuuauugcuuguggaccaaaugaaugcaaacacuuugcucuaacccauuaugcagcccaaccagggggauacuacaauggaacaagaggagacagaaacaagcugaggcaucuaauuucagucaaauugggcaaaaucccaacaguagaaaacuccauuuuccacguggcagcauggagcggguccgcaugccaugaugguaaggaauggacauauaucggaguugauggcccugacaauaaugcauugcucaaaauaaaauauggagaagcauauacugacacauaccauuccuaugcaaacaaaauccuaagaacacaagaaagugccugcaauugcaucgggggaaauuguuaucuuaugauaacugauggcucagcuucagguguuagugaaugcagauuucuuaagauucgagagggccgaauaauaaaagaaauauuuccaacaggaagaguaaaacacacugaggaaugcacaugcggauuugccagcaauaaaaccauagaaugugccuguagagauaacaguuacacagcaaaaagacccuuugucaaauuaaacguggagacugauacagcagaaauaagauugaugugcacagauacuuauuuggacacccccagaccagaugauggaagcauaacaggcccuugugaaucuaauggggacaaagggaguggaggcaucaagggaggauuuguucaucaaagaauggcauccaagauuggaaggugguacucucgaacgaugucuaaaacugaaaggauggggaugggacuguaugucaaguaugauggagacccaugggcugacagugaugcccuagcuuuuaguggaguaaugguuucaaugaaagaaccugguugguacuccuuuggcuucgaaauaaaagauaagaaaugcgauguccccuguauugggauagagaugguacaugaugguggaaaagagacuuggcacucagcagcaacagccauuuacuguuuaaugggcucaggacagcugcugugggacacugucacagguguugacauggcucuguaa

SEQ ID NO: 61383 - RNA, 1401 nt, Artificial Sequence
  derived and/or modified CDS sequence (wt) from neuraminidase__InfluenzaB__AGX18967
augcuaccuucaacuauacaaacguuaacccuauuucucacaucagggggaguauuauuaucacuauaugugucagcuucauuaucauacuuacuauauucggauauauugcuaaaauucucaccaacagaaauaacugcaccaacaaugccauuggauugugcaaacgcaucaaauguucaggcugugaaccguucugcaacaaaaggggugacaccucuucucccagaaccggaguggacauacccgcguuuaucuugcccgggcucaaccuuucagaaagcacuccuaauuagcccucauagauucggagaaaccaaaggaaacucagcucccuugauaauaagggaaccuuuuauugcuuguggaccaaaugaaugcaaacacuuugcucuaacccauuaugcagcccaaccagggggauacuacaauggaacaagaggagacagaaacaagcugaggcaucuaauuucagucaaauugggcaaaaucccaacaguagaaaacuccauuuuccacauggcagcauggagcggguccgcaugccaugaugguaaggaauggacauauaucggaguugauggcccugacaauaaugcauugcucaaaauaaaauauggagaagcauauacugacacauaccauuccuaugcaaacaaaauccuaagaacacaagaaagugccugcaauugcaucgggggaaauuguuaucuuaugauaacugauggcucagcuucagguguuagugaaugcagauuucuuaagauucgagagggccgaauaauaaaagaaauauuuccaacaggaagaguaaaacacacugaggaaugcacaugcggauuugccagcaauaaaaccauagaaugugccuguagagauaacaguuacacagcaaaaagacccuuugucaaauuaaacguggagacugauacagcagaaauaagauugaugugcacagauacuuauuuggacacccccagaccagaugauggaagcauaacaggcccuugugaaucuaauggggacaaagggaguggaggcaucaagggaggauuuguucaucaaagaauggcauccaagauuggaaggugguacucucgaacgaugucuaaaacugaaaggauggggaugggacuguaugucaaguaugauggagacccaugggcugacagugaugcccuagcuuuuaguggaguaaugguuucaaugaaagaaccugguugguacuccuuuggcuucgaaauaaaagauaagaaaugcgauguccccuguauugggauagagaugguacaugaugguggaaaagagacuuggcacucagcagcaacagccauuuacuguuuaaugggcucaggacagcugcugugggacacugucacagguguugacauggcucuguaa

SEQ ID NO: 61384 - RNA, 1401 nt, Artificial Sequence
  derived and/or modified CDS sequence (wt) from neuraminidase__InfluenzaB__AGX18978
augcuaccuucaacuauacaaacguuaacccuauuucucacaucagggggaguauuauuaucacuauaugugucagcuucauugucauacuuacuauauucggauauauugcuaaaauucccaucaacagaaauuacugcaccaacaaugccauuggauugugcaaacgcaucaaauguucaggcugugaaccguucugcaacaaaaggggugacacuucuucucccagaaccggaauggacauacccgcguuuaucuugcccgggcucaaccuuucagaaagcacuccuaauuagcccucauagauucggagaaaccaaaggaaacucagcucccuugauaauaagggaaccuuuuauugcuuguggaccaaaggaaugcaaacacuuugcucuaacccacuaugcagcccaaccagggggauacuacaauggaacaagaggagacagaaacaagcugaggcaucuaauuucagucaaauugggcaaaaucccaacaguagaaaacuccauuuuccacauggcagcauggagcggguccgcaugccaugaugguaaggaauggacauauaucggaguugauggcccugacaauaaugcauugcucaaaauaaaauauggagaagcauauacugacacauaccauuccuaugcaaacaacauccuaagaacacaagaaagugcuugcaauugcaucgggggaaauuguuaucuuaugauaacugauggcucagcuucagguguuagugaaugcagauuucuuaagauucgagagggccgaauaauaaaagaaauauuuccaacaggaagaauaaaacauacugaagaaugcacaugcggauuugcuagcaauaaaaccauagaaugugccuguagagauaacagcuacacagcaaaaagacccuuugucaaauuaaacguggagacugauacagcagaaauaagauugaugugcacagagacuuauuuggacacccccagaccagaugauggaagcauaacagggccuugugaaucuaauggggacaaagggaguggaggcaucaagggaggauuuguccaucaaagaauggcauccaagauuggaaggugguacucucgaacgauguccaaaacugaaaggauggggauggggcuguaugucaaguaugauggagacccaugggcugacagugaugcccuugcuuuuaguggaguaaugguuucaauggaagaaccugguugguacuccuuuggcuucgaaauaaaagacaagaaaugugauguccccuguauugggauagagaugguacaugaugguggaaaagagacuuggcacucagcagcuacagccauuuacuguuuaaugggcucaggacaguugcugugggacacugucacagguguuaauauggcucuguaa

SEQ ID NO: 61385 - RNA, 1401 nt, Artificial Sequence
  derived and/or modified CDS sequence (wt) from neuraminidase__InfluenzaB__AGX18989
augcuaccuucaacuauacaaacguuaacccuauuucucacaucagggggaguauuauuaucacuauaugugucagcuucauuaucauacuuacuauauucggauauauugcuaaaauucucaccaacagaaauaacugcaccaacaaugccauuggauuaugcaaacgcaucaaauguucaggcugugaaccguucugcaacaaaaggggugacacuucuucucccagaaccggaguggacauacccgcguuuaucuugcccgggcucaaccuuucagaaagcacuccuaauuagcccucauagauucggagaaaccaaaggaaacucagcucccuugauaauaagggaaccuuuuauugcuuguggaccaaaugaaugcaaacacuuugcucuaacccauuaugcagcccaaccagggggauacuacaauggaacaagaggagacagaaacaagcugaggcaucuaauuucagucaaauugggcaaaaucccaacaguagaaaacuccauuuuccacauggcagcauggagcggguccgcaugccaugaugguaaggaauggacauauaucggaguugauggcccugacaauaaugcauugcucaaaauaaaauauggagaagcauauacugacacauaccauuccuaugcaaacaaaauccuaagaacacaagaaagugccugcaauugcaucgggggaaauuguuaucuuaugauaacugauggcucagcuucagguguuagugaaugcagauuucuuaagauucgagagggccgaauaacaaaagaaauauuuccaacaggaagaguaaaacacacugaggaaugcacaugcggauuugccagcaauaaaaccauagaaugugccuguagagauaacaguuacacagcaaaaagacccuuugucaaauuaaacguggagacugauacagcagaaauaagauugaugugcacagauacuuauuuggacacccccagaccagaugauggaagcauaacaggcccuugugaaucuaauggggacaaagggaguggaggcaucaagggaggauuuguucaucaaagaauggcauccaagauuggaaggugguacucucgaacgaugucuaaaacugaaaggauggggaugggacuguaugucaaguaugauggagacccaugggcugacagugaugcccuagcuuuuaguggaguaaugguuucaaugaaagaaccugguugguacuccuuuggcuucgaaauaaaagauaagaaaugcgauguccccuguauugggauagagaugguacaugaugguggaaaagagacuuggcacucagcagcaacagccauuuacuguuuaaugggcucaggacagcugcugugggacacugucacagguguugacauggcucuguaa

SEQ ID NO: 61386 - RNA, 1401 nt, Artificial Sequence
  derived and/or modified CDS sequence (wt) from neuraminidase__InfluenzaB__AGX19000
augcuaccuucaacuauacaaacguuaacccuauuucucacaucagggggaguguuauuaucacuauaugugucagccucauuaucauacuuacuauauucggauauauugcuaaaauucucaccaacagaaauaacugcaccaacaaugccauuggauugugcaaacgcaucaaauguucaugcugugaaccguucugcaacaaaaggggugacacuucuucucccagaaccggaguggacauacccgcguuuaucuugcccgggcucaaccuuucagaaagcacuccuaauuagcccucauagauucggagaaaccaaaggaaacucagcucccuugauaauaagggaaccuuuuauugcuuguggaccaaaugaaugcaaacacuuugcucuaaccuauuaugcagcccaaccagggggauacuacaauggaacaagaggagacagaaacaagcugaggcaucuaauuucagucaaauugggcaaaaucccaacaguagaaaacuccauuuuccacauggcagcauggagcggguccgcaugccaugaugguaaggaauggacauauaucggaguugauggcccugacaauaaugcauugcucaaaauaaaauauggagaagcauauacugacacauaccauuccuaugcaaacaacauccuaagaacacaagaaagugccugcaauugcaucgggggaaauuguuaucuuaugauaacugauggcucagcuucagguguuagugaaugcagauuucuuaagauucgagagggccgaauaauaaaagaaauauuuccaacaggaagaguaaaacauacugaggaaugcacaugcggauuugccagcaauaaaaccauagaaugugccuguagagauaacaguuacacagcaaaaagacccuuugucaaauuaaacguggaaacugauacagcagaaauaagauugaugugcacagauacuuauuuggacacccccagaccagaugauggaagcauaacaggcccuugugaaucuaauggggacaaagggaguggaggcaucaagggaggauuuguucaucaaagaauggcauccaagauuggaaggugguacucucgaacgaugucuaaaacugaaaggauggggaugggacuguaugucaaguaugauggagacccaugggcugacagugaugcccuugcuuuuaguggaguaaugguuucaaugaaagaaccugguugguacuccuuuggcuucgaaauaaaagauaagaaaugcgauguccccuguauugggauagagaugguacaugaugguggaaaagagacuuggcacucagcagcaacagccauuuacuguuuaaugggcucaggacagcugcugugggacacugucacagguguugacauggcucuguaa

SEQ ID NO: 61387 - RNA, 1401 nt, Artificial Sequence
  derived and/or modified CDS sequence (wt) from neuraminidase__InfluenzaB__AGX19011
augcuaccuucaacuauacaaacguuaacccuauuucucacaucagggggaguauuauuaucacuauaugugucagcuucauuaucauacuuacuauauucggauauauugcuaaaauucucaccaacagaaauaacugcaccaacaaugccauuggauugugcaaaugcaucaaauguucaggcugugaaccguucugcaacaaaaggggugacacuucuucucccagaaccggaguggacauacccgcguuuaucuugcccgggcucaaccuuucagaaagcacuccuaauuagcccucauagauucggagaaaccaaaggaaacucagcucccuugauaauaagggaaccuuuuauugcuuguggaccaaaugaaugcaaacacuuugcucuaacccauuaugcagcccaaccagggggauacuacaauggaacaagaggagacagaaacaagcugaggcaucuaauuucagucaaauugggcaaaaucccaacaguagaaaacuccauuuuccacauggcagcauggagcggguccgcaugccaugaugguaaggaauggacauauaucggaguugauggcccugacaauaaugcguugcucaaaauaaaauauggagaagcauauacugacacauaccauuccuaugcaaacaaaauccuaagaacacaagaaagugccugcaauugcaucgggggaaauuguuaucuuaugauaacugauggcucagcuucagguguuagugaaugcagauuucuuaagauucgagagggccgaauaauaaaagaaauauuuccaacaggaagaguaaaacacacugaggaaugcacaugcggauuugccagcaauaaaaccauagaaugugccuguagagauaacaguuacacagcaaaaagacccuuugucaaauuaaacguggagacugauacagcagaaauaagauugaugugcacagauacuuauuuggacacccccagaccagaugauggaagcauaacaggcccuugugaaucuaauggggacaaagggaguggaggcaucaagggaggauuuguucaucaaagaauggcauccaagauuggaaggugguacucucgaacgaugucuaaaacugaaaggauggggaugggacuguaugucaaguaugauggagacccaugggcugacagugaugcccuagcuuuuaguggaguaaugguuucaaugaaagaaccugguugguacuccuuuggcuucgaaauaaaagauaagaaaugcgauguccccuguauugggauagagaugguacaugaugguggaaaagagacuuggcacucagcagcaacagccauuuacuguuuaaugggcucaggacagcugcugugggacacugucacagguguugacauggcucuguaa

SEQ ID NO: 61388 - RNA, 1401 nt, Artificial Sequence; identical to SEQ ID NO: 60748
  derived and/or modified CDS sequence (wt) from neuraminidase__InfluenzaB__AGX19022

SEQ ID NO: 61389 - RNA, 1401 nt, Artificial Sequence
  derived and/or modified CDS sequence (wt) from neuraminidase__InfluenzaB__AGX19033
augcuaccuucaacuauacaaacguuaacccuauuucucacaucagggggaguauuauuaucacuauaugugucagcuucauugucauacuuacuauauucggauauauugcuaaaauucccaucaacagaaauuacugcaccaacaaugccauugaauugugcaaacgcaucaaauguucaggcugugaaccguucugcaacaaaaggggugacacuucuucucccagaaccggaauggacauacccgcguuuaucuugcccgggcucaaccuuucagaaagcacuccuaauuagcccucauagauucggagaaaccaaaggaaacucagcucccuugauaauaagggaaccuuuuauugcuuguggaccaaaggaaugcaaacacuuugcucuaacccacuaugcagcccaaccagggggauacuacaauggaacaagaggagacagaaacaagcugaggcaucuaauuucagucaaauugggcaaaaucccaacaguagaaaacuccauuuuccacauggcagcauggagcggguccgcaugccaugaugguaaggaauggacauauaucggaguugauggcccugacaauaaugcauugcucaaaauaaaauauggagaagcauauacugacacauaccauuccuaugcaaacaacauccuaagaacacaagaaagugcuugcaauugcaucgggggaaauuguuaucuuaugauaacugauggcucagcuucagguguuagugaaugcagauuucuuaagauucgagagggccgaauaauaaaagaaauauuuccaacaggaagaauaaaacauacugaagaaugcacaugcggauuugcuagcaauaaaaccauagaaugugccuguagagauaacaguuacacagcaaaaagacccuuugucaaauuaaacguggagacugauacagcagaaauaagauugaugugcacagagacuuauuuggacacccccagaccagaugauggaagcauaacagggccuugugaaucuaauggggacaaagggagugaaggcaucaagggaggauuuguccaucaaagaauggcauccaagauuggaaggugguacucucgaacgauguccaaaacugaaaggauggggauggggcuguaugucaaguaugauggagacccaugggcugacagugaugcccuugcuuuuaguggaguaaugguuucaauggaagaaccugguugguacuccuuuggcuucgaaauaaaagacaagaaaugugauguccccuguauugggauagagaugguacaugaugguggaaaagagacuuggcacucagcagcuacagccauuuacuguuuaaugggcucaggacaguugcugugggacacugucacagguguuaauauggcucuguaa

SEQ ID NO: 61390 - RNA, 1401 nt, Artificial Sequence; identical to SEQ ID NO: 60748
  derived and/or modified CDS sequence (wt) from neuraminidase__InfluenzaB__AGX19044

SEQ ID NO: 61391 - RNA, 1401 nt, Artificial Sequence; identical to SEQ ID NO: 60748
  derived and/or modified CDS sequence (wt) from neuraminidase__InfluenzaB__AGX19055

SEQ ID NO: 61392 - RNA, 1401 nt, Artificial Sequence
  derived and/or modified CDS sequence (wt) from neuraminidase__InfluenzaB__AGX19066
augcuaccuucaacuauacaaacguuaacccuauuucucacaucagggggaguauuauuaucacuauaugugucagcuucauuaucauacuuacuauauucggauauauugcuaaaauucucaccaacagaaauaacugcaccaacaaugccauuggauugugcaaacgcaucaaauguucaggcugugaaccguucugcaacaaaaggggugacacuucuucucccagaaccggaguggacauacccgcguuuaucuugcccgggcucaaccuuucagaaagcacuccuaauuagcccucauagauucggagaaaccaaaggaaacucagcucccuugauaauaagggaaccuuuuauugcuuguggaccaaaugaaugcaaacacuuugcucuaacccauuaugcagcccaaccagggggauacuacaauggaacaagaggagacagaaacaagcugaggcaucuaauuucagucaaauugggcaaaaucccaacaguagaaaacuccauuuuccacauggcagcauggagcggguccgcaugccaugaugguaaggaauggauauauaucggaguugauggcccugacaauaaugcauugcucaaaauaaaauauggagaagcauauacugacacauaccauuccuaugcaaacaaaauccuaagaacacaagaaagugccugcaauugcaucgggggaaauuguuaucuuaugauaacugauggcucagcuucagguguuagugaaugcagauuucuuaagauucgagagggccgaauaauaaaagaaauauuuccaacaggaagaguaaaacacacugaggaaugcacaugcggauuugccagcaauaaaaccauagaaugugccuguagagauaacaguuacacagcaaaaagacccuuugucaaauuaaacguggagacugauacagcagaaauaagauugaugugcacagauacuuauuuggacacccccagaccagaugauggaagcauaacaggcccuugugaaucuaauggggacaaagggaguggaggcaucaagggaggauuuguucaucaaagaauggcauccaagauuggaaggugguacucucgaacgaugucuaaaacugaaaggauggggaugggacuguaugucaaguaugauggagacccaugggcugacagugaugcccuagcuuuuaguggaguaaugguuucaaugaaagaaccugguugguacuccuuuggcuucgaaauaaaagauaagaaaugcgauguccccuguauugggauagagaugguacaugaugguggaaaagagacuuggcacucagcagcaacagccauuuacuguuuaaugggcucaggacagcugcugugggacacugucacagguguugacauggcucuguaa

SEQ ID NO: 61393 - RNA, 1401 nt, Artificial Sequence
  derived and/or modified CDS sequence (wt) from neuraminidase__InfluenzaB__AGX19077
augcuaccuucaacuauacaaacguuaacccuauuucucacaucagggggaguauuauuaucacuauaugugucagcuucauuaucauacuuacuauauucggauauauugcuaaaauucacaccaacagaaauaacugcaccaacaaugccauuggauugugcaaacgcaucaaauguucaggcugugaaccguucugcaacaaaaggggugacaccucuucucccagaaccggaguggacauacccgcguuuaucuuguccgggcucaaccuuucagaaagcacuccuaauuagcccucauagauucggagaaaccaaaggaaacucagcucccuugauaauaagggaaccuuuuauugcuuguggaccaaaugaaugcaaacacuuugcucuaacccauuaugcagcccaaccagggggauacuacaauggaacaagaggagacagaaacaagcugaggcaucuaauuucagucaaauugggcaaaaucccaacaguagaaaacuccauuuuccacauggcagcauggagcggguccgcaugccaugaugguaaggaauggacauauaucggaguugauggcccugacaauaaugcauugcucaaaauaaaauauggagaagcauauacugacacauaccauuccuaugcaaacaaaauccuaagaacacaagaaagugccugcaauugcaucgggggaaauuguuaucuuaugauaacugauggcucagcuucagguguuagugaaugcagauuucuuaagauucgagagggccgaauaauaaaagaaauauuuccaacaggaagaguaaaacacacugaggaaugcacaugcggauuugccagcaauaaaaccauagaaugugccuguagagauaacaguuacacagcaaaaagacccuuugucaaauuaaacguggagacugauacagcagaaauaagauugaugugcacagauacuuauuuggacacccccagaccagaugauggaagcauaacaggcccuugugaaucuaauggggacaaagggaguggaggcaucaagggaggauuuguucaucaaagaauggcauccaagauuggaaggugguacucucgaacgaugucuaaaacugaaaggauggggaugggacuguaugucaaguaugauggagacccaugggcugacagugaugcccuagcuuuuaguggaguaaugguuucaaugaaagaaccugguugguacuccuuuggcuucgaaauaaaagauaagaaaugcgauguccccuguauugggauagagaugguacaugaugguggaaaagagacuuggcacucagcagcaacagccauuuacuguuuaaugggcucaggacagcugcugugggacacugucacagguguugacauggcucuguaa

SEQ ID NO: 61394 - RNA, 1401 nt, Artificial Sequence
  derived and/or modified CDS sequence (wt) from neuraminidase__InfluenzaB__AGX19088
augcuaccuucaacuauacaaacguuaacccuauuucucacaucagggggaguauuauuaucacuauaugugucagcuucauuaucauacuuacuauauucggauauauugcuaaaauucucaccaacagaaauaacugcaccaacaaugccauuggauugugcaaacgcaucaaauguucaggcugugaaccguucugcaacaaaaggggugacacuucuucucccagaaccggaguggacauacccgcguuuaucuugcccgggcucaaccuuucagaaagcacuccuaauuagcccucauagauucggagaaaccaaaggaaacucagcucccuugauaauaagggaaccuuuuauugcuuguggaccaaaugaaugcaaacacuuugcucuaacccauuaugcagcccaaccagggggauacuacaauggaacaagaggagacagaaacaagcugaggcaucuaauuucagucaaauugggcaaaaucccaacaguagaaaacuccauuuuccacauggcagcauggagcggguccgcaugccaugaugguaaggaauggacauauaucggaguugauggcccugacaauaaugcauugcucaaaauaaaauauggagaagcauauacugacacauaccauuccuaugcaaacaaaauccuaagaacacaagaaagugccugcaauugcaucgggggaaauuguuaucuuaugauaacugauggcucagcuucagguguuagugaaugcagauuucuuaagauucgagagggccgaauaguaaaagaaauauuuccaacaggaagaguaaaacacacugaggaaugcacaugcggauuugccagcaauaaaaccauagaaugugccuguagagauaacaguuacacagcaaaaagacccuuugucaaauuaaacguggagacugauacagcagaaauaagauugaugugcacagauacuuauuuggacacccccagaccagaugauggaagcauaacaggcccuugugaaucuaauggggacaaagggaguggaggcaucaagggaggauuuguucaucaaagaauggcauccaagauuggaaggugguacucucgaacgaugucuaaaacugaaaggauggggaugggacuguaugucaaguaugauggagacccaugggcugacagugaugcccuagcuuuuaguggaguaaugguuucaaugaaagaaccugguugguacuccuuuggcuucgaaauaaaagauaagaaaugcgauguccccuguauugggauagagaugguacaugaugguggaaaagagacuuggcacucagcagcaacagccauuuacuguuuaaugggcucaggacagcugcugugggacacugucacagguguugacauggcucuguaa

SEQ ID NO: 61395 - RNA, 1401 nt, Artificial Sequence
  derived and/or modified CDS sequence (wt) from neuraminidase__InfluenzaB__AGX19099
augcuaccuucaacuauacaaacguuaacccuauuucucacaucagggggaguauuauuaucacuauaugugucagcuucauuaucauacuuacuauauucggauauauugcuaaaauucucaccaacagaaauaacugcaccaacaaugccauuggauugugcaaaugcaucaaauguucaggcugugaaccguucugcaacaaaaggggugacacuucuucucccagaaccggaguggacauacccgcguuuaucuugcccgggcucaaccuuucagaaagcacuccuaauuagcccucauagauucggagaaaccaaaggaaacucagcucccuugauaauaagggaaccuuuuauugcuuguggaccaaaugaaugcaaacacuuugcucuaacccauuaugcagcccaaccagggggauacuacaauggaacaagaggagacagaaacaagcugaggcaucuaauuucagucaaauugggcaaaaucccaacaguagaaaacuccauuuuccacauggcagcauggagcgggucugcaugccaugaugguaaggaauggacauauaucggaguugauggcccugacaauaaugcauugcucaaaauaaaauauggagaagcauauacugacacauaccauuccuaugcaaacaaaauccuaagaacacaagaaagugccugcaauugcaucgggggaaauuguuaucuuaugauaacugauggcucagcuucagguguuagugaaugcagauuucuuaagauucgagagggccgaauaauaaaagaaauauuuccaacaggaagaguaaaacacacugaggaaugcacaugcggauuugccagcaauaaaaccauagaaugugccuguagagauaacaguuacacagcaaaaagacccuuugucaaauuaaacguggagacugauacagcagaaauaagauugaugugcacagauacuuauuuggacacccccagaccagaugauggaagcauaacaggcccuugugaaucuaauggggacaaagggaguggaggcaucaagggaggauuuguucaucaaagaauggcauccaagauuggaaggugguacucucgaacgaugucuaaaacugaaaggauggggaugggacuguaugucaaguaugauggagacccaugggcugacagugaugcccuagcuuuuaguggaguaaugguuucaaugaaagaaccugguugguacuccuuuggcuucgaaauaaaagauaagaaaugcgauguccccuguauugggauagagaugguacaugaugguggaaaagagacuuggcacucagcagcaacagccauuuacuguuuaaugggcucaggacagcugcugugggacacugucacagguguugacauggcucuguaa

SEQ ID NO: 61396 - RNA, 1401 nt, Artificial Sequence
  derived and/or modified CDS sequence (wt) from neuraminidase__InfluenzaB__AGX19110
augcuaccuucaacuauacaaacguuaacccuauuucucacaucagggggaguauuauuaucacuauaugugucagcuucauugucauacuuacuauauucggauauauugcuaaaauucccaucaacagaaauuacugcaccaacaaugccauuggauugugcaaacgcaucaaauguucaggcugugaaccguucugcaacaaaaggggugacacuucuucucccagaaccggaauggacauacccgcguuuaucuugcccgggcucaaccuuucagaaagcacuccuaauuagcccucauagauucggagaaaccaaaggaaacucagcucccuugauaauaagggaaccuuuuauugcuuguggaccaaaggaaugcaaacacuuugcucuaacccacuaugcagcccaaccagggggauacuacaauggaacaagaggagacagaaacaagcugaggcaucuaauuucagucaaauugggaaaaaucccaacaguagaaaacuccauuuuccacauggcagcauggagcggguccgcaugccaugaugguaaggaauggacauauaucggaguugauggcccugacaauaaugcauugcucaagauaaaauauggagaagcauauacugacacauaccauuccuaugcaaacaacauccuaagaacacaagaaagugcuugcaauugcaucgggggaaauuguuaucuuaugauaacugauggcucagcuucagguguuagugaaugcagauuucuuaagauucgagagggccgaauaauaaaagaaauauuuccaacaggaagaauaaaacauacugaagaaugcacaugcggauuugcuagcaauaaaaccauagaaugugccuguagagauaacaguuacacagcaaaaagacccuuuaucaaauuaaacguggagacugauacagcagaaauaagauugaugugcacagagacuuauuuggacacccccagaccagaugauggaagcauaacagggccuugugaaucuaauggggacaaagggaguggaggcaucaagggaggauuuguccaucaaagaauggcauccaagauuggaaggugguacucucgaacgauguccaaaacugaaaggauggggauggggcuguaugucaaguaugauggagacccaugggcugacagugaugcccuuguuuuuaguggaguaaugguuucaauggaagaaccugguugguacuccuuuggcuucgaaauaaaagacaagaaaugugauguccccuguauugggauagagaugguacaugaugguggaaaagagacuuggcacucagcagcuacagccauuuacuguuuaaugggcucaggacaguugcugugggacacugucacagguguuaauauggcucuguaa

SEQ ID NO: 61397 - RNA, 1401 nt, Artificial Sequence
  derived and/or modified CDS sequence (wt) from neuraminidase__InfluenzaB__AGX19121
augcuaccuucaacuacacaaacguuaacccuauuucucacaucagggggaguauuauuaucacuauaugugucagcuucauuaucauacuuacuauauucggauauauugcuaaaauucucaccaacagaaauaacugcaccaacaaugccauuggauugugcaaacgcaucaaauguucaggcugugaaccguucugcaacaaaaggggugacacuucuucucccagaaccggaguggacauacccgcguuuaucuugcccgggcucaaccuuucagaaagcacuccuaauuagcccucauagauucggagaaaccaaaggaaacucagcucccuugauaauaagggaaccuuuuauugcuuguggaccaaaugaaugcaaacacuuugcucuaacccauuaugcagcccaaccagggggauacuacaauggaacaagaggagacagaaacaagcuaaggcaucuaauuucagucaaauugggcaaaaucccaacaguagaaaacuccauuuuccacauggcagcauggagcggguccgcaugccaugaugguaaggaauggacauauaucggaguugauggcccugacaauaaugcauugcucaaaauaaaauauggagaagcauauacugacacauaccauuccuaugcaaacaaaauccuaagaacacaagaaagugccugcaauugcaucgggggaaauuguuaucuuaugauaacugauggcucagcuucagguguuagugaaugcagauuucuuaagauucgagagggccgaauaauaaaagaaauauuuccaacaggaagaguaaaacacacugaggaaugcacaugcggauuugccagcaauaaaaccauagaaugugccuguagagauaacaguuacacagcaaaaagacccuuugucaaauuaaacguggagacugauacagcagaaauaagauugaugugcacagauacuuauuuggacacccccagaccagaugauggaagcauaacaggcccuugugaaucuaauggggacaaagggaguggaggcaucaagggaggauuuguucaucaaagaauggcauccaagauuggaaggugguacucucgaacgaugucuaaaacugaaaggauggggaugggacuguaugucaaguaugauggagacccaugggcugacagugaugcccuagcuuuuaggggaguaaugguuucaaugaaagaaccugguugguacuccuuuggcuucgaaauaaaagauaagaaaugcgauguccccuguauugggauagagaugguacaugaugguggaaaagagacuuggcacucagcagcaacagccauuuacuguuuaaugggcucaggacagcugcugugggacacugucacagguguugacauggcucuguaa

SEQ ID NO: 61398 - RNA, 1401 nt, Artificial Sequence
  derived and/or modified CDS sequence (wt) from neuraminidase__InfluenzaB__AGX19132
augcuaccuucaacuauacaaacguuaacccuauuucucacaucagggggaguguuauuaucacuauaugugucagccucauuaucauacuuacuauauucggauauauugcuaaaauucucaccaacagaaauaacugcaccaacaaugccauuggauugugcaaacgcaucaaauguucaugcugugaaccguucugcaacaaaaggggugacacuucuucucccagaaccggaguggacauacccgcguuuaucuugcccgggcucaaccuuucagaaagcacuccuaauuagcccucauagauucggagaaaccaaaggaaacucagcucccuugauaauaagggaaccuuuuauugcuuguggaccaaaugaaugcaaacacuuugcucuaacccauuaugcagcccaaccagggggauacuacaauggaacaagaggagacagaaacaagcugaggcaucuaauuucagucaaauugggcaaaaucccaacaguagaaaacuccauuuuccacauggcagcauggagcggguccgcaugccaugaugguaaggaauggacauauaucggaguugauggcccugacaauaaugcauugcucaaaauaaaauauggagaagcauauacugacacauaccauuccuaugcaaacaacauccuaagaacacaagaaagugccugcaauugcaucgggggaaauuguuaucuuaugauaacugauggcucagcuucagguguuagugaaugcagauuucuuaagauucgagagggccgaauaauaaaagaaauauuuccaacaggaagaguaaaacauacugaggaaugcacaugcggauuugccagcaauaaaaccauagaaugugccuguagagauaacaguuacacagcaaaaagacccuuugucaaauuaaacguggaaacugauacagcagaaauaagauugaugugcacagauacuuauuuggacacccccagaccagaugauggaagcauaacaggcccuugugaaucuaauggggacaaagggaguggaggcaucaagggaggauuuguucaucaaagaauggcauccaagauuggaaggugguacucucgaacgaugucuaaaacugaaaggauggggaugggacuguaugucaaguaugauggagacccaugggcugaaagugaugcccuugcuuuuaguggaguaaugguuucaaugaaagaaccugguugguacuccuuuggcuucgaaauaaaagauaagaaaugcgaugucccuuguauugggauagagaugguacaugaugguggaaaagagacuuggcacucagcagcaacagccauuuacuguuuaaugggcucaggacagcugcugugggacacugucacagguguugacauggcucuguaa

SEQ ID NO: 61399 - RNA, 1401 nt, Artificial Sequence
  derived and/or modified CDS sequence (wt) from neuraminidase__InfluenzaB__AGX19143
augcuaccuucaacuauacaaacguuaacccuauuucucacaucagggggaguauuauuaucacuauaugugucagcuucauuaucauacuuacuauauucggauauauugcuaaaauucucaccaacagaaauaacugcaccaacaaugccauuggauuaugcaaacgcaucaaauguucaggcugugaaccguucugcaacaaaaggggugacacuucuucucccagaaccggaguggacauacccgcguuuaucuugcccgggcucaaccuuucagaaagcacuccuaauuagcccucauagauucggagaaaccaaaggaaacucagcucccuugauaauaagggaaccuuuuauugcuuguggaccaaaugaaugcaaacacuuugcucuaacccauuaugcagcccaaccagggggauacuacaauggaacaagaggagacagaaacaagcugaggcaucuaauuucagucaaauugggcaaaaucccaacaguagaaaacuccauuuuccacauggcagcauggagcggguccgcaugccaugaugguaaggaauggacauauaucggaguugauggcccugacaauaaugcauugcucaaaauaaaauauggagaagcauauacugacacauaccauuccuaugcaaacaaaauccuaagaacacaagaaagugccugcaauugcaucgggggaaauuguuaucuuaugauaacugauggcucagcuucagguguuagugaaugcagauuucuuaaaauucgagagggccgaauaacaaaagaaauauuuccaacaggaagaguaaaacacacugaggaaugcacaugcggauuugccagcaauaaaaccauagaaugugccuguagagauaacaguuacacagcaaaaagacccuuugucaaauuaaacguggagacugauacagcagaaauaagauugaugugcacagauacuuauuuggacacccccagaccagaugauggaagcauaacaggcccuugugaaucuaauggggacaaagggaguggaggcaucaagggaggauuuguucaucaaagaauggcauccaagauuggaaggugguacucucgaacgaugucuaaaacugaaaggauggggaugggacuguaugucaaguaugauggagacccaugggcugacagugaugcccuagcuuuuaguggaguaaugguuucaaugaaagaaccugguugguacuccuuuggcuucgaaauaaaagauaagaaaugcgauguccccuguauugggauagagaugguacaugaugguggaaaagagacuuggcacucagcagcaacagccauuuacuguuuaaugggcucaggacagcugcugugggacacugucacagguguugacauggcucuguaa

SEQ ID NO: 61400 - RNA, 1401 nt, Artificial Sequence
  derived and/or modified CDS sequence (wt) from neuraminidase__InfluenzaB__AGX19154
augcuaccuucaacuauacaaacguuaacccuauuucucacaucagggggaguguuauuaucacuauaugugucagccucauuaucauacuuacuauauucgaauauauugcuaaaauucucaccaacagaaauaacugcaccaacaaugccauuggauugugcaaacgcaucaaauguucaugcugugaaccguucugcaacaaaaggggugacacuucuucucccagaaccggaguggacauacccgcguuuaucuugcccgggcucaaccuuucagaaagcacuccuaauuagcccucauagauucggagaaaccaaaggaaacucagcucccuugauaauaagggaaccuuuuauugcuuguggaccaaaugaaugcaaacacuuugcucuaacccauuaugcagcccaaccagggggauacuacaauggaacaagaggagacagaaacaagcugaggcaucuaauuucagucaaauugggcaaaaucccaacaguagaaaacuccauuuuccacauggcagcauggagcggguccgcaugccaugaugguaaggaauggacauauaucggaguugauggcccugacaauaaugcauugcucaaaauaaaauauggagaagcauauacugacacauaccauuccuaugcaaacaacauccuaagaacacaagaaagugccugcaauugcaucgggggaaauuguuaucuuaugauaacugauggcucagcuucagguguuagugaaugcagauuucuuaagauucgagagggccgaauaauaaaagaaauauuuccaacaggaagaguaaaacauacugaggaaugcacaugcggauuugccagcaauaaaaccauagaaugugccuguagagauaacaguuacacagcuaaaagacccuuugucaaauuaaacguggaaacugauacagcagaaauaagauugaugugcacagauacuuauuuggacacccccagaccagaugauggaagcauaacaggcccuugugaaucuaauggggacaaagggaguggaggcaucaagggaggauuuguucaucaaagaauggcauccaagauuggaaggugguacucucgaacgaugucuaaaacugaaaggauggggaugggacuguaugucaaguaugauggagacccaugggcugacagugaugcccuugcuuuuaguggaguaaugguuucaaugaaagaaccugguugguacuccuuuggcuucgaaauaaaagauaagaaaugcgauguccccuguauugggauagagaugguacaugaugguggaaaagagacuuggcacucagcagcaacagccauuuacuguuuaaugggcucaggacagcugcugugggacacugucacagguguugacauggcucuguaa

SEQ ID NO: 61401 - RNA, 1401 nt, Artificial Sequence
  derived and/or modified CDS sequence (wt) from neuraminidase__InfluenzaB__AGX19165
augcuaccuucaacuauacaaacguuaacccuauuucucacaucagggggaguauuauuaucacuauaugugucagcuucauuaucauacuuacuauauucggauauauugcuaaaauucucaccaacagaaauaacugcaccaacaaugccauuggauugugcaaacgcaucaaauguucaggcugugaaccguucugcaacaaaaggggugacacuucuucucccagaaccggaguggacauacccgcguuuaucuugcccgggcucaaccuuucagaaagcacuccuaauuagcccucauagauucggagaaaccaaaggaaacucagcucccuugauaauaagggaaccuuuuauugcuuguggaccaaaugaaugcaaacacuuugcucuaacccauuaugcagcccaaccagggggauacuacaauggaacaagaggagacagaaacaagcugaggcaucuaauuucagucaaauugggcaaaaucccaacaguagaaaacuccauuuuccacauggcagcauggagcggguccgcaugccaugaugguaaggaauggacauauaucggaguugauggcccugacaauaaugcauugcucaaaauaaaauauggagaagcauauacugacacauaccauuccuaugcaaacaaaauccuaagaacacaagaaagugccugcaauugcaucgggggaaauuguuaucuuaugauaacugauggcucagcuucagguguuagugaaugcagauuucuuaagauucgagagggccgaauaauaaaagaaauauuuccaacaggaagaguaaaacacacugaggaaugcacaugcggauuugccagcaacaaaaccauagaaugugccuguagagauaacaguuacacagcaaaaagacccuuugucaaauuaaacguggagacugauacagcagaaauaagauugaugugcacagauacuuauuuggacacccccagaccagaugauggaagcauaacaggcccuugugaaucuaauggggacaaagggaguggaggcaucaagggaggauuuguucaucaaagaauggcauccaagauuggaaggugguacucucgaacgaugucuaaaacugaaaggauggggaugggacuguaugucaaguaugauggagacccaugggcugacagugaugcccuagcuuuuaguggaguaaugguuucaaugaaagaaccugguugguacuccuuuggcuucgaaauaaaagauaagaaaugcgauguccccuguauugggauagagaugguacaugaugguggaaaagagacuuggcacucagcagcaacagccauuuacuguuuaaugggcucaggacagcugcugugggacacugucacagguguugacauggcucuguaa

SEQ ID NO: 61402 - RNA, 1401 nt, Artificial Sequence
  derived and/or modified CDS sequence (wt) from neuraminidase__InfluenzaB__AGX19176
augcuaccuucaacuauacaaacguuaacccuauuucucacaucagggggaguguuauuaucacuauaugugucagccucauuaucauacuuacuauauucggauauauugcuaaaauucucaccaacagaaauaacugcaccaacaaugccauuggauugugcaaacgcaucaaauguucaugcugugaaccguucugcaacaaaaggggugacacuucuucucccagaaccggaguggacauacccgcguuuaucuugcccgggcucaaccuuucagaaagcacuccuaauuagcccucauagauucggagaaaccaaaggaaacucagcucccuugauaauaagggaaccuuuuauugcuuguggaccaaaugaaugcaaacacuuugcucuaacccauuaugcagcccaaccagggggauacuacaauagaacaagaggagacagaaacaagcugaggcaucuaauuucagucaaauugggcaaaaucccaacaguagaaaacuccauuuuccacauggcagcauggagcggguccgcaugccaugaugguaaggaauggacauauaucggaguugauggcccugacaauaaugcauugcucaaaauaaaauauggagaagcauauacugacacauaccauuccuaugcaaacaacauccuaagaacacaagaaagugccugcaauugcaucgggggaaauuguuaucuuaugauaacugauggcucagcuucagguguuagugaaugcagauuucuuaagauucgagagggccgaauaauaaaagaaauauuuccaacaggaagaguaaaacauacugaggaaugcacaugcggauuugccagcaauaaaaccauagaaugugccuguagagauaacaguuacacagcaaaaagacccuuugucaaauuaaacguggaaacugauacagcagaaauaagauugaugugcacagauacuuauuuggacacccccagaccagaugauggaagcauaacaggcccuugugaaucuaauggggacaaagggaguggaggcaucaagggaggauuuguucaucaaagaauggcauccaagauuggaaggugguacucucgaacgaugucuaaaacugaaaggauggggaugggacuguaugucaaguaugauggagacccaugggcugacagugaugcccuugcuuuuaguggaguaaugguuucaaugaaagaaccugguugguacuccuuuggcuucgaaauaaaagauaagaaaugcgauguccccuguauugggauagagaugguacaugaugguggaaaagagacuuggcacucagcagcaacagccauuuacuguuuaaugggcucaggacagcugcugugggacacugucacagguguugacauggcucuguaa

SEQ ID NO: 61403 - RNA, 1401 nt, Artificial Sequence
  derived and/or modified CDS sequence (wt) from neuraminidase__InfluenzaB__AGX19187
augcuaccuucaacuauacaaacguuaacccuauuucucacaucagggggaguauuauuaucacuauaugugucagcuucauuaucauacuuacuauauucggauauauugcuaaaauucucaccaacagaaauaacugcaccaacaaugccauuggauugugcaaacgcaucaaauguucaggcugugaaccguucugcaacaaaaggggugacacuucuucucccagaaccagaguggacauacccgcguuuaucuugcucgggcucaaccuuucagaaagcacuccuaauuagcccucauagauucggagaaaccaaaggaaacucagcucccuugauaauaagggaaccuuuuauugcuuguggaccaaaugaaugcaaacacuuugcucuaacccauuaugcagcccaaccagggggauacuacaauggaacaagaggagacagaaacaagcugaggcaucuaauuucagucaaauugggcaaaaucccaacaguagaaaacuccauuuuccacauggcagcauggagcggguccgcaugccaugaugguaaggaauggacauauaucggaguugauggcccugacaauaaugcauugcucaaaauaaaauauggagaagcauauacugacacauaccauuccuaugcaaacaaaauccuaagaacacaagaaagugccugcaauugcaucgggggaaauuguuaucuuaugauaacugauggcucagcuucagguguuagugaaugcagauuucuuaagauucgagagggccgaauaauaaaagaaauauuuccaacaggaagaguaaaacacacugaggaaugcacaugcggauuugccagcaauaaaaccauagaaugugccuguagagauaacaguuacacagcaaaaagacccuuugucaaauuaaacguggagacugauacagcagaaauaagauugaugugcacagauacuuauuuggacacccccagaccagaugauggaagcauaacaggcccuugugaaucuaauggggacaaagggaguggaggcaucaagggaggauuuguucaucaaagaauggcauccaagauuggaaggugguacucucgaacgaugucuaaaacugaaaggauggggaugggacuguaugucaaguaugauggagacccaugggcugacagugaugcccuagcuuuuaguggaguaaugguuucaaugaaagaaccugguugguacuccuuuggcuucgaaauaaaagauaagaaaugcgauguccccuguauugggauagagaugguacaugaugguggaaaagagacuuggcacucagcagcaacagccauuuacuguuuaaugggcucaggacagcugcugugggacacugucacagguguugacauggcucuguaa

SEQ ID NO: 61404 - RNA, 1401 nt, Artificial Sequence
  derived and/or modified CDS sequence (wt) from neuraminidase__InfluenzaB__AGX19198
augcuaccuucaacuauacaaacguuaacccuauuucucacaucagggggaguauuauuaucacuauaugugucagcuucauuaucauacuuacuauauucggauauauugcuaaaauucucaccaacagaaauaacugcaccaacaaugccauuggauuaugcaaaugcaucaaauguucaggcugugaaccguucugcaacaaaaggggugacacuucuucucccagaaccggaguggacauacccgcguuuaucuugcccgggcucaaccuuucagaaagcacuccuaauuagcccucauagauucggagaaaccaaaggaaacucagcucccuugauaauaagggaaccuuuuauugcuuguggaccaaaugaaugcaaacacuuugcucuaacccauuaugcagcccaaccagggggauacuacaauggaacaagaggagacagaaacaagcugaggcaucuaauuucagucaaauugggcaaaaucccaacaguagaaaacuccauuuuccacauggcagcauggagcggguccgcaugccaugaugguaaggaauggacauauaucggaguugauggcccugacaauaaugcauugcucaaaauaaaauauggagaagcauauacugacacauaccauuccuaugcaaacaaaauccuaagaacacaagaaagugccugcaauugcaucgggggaaauuguuaucuuaugauaacugauggcucagcuucagguguuagugaaugcagauuucuuaagauucgagagggccgaauaauaaaagaaauauuuccaacaggaagaguaaaacacacugaggaaugcacaugcggauuugccagcaauaaaaccauagaaugugccuguagagauaacaguuacacagcaaaaagacccuuugucaaauuaaacguggagacugauacagcagaaauaagauugaugugcacagauacuuauuuggacacccccagaccagaugauggaagcauaacaggcccuugugaaucuaauggggacaaagggaguggaggcaucaagggaggauuuguucaucaaagaauggcauccaagauuggaaggugguacucucgaacgaugucuaaaacugaaaggauggggaugggacuguaugucaaguaugauggagacccaugggcugacagugaugcccuagcuuuuaguggaguaaugguuucaaugaaagaaccugguugguacuccuuuggcuucgaaauaaaagauaagaaaugcgauguccccuguauugggauagagaugguacaugaugguggaaaagagacuuggcacucagcagcaacagccauuuacuguuuaaugggcucaggacagcugcugugggacacugucacagguguugacauggcucuguaa

SEQ ID NO: 61405 - RNA, 1401 nt, Artificial Sequence
  derived and/or modified CDS sequence (wt) from neuraminidase__InfluenzaB__AGX19209
augcuaccuucaacuauacaaacguuaacccuauuucucacaucagggggaguauuauuaucacuauaugugucagcuucauuaucauacuuacuauauucggauauauugcuaaaauucucaccaacagaaauaacugcaccaacaaugccauuggauuaugcaaacgcaucaaauguucaggcugugaaccguucugcaacaaaaggggugacacuucuucucccagaaccggaguggacauacccgcguuuaucuugcccgggcucaaccuuucagaaagcacuccuaauuagcccucauagauucggagaaaccaaaggaaacucagcucccuugauaauaagggaaccuuuuauugcuuguggaccaaaugaaugcaaacacuuugcucuaacccauuaugcagcccaaccagggggauacuacaauggaacaagaggagacagaaacaagcugaggcaucuaauuucagucaaauugggcaaaaucccaaccguagaaaacuccauuuuccacauggcagcauggagcggguccgcaugccaugaugguaaggaauggacauauaucggaguugauggcccugacaauaaugcauugcucaaaauaaaauauggagaagcauauacugacacauaccauuccuaugcaaacaaaauccuaagaacacaagaaagugccugcaauugcaucgggggaaauuguuaucuuaugauaacugauggcucagcuucagguguuagugaaugcagauuucuuaagauucgagagggccgaauaacaaaagaaauauuuccaacaggaagaguaaaacacacugaggaaugcacaugcggauuugccagcaauaaaaccauagaaugugccuguagagauaacaguuacacagcaaaaagacccuuugucaaauuaaacguggagacugauacagcagaaauaagauugaugugcacagauacuuauuuggacacccccagaccagaugauggaagcauaacaggcccuugugaaucuaauggggacaaagggaguggaggcaucaagggaggauuuguucaucaaagaauggcauccaagauuggaaggugguacucucgaacgaugucuaaaacugaaaggauggggaugggacuguaugucaaguaugauggagacccaugggcugacagugaugcccuagcuuuuaguggaguaaugguuucaaugaaagaaccugguugguacuccuuuggcuucgaaauaaaagauaagaaaugcgauguccccuguauugggauagagaugguacaugaugguggaaaagagacuuggcacucagcagcaacagccauuuacuguuuaaugggcucaggacagcugcugugggacacugucacagguguugacauggcucuguaa

SEQ ID NO: 61406 - RNA, 1401 nt, Artificial Sequence
  derived and/or modified CDS sequence (wt) from neuraminidase__InfluenzaB__AGX19220
augcuaccuucaacuauacaaacguuaacccuauuucucacaucagggggaguauuauuaucacuauaugugucagcuucauuaucauacuuacuauauucggauauauugcuaaaauucucaccaacagaaauaacugcaccaacaaugucauuggauugugcaaacgcaucaaauguucaggcugugaaccguucugcaacaaaaggggugacacuucuucucccagaaccggaguggacauacccgcguuuaucuugcccgggcucaaccuuucagaaagcacuccuaauuagcccucauagauucggagaaaccaaaggaaacucagcucccuugauaauaagggaaccuuuuauugcuuguggaccaaaugaaugcaaacacuuugcucuaacccauuaugcagcccaaccagggggauacuacaauggaacaagaggagacagaaacaagcugaggcaucuaauuucagucaaauugggcaaaaucccaacaguagaaaacuccauuuuccacauggcagcauggagcggguccgcaugccaugaugguaaggaauggacauauaucggaguugauggcccugacaauaaugcauugcucaaaauaaaauauggagaagcauauacugacacauaccauuccuaugcaaacaaaauccuaagaacacaagaaagugccugcaauugcaucgggggaaauuguuaucuuaugauaacugauggcucagcuucagguguuagugaaugcagauuucuuaagauucgagagggccgaauaauaaaagaaauauuuccaacaggaagaguaaaacacacugaggaaugcacaugcggauuugccagcaauaaaaccauagaaugugccuguagagauaacaguuacacagcaaaaagacccuuugucaaauugaacguggagacugauacagcagaaauaagauugaugugcacagauacuuauuuggacacccccagaccagaugauggaagcauaacaggcccuugugaaucuaauggggacagagggaguggaggcaucaagggaggauuuguucaucaaagaauggcauccaagauuggaaggugguacucucgaacgaugucuaaaacugaaaggauggguaugggacuguaugucaaguaugauggagacccaugggcugacagugaugccuuagcuuuuaguggaguaaugguuucaaugaaagaaccugguugguacuccuuuggcuucgaaauaaaagauaagaaaugcgauguccccuguauugggauagagaugguacaugaugguggaaaagagacuuggcacucagcagcaacagccauuuacuguuuaaugggcucaggacagcugcugugggacacugucacagguguugacauggcucuguaa

SEQ ID NO: 61407 - RNA, 1401 nt, Artificial Sequence
  derived and/or modified CDS sequence (wt) from neuraminidase__InfluenzaB__AGX19231
augcuaccuucaacuauacaaacguuaacccuauuucucacaucagggggaguauuauuaucacuauaugugucagcuucauuaucauacuuacuauauucggauauauugcuaaaauucucaccaacagaaauaacugcaccaacaaugccauuggauugugcaaacgcaucaaauguucaugcugugaaccguucugcaacaaaaggggugacacuucuucucccagaaccggaguggacauacccgcguuuaucuugcccgggcucaaccuuucagaaagcacuccuaauuagcccucauagauucggagaaaccaaaggaaacucagcucccuugauaauaagggaaccuuuuauugcuuguggaccaaaugaaugcaaacacuuugcucuaacccauuaugcagcccaaccagggggauacuacaauggaacaagaggagacagaaacaagcugaggcaucuaauuucagucaaauugggcaaaaucccaacaguagaaaacuccauuuuccacauggcagcauggagcggguccgcaugccaugaugguaaggaauggacauauauaggaguugauggcccugacaauaaugcauugcucaaaauaaaauauggagaagcauauacugacacauaccauuccuaugcaaacaacauccuaagaacacaagaaagugccugcaauugcaucgggggaaauuguuaucuuaugauaacugauggcucagcuucagguguuagugaaugcagauuucuuaagauucgagagggccgaauaauaaaagaaauauuuccaacaggaagaguaaaacauacugaggaaugcacaugcggauuugccagcaauaaaaccauagaaugugccuguagagauaacaguuacacagcaaaaagacccuuugucaaauuaaacguggaaacugauacagcagaaauaagauugaugugcacagauacuuauuuggacacccccagaccagaugauggaagcauaacaggcccuugugaaucuaauggggacaaaggaaguggaggcaucaagggaggauuuguucaucaaagaauggcauccaagauuggaaggugguacucucgaacgaugucuaaaacugaaaggauggggaugggacuguaugucaaguaugauggagacccaugggcugacagugaugcccuugcuuuuaguggaguaaugguuucaaugaaagaaccugguugguacuccuuuggcuucgaaauaaaagauaagaaaugcgauguccccuguauugggauagagaugguacaugaugguggaaaagagacuuggcacucagcagcaacagccauuuacuguuuaaugggcucaggacagcugcugugggacacugucacagguguugacauggcucuguaa

SEQ ID NO: 61408 - RNA, 1401 nt, Artificial Sequence
  derived and/or modified CDS sequence (wt) from neuraminidase__InfluenzaB__AGX19253
augcuaccuucaacuauacaaacguuaacccuauuucucacaucagggggaguauuauuaucacuauaugugucagcuucauuaucauacuuacuauauucggauauauugcuaaaauucucaccaacagaaauaacugcaccaacaaugccauuggauugugcaaacgcaucaaauguucaggcugugaaccauucugcaacaaaaggggugacacuucuucucccagaaccggaguggacauacccgcguuuaucuugcccgggcucaaccuuucagaaagcacuccuaauuagcccucauagauucggagaaaccaaaggaaacucagcucccuugauaauaagggaaccuuuuauugcuuguggaccaaaugaaugcaaacacuuugcuuuaacccauuaugcagcccaaccagggggauacuacaauggaacaagaggagacagaaacaagcugaggcaucuaauuucagucaaauugggcaaaaucccaacaguagaaaacuccauuuuccacauggcagcauggagcggguccgcaugccaugaugguaaggaauggacauauaucggaguugauggcccugacaauaaugcauugcucaaaauaaaauauggagaagcauauacugacacauaccauuccuaugcaaacaaaauccuaagaacacaagaaagugccugcaauugcaucgggggaaauuguuaucuuaugauaacugauggcucagcuucagguguuagugaaugcagauuucuuaagauucgagagggccgaauaauaaaagaaauauuuccaacaggaagaguaaaacacacugaggaaugcacaugcggauuugccagcaauaaaaccauagaaugugccuguagagauaacaguuacacagcaaaaagacccuuugucaaauuaaacguggagacugauacagcagaaauaagauugaugugcacagauacuuauuuggacacccccagaccagaugauggaagcauaacaggcccuugugaaucuaauggggacaaagggaguggaggcaucaagggaggauuuguucaucaaagaauggcauccaagauuggaaggugguacucucgaacuaugucuaaaacugaaaggauggggaugggacuguaugucaaguaugauggagacccaugggcugacagugauucccuagcuuuuaguggaguaaugguuucaaugaaagaaccugguugguacuccuuuggcuucgaaauaaaagauaagaaaugcgauguccccuguauugggauagagaugguacaugaugguggaaaagagacuuggcacucagcagcaacagccauuuacuguuuaaugggcucaggacagcugcugugggacacugucacagguguugacauggcucuguaa

SEQ ID NO: 61409 - RNA, 1401 nt, Artificial Sequence; identical to SEQ ID NO: 61383
  derived and/or modified CDS sequence (wt) from neuraminidase__InfluenzaB__AGX19264

SEQ ID NO: 61410 - RNA, 1401 nt, Artificial Sequence
  derived and/or modified CDS sequence (wt) from neuraminidase__InfluenzaB__AGX19275
augcuaccuucaacuauacaaacguuaacccuauuucucacaucagggggaguauuauuaucacuauaugugucagcuucauuaucauacuuacuauauucggauauauugcuaaaauucucaccaacagaaauaacugcaccaacaaugccauuggauugugcaaacgcaucaaauguucaggcugugaaccguucugcaacaaaaggggugacacuucuucucccagaaccggaguggacauacccgcguuuaucuugcccgggcucaaccuuucagaaagcacuccuaauuagcccucauagauucggagaaaccaaaggaaacucagcucccuugauaauaagggaaccuuuuauugcuuguggaccaaaugaaugcaaacacuuugcucuaacccauuaugcagcccaaccagggggauacuacaauggaacaagaggagacagaaacaagcugaggcaucuaauuucagucaaauugggcaaaaucccaacaguagaaaacuccauuuuccacauggcagcauggagcggguccgcaugccaugaugguaaggaauggacauauaucggaguugauggcccugacaauaaugcauugcucaaaauaaaauauggagaagcauauacugacacauaccauuccuaugcaaacaaaauccuaagaacacaagaaagugccugcaauugcaucgggggaaauuguuaucuuaugauaacugauggcucagcuucagguguuagugaaugcagauuucuuaagauucgagagggccgaauaauaaaagaaauauuuccaacaggaagaguaaaacacacugaggaaugcacaugcggauuugccagcaauaaaaccauagaaugugccuguagagauaacaguuacacagcaaaaagaccuuuugucaaauuaaacguggagacugauacagcagaaauaagauugaugugcacagauacuuauuuggacacccccagaccagaugauggaagcauaacaggcccuugugaaucuaauggggacaaagggaguggaggcaucaagggaggauuuguucaucaaagaauggcauccaagauuggaaggugguacucucgaacgaugucuaaaacugaaaggauggggaugggacuguaugucaaguaugauggagacccaugggcugacagugaugcccuagcuuuuaguggaguaaugguuucaaugaaagaaccugguugguacuccuuuggcuucgaaauaaaagauaagaaaugcgauguccccuguauugggauagagaugguacaugaugguggaaaagagacuuggcacucagcagcaacagccauuuacuguuuaaugggcucaggacagcugcugugggacacugucacagguguugacauggcucuguaa

SEQ ID NO: 61411 - RNA, 1401 nt, Artificial Sequence
  derived and/or modified CDS sequence (wt) from neuraminidase__InfluenzaB__AGX19286
augauaccuucaacuauacaaacguuaacccuauuucucacaucagggggaguauuauuaucacuauaugugucagcuucauuaucauacuuacuauauucggauauauugcuaaaauucucaccaacagaaauaauugcaccaacaaugccauuggauugugcaaacgcaucaaauguucaugcugugaaccguucugcaacaaaaggggugacacuucuucucccagaaccggaguggacauacccgcguuuaucuugcccgggcucaaccuuucagaaagcacuccuaauuagcccucauagauucggagaaaccaaaggaaacucagcucccuugauaauaagggaaccuuuuauugcuuguggaccaaaugaaugcaaacacuuugcucuaacccauuaugcagcccaaccagggggauacuacaauggaacaagaggagacagaaacaagcugaggcaucuaauuucagucaaauugggcaaaaucccaacaguagaaaacuccauuuuccacauggcagcauggagcggguccgcaugccaugaugguaaggaauggacauauauaggaguugauggcccugacaauaaugcauugcucaaaauaaaauauggagaagcauauacugacacauaccauuccuaugcaaacaacauccuaagaacacaagaaagugccugcaauugcaucgggggaaauuguuaucuuaugauaacugauggcucagcuucagguguuagugaaugcagauuucuuaagauucgagagggccgaauaauaaaagaaauauuuccaacaggaagaguaaaacauacugaggaaugcacaugcggauuugccagcaauaaaaccauagaaugugccuguagagauaacaguuacacagcaaaaagacccuuugucaaauuaaacguggaaacugauacagcagaaauaagauuaaugugcacagauacuuauuuggacacccccagaccagaugauggaagcauaacaggcccuugugaaucuaauggggacaaagggaguggaggcaucaagggaggauuuguucaucaaagaauggcauccaagauuggaaggugguacucucgaacgaugucuaaaacugaaaggauggggaugggacuguaugucaaguaugauggagacccaugggcugacagugaugcccuugcuuuuaguggaguaaugguuucaaugaaagaaccugguugguacuccuuuggcuucgaaauaaaagauaagaaaugcgauguccccuguauugggauagagaugguacaugaugguggaaaagagacuuggcacucagcagcaacagccauuuacuguuuaaugggcucaggacagcugcugugggacacugucacagguguugacauggcucuguaa

SEQ ID NO: 61412 - RNA, 1401 nt, Artificial Sequence
  derived and/or modified CDS sequence (wt) from neuraminidase__InfluenzaB__AGX19297
augcuaccuucaacuauacaaacguuaacccuauuucucacaucagggggaguauuauuaucacuauaugugucagcuucauuaucauacuuacuauauucggauauauugcuaaaauucucaccaacagaaauaauugcaccaacaaugccauuggauugugcaaacgcaucaaauguucaugcugugaaccguucugcaacaaaaggggugacacuucuucucccagaaccggaguggacauacccgcguuuaucuugcccgggcucaaccuuucagaaagcacuccuaauuagcccucauagauucggagaaaccaaaggaaacucagcucccuugauaauaagggaaccuuuuauugcuuguggaccaaaugaaugcaaacacuuugcucuaacccauuaugcagcccaaccagggggauacuacaauggaacaagaggagacagaaacaagcugaggcaucuaauuucagucaaauugggcaaaaucccaacaguagaaaacuccauuuuccacauggcagcauggagcggguccgcaugccaugaugguaaggaauggacauauauaggaguugauggcccugacaauaaugcauugcucaaaauaaaauauggagaagcauauacugacacauaccauuccuaugcaaacaacauccuaagaacacaagaaagugccugcaauugcaucgggggaaauuguuaucuuaugauaacugauggcucagcuucagguguuagugaaugcagauuucuuaagauucgagagggccgaauaauaaaagaaauauuuccaacaggaagaguaaaacauacugaggaaugcacaugcggauuugcuagcaauaaaaccauagaaugugccuguagagauaacaguuacacagcaaaaagacccuuugucaaauuaaacguggaaacugauacagcagaaauaagauuaaugugcacagauacuuauuuggacacccccagaccagaugacggaagcauaacaggcccuugugaaucuaauggggacaaagggaguggaggcaucaagggaggauuuguucaucaaagaauggcauccaagauuggaaggugguacucucgaacgaugucuaaaacugaaaggauggggaugggacuguaugucaaguaugauggagacccaugggcugacagugaugcccuugcuuuuaguggaguaaugguuucaaugaaagaaccugguugguacuccuuuggcuucgaaauaaaagauaagaaaugcgauguccccuguauugggauagagaugguacaugaugguggaaaagagacuuggcacucagcagcaacagccauuuacuguuuaaugggcucaggacagcugcugugggacacugucacagguguugacauggcucuguaa

SEQ ID NO: 61413 - RNA, 1401 nt, Artificial Sequence; identical to SEQ ID NO: 61412
  derived and/or modified CDS sequence (wt) from neuraminidase__InfluenzaB__AGX19308

SEQ ID NO: 61414 - RNA, 1401 nt, Artificial Sequence; identical to SEQ ID NO: 61412
  derived and/or modified CDS sequence (wt) from neuraminidase__InfluenzaB__AGX19319

SEQ ID NO: 61415 - RNA, 1401 nt, Artificial Sequence
  derived and/or modified CDS sequence (wt) from neuraminidase__InfluenzaB__AGX19330
augcuaccuucaacuauacaaacguuaacccuauuucucacaucagggggaguauuauuaucacuauaugugucagcuucauuaucauacuuacuauauucggauauauugcuaaaauucucaccaacagaaauaauugcaccaacaaugccauuggauugugcaaacgcaucaaauguucaugcugugaaccguucugcaacaaaaggggugacacuucuucucccagaaccggaguggacauacccgcguuuaucuugcccgggcucaaccuuucagaaagcacuccuaauuagcccucauagauucggagaaaccaaaggaaacucagcucccuugauaauaagggaaccuuuuauugcuuguggaccaaaugaaugcaaacacuuugcucuaacccauuaugcagcccaaccagggggauacuacaauggaacaagaggaaacagaaacaagcugaggcaucuaauuucagucaaauugggcaaaaucccaacaguagaaaacuccauuuuccacauggcagcauggagcggguccgcaugccaugaugguaaggaauggacauauauaggaguugauggcccugacaauaaugcauugcucaaaauaaaauauggagaagcauauacugacacauaccauuccuaugcaaacaacauccuaagaacacaagaaagugccugcaauugcaucgggggaaauuguuaucuuaugauaacugauggcucagcuucagguguuagugaaugcagauuucuuaagauucgagagggccgaauaauaaaagaaauauuuccaacaggaagaguaaaacauacugaggaaugcacaugcggauuugccagcaauaaaaccauagaaugugccuguagagauaacaguuacacagcaaaaagacccuuugucaaauuaaacguggaaacugauacagcagaaauaagauuaaugugcacagauacuuauuuggacacccccagaccagaugauggaagcauaacaggcccuugugaaucuaauggggacaaagggaguggaggcaucaagggaggauuuguucaucaaagaauggcauccaagauuggaaggugguacucucgaacgaugucuaaaacugaaaggauggggaugggacuguaugucaaguaugauggagacccaugggcugacagugaugcccuugcuuuuaguggaguaaugguuucaaugaaagaaccugguugguacuccuuuggcuucgaaauaaaagauaagaaaugcgauguccccuguauugggauagagaugguacaugaugguggaaaagagacuuggcacucagcagcaacagccauuuacuguuuaaugggcucaggacagcugcugugggacacugucacagguguugacauggcucuguaa

SEQ ID NO: 61416 - RNA, 1401 nt, Artificial Sequence
  derived and/or modified CDS sequence (wt) from neuraminidase__InfluenzaB__AGX19341
augcuaccuucaacuauacaaacguuaacccuauuucucacaucagggggaguauuauuaucacuauaugugucagcuucauuaucauacuuacuauauucggauauauugcuaaaauucucaccaacagaaauaauugcaccaacaaugccauuggauugugcaaacgcaucaaauguucaugcugugaaccguucugcaacaaaaggggugacacuucuucucccagaaccggaguggacauacccgcguuuaucuugcccgggcucaaccuuucagaaagcacuccuaauuagcccucauagauucggagaaaccaaaggaaacucagcucccuugauaauaagggaaccuuuuauugcuuguggaccaaaugaaugcaaacacuuugcucuaacccauuaugcagcccaaccagggggauacuacaauggaacaagaggagacagaaacaagcugaggcaucuaauuucagucaaauugggcaaaaucccaacaguagaaaacuccauuuuccacauggcagcauggagcggguccgcaugccaugaugguaaggaauggacauauauaggaguugauggcccugacaauaaugcauugcucaaaauaaaauauggagaagcauauacugacacauaccauuccuaugcaaacaacauccuaagaacacaagaaagugccugcaauugcaucgggggaaauuguuaucuuaugauaacugauggcucagcuucagguguuagugaaugcagauuucuuaagauucgagagggccgaauaauaaaagaaauauuuccaacaggaagaguaaaacauacugaggaaugcacaugcggauuugccagcaauaaaaccauagaaugugccuguagagauaacaguuacacagcaaaaagacccuuugucaaauuaaacguggaaacugauacagcagaaauaagauuaaugugcacagauacuuauuuggacacccccagaccagaugauggaagcauaacaggcccuugugaaucuaauggggacaaagggaguggaggcaucaagggaggauuuguucaucaaagaauggcauccaagauuggaaggugguacucucgaacgaugucuaaaacugaaaggauggggaugggacuguaugucaaguaugauggagacccaugggcugacagugaugcccuugcuuuuaguggaguaaugguuucaaugaaagaaccugguugguacuccuuuggcuucgaaauaaaagauaagaaaugcgauguccccuguauugggauagagaugguacaugaugguggaaaagagacuuggcacucagcagcaacagccauuuacuguuuaaugggcucaggacagcugcugugggacacugucacagguguugacauggcucuguaa

SEQ ID NO: 61417 - RNA, 1401 nt, Artificial Sequence; identical to SEQ ID NO: 61416
  derived and/or modified CDS sequence (wt) from neuraminidase__InfluenzaB__AGX19352

SEQ ID NO: 61418 - RNA, 1401 nt, Artificial Sequence
  derived and/or modified CDS sequence (wt) from neuraminidase__InfluenzaB__AGX19363
augcuaccuucaacuauacaaacguuaacccuauuucucacaucagggggaguauuauuaucacuauaugugucagcuucauuaucauacuuacuauauucggauauauugcuaaaauucucaccaacagaaauaauugcaccaacaaugccauuggauugugcaaacgcaucaaauguucaugcugugaaccguucugcaacaaaaggggugacacuucuucucccagaaccggaguggacauacccgcguuuaucuugcccgggcucaaccuuucagaaagcacuccuaauuagcccucauagauucggagaaaccaaaggaaacucagcucccuugauaauaagggaaccuuuuauugcuuguggaccaaaugaaugcaaacacuuugcucuaaccuauuaugcagcccaaccagggggauacuacaauggaacaagaggagacagaaacaagcugaggcaucuaauuucagucaaauugggcaaaaucccaaccguagaaaacuccauuuuccacauggcagcauggagcggguccgcaugccaugaugguaaggaauggacauauauaggaguugauggcccugacaauaaugcauugcucaaaauaaaauauggagaagcauauacugacacauaccauuccuaugcaaacaacauccuaagaacacaagaaagugccugcaauugcaucgggggaaauuguuaucuuaugauaacugauggcucagcuucagguguuagugaaugcagauuucuuaagauucgagagggccgaauaauaaaagaaauauuuccaacaggaagaguaaaacauacugaggaaugcacaugcggauuugccagcaauaaaaccauagaaugugccuguagagauaacaguuacacagcaaaaagacccuuugucaaauuaaacguggaaacugauacagcagaaauaagauuaaugugcacagauacuuauuuggacacccccagaccagaugauggaagcauaacaggcccuugugaaucuaauggggacaaagggaguggaggcaucaagggaggauuuguucaucaaagaauggcauccaagauuggaaggugguacucucgaacgaugucuaaaacugaaaggauggggaugggacuguaugucaaguaugauggagacccaugggcugacagugaugcccuugcuuuuaguggaguaaugguuucaaugaaagaaccugguugguacuccuuuggcuucgaaauaaaagauaagaaaugcgauguccccuguauugggauagagaugguacaugaugguggaaaagagacuuggcacucagcagcaacagccauuuacuguuuaaugggcucaggacagcugcugugggacacugucacagguguugacauggcucuguaa

SEQ ID NO: 61419 - RNA, 1401 nt, Artificial Sequence
  derived and/or modified CDS sequence (wt) from neuraminidase__InfluenzaB__AGX19374
augcuaccuucaacuauacaaacguuaacccuauuucucacaucagggggaguguuauuaucacuauaugugucagcuucauugucauacuuacuauauucggauauauugcuaaaauuuucacaaacagaaauaacugcaccaauaaugccauuggauugugcaaacgcaucaaauguucaggcugugaaccguucugcagcaaaaggggugacacuucuucucucagaaccggaguggacauacccucguuuaucuugcccgggcucaaccuuucagaaagcacuccuaauuagcccccauagauucggagaaaccaaaggaaacucagcucccuugauaauaagggaaccuuuuauugccuguggaccaacggaaugcaaacacuuugcucuaacccauuaugcagcucaaccagggggauacuacaauggaacaagagaagacagaaacaagcugaggcaucuaauuucagucaaauugggaaaaaucccaacaguagaaaacuccauuuuccacauggcagcuuggagcggguccgcaugccaugaugguaaagaauggacauauaucggaguugauggccccgacaguaaugcauugcucaaaauaaaauauggagaagcauauacugacacauaccauuccuaugcaaaaaacauccuaaggacacaagaaagugccugcaauugcaucgggggagauuguuaucuuaugauaacugauggcccagcuucagggguuagugaaugcagauuccuuaagauucgagagggcagaauaauaaaagaaauauuuccaacaggaagaguaaaacauacugaggaaugcacaugcggauuugccagcaacaaaaccauagaaugugcuuguagagauaacaguuacacagcaaaaagacccuuugucaaauuaaauguggagacugauacagcggaaauaagauugaugugcacagagacuuauuuggacacccccagaccaaaugauggaagcauaacagggccuugcgaaucugauggggacaaagggaguggaggcaucaagggaggguuuguucaucaaagaauggcauccaagauuggaagaugguacucucgaacgaugucuaaaacuaaaagaauggggaugggacuguauguaaaguaugauggagacccauggacugacagugaagcccuugcucuuaguggaguaaugguuucaauggaagaaccugguugguauuccuuuggcuucgaaauaaaagauaagaaaugugauguccccuguauugggauagaaaugguacaugauggugggaaaacgacuuggcacucagcagcaacagccauuuauuguuuaaugggcucaggacaacugcugugggacacugucacagguguugauauggcucuguaa

SEQ ID NO: 61420 - RNA, 1401 nt, Artificial Sequence; identical to SEQ ID NO: 61416
  derived and/or modified CDS sequence (wt) from neuraminidase__InfluenzaB__AGX19385

SEQ ID NO: 61421 - RNA, 1401 nt, Artificial Sequence
  derived and/or modified CDS sequence (wt) from neuraminidase__InfluenzaB__AGX19396
augcuaccuucaacuauacaaacguuaacccuauuucucacaucagggggaguauuauuaucacuauaugugucagcuucauuaucauacuuacuauauucggauauauugcuaaaauucucaccaacagaaauaauugcaccaacaaugccauuggauugugcaaacgcaucaaauguucaugcugugaaccguucugcaacaaaaggggugacacuucuucucccagaaccggaguggacauacccgcguuuaucuugcccgggcucaaccuuucagaaagcacuccuaauuagcccucauagauucggagaaaccaaaggaaacucagcucccuugauaauaagggaaccuuuuauugcuuguggaccaaaugaaugcaaacacuuugcucuaacccauuaugcagcccaaccagggggauacuacaauggaccaagaggagacagaaacaagcugaggcaucuaauuucagucaaauugggcaaaaucccaacaguagaaaacuccauuuuccacauggcagcauggagcggguccgcaugccaugaugguaaggaauggacauauauaggaguugauggcccugacaauaaugcauugcucaaaauaaaauauggagaagcauauacugacacauaccauuccuaugcaaacaacauccuaagaacacaagaaagugccugcaauugcaucgggggaaauuguuaucuuaugauaacugauggcucagcuucagguguuagugaaugcagauuucuuaagauucgagagggccgaauaauaaaagaaauauuuccaacaggaagaguaaaacauacugaggaaugcacaugcggauuugccagcaauaaaaccauagaaugugccuguagagauaacaguuacacagcaaaaagacccuuugucaaauuaaacguggaaacugauacagcagaaauaagauuaaugugcacagauacuuauuuggacacccccagaccagaugauggaagcauaacaggcccuugugaaucuaauggggacaaagggaguggaggcaucaagggaggauuuguucaucaaagaauggcauccaagauuggaaggugguacucucgaacgaugucuaaaacugaaaggauggggaugggacuguaugucaaguaugauggagacccaugggcugacagugaugcccuugcuuuuaguggaguaaugguuucaaugaaagaaccugguugguacuccuuuggcuucgaaauaaaagauaagaaaugcgauguccccuguauugggauagagaugguacaugaugguggaaaagagacuuggcacucagcagcaacagccauuuacuguuuaaugggcucaggacagcugcugugggacacugucacagguguugacauggcucuguaa

SEQ ID NO: 61422 - RNA, 1401 nt, Artificial Sequence
  derived and/or modified CDS sequence (wt) from neuraminidase__InfluenzaB__AGX19407
augcuaccuucaacuauacaaacguuaacccuauuucucacaucagggggaguauuauuaucacuauaugugucagcuucauuaucauacuuacuauauucggauauauugcuaaaauucucaccaacagaaauaauugcaccaacaaugccauuggauugugcaaacgcaucaaauguucaugcugugaaccguucugcaacaaaaggggugacacuucuucucccagaaccggaguggacauacccgcguuuaucuugcccgggcucaaccuuucagaaagcacuccuaauuagcccucauagauucggagaaaccaaaggaaacucagcucccuugauaauaagggaaccuuuuauugcuuguggaccaaaugaaugcaaacacuuugcucuaacccauuaugcagcccaaccagggggauacuacaauggaacaagaggagacagaaacaagcugaggcaucuaauuucagucaaauugggcaaaaucccaacaguagaaaacuccauuuuccacauggcagcauggagcggguccgcaugccaugaugguaaggaauggacauauauaggaguugauggcccugacaauaaugcauugcucaaaauaaaauauggagaagcauauacugacacauaccauuccuaugcaaacaacauccuaagaacacaagaaagugccugcaauugcaucgggggaaauuguuaucuuaugauaacugauggcucagcuucagguguuagugaaugcagauuucuuaagauucgagagggccgaauaauaaaagaaauauuuccaacaggaagaguaaaacauacugaggaaugcacaugcggauuugccagcaauaaaaccauagaaugugccuguagagauaacaguuacacagcaaaaagacccuuugucaaauuaaacguggaaacugauacagcagaaauaagauuaaugugcacagauacuuauuuggacacccccagaccagaugauggaagcauaacaggcccuugugaaucuaauggagacaaagggaguggaggcaucaagggaggauuuguucaucaaagaauggcauccaagauuggaaggugguacucucgaacgaugucuaaaacugaaaggauggggaugggacuguaugucaaguaugauggagacccaugggcugacagugaugcccuugcuuuuaguggaguaaugguuucaaugaaagaaccugguugguacuccuuuggcuucgaaauaaaagauaagaaaugcgauguccccuguauugggauagagaugguacaugaugguggaaaagagacuuggcacucagcagcaacagccauuuacuguuuaaugggcucaggacagcugcugugggacacugucacagguguugacauggcucuguaa

SEQ ID NO: 61423 - RNA, 1401 nt, Artificial Sequence
  derived and/or modified CDS sequence (wt) from neuraminidase__InfluenzaB__AGX19418
augcuaccuucaacuauacaaacguuaacccuauuucucacaucagggggaguauuauuaucacuauaugugucagcuucauuaucauacuuacuauauucggauauauugcuaaaauucucaccaacagaaauaacugcaccaacaaugccauuggauugugcaaacgcaucaaauguucaggcugugaaccguucugcaacaaaaggggugacacuucuucucccagaaccggaguggacauacccgcguuuaucuugcccgggcucaaccuuucagaaagcacuccuaauuagcccucauagauucggagaaaccaaaggaaacucagcucccuugauaauaagggaaccuuuuauugcuuguggaccaaaugaaugcaaacacuuugcucuaacccauuaugcagcccaaccagggggauacuacaauggaacaagaggagacagaaacaagcugaggcaucuaauuucagucaaauugggcaaaaucccaacaguagaaaacuccauuuuccacauggcagcauggagcgguuccgcgugccaugaugguaaggaauggacauauaucggaguugauggcccugacaauaaugcauugcucaaaguaaaauauggagaagcauauacugacacauaccauuccuaugcaaacaaaauccuaagaacacaagaaagugccugcaauugcaucgggggaaauuguuaucuuaugauaacugauggcucagcuucagguguuagugaaugcagauuucuuaagauucgagagggccgaauaauaaaagaaauauuuccaacaggaagaguaaaacacacugaggaaugcacaugcggauuugccagcaauaaaaccauagaaugugccuguagagauaacaguuacacagcaaaaagaccuuuugucaaauuaaacguggagacugauacagcagaaauaagauugaugugcacagauacuuauuuggacacccccagaccaaaugauggaagcauaacaggcccuugugaaucuaauggggacaaagggaguggaggcaucaagggaggauuuguucaucaaagaauggaauccaagauuggaaggugguacucucgaacgaugucuaaaacugaaaggauggggaugggacuguaugucaaguaugauggagacccaugggcugacagugaugcccuagcuuuuaguggaguaaugguuucaaugaaagaaccugguugguacuccuuuggcuucgaaauaaaagauaagaaaugcgauguccccuguauugggauagagaugguacaugaugguggaaaagagacuuggcacucagcagcaacagccauuuacuguuuaaugggcucaggacagcugcugugggacacugucacagguguugacauggcucuguaa

SEQ ID NO: 61424 - RNA, 1401 nt, Artificial Sequence
  derived and/or modified CDS sequence (wt) from neuraminidase__InfluenzaB__AGX19429
augcuaccuucaacuauacaaacguuaacccuauuucucacaucagggggaguguuauuaucacuauaugugucagcuucauugucauacuuacuauauucggauauauugcuaaaauuuucacaaacagaaauaacugcaccaauaaugccauuggauugugcaaacgcaucaaauguucaggcugugaaccguucugcagcaaaaggggugacacuucuucucccagaaccggaguggacauacccucguuuaucuugcccgggcucaaccuuucagaaagcacuccuaauuagcccccauagauucggagaaaccaaaggaaacucagcucccuugauaauaagggaaccuuuuauugcuuguggaccaacggaaugcaaacacuuugcucuaacccauuaugcagcucaaccagggggauacuacaauggaacaagagaagacagaaacaagcugaggcaucuaauuucagucaaauugggcaaaaucccaacaguagaaaacuccauuuuccauauggcagcuuggagcggguccgcaugccaugaugguaaagaauggacauauaucggaguugauggccccgacaguaaugcauugcucaaaauaaaauauggagaagcauauacugacacauaccauuccuaugcaaaaaacauccuaaggacacaagaaagugccugcaauugcaucgggggagauuguuaucuuaugauaacugauggcccagcuucagggauuagugaaugcagauuccuuaagauucgagagggcagaauaauaaaagaaauauuuccaacaggaagaguaaaacauacugaggaaugcacaugcggauuugccagcaacaaaaccauagaaugugcuuguagagauaacaguuacacagcaaaaagacccuuugucaaauuaaauguggagacugauacagcagaaauaagauugaugugcacagagacuuauuuggacacccccagaccaaaugauggaagcauaacagggccuugcgaaucugauggggacaaagggaguggaggcaucaagggaggauuuguucaucaaagaauggcauccaagauuggaaggugguacucucgaacgaugucuaaaacuagaagaauggggaugggacuguauguaaaguaugauggagacccauggacugacagugaagcccuugcucuuaguggaguaaugguuucaauggaagaaccugguugguauuccuuuggcuucgaaauaaaagauaagaaaugugauguccccuguauugggauagaaaugguacaugauggugggaaaacgacuuggcacucagcagcaacagccauuuacuguuuaaugggcucaggacaacugcugugggacacugucacagguguugauauggcucuguaa

SEQ ID NO: 61425 - RNA, 1401 nt, Artificial Sequence
  derived and/or modified CDS sequence (wt) from neuraminidase__InfluenzaB__AGX19451
augcuaccuucaacuauacaaacguuaacccuauuucucacaucagggggaguauuauuaucacuauaugugucagcuucauuaucauacuuacuauauucggauauauugcuaaaauucucaccaacagaaauaacugcaccaacaaugccauuggauugugcaaacgcaucaaauguucaugcugugaaccauucugcaacaaaaggggugacacuucuucucccagaaccagaguggacauacccgcguuuaucuugcccgggcucaaccuuucagaaagcacuccuaauuagcccucauagauucggagaaaccaaaggaaacucagcucccuugauaauaagggaaccuuuuauugcuuguggaccaaaugagugcaaacacuuugcucuaacccauuaugcagcccaaccagggggauacuacaauggaacaagaggagacagaaacaagcugaggcaucuaauuucagucaaauugggcaaaaucccaacaguagaaaacuccauuuuccacauggcagcauggagcggguccgcaugccaugaugguaaagaauggacauauauaggaguugauggcccugacaauaaugcauugcucaaaauaaaauauggagaagcauauacugacacauaccauuccuaugcaaacaacauccuaagaacacaagaaagugccugcaauugcaucgggggaaauuguuaucuuaugguaacugauggcucagcuucagguguuagugaaugcagauuucuuaagauucgagagggccgaauaauaaaagaaauauuuccaacaggaagaguaaaacauacugaggaaugcacaugcggauuugccagcaauaaaaccauagaaugugccuguagagauaacaguuacacagcaaaaagacccuuugucaaauuaaacguggaaacugauacagcagaaauaagauuaauguguacagauacuuauuuggacacccccagaccagaugauggaagcauaacaggcccuugugaaucuaauggggacaaagggaguggaggcaucaagggaggauuuguucaucagagaauggcauccaagauuggaaggugguacucucgaacgaugucuaaaacugaaaggauggggaugggacuguaugucaaguaugauggagacccaugggcugacagugaugcccuugcuuuuaguggaguaaugguuucaaugaaagaaccugguugguacuccuuuggauucgaaauaaaagauaagaaaugcgauguccccuguauugggauagagaugguacaugaugguggaaaagagacuuggcacucagcagcaacagccauuuacuguuuaaugggcucaggacaacugcugugggacacugucacagguguugacauggcucuguaa

SEQ ID NO: 61426 - RNA, 1401 nt, Artificial Sequence
  derived and/or modified CDS sequence (wt) from neuraminidase__InfluenzaB__AGX19462
augcuaccuucaacuauacaaacguuaacccuauuucucacaucagggggaguguuauuaucacuauaugugucagcuucauugucauacuuacuauauucggauauauugcuaaaauuuucacaaacagaaauaacugcaccaauaaugccauuggauugugcaaacgcaucaaauguucaggcugugaaccguucugcagcaaaaggggugacacuucuucucccagaaccggaguggacauacccucguuuaucuugcccgggcucaaccuuucagaaagcacuccuaauuagcccccauagauucggagaaaccaaaggaaacucagcucccuugauaauaagggaaccuuuuauugcuuguggaccaacggaaugcaaacacuuugcucuaacccauuaugcagcucaaccagggggauacuacaauggaacaagagaagacagaaacaagcugaggcaucuaauuucagucaaauugggcaaaaucccaacaguagaaaacuccauuuuccauauggcagcuuggagcggguccgcaugccaugaugguaaagaauggacauauaucggaguugauggccccgacaguaaugcauugcucaaaauaaaauauggagaagcauauacugacacauaccauuccuaugcaaaaaacauccuaaggacacaagaaagugccugcaauugcaucgggggagauuguuaucuuaugauaacugauggcccagcuucagggauuagugaaugcagauuccuuaagauucgagagggcagaauaauaaaagaaauauuuccaacaggaagaguaaaacauacugaggaaugcacaugcggauuugccagcaacaaaaccauagaaugugcuuguagagauaacaguuacacagcaaaaagacccuuugucaaauuaaauguggagacugauacagcggaaauaagauugaugugcacagagacuuauuuggacacccccagaccaaaugauggaagcauaacagggccuugcgaaucugauggggacaaagggaguggaggcaucaagggaggauuuguucaucaaagaauggcauccaagauuggaaggugguacucucgaacgaugucuaaaacuagaagaauggggaugggacuguauguaaaguaugauggagacccauggacugacagugaagcccuugcucuuaguggaguaaugguuucaauggaagaaccugguugguauuccuuuggcuucgaaauaaaagauaagaaaugugauguccccuguauugggauagaaaugguacaugauggugggaaaacgacuuggcacucagcagcaacagccauuuacuguuuaaugggcucaggacaacugcugugggacacugucacagguguugauauggcucuguaa

SEQ ID NO: 61427 - RNA, 1401 nt, Artificial Sequence; identical to SEQ ID NO: 61426
  derived and/or modified CDS sequence (wt) from neuraminidase__InfluenzaB__AGX19473

SEQ ID NO: 61428 - RNA, 1401 nt, Artificial Sequence; identical to SEQ ID NO: 61111
  derived and/or modified CDS sequence (wt) from neuraminidase__InfluenzaB__AGX19484

SEQ ID NO: 61429 - RNA, 1401 nt, Artificial Sequence; identical to SEQ ID NO: 61425
  derived and/or modified CDS sequence (wt) from neuraminidase__InfluenzaB__AGX19495

SEQ ID NO: 61430 - RNA, 1401 nt, Artificial Sequence; identical to SEQ ID NO: 61111
  derived and/or modified CDS sequence (wt) from neuraminidase__InfluenzaB__AGX19506

SEQ ID NO: 61431 - RNA, 1401 nt, Artificial Sequence; identical to SEQ ID NO: 61114
  derived and/or modified CDS sequence (wt) from neuraminidase__InfluenzaB__AGX19517

SEQ ID NO: 61432 - RNA, 1401 nt, Artificial Sequence; identical to SEQ ID NO: 61114
  derived and/or modified CDS sequence (wt) from neuraminidase__InfluenzaB__AGX19528

SEQ ID NO: 61433 - RNA, 1401 nt, Artificial Sequence
  derived and/or modified CDS sequence (wt) from neuraminidase__InfluenzaB__AGX19539
augcuaccuucaacuauacaaacguuaacccuauuucucacaucagggggaguauuauuaucacuauaugugucagcuucauuaucauacuuacuauauucggauauauugcuaaaauucucaccaacagaaauaacugcaccaacaaugccauuggauugugcaaacgcaucaaauguucaugcugugaaccauucugcaacaaaaggggugacacuucuucucccagaaccagaguggacauacccgcguuuaucuugcccgggcucaaccuuucagaaagcacuccuaauuagcccucauagauucggagaaaccaaaggaaacucagcucccuuaauaauaagggaaccuuuuauugcuuguggaccaaaugagugcaaacacuuugcucuaacccauuaugcagcccaaccagggggauacuacaauggaacaagaggagacagaaacaagcugaggcaucuaauuucagucaaauugggcaaaaucccaacaguagaaaacuccauuuuccacauggcagcauggagcggguccgcaugccaugaugguaaagaauggacauauauaggaguugauggcccugacaauaaugcauugcucaaaauaaaauauggagaagcauauacugacacauaccauuccuaugcaaacaacauccuaagaacacaagaaagugccugcaauugcaucgggggaaauuguuaucuuaugguaacugauggcucagcuucagguguuagugaaugcagauuucuuaagauucgagagggccgaauaauaaaagaaauauuuccaacaggaagaguaaaacauacugaggaaugcacaugcggauuugccagcaauaaaaccauagaaugugccuguagagauaacaguuacacagcaaaaagacccuuugucaaauuaaacguggaaacugauacggcagaaauaagauuaauguguacagauacuuauuuggacacccccagaccagaugauggaagcauaacaggcccuugugaaucuaauggggacaaagggaguggaggcaucaagggaggauuuguucaucagagaauggcauccaagauuggaaggugguacucucgaacgaugucuaaaacugaaaggauggggaugggacuguaugucaaguaugauggagacccaugggcugacagugaugcccuugcuuuuaguggaguaaugguuucaaugaaagaaccugguugguacuccuuuggauucgaaauaaaagauaagaaaugcgauguccccuguauugggauagagaugguacaugaugguggaaaagagacuuggcacucagcagcaacagccauuuacuguuuaaugggcucaggacaacugcugugggacacugucacagguguugacauggcucuguaa

SEQ ID NO: 61434 - RNA, 1401 nt, Artificial Sequence
  derived and/or modified CDS sequence (wt) from neuraminidase__InfluenzaB__AGX19550
augcuaccuucaacuauacaaacguuaacccuauuucucacaucagggggaguauuauuaucacuauaugugucagcuucauuaucauacuuacuauauucggauauauugcuaaaauucucaccaacagaaauaacugcaccaacaaugccauuggauugugcaaacgcaucaaauguucaugcugugaaccauucugcaacaaaaggggugacacuucuucucccagaaccagaguggacauacccgcguuuaucuugcccgggcucaaccuuucagaaagcacuccuaauuagcccucauagauucggagaaaccaaaggaaacucagcucccuugauaauaagggaaccuuuuauugcuuguggaccaaaugagugcaaacacuuugcucuaacccauuaugcagcccaaccagggggauacuacaauggaacaagaggagacagaaacaagcugaggcaucuaauuucagucaaauugggcaaaaucccaacaguagaaaacuccauuuuccacauggcagcauggagcggguccgcaugccaugaugguaaagaauggacauauauaggaguugauggcccugacaauaaugcauugcucaaaauaaaauauggagaagcauauacugacacauaccauuccuaugcaaacaacauccuaagaacacaagaaagugccugcaauugcaucgggggaaauuguuaucuuaugguaacugauggcucagcuucagguguuagugaaugcagauuucuuaagauucgagagggccgaauaauaaaagaaauauuuccaacaggaagaguaaaacauacugaggaaugcacaugcggauuugccagcaauaaaaccauagaaugugccuguagagauaacaguuacacagcaaaaagacccuuugucaaauuaaacguggaaacugauacagcagaaauaagauuaauguguacagauacuuauuuggacacccccagaccagaugauggaagcauaacaggcccuugugaaucuaauggggacaaagggaguggaggcaucaagggaggauuuguucaucagagaauggcauccaagauuggaaggugguacucucgaacgaugucuaaaacugaaaggauggggaugggacuguaugucaaguaugauggagacccaugggcugacagugaugcccuugcuuuuaguggaguaaugguuucaaugaacgaaccugguugguacuccuuuggauucgaaauaaaagauaagaaaugcgauguccccuguauugggauagagaugguacaugaugguggaaaagagacuuggcacucagcagcaacagccauuuacuguuuaaugggcucaggacaacugcugugggacacugucacagguguugacauggcucuguaa

SEQ ID NO: 61435 - RNA, 1401 nt, Artificial Sequence
  derived and/or modified CDS sequence (wt) from neuraminidase__InfluenzaB__AGX19561
augcuaccuucaacuauacaaacguuaacccuauuucucacaucagggggaguauuauuaucacuauaugugucagcuucauuaucauacuuacuauauucggauauauugcuaaaauucucaccaacagaaauaacugcaccaacaaugccauuggauugugcaaacgcaucaaauguucaugcugugaaccauucugcaacaaaaggggugacacuucuucucccagaaccagaguggacauacccgcguuugucuugcccgggcucaaccuuucagaaagcacuccuaauuagcccucauagauucggagaaaccaaaggaaacucagcucccuuaauaauaagggaaccuuuuauugcuuguggaccaaaugagugcaaacacuuugcucuaacccauuaugcagcccaaccaaggggauacuacaauggaacaagaggagacagaaacaagcugaggcaucuaauuucagucaaauugggcaaaaucccaacaguagaaaacuccauuuuccacauggcagcauggagcggguccgcaugccaugaugguaaagaauggacauauauaggaguugauggcccugacaauaaugcauugcucaaaauaaaauauggagaagcauauacugacacauaccauuccuaugcaaacaacauccuaagaacacaagaaagugccugcaauugcaucgggggaaauuguuaucuuaugguaacugauggcucagcuucagguguuagugaaugcagauuucuuaagauucgagagggccgaauaauaaaagaaauauuuccaacaggaagaguaaaacauacugaggaaugcacaugcggauuugccagcaauaaaaccauagaaugugccuguagagauaacaguuacacagcaaaaagacccuuugucaaauuaaacguggaaacugauacagcagaaauaagauuaauguguacagauacuuauuuggacacccccagaccagaugauggaagcauaacaggcccuugugaaucuaauggggacaaagggaguggaggcaucaagggaggauuuguucaucagagaauggcauccaagauuggaaggugguacucucgaacgaugucuaaaacugaaaggauggggaugggacuguaugucaaguaugauggagacccaugggcugacagugaugcccuugcuuuuaguggaguaaugguuucaaugaaagaaccugguugguacuccuuuggauucgaaauaaaagauaagaaaugcgauguccccuguauugggauagagaugguacaugaugguggaaaagagacuuggcacucagcagcaacagccauuuacuguuuaaugggcucaggacaacugcugugggacacugucacagguguugacauggcucuguaa

SEQ ID NO: 61436 - RNA, 1401 nt, Artificial Sequence
  derived and/or modified CDS sequence (wt) from neuraminidase__InfluenzaB__AGX19572
augcuaccuucaacuauacaaacguuaacccuauuucucacaucagggggaguauuauuaucacuauaugugucagcuucauuaucauacuuacuauauucggauauauugcuaaaauucucaccaacagaaauaacugcaccaacaaugccauuggauugugcaaacgcaucaaauguucaggcugugaaccguucugcaacaaaaggggugacacuucuucucccagaaccggaguggacauacccgcguuuaucuugcccgggcucaaccuuucagaaagcacuccuaauuagcccucauagauucggagaaaccaaaggaaacucagcucccuugauaauaagggaaccuuuuauugcuuguggaccaaaugaaugcaaacacuuugcucuaacccauuaugcagcccaaccagggggauacuacaauggaacaagaggagacagaaacaagcugaggcaucuaauuucagucaaauugggcaaaaucccaacaguagaaaacuccauuuuccacauggcagcauggagcggguccgcgugccaugaugguaaagaauggacauauaucggaguugauggcccugacaauaaugcauugcucaaaguaaaauauggagaagcauauacugacacauaccauuccuaugcaaacaaaauccuaagaacacaagaaagugccugcaauugcaucgggggaaauuguuaucuuaugauaacugauggcucagcuucagguguuagugaaugcagauuucuuaagauucgagagggccgaauaauaaaagaaauauuuccaacaggaagaguaaaacacacugaggaaugcacaugcggauuugccagcaauaaaaccauagaaugugccuguagagauaacaguuacacagcaaaaagaccuuuugucaaauuaaacguggagacugauacagcagaaauaagauugaugugcacagauacuuauuuggacacccccagaccaaaugauggaagcauaacaggcccuugugaaucuaauggggacaaagggaguggaggcaucaagggaggauuuguucaucaaagaauggaauccaagauuggaaggugguacucucgaacgaugucuaaaacugaaaggauggggaugggacuguaugucaaguaugauggagacccaugggcugacagugaugcccuagcuuuuaguggaguaaugguuucaaugaaagaaccugguugguacuccuuuggcuucgaaauaaaagauaagaaaugcgauguccccuguauugggauagagaugguacaugaugguggaaaagagacuuggcacucagcagcaacagccauuuacuguuuaaugggcucaggacagcugcugugggacacugucacagguguuaacauggcucuguaa

SEQ ID NO: 61437 - RNA, 1401 nt, Artificial Sequence; identical to SEQ ID NO: 61114
  derived and/or modified CDS sequence (wt) from neuraminidase__InfluenzaB__AGX19583

SEQ ID NO: 61438 - RNA, 1401 nt, Artificial Sequence
  derived and/or modified CDS sequence (wt) from neuraminidase__InfluenzaB__AGX19594
augcuaccuucaacuauacaaacguuaacccuauuucucacaucagggggaguauuauuaucacuauaugugucagcuucauuaucauacuuacuauauucggauauauugcuaaaauucucaccaacagaaauaacugcaccaacaaugccauuggauugugcaaacgcaucaaauguucaggcugugaaccguucugcaacaaaaggggugacacuucuucucccagaaccggaguggacauacccgcguuuaucuugcccgggcucaaccuuucagaaagcacuccuaauuagcccucauagauucggagaaaccaaaggaaacucagcucccuugauaauaagggaaccuuuuauugcuuguggaccaaaugaaugcaaacacuuugcucuaacccauuaugcagcccaaccagggggauacuacaauggaacaagaggagacagaaacaagcugaggcaucuaauuucagucaaauugggcaaaaucccaacaguagaaaacuccauuuuccacauggcagcauggagcggguccgcgugccaugaugguaaagaauggacauauaucggaguugauggcccugacaauaaugcauugcucaaaguaaaauauggagaagcauauacugacacauaccauuccuaugcaaacaaaauccuaagaacacaagaaagugccugcaauugcaucgggggaaauuguuaucuuaugauaacugauggcucagcuucagguguuagugaaugcagauuucuuaagauucgagagggccgaauaauaaaagaaauauuuccaacaggaagaguaaaacacacugaggaaugcacaugcggauuugccagcaauaaaaccauagaaugugccuguagagauaacaguuacacagcaaaaagaccuuuugucaaauuaaacguggagacugauacagcagaaauaagauugaugugcacagauacuuauuuggacacccccagaccaaaugauggaagcauaacaggcccuugugaaucuaauggggacaaagggaguggaggcaucaagggaggauuuguucaucaaagaauggaauccaagauuggaaggugguacucucgaacgaugucuaaaacugaaaggauggggaugggacuguaugucaaguaugauggggacccaugggcugacagugaugcccuagcuuuuaguggaguaaugguuucaaugaaagaaccugguugguacuccuuuggcuucgaaauaaaagauaagaaaugcgauguccccuguauugggauagagaugguacaugaugguggaaaagagacuuggcacucagcagcaacagccauuuacuguuuaaugggcucaggacagcugcugugggacacugucacagguguugacauggcucuguaa

SEQ ID NO: 61439 - RNA, 1401 nt, Artificial Sequence; identical to SEQ ID NO: 60973
  derived and/or modified CDS sequence (wt) from neuraminidase__InfluenzaB__AGX19605

SEQ ID NO: 61440 - RNA, 1401 nt, Artificial Sequence
  derived and/or modified CDS sequence (wt) from neuraminidase__InfluenzaB__AGX19616
augcuacccucaacuauacaaacguuaacccuauuucucacaucagggggaguauuauuaucacuauaugugucagcuucauuaucauacuuacuauauucggauauauugcuaaaauucucaccaacagaaauaacugcaccaacaaugccauuggauugugcaaacgcaucaaauguucaggcugugaaccguucugcaacaaaaggggugacacuucuucucccagaaccggaguggacauacccgcguuuaucuugcccgggcucaaccuuucagaaagcacuccuaauuagcccucauagauucggagaaaccaaaggaaacucagcucccuugauaauaagggaaccuuuuauugcuuguggaccaaaugaaugcaaacacuuugcucuaacccauuaugcagcccaaccagggggauacuacaauggaacaagaggagacagaaacaagcugaggcaucuaauuucagucaaauugggcaaaaucccaacaguagaaaacuccauuuuccacauggcagcauggagcggguccgcgugccaugaugguaaggaauggacauauaucggaguugauggcccugacaauaaugcauugcucaaaguaaaauauggagaagcauauacugacacauaccauuccuaugcaaacaaaauccuaagaacacaagaaagugccugcaauugcaucgggggaaauuguuaucuuaugauaacugauggcucagcuucagguguuagugaaugcagauuucuuaagauucgagagggccgaauaauaaaagaaauauuuccaacaggaagaguaaaacacacugaggaaugcacaugcggauuugccagcaauaaaaccauagaaugugccuguagagauaacaguuacacagcaaaaagaccuuuugucaaauuaaacguggagacugauacagcagaaauaagauugaugugcacagauacuuauuuggacacccccagaccaaacgauggaagcauaacaggcccuugugaaucuaauggggacaaagggaguggaggcaucaagggaggauuuguucaucaaagaauggaauccaagauuggaaggugguacucucgaacgaugucuaaaacugaaaggauggggaugggacuguaugucaaguaugauggagacccaugggcugacagugaugcccuagcuuuuaguggaguaaugguuucaaugaaagaaccugguugguacuccuuuggcuucgaaauaaaagauaagaaaugcgauguccccuguauugggauagagaugguacaugaugguggaaaagagacuuggcacucagcagcaacagccauuuacuguuuaaugggcucaggacagcugcugugggacacugucacagguguugacauggcucuguaa

SEQ ID NO: 61441 - RNA, 1401 nt, Artificial Sequence; identical to SEQ ID NO: 61425
  derived and/or modified CDS sequence (wt) from neuraminidase__InfluenzaB__AGX19627

SEQ ID NO: 61442 - RNA, 1401 nt, Artificial Sequence
  derived and/or modified CDS sequence (wt) from neuraminidase__InfluenzaB__AGX19638
augcuaccuucaacuauacaaacguuaacccuauuucucacaucagggggaguauuauuaucacuauaugugucagcuucauuaucauacuuacuauauucggauauauugcuaaaauucucaccaacagaaauaacugcaccaacaaugccauuggauugugcaaacgcaucaaauguucaggcugugaaccguucugcaacaaaaggggugacacuucuucucccagaaccggaguggacauacccgcguuuaucuugcccgggcucaaccuuucagaaagcacuccuaauuagcccucauagauucggagaaaccaaaggaaacucagcucccuugauaauaagggaaccuuuuauugcuuguggaccaaaugaaugcaaacacuuugcucuaacccauuaugcagcccaaccagggggauacuacaauggaacaagaggagacagaaacaagcugaggcaucuaauuucagucaaauugggcaaaaucccaacaguagaaaacuccauuuuccacauggcagcauggagcggguccgcgugccaugaugguaaggaauggacauauaucggaguugauggcccugacaauaaugcauugcucaaaguaaaauauggagaagcauauacugacacauaccauuccuaugcaaacaaaauccuaagaacacaagaaagugccugcaauugcaucgggggaaauuguuaucuuaugauaacugauggcucagcuucagguguuagugaaugcagauuucuuaagauucgagagggccgaauaauaaaagaaauauuuccaacaggaagaguaaaacacacugaggaaugcacaugcggauuugccagcaauaaaaccauagaaugugccuguagagauaacaguuacacagcaaaaagaccuuuugucaaauuaaacguggagacugauacagcagaaauaagauugaugugcacagauacuuauuuggacacccccagaccaaaugauggaagcauaacaggcccuugugaaucuaauggggacaaagggaguggaggcaucaagggaggauuuguucaucaaagaauggaauccaagauuggaaggugguacucucgaacgaugucuaaaacugaaaggauggggaugggacuguaugucaaguaugauggagacccaugggcugacagugaugcccuagcuuuuaguggaguaaugguuucaaugaaagaaccugguugguacuccuuuggcuucgaaauaaaagauaagaaaugcgauguccccuguauuggaauagagaugguacaugaugguggaaaagagacuuggcacucagcagcaacagccauuuacuguuuaaugggcucaggacagcugcugugggacacugucacagguguugacauggcucuguaa

SEQ ID NO: 61443 - RNA, 1401 nt, Artificial Sequence; identical to SEQ ID NO: 61425
  derived and/or modified CDS sequence (wt) from neuraminidase__InfluenzaB__AGX19649

SEQ ID NO: 61444 - RNA, 1401 nt, Artificial Sequence; identical to SEQ ID NO: 61425
  derived and/or modified CDS sequence (wt) from neuraminidase__InfluenzaB__AGX19660

SEQ ID NO: 61445 - RNA, 1401 nt, Artificial Sequence; identical to SEQ ID NO: 61114
  derived and/or modified CDS sequence (wt) from neuraminidase__InfluenzaB__AGX19671

SEQ ID NO: 61446 - RNA, 1401 nt, Artificial Sequence; identical to SEQ ID NO: 60973
  derived and/or modified CDS sequence (wt) from neuraminidase__InfluenzaB__AGX19682

SEQ ID NO: 61447 - RNA, 1401 nt, Artificial Sequence; identical to SEQ ID NO: 61425
  derived and/or modified CDS sequence (wt) from neuraminidase__InfluenzaB__AGX19704

SEQ ID NO: 61448 - RNA, 1401 nt, Artificial Sequence
  derived and/or modified CDS sequence (wt) from neuraminidase__InfluenzaB__AGX19715
augcuaccuucaacuauacaaacguuaacccuauuucucacaucagggggaguauuauuaucacuauaugugucagcuucauuaucauacuuacuauauucggauauauugcuaaaauucucaccaacagaaauaacugcaccaacaaugccauuggauugugcaaacgcaucaaauguucaugcugugaaccguucuacaacaaaaggggugacacuucuucucccagaaccggaguggacauacccgcguuuaucuugcccgggcucaaccuuucagaaagcacuccuaauuagcccucauagauucggagaaaccaaaggaaacucagcucccuugauaauaagggaaccuuuuauugcuuguggaccaaaugaaugcaaacacuuugcccuaacccauuaugcagcccaaccagggggauacuacaauggaacaagaggagacagaaacaagcugaggcaucuaauuucagucaaauugggcaaaaucccaacaguagaaaacuccauuuuccacauggcagcauggagcgggucugcaugccaugaugguaaggaauggacauauaucggaguugauggcccugacaauaaugcauugcucaaaauaaaauauggagaagcauauacugacacauaccauuccuaugcaaacaacauccuaagaacacaagaaagugccugcaauugcaucgggggaaauuguuaucuuaugauaacugauggcucagcuucagguguuagugaaugcagauuucuuaagauucgagagggccgaauaauaaaagaaauauuuccaacaggaagaguaaaacauacugaggaaugcacaugcggauuugccagcaauaaaaccauagaaugugccuguagagauaacaguuacacagcaaaaagacccuuugucaaauuaaacguggaaacugauacagcagaaauaagauugaugugcacagauacuuauuuggacacccccagaccagaugauggaagcauaacaggcccuugugaaucuaauggggacaaagggaguggaggcaucaagggaggauuuguucaucaaagaauggcauccaagauuggaaggugguacucucgaacgaugucuaaaacugaaaggauggggaugggacuguaugucaaguaugauggagacccaugggcugacagugaugcccuugcuuuuaguggaguaaugguuucaaugaaagaaccugguugguacuccuuuggcuucgaaauaaaagauaagaaaugcgauguccccuguauugggauagagaugguacaugaugguggaaaagagacuuggcacucagcagcaacagccauuuacuguuuaaugggcucaggacagcugcugugggacacugucacaggugucgacauggcucuguaa

SEQ ID NO: 61449 - RNA, 1401 nt, Artificial Sequence; identical to SEQ ID NO: 61438
  derived and/or modified CDS sequence (wt) from neuraminidase__InfluenzaB__AGX19726

SEQ ID NO: 61450 - RNA, 1401 nt, Artificial Sequence
  derived and/or modified CDS sequence (wt) from neuraminidase__InfluenzaB__AGX19737
augcuaccuucaacuauacaaacguuaacccuauuucucacaucagggggaguauuauuaucacuauaugugucagcuucauuaucauacuuacuauauucggauauauugcuaaaauucucaccaacagaaauaacugcaccaacaaugccauuggauugugcaaacgcaucaaauguucaggcugugaaccguucugcaacaaaaggggugacacuucuucucccagaaccggaguggacauacccgcguuuaucuugcccgggcucaaccuuucagaaagcacuccuaauuagcccucauagauucggagaaaccaaaggaaacucagcucccuugauaauaagggaaccuuuuauugcuuguggaccaaaugaaugcaaacacuuugcucuaacccauuaugcagcccaaccagggggauacuacaauggaacaagaggagacagaaacaagcugaggcaucuaauuucagucaaauugggcaaaaucccaacaguagaaaacuccauuuuccacauggcagcauggagcggguccgcgugccaugaugguaaagaauggacauauaucggaguugauggcccugacaauaaugcauugcucaaaguaaaauauggagaagcauauacugacacauaccauuccuaugcaaacaaaauccuaagaacacaagaaagugccugcaauugcaucgggggaaauuguuaucuuaugauaacugauggcucagcuucagguguuagugaaugcagauuucuuaagauucgagagggccgaauaauaaaagaaauauuuccaacaggaagaguaaaacacacugaggaaugcacaugcggauuugccagcaauaaaaccauagaaugugccuguagagauaacaguuacacagcaaaaagaccuuuugucaaauuaaacguggagacugauacagcagaaauaagauugaugugcacagauacuuauuuggacacccccagaccaaaugauggaagcauaacaggcccuugugaaucuaauggggacaaagggaguggaggcaucaagggaggauuuguucaucaaagaauggaauccaagauuggaaggugguacucucgaacgaugucuaaaacugaaaggauggggaugggacuguaugucaaguaugauggagacccaugggcugacagugaugcccuagcuuucaguggaguaaugguuucaaugaaagaaccugguugguacuccuuuggcuucgaaauaaaagauaagaaaugcgauguccccuguauugggauagagaugguacaugaugguggaaaagagacuuggcacucagcagcaacagccauuuacuguuuaaugggcucaggacagcugcugugggacacugucacagguguugacauggcucuguaa

SEQ ID NO: 61451 - RNA, 1401 nt, Artificial Sequence
  derived and/or modified CDS sequence (wt) from neuraminidase__InfluenzaB__AGX19748
augcuaccuucaacuauacaaacguuaacccuauuucucacaucagggggaguauuauuaucacuauaugugucagcuucauuaucauacuuacuauauucggauauauugcuaaaauucucaccaacagaaauaacugcaccaacaaugccauuggauugugcaaacgcaucaaauguucaggcugugaaccguucugcaacaaaaggggugacacuucuucucccagaaccggaguggacauacccgcguuuaucuugcccgggcucaaccuuucagaaagcacuccuaauuagcccucauagauucggagaaaccaaaggaaacucagcucccuugauaauaagggaaccuuuuauugcuuguggaccaaaugaaugcaaacacuuugcucuaacccauuaugcagcccaaccagggggauacuacaauggaacaagaggagacagaaacaagcugaggcaucuaauuucagucaaauugggcaaaaucccaacaguagaaaacuccauuuuccacauggcagcauggagcggguccgcgugccaugaugguaaggaauggacauauaucggaguugauggcccugacaauaaugcauugcucaaaguaaaauauggagaagcauauacugacacauaccauuccuaugcaaacaaaauccuaagaacacaagaaagugccugcaauugcaucgggggaaauuguuaucuuaugauaacugauggcucagcuucagguguuagugaaugcagauuucuuaagauucgagagggccgaauaauaaaagaaauauuuccaacaggaagaguaaaacacacugaggaaugcacaugcggauuugcaagcaauaaaaccauagaaugugccuguagagauaacaguuacacagcaaaaagaccuuuugucaaauuaaacguggagacugauacagcagaaauaagauugaugugcacagauacuuauuuggacacccccagaccaaacgauggaagcauaacaggcccuugugaaucuaauggggacaaagggaguggaggcaucaagggaggauuuguucaucaaagaauggaauccaagauuggaaggugguacucucgaacgaugucuaaaacugaaaggauggggaugggacuguaugucaaguaugauggagacccaugggcugacagugaugcccuagcuuuuaguggaguaaugguuucaaugaaagaaccugguugguacuccuuuggcuucgaaauaaaagauaagaaaugcgauguccccuguauugggauagagaugguacaugaugguggaaaagagacuuggcacucagcagcaacagccauuuacuguuuaaugggcucaggacagcugcugugggacacugucacagguguugacauggcucuguaa

SEQ ID NO: 61452 - RNA, 1401 nt, Artificial Sequence; identical to SEQ ID NO: 61425
  derived and/or modified CDS sequence (wt) from neuraminidase__InfluenzaB__AGX19759

SEQ ID NO: 61453 - RNA, 1401 nt, Artificial Sequence; identical to SEQ ID NO: 61114
  derived and/or modified CDS sequence (wt) from neuraminidase__InfluenzaB__AGX19770

SEQ ID NO: 61454 - RNA, 1401 nt, Artificial Sequence
  derived and/or modified CDS sequence (wt) from neuraminidase__InfluenzaB__AGX19781
augcuaccuucaacuauacaaacguuaacccuauuucucacaucagggggaguauuauuaucacuauaugugucagcuucauuaucauacuuacuauauucggauauauugcuaaaauucucaccaacagaaauaacugcaccaacaaugccauuggauugugcaaacgcaucaaauguucaggcugugaaccguucugcaacaaaaggggugacacuucuucucccagaaccggaguggacauacccgcguuuaucuugcccgggcucaaccuuucagaaagcacuccuaauuagcccucauagauucggagaaaccaaaggaaacucagcucccuugauaauaagggaaccuuuuauugcuuguggaccaaaugaaugcaaacacuuugcucuaacccauuaugcagcccaaccagggggauacuacaauggaacaagaggagacagaaacaagcugaggcaucuaauuucagucaaauugggcaaaaucccaacaguagaaaacuccauuuuccacauggcagcauggagcggguccgcgugccaugaugguaaggaauggacauauaucggaguugauggcccugacaauaaugcauugcucaaaguaaaauauggagaagcauauacugacacauaccauuccuaugcaaacaaaauccuaagaacacaagaaagugccugcaauugcaucgggggaaauuguuaucuuaugauaacugauggcucagcuucagguguuagugaaugcagauuucuuaagauucgagagggccgaauaauaaaagaaauauuuccaacaggaagaguaaaacacacugaggaaugcacaugcggauuugccagcaauaaaaccauagaaugugccuguagagauaacaguuacacagcaaaaagaccuuuugucaaauuaaacguggagacugauacagcagaaauaagauugaugugcacagauacuuauuuggacacccccaggccaaaugauggaagcauaacaggcccuugugaaucuaauggggacaaagggaguggaggcaucaagggaggauuuguucaucaaagaauggaauccaagauuggaaggugguacucucgaacgaugucuaaaacugaaaggauggggaugggacuguaugucaaguaugauggagacccaugggcugacagugaugcccuagcuuuuaguggaguaaugguuucaaugaaagaaccugguugguacuccuuuggcuucgaaauaaaagauaagaaaugcgauguccccuguauugggauagagaugguacaugaugguggaaaagagacuuggcacucagcagcaacagccauuuacuguuuaaugggcucaggacagcugcugugggacacugucacagguguugacauggcucuguaa

SEQ ID NO: 61455 - RNA, 1401 nt, Artificial Sequence; identical to SEQ ID NO: 61114
  derived and/or modified CDS sequence (wt) from neuraminidase__InfluenzaB__AGX19792

SEQ ID NO: 61456 - RNA, 1401 nt, Artificial Sequence; identical to SEQ ID NO: 60973
  derived and/or modified CDS sequence (wt) from neuraminidase__InfluenzaB__AGX19803

SEQ ID NO: 61457 - RNA, 1401 nt, Artificial Sequence
  derived and/or modified CDS sequence (wt) from neuraminidase__InfluenzaB__AGX19814
augcuaccuucaacuauacaaacguuaacccuauuucucacaucagggggaguauuauuaucacuauaugugucagcuucauuaucauacuuacuauauucggauauauugcuaaaauucucaccaacagaaauaacugcaccaacaaugccauuggauugugcaaacgcaucaaauguucaggcugugaaccguucugcaacaaaaggggugacacuucuucucccagaaccggaguggacauacccgcguuuaucuugcccgggcucaaccuuucagaaagcacuccuaauuagcccucauagauucggagaaaccaaaggaaacucagcucccuugauaauaagggaaccuuuuauugcuuguggaccaaaugaaugcaaacacuuugcucuaacccauuaugcagcccaaccagggggauacuacaauggaacaagaggagacagaaauaagcugaggcaucuaauuucagucaaauugggcaaaaucccaacaguagaaaacuccauuuuccacauggcagcauggagcggguccgcgugccaugaugguaaagaauggacauauaucggaguugauggcccugacaauaaugcauugcucaaaguaaaauauggagaagcauauacugacacauaccauuccuaugcaaacaaaauccuaagaacacaagaaagugccugcaauugcaucgggggaaauuguuaucuuaugauaacugauggcucagcuucagguguuagugaaugcagauuucuuaagauucgagagggccgaauaauaaaagaaauauuuccaacaggaagaguaaaacacacugaggaaugcacaugcggauuugccagcaauaaaaccauagaaugugccuguagagauaacaguuacacagcaaaaagaccuuuugucaaauuaaacguggagacugauacagcagaaauaagauugaugugcacagauacuuauuuggacacccccagaccaaaugauggaagcauaacaggcccuugugaaucuaauggggacaaagggaguggaggcaucaagggaggauuuguucaucaaagaauggaauccaagauuggaaggugguacucucgaacgaugucuaaaacugaaaggauggggaugggacuguaugucaaguaugauggagacccaugggcugacagugaugcccuagcuuuuaguggaguaaugguuucaaugaaagaaccugguugguacuccuuuggcuucgaaauaaaagauaagaaaugcgauguccccuguauugggauagagaugguacaugaugguggaaaagagacuuggcacucagcagcaacagccauuuacuguuuaaugggcucaggacagcugcugugggacacugucacagguguugacauggcucuguaa

SEQ ID NO: 61458 - RNA, 1401 nt, Artificial Sequence
  derived and/or modified CDS sequence (wt) from neuraminidase__InfluenzaB__AGX19825
augcuaccuucaacuauacaaacguuaacccuauuucucacaucagggggaguauuauuaucacuauaugugucagcuucauuaucauacuuacuauauucggauauauugcuaaaauucucaccaacagaaauaacugcaccaacaaugccauuggauugugcaaacgcaucaaauguucaugcugugaaccauucugcaacaaaaggggugacacuucuucucccagaaccagaguggacauacccgcguuuaucuugcccgggcucaaccuuucagaaagcacuccuaauuagcccucauagauucggagaaaccaaaggaaacucagcucccuugauaauaagggaaccuuuuauugcuuguggaccaaaugagugcaaacacuuugcucuaacccauuaugcagcccaaccagggggauacuacaauggaacaagaggagacagaaacaagcugaggcaucuaauuucagucaaauugggcaaaaucccaacaguagaaaacuccauuuuccacauggcagcauggagcggguccgcaugccaugaugguaaagaauggacauauauaggaguugauggcccugacaauaaugcauugcucaaaauaaaauauggagaagcauauacugacacauaccauuccuaugcaaacaacauccuaagaacacaagaaagugccugcaauugcaucgggggaaauuguuaucuuaugguaacugauggcucagcuucagguguuagugaaugcagauuucuuaagauucgagagggccgaauaauaaaagaaauauuuccaacaggaagaguaaaacauacugaggaaugcacaugcggauuugccaacaauaaaaccauagaaugugccuguagagauaacaguuacacagcaaaaagacccuuugucaaauuaaacguggaaacugauacagcagaaauaagauuaauguguacagauacuuauuuggacacccccagaccagaugauggaagcauaacaggcccuugugaaucuaauggggacaaagggaguggaggcaucaagggaggauuuguucaucagagaauggcauccaagauuggaaggugguacucucgaacgaugucuaaaacugaaaggauggggaugggacuguaugucaaguaugauggagacccaugggcugacagugaugcccuugcuuuuaguggaguaaugguuucaaugaaagaaccugguugguacuccuuuggauucgaaauaaaagauaagaaaugcgauguccccuguauugggauagagaugguacaugaugguggaaaagagacuuggcacucagcagcaacagccauuuacuguuuaaugggcucaggacaacugcugugggacacugucacagguguugacauggcucuguaa

SEQ ID NO: 61459 - RNA, 1401 nt, Artificial Sequence; identical to SEQ ID NO: 61114
  derived and/or modified CDS sequence (wt) from neuraminidase__InfluenzaB__AGX19836

SEQ ID NO: 61460 - RNA, 1401 nt, Artificial Sequence
  derived and/or modified CDS sequence (wt) from neuraminidase__InfluenzaB__AGX19847
augcuaccuucaacuauacaaacguuaacccuauuucucacaucagggggaguauuauuaucacuauaugugucagcuucauuaucauacuuacuauauucggauauauugcuaaaauucucaccaacagaaauaacugcaccaacaaugccauuggauugugcaaacgcaucaaauguucaggcugugaaccguucugcaacaaaaggggugacacuucuucucccagaaccggaguggacauacccgcguuuaucuugcccgggcucaaccuuucagaaagcacuccuaauuagcccucauagauucggagaaaccaaaggaaacucagcucccuugauaauaagggaaccuuuuauugcuuguggaccaaaugaaugcaaacacuuugcucuaacccauuaugcagcccaaccagggggauacuacaauggaacaagaggagacagaaacaagcugaggcaucuaauuucagucaaauugggcaaaaucccaacaguagaaaacuccauuuuccacauggcagcauggagcggguccgcgugccaugaugguaaggaauggacauauaucggaguugauggcccugacaauaaugcauugcucaaaguaaaauauggagaagcauauacugacacauaccauuccuaugcaaacaaaauccuaagaacacaagaaagugccugcaauugcaucgggggaaauuguuaucuuaugauaacugauggcucagcuucagguguuagugaaugcagauuucuuaagauucgagagggccgaauaauaaaagaaauauuuccaacaggaagaguaaaacacacugaggaaugcacaugcggauuugccagcaauaaaaccauagaaugugccuguagagauaacaguuacacagcaaaaagaccuuuugucaaauuaaacguggagacugauacagcagaaauaagauugaugugcacagauacuuauuuggacacccccagaccaaacgauggaagcauaacaggcccuugugaaucuaauggggacaaagggaguggaggcaucaagggaggauuuguucaucaaagaauggaauccaagauuggaaggugguacucucgaacgaugucuaaaacugaaaggauggggaugggacuguaugucaaguaugauggagacccaugggcugacagugaugcccuagcuuuuaguggaguaaugguuucaaugaaagaaccugguugguacuccuuuggcuucgaaauaaaagauaagaaaugcgauguccccuguauugggauagagaugguacaugaugguggaaaagagacuuggcacucggcagcaacagccauuuacuguuuaaugggcucaggacagcugcugugggacacugucacagguguugacauggcucuguaa

SEQ ID NO: 61461 - RNA, 1401 nt, Artificial Sequence; identical to SEQ ID NO: 61111
  derived and/or modified CDS sequence (wt) from neuraminidase__InfluenzaB__AGX19858

SEQ ID NO: 61462 - RNA, 1401 nt, Artificial Sequence; identical to SEQ ID NO: 60973
  derived and/or modified CDS sequence (wt) from neuraminidase__InfluenzaB__AGX19869

SEQ ID NO: 61463 - RNA, 1401 nt, Artificial Sequence; identical to SEQ ID NO: 61114
  derived and/or modified CDS sequence (wt) from neuraminidase__InfluenzaB__AGX19880

SEQ ID NO: 61464 - RNA, 1401 nt, Artificial Sequence
  derived and/or modified CDS sequence (wt) from neuraminidase__InfluenzaB__AGX19891
augcuaccuucaacuauacaaacguuaacccuauuucucacaucagggggaguauuauuaucacuauaugugucagcuucauuaucauacuuacuauauucggauauauugcuaaaauucucaccaacagaaauaacugcaccaacaaugccauuggauugugcaaacgcaucaaauguucaggcugugaaccguucugcaacaaaaggggugacacuucuucucccagaaccggaguggacauacccgcguuuaucuugcccgggcucaaccuuucagaaagcacuccuaauuagcccucauagauucggagaaaccaaaggaaacucagcucccuugauaauaagggaaccuuuuauugcuuguggaccaaaugaaugcaaacacuuugcucuaacccauuaugcagcccaaccagggggauacuacaauggaacaagaggagacagaaacaagcugaggcaucuaauuucagucaaauugggcaaaaucccaacaguagaaaacuccauuuuccacauggcagcauggagcggguccgcgugccaugaugguaaggaauggacauauaucggaguugauggcccugacaauaaugcauugcucaaaguaaaauauggagaagcauauacugacacauaccauuccuaugcaaacaaaauccuaagaacacaagaaagugccugcaauugcaucgggggaaauuguuaucuuaugauaacugauggcucagcuucagguguuagugaaugcagauuucuuaagauucgagagggccgaauaauaaaagaaauauuuccaacaggaagaguaaaacacacugaggaaugcacaugcggauuugccagcaauaaaaccauagaaugugccuguagagauaacaguuacacagcaaaaagaccuuuugucaaauuaaacguggagacugauacagcagaaauaagauugaugugcacagauacuuauuuggacacccccagaccaaaugauggaagcauaacaggcccuugugaaucuaauggggacaaagggaguggaggcaucaagggaggauuuguucaucaaagaauggaauccaagauuggaaggugguacucucgaacgaugucuaaaacugaaaggauggggaugggacuguaugucaaguaugauggagacccaugggcugacagugaugcccuagcuuuuaguggaguaaugguuucaaugaaagaaccugguugguacuccuuuggcuucgaaauaaaagauaagaaaugcgauguccccuguauugggauagagaugguacaugaugguggaaaagaaacuuggcacucagcagcaacagccauuuacuguuuaaugggcucaggacagcugcugugggacacugucacagguguugacauggcucuguaa

SEQ ID NO: 61465 - RNA, 1401 nt, Artificial Sequence; identical to SEQ ID NO: 61454
  derived and/or modified CDS sequence (wt) from neuraminidase__InfluenzaB__AGX19902

SEQ ID NO: 61466 - RNA, 1401 nt, Artificial Sequence
  derived and/or modified CDS sequence (wt) from neuraminidase__InfluenzaB__AGX19913
augcuaccuucaacuauacaaacguuaacccuauuucucacaucagggggaguauuauuaucacuauaugugucagcuucauuaucauacuuacuauauucggauauauugcuaaaauucucaccaacagaaauaacugcaccaacaaugccauuggauugugcaaacgcaucaaauguucaugcuaugaaccauucugcaacaaaaggggugacacuucuucucccagaaccagaguggacauacccgcguuuaucuugcccgggcucaaccuuucagaaagcacuccuaauuagcccucauagauucggagaaaccaaaggaaacucagcucccuugauaauaagggaaccuuuuauugcuuguggaccaaaugagugcaaacacuuugcucuaacccauuaugcagcccaaccagggggauacuacaauggaacaagaggagacagaaacaagcugaggcaucuaauuucagucaaauugggcaaaaucccaacaguagaaaacuccauuuuccacauggcagcauggagcggguccgcaugccaugaugguaaagaauggacauauauaggaguugauggcccugacaauaaugcauugcucaaaauaaaauauggagaagcauauacugacacauaccauuccuaugcaaacaacauccuaagaacacaagaaagugccugcaauugcaucgggggaaauuguuaucuuaugguaacugauggcucagcuucagguguuagugaaugcagauuucuuaagauucgagagggccgaauaauaaaagaaauauuuccaacaggaagaguaaaacauacugaggaaugcacaugcggauuugccagcaauaaaaccauagaaugugccuguagagauaacaguuacacagcaaaaagacccuuugucaaauuaaacguggaaacugauacagcagaaauaagauuaauguguacagauacuuauuuggacacccccagaccagaugauggaagcauaacaggcccuugugaaucuaauggggacaaagggaguggaggcaucaagggaggauuuguucaucagagaauggcauccaagauuggaaggugguacucucgaacgaugucuaaaacugaaaggauggggaugggacuguaugucaaguaugauggagacccaugggcugacagugaugcccuugcuuuuaguggaguaaugguuucaaugaaagaaccugguugguacuccuuuggauucgaaauaaaagauaagaaaugcgauguccccuguauugggauagagaugguacaugaugguggaaaagagacuuggcacucagcagcaacagccauuuacuguuuaaugggcucaggacaacugcugugggacacugucacagguguugacauggcucuguaa

SEQ ID NO: 61467 - RNA, 1401 nt, Artificial Sequence; identical to SEQ ID NO: 61114
  derived and/or modified CDS sequence (wt) from neuraminidase__InfluenzaB__AGX19924

SEQ ID NO: 61468 - RNA, 1401 nt, Artificial Sequence; identical to SEQ ID NO: 61454
  derived and/or modified CDS sequence (wt) from neuraminidase__InfluenzaB__AGX19935

SEQ ID NO: 61469 - RNA, 1401 nt, Artificial Sequence
  derived and/or modified CDS sequence (wt) from neuraminidase__InfluenzaB__AGX19946
augcuaccuucaacuauacaaacguuaacccuauuucucacaucagggggaguauuauuaucacuauaugugucagcuucauuaucauacuuacuauauucggauauauugcuaaaauucucaccaacagaaauaacugcaccaacaaugccauuggauugugcaaacgcaucaaauguucaggcugugaaccguucugcaacaaaaggggugacacuucuucucccagaaccggaguggacauacccgcguuuaucuugcccgggcucaaccuuucagaaagcacuccuaauuagcccucauagauucggagaaaccaaaggaaacucagcucccuugauaauaagggaaccuuuuauugcuuguggaccaaaugaaugcaaacacuuugcucuaacccauuaugcagcccaaccagggggauacuacaauggaacaagaggagacagaaacaagcugaggcaucuaauuucagucaaauugggcaaaaucccaacaguagaaaacuccauuuuccacauggcagcauggagcggguccgcgugccaugaugguaaggaauggacauauaucggaguugauggcccugacaauaaugcauugcucaaaguaaaauauggagaagcauauacugacacauaccauuccuaugcaaacaaaauccuaagaacacaagaaagugccugcaauugcaucgggggaaauuguuaucuuaugauaacugauggcucagcuucagguguuagugaaugcagauuucuuaagauucgagagggccgaauaauaaaagaaauauuuccaacaggaagaguaaaacacacugaggaaugcacaugcggauuugccagcaauaaaaccauagaaugugccuguagagacaacaguuacacagcaaaaagaccuuuugucaaauuaaacguggagacugauacagcagaaauaagauugaugugcacagauacuuauuuggacacccccagaccaaaugauggaagcauaacaggcccuugugaaucuaauggggacaaagggaguggaggcaucaagggaggauuuguucaucaaagaauggaauccaagauuggaaggugguacucucgaacgaugucuaaaacugaaaggauggggaugggacuguaugucaaguaugauggagacccaugggcugacagugaugcccuagcuuuuaguggaguaaugguuucaaugaaagaaccugguugguacuccuuuggcuucgaaauaaaagauaagaaaugcgauguccccuguauugggauagagaugguacaugaugguggaaaagagacuuggcacucagcagcaacagccauuuacuguuuaaugggcucaggacagcugcugugggacacugucacagguguugacauggcucuguaa

SEQ ID NO: 61470 - RNA, 1401 nt, Artificial Sequence; identical to SEQ ID NO: 61111
  derived and/or modified CDS sequence (wt) from neuraminidase__InfluenzaB__AGX19957

SEQ ID NO: 61471 - RNA, 1401 nt, Artificial Sequence
  derived and/or modified CDS sequence (wt) from neuraminidase__InfluenzaB__AGX19968
augcuaccuucaacuauacaaacguuaacccuauuucucacaucagggggaguauuauuaucacuauaugugucagcuucauuaucauacuuacuauauucggauauauugcuaaaauucucaccaacagaaauaacugcaccaacaaugccauuggauugugcaaacgcaucaaauguucaggcugugaaccguucugcaacaaaaggggugacacuucuucucccagaaccggaguggacauacccgcguuuaucuugcccgggcucaaccuuucagaaagcacuccuaauuagcccucauagauucggagaaaccaaaggaaacucagcucccuugauaauaagggaaccuuuuauugcuuguggaccaaaugaaugcaaacacuuugcucuaacccauuaugcagcccaaccagggggauacuacaauggaacaagaggagacagaaacaagcugaggcaucuaauuucagucaaauugggcaaaaucccaacaguagaaaacuccauuuuccacauggcagcguggagcggguccgcgugccaugaugguaaagaauggacauauaucggaguugauggcccugacaaugaugcauugcucaaaguaaaauauggagaagcauauacugacacauaccauuccuaugcaaacaaaauccuaagaacacaagaaagugccugcaauugcaucgggggaaauuguuaucuuaugauaacugauggcucagcuucagguguuagugaaugcagauuucuuaagauucgagagggccgaauaauaaaagaaauauuuccaacaggaagaguaaaacacacugaggaaugcacaugcggauuugccagcaauaaaaccauagaaugugccuguagagauaacaguuacacagcaaaaagaccuuuugucaaauuaaacguggagacugauacagcagaaauaagauugaugugcacagauacuuauuuggacacccccagaccaaaugauggaagcauaacaggcccuugugaaucuaauggggacaaagggaguggaggcaucaagggaggauuuguucaucaaagaauggaauccaagauuggaaggugguacucucgaacgaugucuaaaacugaaaggauggggaugggacuguaugucaaguaugauggagacccaugggcugacagugaugcccuagcuuuuaguggaguaaugguuucaaugaaagaaccugguugguacuccuuuggcuucgaaauaaaagauaagaaaugcgauguccccuguauugggauagagaugguacaugaugguggaaaagagacuuggcacucagcagcaacagccauuuacuguuuaaugggcucaggacagcugcugugggacacugucacagguguuaacauggcucuguaa

SEQ ID NO: 61472 - RNA, 1401 nt, Artificial Sequence; identical to SEQ ID NO: 61425
  derived and/or modified CDS sequence (wt) from neuraminidase__InfluenzaB__AGX19979

SEQ ID NO: 61473 - RNA, 1401 nt, Artificial Sequence
  derived and/or modified CDS sequence (wt) from neuraminidase__InfluenzaB__AGX19990
augcuaccuucaacuauacaaacguuaacccuauuucucacaucagggggaguauuauuaucacuauaugugucagcuucauuaucauacuuacuauauucggauauauugcuaaaauucucaccaacagaaauaacugcaccaacaaugccauuggauugugcaaacgcaucaaauguucaugcugugaaccauucugcaacaaaaggggugacacuucuucucccagaaccagaguggacauacccgcguuuaucuugcccgggcucaaccuuucagaaagcacuccuaauuagcccucauagauucggagaaaccaaaggaaacucagcucccuugauaauaagggaaccuuuuauugcuuguggaccaaaugagugcaaacacuuugcucuaacccauuaugcagcccaaccagggggauacuacaauggaacaagaggagacagaaacaagcugaggcaucuaauuucagucaaauugggcaaaaucccaacaguagaaaacuccauuuuccacauggcagcauggagcggguccgcaugccaugaugguaaagaauggacauauauaggaguugauggcccugacaauaaugcauugcucaaaauaaaauauggagaagcauauacugacacauaccauuccuaugcaaacaacauccuaagaacacaagaaagugccugcaauugcaucgggggaaauuguuaucuuaugguaacugauggcucagcuucagguguuagugaaugcagauuucuuaaaauucgagagggccgaauaauaaaagaaauauuuccaacaggaagaguaaaacauacugaggaaugcacaugcggauuugccagcaauaaaaccauagaaugugccuguagagauaacaguuacacagcaaaaagacccuuugucaaauuaaacguggaaacugauacagcagaaauaagauuaauguguacagauacuuauuuggacacccccagaccagaugauggaagcauaacaggcccuugugaaucuaauggggacaaagggaguggaggcaucaagggaggauuuguucaucagagaauggcauccaagauuggaaggugguacucucgaacgaugucuaaaacugaaaggauggggaugggacuguaugucaaguaugauggagacccaugggcugacagugaugcccuugcuuuuaguggaguaaugguuucaaugaaagaaccugguugguacuccuuuggauucgaaauaaaagauaagaaaugcgauguccccuguauugggauagagaugguacaugaugguggaaaagagacuuggcacucagcagcaacagccauuuacuguuuaaugggcucaggacaacugcugugggacacugucacagguguugacauggcucuguaa

SEQ ID NO: 61474 - RNA, 1401 nt, Artificial Sequence; identical to SEQ ID NO: 60973
  derived and/or modified CDS sequence (wt) from neuraminidase__InfluenzaB__AGX20001

SEQ ID NO: 61475 - RNA, 1401 nt, Artificial Sequence; identical to SEQ ID NO: 61111
  derived and/or modified CDS sequence (wt) from neuraminidase__InfluenzaB__AGX20012

SEQ ID NO: 61476 - RNA, 1401 nt, Artificial Sequence; identical to SEQ ID NO: 61111
  derived and/or modified CDS sequence (wt) from neuraminidase__InfluenzaB__AGX20023

SEQ ID NO: 61477 - RNA, 1401 nt, Artificial Sequence
  derived and/or modified CDS sequence (wt) from neuraminidase__InfluenzaB__AGX20034
augcuaccuucaacuauacaaacguuaacccuauuucucacaucagggggaguauuauuaucacuauaugugucagcuucauuaucauacuuacuauauucggauauauugcuaaaauucucaccaacagaaauaacugcaccaacaaugccauuggauugugcaaacgcaucaaauguucaggcugugaaccguucugcaacaaaaggggugacacuucuucucccagaaccggaguggacauacccgcguuuaucuugcccgggcucaaccuuucagaaagcacuccuaauuagcccucauagauucggagaaaccaaaggaaacucagcucccuugauaauaagggaaccuuuuauugcuuguggaccaaaugaaugcaaacacuuugcucuaacccauuaugcagcccaaccagggggauacuacaauggaacaagaggagacagaaacaagcuaaggcaucuaauuucagucaaauugggcaaaaucccaacaguagaaaacuccauuuuccacauggcagcauggagcgguuccgcgugccaugaugguaaggaauggacauauaucggaguugauggcccugacaauaaugcauugcucaaaguaaaauauggagaagcauauacugacacauaccauuccuaugcaaacaaaauccuaagaacacaagaaagugccugcaauugcaucgggggaaauuguuaucuuaugauaacugauggcucagcuucagguguuagugaaugcagauuucuuaagauucgagagggccgaauaauaaaagaaauauuuccaacaggaagaguaaaacacacugaggaaugcacaugcggauuugccagcaauaaaaccauagaaugugccuguagagauaacaguuacacagcaaaaagaccuuuugucaaauuaaacguggagacugauacagcagaaauaagauugaugugcacagauacuuauuuggacacccccagaccaaaugauggaagcauaacaggcccuugugaaucuaauggggacaaagggaguggaggcaucaagggaggauuuguucaucaaagaauggaauccaagauuggaaggugguacucucgaacgaugucuaaaacugaaaggauggggaugggacuguaugucaaguaugauggagacccaugggcugacagugaugcccuagcuuuuaguggaguaaugguuucaaugaaagaaccugguugguacuccuuuggcuucgaaauaaaagauaagaaaugcgauguccccuguauugggauagagaugguacaugaugguggaaaagagacuuggcacucagcagcaacagccauuuacuguuuaaugggcucaggacagcugcugugggacacugucacagguguugacauggcucuguaa

SEQ ID NO: 61478 - RNA, 1401 nt, Artificial Sequence
  derived and/or modified CDS sequence (wt) from neuraminidase__InfluenzaB__AGX20045
augcuaccuucaacuauacaaacguuaacccuauuucucacaucagggggaguauuauuaucacuauaugugucagcuucauuaucauacuuacuauauucggauauauugcuaaaauucucaccaacagaaauaacugcaccaacaaugccauuggauugugcaaacgcaucaaauguucaggcugugaaccguucugcaacaaaaggggugacacuucuucucccagaaccggaguggacauacccgcguuuaucuugcccgggcucaaccuuucagaaagcacuccuaauuagcccucauagauucggagaaaccaaaggaaacucagcucccuugauaauaagggaaccuuuuauugcuuguggaccaaaugaaugcaaacacuuugcucuaacccauuaugcagcccaaccagggggauacuacaauggaacaagaggagacagaaacaagcugaggcaucuaauuucagucaaauugggcaaaaucccaacaguagaaaacuccauuuuccacauggcagcauggagcggguccgcgugccaugaugguaaggaauggacauauaucggaguugauggcccugacaauaaugcauugcucaaaguaaaauauggagaagcauauacugacacauaccauuccuaugcaaacaaaauccuaagaacacaagaaagugccugcaauugcaucgggggaaauuguuaucuuaugauaacugauggcucagcuucagguguuagugaaugcagauuucuuaagauuagagagggccgaauaauaaaagaaauauuuccaacaggaagaguaaaacacacugaggaaugcacaugcggauuugccagcaauaaaaccauagaaugugccuguagagauaacaguuacacagcaaaaagaccuuuugucaaauuaaacguggagacugauacagcagaaauaagauugaugugcacagauacuuauuuggacacccccagaccaaacgauggaagcauaacaggcccuugugaaucuaauggggacaaagggaguggaggcaucaagggaggauuuguucaucaaagaauggaauccaagauuggaaggugguacucucgaacgaugucuaaaacugaaaggauggggaugggacuguaugucaaguaugauggagacccaugggcugacagugaugcccuagcuuuuaguggaguaaugguuucaaugaaagaaccugguugguacuccuuuggcuucgaaauaaaagauaagaaaugcgauguccccuguauugggauagagaugguacaugaugguggaaaagagacuuggcacucagcagcaacagccauuuacuguuuaaugggcucaggacagcugcugugggacacugucacagguguugacauggcucuguaa

SEQ ID NO: 61479 - RNA, 1401 nt, Artificial Sequence
  derived and/or modified CDS sequence (wt) from neuraminidase__InfluenzaB__AGX20056
augcuaccuucaacuauacaaacguuaacccuauuucucacaucagggggaguauuauuaucacuauaugugucagcuucauuaucauacuuacuauauucggauauauugcuaaaauucucaccaacagaaauaacugcaccaacaaugccauuggauugugcaaacgcaucaaauguucaggcugugaaccguucugcaacaaaaggggugacacuucuucucccagaaccggaguggacauacccgcguuuaucuugcccgggcucaaccuuucagaaagcacuccuaauuagcccucauagauucggagaaaccaaaggaaacucagcucccuugaugauaagggaaccuuuuauugcuuguggaccaaaugaaugcaaacacuuugcucuaacccauuaugcagcccaaccagggggauacuacaauggaacaagaggagacagaaacaagcugaggcaucuaauuucagucaaauugggcaaaaucccaacaguagaaaacuccauuuuccacauggcagcauggagcggguccgcgugccaugaugguaaagaauggacauauaucggaguugauggcccugacaauaaugcauugcucaaaguaaaauauggagaagcauauacugacacauaccauuccuaugcaaacaaaauccuaagaacacaagaaagugccugcaauugcaucgggggaaauuguuaucuuaugguaacugauggcucagcuucagguguuagugaaugcagauuucuuaagauucgagagggccgaauaauaaaagaaauauuuccaacaggaagaguaaaacacacugaggaaugcacaugcggauuugccagcaauaaaaccauagaaugugccuguagagauaacaguuacacagcaaaaagaccuuuugucaaauuaaacguggagacugauacagcagaaauaagauugaugugcacagauacuuauuuggacacccccagaccaaaugauggaagcauaacaggcccuugugaaucuaauggggacaaagggaguggaggcaucaagggaggauuuguucaucaaagaauggaauccaagauuggaaggugguacucucgaacgaugucuaaaacugaaaggauggggaugggacuguaugucaaguaugauggagacccaugggcugacagugaugcccuagcuuuuaguggaguaaugguuucaaugaaagaaccugguugguacuccuuuggcuucgaaauaaaagauaagaaaugcgauguccccuguauugggauagagaugguacaugaugguggaaaagagacuuggcacucagcagcaacagccauuuacuguuuaaugggcucaggacagcugcugugggacacugucacagguguugacauggcucuguaa

SEQ ID NO: 61480 - RNA, 1401 nt, Artificial Sequence
  derived and/or modified CDS sequence (wt) from neuraminidase__InfluenzaB__AGX20067
augcuaccuucaacuauacaaacguuaacccuauuucucacaucagggggaguauuauuaucacuauaugugucagcuucauuaucauacuuacuauauucggauauauugcuaaaauucucaccaacagaaauaacugcaccaacaaugccauuggauugugcaaacgcaucaaauguucaggcugugaaccguucugcaacaaaaggggugacacuucuucucccagaaccggaguggacauacccgcguuuaucuugcccgggcucaaccuuucagaaagcacuccuaauuagcccucauagauucggagaaaccaaaggaaacucagcucccuugauaauaagggaaccuuuuauugcuuguggaccaaaugaaugcaaacacuuugcucuaacccauuaugcagcccaaccagggggauacuacaauggaacaagaggagacagaaacaagcugaggcaucuaauuucagucaaauugggcaaaaucccaacaguagaaaacuccauuuuccacauggcagcauggagcggguccgcgugccaugaugguaaagaauggacauauaucggaguugauggcccugacaauaaugcauugcucaaaguaaaauauggagaagcauauacugacacauaccauuccuaugcaaacaaaauccuaagaacacaagaaagugccugcaauugcaucgggggaaauuguuaucuuaugguaacugauggcucagcuucagguguuagugaaugcagauuucuuaagauucgagagggccgaauaauaaaagaaauauuuccaacaggaagaguaaaacacacugaggaaugcacaugcggauuugccagcaauaaaaccauagaaugugccuguagagauaacaguuacacagcaaaaagaccuuuugucaaauuaaacguggagacugauacagcagaaauaagauugaugugcacagauacuuauuuggacacccccagaccaaaugauggaagcauaacaggcccuugugaaucuaauggggacaaagggaguggaggcaucaagggaggauuuguucaucaaagaauggaauccaagauuggaaggugguacucucgaacgaugucuaaaacugaaaggauggggaugggacuguaugucaaguaugauggagacccaugggcugacagugaugcccuagcuuuuaguggaguaaugguuucaaugaaagaaccugguugguacuccuuuggcuucgaaauaaaagauaagaaaugcgauguccccuguauugggauagagaugguacaugaugguggaaaagagacuuggcacucagcagcaacagccauuuacuguuuaaugggcucaggacagcugcugugggacacugucacagguguugacauggcucuguaa

SEQ ID NO: 61481 - RNA, 1401 nt, Artificial Sequence
  derived and/or modified CDS sequence (wt) from neuraminidase__InfluenzaB__AGX20078
augcuaccuucaacuauacaaacguuaacccuauuucucacaucagggggaguauuauuaucacuauaugugucagcuucauuaucauacuuacuauauucggauauauugcuaaaauucucaccaacagaaauaacugcaccaacaaugccauuggauugugcaaacgcaucaaauguucaggcugugaaccguucugcaacaaaaggggugacacuucuucucccagaaccggaguggacauacccgcguuuaucuugcccgggcucaaccuuucagaaagcacuccuaauuagcccucauagauucggagaaaccaaaggaaacucagcucccuugauaauaagggaaccuuuuauugcuuguggaccaaaugaaugcaaacacuuugcucuaacccauuaugcagcccaaccagggggauacuacaauggaacaagaggagacagaaacaagcugaggcaucuaauuucagucaaauugggcaaaaucccaacaguagaaaacuccauuuuccacauggcagcauggagcggguccgcgugccaugaugguaaagaauggacauauaucggaguugauggcccugacaauaaugcauugcucaaaguaaaauauggagaagcauauacugacacauaccauuccuaugcaaacaaaauccuaagaacacaagaaagugccugcaauugcaucgggggaaauuguuaucuuaugauaacugauggcucagcuucagguguuagugaaugcagauuucuuaagauucgagagggccgaauaauaaaagaaauauuuccaacaggaagaguaaaacacacugaggaaugcacaugcggauuugccagcaauaaaaccauagaaugugccuguagagauaacaguuacacagcaaaaagaccuuuugucaaauuaaacguggagacugauacagcagaaauaagauugaugugcacagauacuuauuuggacacccccagaccaaaugauggaagcauaacaggcccuugugaaucuaauggggauaaagggaguggaggcaucaagggaggauuuguucaucaaagaauggaauccaagauuggaaggugguacucucgaacgaugucuaaaacugaaaggauggggaugggacuguaugucaaguaugauggagacccaugggcugacagugaugcccuagcuuuuaguggaguaaugguuucaaugaaagaaccugguugguacuccuuuggcuucgaaauaaaagauaagaaaugcgauguccccuguauugggauagagaugguacaugaugguggaaaagagacuuggcacucagcagcaacagccauuuacuguuuaaugggcucaggacagcugcugugggacacugucacagguguugacauggcucuguaa

SEQ ID NO: 61482 - RNA, 1401 nt, Artificial Sequence; identical to SEQ ID NO: 60973
  derived and/or modified CDS sequence (wt) from neuraminidase__InfluenzaB__AGX20089

SEQ ID NO: 61483 - RNA, 1401 nt, Artificial Sequence
  derived and/or modified CDS sequence (wt) from neuraminidase__InfluenzaB__AGX20100
augcuacccucaacuauacagacguuaacccuauuucucacaucagggggaguauuauuaucacuauaugugucagcuucauugucauacuuacuauauucggauauauugcuaaaauucccaucaacagaaauuacugcaccaacaaugccauuagauugugcaaacgcaucaaauguucaggcugugaaccguucugcaacaaaaggggugacacuucuucucccagaaccggaguggacauacccgcguuuaucuugcccgggcucaaccuuucagaaagcacuccuaauuagcccucauagauucggagaaaccaaaggaaacucagcucccuugauaauaagggaaccuuuuauugcuuguggaccaaaggaaugcaaacacuuugcucuaacccacuaugcagcccaaccagggggauacuacaauggaacaagaggagacagaaacaagcugaggcaucuaauuucagucaaauugggcaaaaucccaacaguagaaaacuccauuuuccacauggcagcauggagcggguccgcaugucaugaugguaaggaauggacauauaucggaguugauggcccugacaauaaugcagugcucaaaauaaaauauggggaagcauauacugacacauaccauuccuaugcaaacaacauccuaagaacacaagaaagugccugcaauugcaucggaggaaauuguuaucuuaugauaacugauggcucagcuucagguguuagugaaugcagauuucuuaagauucgagagggccgaauaauaaaagaaauauuuccaacaggaagaauacaacauacugaagaaugcacaugcggauuugcuagcaauaaaaccauagaaugugccuguagagauaacaguuacacagcaaaaagacccuuugucaaauuaaacguggagacugauacagcagaaauaagauugaugugcacaaagacuuauuuggacacccccagaccagaugauggaagcauaacagggccuugugaaucuaauggaggcaaagggaguggaggcaucaagggaggauuuguccaucaaagaauggcauccaagauuggaaggugguacucucgaacgaugucuaaaacugaaaggaaggggauggggcuguaugucaaguaugauggagacccaugggcugacagugaugcccuugcuuuuaguggaguaaugguuucaauggaagaaccugguugguacuccuuuggcuucgaaauaaaagacaagaaaugugauguccccuguauugggauagagaugguacaugaugguggaaaagagacuuggcacucagcagcuacagccauuuacuguuuaaugggcucaggacagcugcugugggacacugucacagguguuaauauggcucuguaa

SEQ ID NO: 61484 - RNA, 1401 nt, Artificial Sequence
  derived and/or modified CDS sequence (wt) from neuraminidase__InfluenzaB__AGX20111
augcuaccuucaacuauacaaacguuaacccuauuucucacaucagggggaguauuauuaucacuauaugugucagcuucauuaucauacuuacuauauucggauauauugcuaaaauucucaccaacagaaauaacugcaccaacaaugccauuggauugugcaaacgcaucaaauguucaggcugugaaccguucugcaacaaaaggggugacacuucuucucccagaaccggaguggacauacccgcguuuaucuugcccgggcucaaccuuucagaaagcacuccuaauuagcccucauagauucggagaaaccaaaggaaacucagcucccuugauaauaagggaaccuuuuauugcuuguggaccaaaugaaugcaaacacuuugcucuaacccauuaugcagcccaaccagggggauacuacaauggaacaagaggagacagaaacaagcugaggcaucuaauuucagucaaauugggaaaaaucccaacaguagaaaacuccauuuuccacauggcagcauggagcggguccgcgugccaugaugguaaggaauggacauauaucggaguugauggcccugacaauaaugcauugcucaaaguaaaauauggagaagcauauacugacacauaccauuccuaugcaaacaaaauccuaagaacacaagaaagugccugcaauugcaucgggggaaauuguuaucuuaugauaacugauggcucagcuucagguguuagugaaugcagauuucuuaagauucgagagggccgaauaauaaaagaaauauuuccaacaggaagaguaaaacacacugaggaaugcacaugcggauuugccagcaauaaaaccauagaaugugccuguagagauaacaguuacacagcaaaaagaccuuuugucaaauugaacguggagacugauacagcagaaauaagauugaugugcacagauacuuauuuggacacccccagaccagaugauggaagcauaacaggcccuugugaaucuaauggggacaaagggaguggaggcaucaagggaggauuuguucaucaaagaauggaauccaagauuggaaggugguacucucgaacgaugucuaaaacugaaaggaugggaaugggacuguaugucaaguaugauggagacccaugggcugacagugaugcccuaacuuuuaguggaguaaugguuucaaugaaagaaccugguugguacuccuuuggcuucgaaauaaaagauaagaaaugcgauguccccuguauugggauagagaugguacaugaugguggaaaagagacuuggcacucagcagcaacagccauuuacuguuuaaugggcucaggacagcugcugugggacacugucacagguguugacauggcucuguaa

SEQ ID NO: 61485 - RNA, 1401 nt, Artificial Sequence
  derived and/or modified CDS sequence (wt) from neuraminidase__InfluenzaB__AGX20122
augcuaccuucaacuauacaaacguuaacccuauuucucacaucagggggaguauuauuaucacuauaugugucagcuuuauuaucauacuuacuauauucggauauauugcuaaaauucucaccaacagaaauaacugcaccaacaaugucauuggauugugcaaacgcaucaaauguucaggcugugaaccguucugcaacaaaaggggugacauuucuucucccagaaccggaguggacauacccgcguuuaucuugcccgggcucaaccuuucagagagcacuccuaauuagcccucauagauucggagaaaccaaaggaaacucagcucccuugauaauaagggaaccuuuuauugcuuguggaccaaaugaaugcaaacacuuugcucuaacccauuaugcagcccaaccagggggauacuacaauggaacaagaggagacagaaacaagcugaggcaucuaauuucagucaaauugggcaaaaucccaacaguagaaaacuccauuuuccacauggcagcauggagcggguccgcuugccaugaugguaaggaauggacauauaucggaguugauggcccugacaaugaugcauugcucaaaguaaaauauggagaagcauauacugacacauaccauuccuaugcaaacaaaauccuaagaacacaagaaagugccugcaauugcaucgggggaaauuguuaucuuaugauaacugauggcucagcuucagguguuagugaaugcagauuucuuaagauucgagagggccgaauaauaaaagaaauauuuccaacaggaagaguaaaacacacugaggaaugcacaugcggauuugccagcaauaaaaccauagaaugugccuguagagauaacaguuacacagcaaaaagaccuuuugucaaauuaaacguggagacugauacagcagaaauaagauugaugugcacagauacuuauuuggacacccccagaccagaugauggaagcauaacaggcccuugugaaucuaauggggacaaagggaguggaggcaucaagggaggauuuguucaucaaagaauggaauccaagauuggaaggugguacucucgaacgaugucuaagacugaaaggauggggaugggacuguaugucaaguaugauggagacccaugggcugacagugaugcccuagcuuuuaguggaguaaugguuucaaugaaagaaccugguugguacucuuuuggcuucgaaauaaaagauaagaaaugcgauguccccuguauugggauagagaugguacaugaugguggaaaagagacuuggcacucagcagcaacagccauuuacuguuuaaugggcucaggacagcugcugugggacacugucacaggcguugacauggcucuguaa

SEQ ID NO: 61486 - RNA, 1401 nt, Artificial Sequence
  derived and/or modified CDS sequence (wt) from neuraminidase__InfluenzaB__AGX20133
augcuaccuucaacuauacaaacguuaacucuauuucucacaucagggggaguauuauuaucacuauaugugucagcuuuauuaucauacuuacuauauucggauguauugcuaaaauucucaccgacagaaauaacugcaccaacaaugucauuggauugugcaaacgcaucaaauguucaggcugugaaccguucugcaacaaaaggggugacauuucuucucccagaaccggaguggacauacccgcguuuaucuugcccgggcucaaccuuucagaaagcacuccuaauuagcccucauagauucggagaaaccaaaggaaacucagcucccuugauaauaagggaaccuuuuauugcuuguggaccaaaugaaugcaaacacuuugcucuaacccauuaugcagcccaaccagggggauacuacaauggaacaagaggagacagaaacaagcugaggcaucuaauuucagucaaauugggcaaaaucccaacaguagaaaacuccauuuuccacauggcagcauggagcggguccgcgugccaugaugguaaggaauggacauauaucggaguugauggcccugacaaugaugcauugcucaaaguaaaauauggagaagcauauacugacacauaccauuccuaugcaaacaaaauccuaagaacacaagaaagugccugcaauugcaucgggggaaauuguuaucuuaugauaacugauggcucagcuucagguguuagugaaugcagauuucuuaagauucgagagggccgaauaauaaaagaaauauuuccaacaggaagaguaaaacacacugaggaaugcacaugcggauuugccagcaauaaaaccauagaaugugccuguagagauaacaguuacacagcaaaaagaccuuuugucaaauuaaacguggagacugauacagcagaaauaagauugaugugcacagauacuuauuuggacacccccagaccagaugauggaagcauaacaggcccuugugaaucuaauggggacaaagggaguggaggcaucaagggaggauuuguucaucaaagaauggaauccaagauuggaaggugguacucucgaacgaugucuaagacugaaaggauggggaugggacuguaugucaaguaugauggagacccaugggcugacagugaugcccuagcuuuuaguggaguaaugguuucaaugaaagaaccugguugguacuccuuuggcuucgaaauaaaagauaagaaaugcgauguccccuguauugggauagagaugguacaugaugguggaaaagagacuuggcacucagcagcaacagccauuuacuguuugaugggcucaggacagcugcuaugggacacugucacaggcguugacauggcucuguaa

SEQ ID NO: 61487 - RNA, 1401 nt, Artificial Sequence
  derived and/or modified CDS sequence (wt) from neuraminidase__InfluenzaB__AGX20144
augcuaccuucaacuauacaaacguuaacccuauuucucacaucagggggaguauuauuaucacuauaugugucagcuuuauuaucauacuuacuauauucggauauauugcuaaaauucucaccaacagaaauaacugcaccaacaaugucauuggauugugcaaacgcaucaaauguucaggcugugaaccguucugcaacaaaaggggugacauuucuucucccagaaccggaguggacauacccgcguuuaucuugcccgggcucaaccuuucagaaagcacuccuaauuagcccucauagauucggagaaaccaaaggaaacucagcucccuugauaauaagggaaccuuuuauugcuuguggaccaaaugaaugcaaacacuuugcucuaacccauuaugcagcccaaccagggggauacuacaauggaacaagaggagacagaaacaagcugaggcaucuaauuucagucaaauugggcaaaaucccaacaguagaaaacuccauuuuccacauggcagcauggagcggguccgcgugccaugaugguaaggaauggacauauaucggaguugauggcccugacaaugaugcauugcucaaaguaaaauauggagaagcauauacugacacauaccauuccuaugcaaacaaaauccuaagaacacaagaaagugccugcaauugcaucgggggaaauuguuaucuuaugauaacugauggcucagcuucagguauuagugaaugcagauuucuuaagauucgagagggccgaauaauaaaagaaauauuuccaacaggaagaguaaaacacacugaggaaugcacaugcggauuugccagcaauaaaaccauagaaugugccuguagagauaacaguuacacagcaaaaagaccuuuugucaaauuaaacguggagacugauacagcagaaauaagauugaugugcacagauacuuauuuggacacccccagaccagaugauggaagcauaacaggcccuugugaaucuaauggggacaaagggaguggaggcaucaaaggaggauuuguucaucaaagaauggaauccaagauuggaaggugguacucucgaacgaugucuaagacugaaaggauggggaugggacuguaugucaaguaugauggagacccaugggcugacagugaugcccuagcuuuuaguggaguaaugguuucaaugaaagaaccugguugguacuccuuuggcuucgaaauaaaagauaagaaaugcgauguccccuguauugggauagagaugguacaugaugguggaaaagagacuuggcacucagcagcaacagccauuuacuguuuaaugggcucaggacagcugcugugggacacugucacaggcguugacauggcucuguaa

SEQ ID NO: 61488 - RNA, 1401 nt, Artificial Sequence; identical to SEQ ID NO: 61487
  derived and/or modified CDS sequence (wt) from neuraminidase__InfluenzaB__AGX20155

SEQ ID NO: 61489 - RNA, 1401 nt, Artificial Sequence; identical to SEQ ID NO: 61487
  derived and/or modified CDS sequence (wt) from neuraminidase__InfluenzaB__AGX20166

SEQ ID NO: 61490 - RNA, 1401 nt, Artificial Sequence; identical to SEQ ID NO: 61125
  derived and/or modified CDS sequence (wt) from neuraminidase__InfluenzaB__AGX20177

SEQ ID NO: 61491 - RNA, 1401 nt, Artificial Sequence
  derived and/or modified CDS sequence (wt) from neuraminidase__InfluenzaB__AGX20188
augcuaccuucaacuauacaaacguuaacucuauuucucacaucagggggaguauuauuaucacuauaugugucagcuuuauuaucauacuuacuauauucggauauauugcuaaaauucucaccgacagaaauaacugcaccaacaaugucauuggauugugcaaacgcaucaaauguucaggcugugaaccguucugcaacaaaaggggugacauuucuucucccagaaccggaguggacauacccgcguuuaucuugcccgggcucaaccuuucagaaagcacuccuaauuagcccucauagauucggagaaaccaaaggaaacucagcucccuugauaauaagggaaccuuuuauugcuuguggaccaaaugaaugcaaacacuuugcucuaacccauuaugcagcccaaccagggggauacuacaauggaacaagaggagacagaaacaagcugaggcaucuaauuucagucaaauugggcaaaaucccaacaguagaaaacuccauuuuccacauggcagcauggagcggguccgcgugccaugaugguaaggaauggacauauaucggaguugauggcccugacaaugaugcauugcucaaaguaaaauauggagaagcauauacugacacauaccauuccuaugcaaacaaaauccuaagaacacaagaaagugccugcaauugcaucgggggaaauuguuaucuuaugauaacugauggcucagcuucagguguuagugaaugcagauuucuuaagauucgagagggccgaauaauaaaagaaauauuuccaacaggaagaguaaaacacacugaggaaugcacaugcggauuugccagcaauaaaaccauagaaugugccuguagagauaacaguuacacagcaaaaagaccuuuugucaaauuaaacguggagacugauacagcagaaauaagauugaugugcacagauacuuauuuggacacccccagaccagaugauggaagcauaacaggcccuugugaaucuaauggggacaaagggaguggaggcaucaagggaggauuuguucaucaaagaauggaauccaagauuggaaggugguacucucgaacgaugucuaagacugaaaggauggggaugggacuguaugucaaguaugauggagacccaugggcugacagugaugcccuagcuuuuaguggaguaaugguuucaaugaaagaaccugguugguacuccuuuggcuucgagauaaaagauaagaaaugcgauguccccuguauugggauagagaugguacaugaugguggaaaagagacuuggcacucagcagcaacagccauuuacuguuugaugggcucaggacagcugcuaugggacacugucacaggcguugacauggcucuguaa

SEQ ID NO: 61492 - RNA, 1401 nt, Artificial Sequence; identical to SEQ ID NO: 60926
  derived and/or modified CDS sequence (wt) from neuraminidase__InfluenzaB__AGX20199

SEQ ID NO: 61493 - RNA, 1401 nt, Artificial Sequence; identical to SEQ ID NO: 61125
  derived and/or modified CDS sequence (wt) from neuraminidase__InfluenzaB__AGX20210

SEQ ID NO: 61494 - RNA, 1401 nt, Artificial Sequence; identical to SEQ ID NO: 61487
  derived and/or modified CDS sequence (wt) from neuraminidase__InfluenzaB__AGX20221

SEQ ID NO: 61495 - RNA, 1401 nt, Artificial Sequence
  derived and/or modified CDS sequence (wt) from neuraminidase__InfluenzaB__AGX20232
augcuaccuucaacuauacaaacguuaacccuauuucucacaucagggggaguauuauuaucacuauaugugucagcuucauuaucauacuuacuauauucggguauauugcuaaaauucucaccaacagaaauaacugcaccaacaaugccauuggauugugcaaacgcaucaaauguucaggcugugaaccguucugcaacaaaaggggugacauuucuucucccagaaccggaguggacauacccgcguuuaucuugcccgggcucaaccuuucagaaagcacuccuaauuagcccucauagauucggagaaaccaaaggaaacucagcucccuugauaauaagggaaccuuuuauugcuuguggaccaaaugaaugcaaacacuuugcucuaacccauuaugcagcccaaccagggggauacuacaauggaacaagaggagacagaaacaagcugaggcaucuaauuucagucaaauugggcaaaaucccaacaguagaaaacuccauuuuccacauggcagcauggagcggguccgcgugccaugaugguaaggaauggacauauaucggaguugauggcccugacaauaaugcauugcucaaaguaaaauauggagaagcauauacugacacauaccauuccuaugcaaacaaaauccuaagaacacaagaaagugccugcaauugcaucgggggaaauuguuaucuuaugauaacugauggcucagcuucagguguuagugaaugcagauuucuuaagauucgagagggccgaauaauaaaagaaauauuuccaacaggaagaguaaaacacacugaggaaugcacaugcggauuugccagcaaugaaaccauagaaugugccuguagagauaacaguuacacagcaaaaagaccuuuugucaaauuaaacguggagacugauacagcagaaauaagauugaugugcacagauacuuauuuggacacccccagaccaaacgauggaagcauaacaggcccuugugaaucuaauggggacaaaggggguggaggcaucaagggaggauuuguucaucaaagaauggaauccaagauuggaaggugguacucucgaacgaugucuaaaacugaaaggauggggaugggacuguaugucaaguaugauggagacccaugggcugacagugaugcccuagcuuuuaguggaguaaugguuucaaugaaagaaccugguugguacuccuuuggcuucgaaauaaaagauaagaaaugcgauguccccuguauugggauagagaugguacaugaugguggaaaagagacuuggcacucagcagcaacagccauuuacuguuuaaugggcucaggacagcugcugugggacacugucacagguguugacauggcucuguaa

SEQ ID NO: 61496 - RNA, 1401 nt, Artificial Sequence
  derived and/or modified CDS sequence (wt) from neuraminidase__InfluenzaB__AGX20243
augcuaccuucaacuauacaaacguuaacccuauuucucacaucagggggaguauuauuaucacuauaugugucagcuuuauuaucauacuuacuauauucggauauauugcuaaaauucucaccaacagaaauaacugcaccaacaaugucauuggauugugcaaacgcaucaaauguucaggcugugaaccguucugcaacaaaaggggugacauuucuucucccagaaccggaguggacauacccgcguuuaucuugcccgggcucaaccuuucagaaagcacuccuaauuagcccucauagauucggagaaaccaaaggaaacucagcucccuugauaauaagggaaccuuuuauugcuuguggaccaaaugaaugcaaacacuuugcucuaacccauuaugcagcccaaccagggggauacuacaauggaacaagaggagacagaaacaagcugaggcaucuaauuucagucaaauugggcaaaaucccaacaguagaaaacuccauuuuccacauggcagcauggagcggguccgcgugccaugaugguaaggaauggacauauaucggaguugauggcccugacaaugaugcauugcucaaaguaaaauauggagaagcauauacugacacauaccauuccuaugcaaacaaaauccuaagaacacaagaaagugccugcaauugcaucgggggaaauuguuaucuuaugauaacugauggcucagcuucagguguuagugaaugcagauuucuuaagauucgagaggggcgaauaauaaaagaaauauuuccaacaggaagaguaaaacacacugaggaaugcacaugcggauuugccagcaauaaaaccauagaaugugccuguagagauaacaguuacacagcaaaaagaccuuuugucaaauuaaacguggagacugauacagcagaaauaagauugaugugcacagauacuuauuuggacacccccagaccagaugauggaagcauaacaggcccuugugaaucuaauggggacaaagggaguggaggcaucaagggaggauuuguucaucaaagaauggaauccaagauuggaaggugguacucucgaacgaugucuaagacugaaaggauggggaugggacuguaugucaaguaugauggagacccaugggcugacagugaugcccuagcuuuuaguggaguaaugguuucaaugaaagaaccugguugguacuccuuuggcuucgaaauaaaagauaagaaaugcgauguccccuguauugggauagagaugguacaugaugguggaaaagagacuuggcacucagcagcaacagccauuuacuguuugaugggcucaggacagcugcugugggacacugucacaggcguugacauggcucuguaa

SEQ ID NO: 61497 - RNA, 1401 nt, Artificial Sequence; identical to SEQ ID NO: 61487
  derived and/or modified CDS sequence (wt) from neuraminidase__InfluenzaB__AGX20254

SEQ ID NO: 61498 - RNA, 1401 nt, Artificial Sequence; identical to SEQ ID NO: 60884
  derived and/or modified CDS sequence (wt) from neuraminidase__InfluenzaB__AGX20265

SEQ ID NO: 61499 - RNA, 1401 nt, Artificial Sequence; identical to SEQ ID NO: 61487
  derived and/or modified CDS sequence (wt) from neuraminidase__InfluenzaB__AGX20276

SEQ ID NO: 61500 - RNA, 1401 nt, Artificial Sequence; identical to SEQ ID NO: 61125
  derived and/or modified CDS sequence (wt) from neuraminidase__InfluenzaB__AGX20287

SEQ ID NO: 61501 - RNA, 1401 nt, Artificial Sequence
  derived and/or modified CDS sequence (wt) from neuraminidase__InfluenzaB__AGX20298
augcuaccuucaacuauacaaacguuaacccuauuucucacaucagggggaguauuauuaucacuauaugugucagcuuuauuaucauacuuacuauauucggauauauugcuaaaauucucaccaacagaaauaacugcaccaacaaugucauuggauugugcaaacgcaucaaauguucaggcugugaaccguucugcaacaaaaggggugacauuucuucucccagaaccggaguggacauacccgcguuuaucuugcccgggcucaaccuuucagaaagcacuccuaauuagcccucauagauucggagaaaccaaaggaaacucagcucccuugauaauaagggaaccuuuuauugcuuguggaccaaaugaaugcaaacacuuugcucuaacccauuaugcagcccaaccagggggauacuacaauggaacaagaggagacagaaacaagcugaggcaucuaauuucagucaaauugggcaaaaucccaacaguagaaaacuccauuuuccacauggcagcauggagcggguccgcgugccaugaugguaaggaauggacauauaucggaguugauggcccugacaaugaugcauugcucaaaguaaaauauggagaagcauauacugacacauaccauuccuaugcaaacaaaauccuaagaacacaagaaagugccugcaauugcaucgggggaaauuguuaucuuaugauaacugauggcucagcuucagguguuagugaaugcagauuucuuaagauucgagagggccgaauaauaaaagaaauauuuccaacaggaagaguaaaacacacugaggaaugcacaugcggauuugccagcaauaaaaccauagaaugugccuguagagauaacaguuacacagcaaaaagaccuuuugucaaauuaaacguggagacugauacagcagaaauaagauugaugugcacagauacuuauuuggacacccccagaccagaugauggaagcauaacaggcccuugugaaucuaauggagacaaagggaguggaggcaucaagggaggauuuguucaucaaagaauggaauccaagauuggaaggugguacucucgaacgaugucuaagacugaaaggauggggaugggacuguaugucaaguaugauggagacccaugggcugacagugaugcccuagcuuuuaguggaguaaugguuucaaugaaagaaccugguugguacuccuuuggcuucgaaauaaaagauaagaaaugcgauguccccuguauugggauagagaugguacaugaugguggaaaagagacuuggcaaucagcagcaacagccauuuacuguuugaugggcucaggacagcugcugugggacacugucacaggcguugacauggcucuguaa

SEQ ID NO: 61502 - RNA, 1401 nt, Artificial Sequence
  derived and/or modified CDS sequence (wt) from neuraminidase__InfluenzaB__AGX20320
augcuaccuucaacuauacaaacguuaacccuauuucucacaucagggggaguauuauuaucacuauaugugucagcuuuauuaucauacuuacuauauucggauauauugcuaaaauucucaccaacagaaauaauugcaccaacaaugucauuggauugugcaaacgcaucaaauguucaggcugugaaccguucugcaacaaaaggggugacauuucuucucccagaaccggaguggacauacccgcguuuaucuugcccgggcucaaccuuucagaaagcacuccuaauuagcccucauagauucggagaaaccaaaggaaacucagcucccuugauaauaagggaaccuuuuauugcuuguggaccaaaugaaugcaaacacuuugcucuaacccauuaugcagcccaaccagggggauacuacaauggaacaagaggagacagaaacaagcugaggcaucuaauuucagucaaauuggguaaaaucccaacaguagaaaacuccauuuuccacauggcagcauggagcggguccgcgugccaugaugguaaggaauggacauauaucggaguugauggcccugacaaugaugcauugcucaaaguaaaauauggagaagcauauacugacacauaccauuccuaugcaaacaaaauacuaagaacacaagaaagugccugcaauugcaucgggggaaauuguuaucuuaugauaacugauggcucagcuucagguguuagugaaugcagauuucuuaagauucgagagggccgaauaauaaaagaaauauuuccaacaggaagaguaaaacacacugaggaaugcacaugcggauuugccagcaauaaaaccauagaaugugccuguagagauaacaguuacacagcaaaaagaccuuuugucaaauuaaacguggagacugauacagcagaaauaagauugaugugcacagauacuuauuuggacacccccagaccagaugauggaagcauaacaggcccuugugaaucuaauggggacaaagggaguggaggcaucaagggaggauuuguucaucaaagaauggaauccaagauuggaaggugguacucucgaacgaugucuaagacugaaaggauggggaugggacuguaugucaaguauaauggagacccaugggcugacagugaugcccuagcuuuuaguggaguaaugguuucaaugaaagaaccugguugguacuccuuuggcuucgaaauaaaagauaagaaaugcgauguccccuguauugggauagagaugguacaugaugguggaaaagagacuuggcacucagcagcaacagccauuuacuguuuaaugggcucaggacagcugcugugggacacugucacaggcguugacauggcucuguaa

SEQ ID NO: 61503 - RNA, 1401 nt, Artificial Sequence; identical to SEQ ID NO: 61125
  derived and/or modified CDS sequence (wt) from neuraminidase__InfluenzaB__AGX20331

SEQ ID NO: 61504 - RNA, 1401 nt, Artificial Sequence
  derived and/or modified CDS sequence (wt) from neuraminidase__InfluenzaB__AGX20342
augcuaccuucaacuauacaaacguuaacccuauuucucacaucagggggaguauuauuaucacuauaugugucagcuucauuaucauacuuacuauauucggauauauugcuaaaauucucaccaacagaaauaacugcaccaacaaugccauuggauugugcaaacgcaucaaauguucaggcugugaaccguucugcaacaaaaggggugacacuucuucucccagaaccggaguggacauacccgcguuuaucuugcccgggcucaaccuuucagaaagcacuccuaauuagcccucauagauucggagaaaccaaaggaaacucagcucccuugauaauaagggaaccuuuuauugcuuguggaccaaaugaaugcaaacacuuugcucuaacccauuaugcagcccaaccagggggauacuacaauggaacaagaggagacagaaacaagcugaggcaucuaauuucagucaaauugggcaaaaucccaacaguagaaaacuccauuuuccacauggcagcauggagcggguccgcgugccaugaugguaaggaauggacauauaucggaguugauggcccugacaauaaugcauugcucaaaguaaaauauggagaagcauauacugacacauaccauuccuaugcaaacaaaauccuaagaacacaagaaagugccugcaauugcaucgggggaaauuguuaucuuaugguaacugauggcucagcuucagguguuagugaaugcagauuucuuaagauucgagagggccgaauaauaaaagaaauauuuccaacaggaagaguaaaacacacugaggaaugcacaugcggauuugcuagcaauaaaaccauagaaugugccuguagagauaacaguuacaccgcaaaaagaccuuuugucaaauuaaacguggagacugauacagcagaaauaagauugaugugcacagauacuuauuuggacacccccagaccagaugauggaagcauaacaggcccuugugaaucuaauggggacaaagggaguggaggcaucaagggaggauuuguucaucaaagaauggaauccaagauuggaaggugguacucucgaacgaugucuaaaacugaaaggaugggaaugggacuguaugucaaguaugauggagacccaugggcugacagugaugcccuagcuuuuaguggaguaaugguuucaaugaaagaaccugguugguacuccuuuggcuucgaaauaaaagauaagaaaugcgauguccccuguauugggauagagaugguacaugaugguggaaaagagacuuggcacucagcagcaacagccauuuacuguuuaaugggcucaggacagcugcugugggacacugucacagguguugacauggcucuguaa

SEQ ID NO: 61505 - RNA, 1401 nt, Artificial Sequence
  derived and/or modified CDS sequence (wt) from neuraminidase__InfluenzaB__AGX20353
augcuaccuucaacuauacaaacguuaacccuauuucucacaucagggggaguauuauuaucacuauaugugucagcuuuauuaucauacuuacuauauucggauauauugcuaaaauucucaccaacagaaauaauugcaccaacaaugucauuggauugugcaaacgcaucaaauguucaggcugugaaccguucugcaacaaaaggggugacauuucuucucccagaaccggaguggacauacccgcguuuaucuugcccgggcucaaccuuucagaaagcacuccuaauuagcccucauagauucggagaaaccaaaggaaacucagcucccuugauaauaagggaaccuuuuauugcuuguggaccaaaugaaugcaaacacuuugcucuaacccauuaugcagcucaaccagggggauacuacaauagaacaagaggagacagaaacaagcugaggcaucuaauuucagucaaauugggcaaaaucccaacaguagaaaacuccauuuuccacauggcagcauggagcggguccgcgugccaugaugguaaggaauggacauauaucggaguugauggcccugacaaugaugcauugcucaaaguaaaauauggagaagcauauacugacacauaccauuccuaugcaaacaaaauccuaagaacacaagaaagugccugcaauugcaucgggggaaauuguuaucuuaugauaacugauggcucagcuucagguauuagugaaugcagauuucuuaagauucgagagggccgaauaauaaaagaaauauuuccaacaggaagaguaaaacacacugaggaaugcacaugcggauuugccagcaauaaaaccauagaaugugccuguagagauaacaguuacacagcaaaaagaccuuuugucaaauuaaacguggagacugauacagcagaaauaagauugaugugcacagauacuuauuuggacacccccagaccagaugauggaagcauaacaggcccuugugaaucuaauggggacaaagggaguggaggcaucaaaggaggauuuguucaucaaagaauggaauccaagauuggaaggugguacucucgaacgaugucuaagacugaaaggauggggaugggacuguaugucaaguaugauggagacccaugggcugacagugaugcccuagcuuuuaguggaguaaugguuucaaugaaagaaccugguugguacuccuuuggcuucgaaauaaaagauaagaaaugcgauguccccuguauugggauagagaugguacaugaugguggaaaagagacuuggcacucagcagcaacagccauuuacuguuuaaugggcucaggacagcugcugugggacacugucacaggcguugacauggcucuguaa

SEQ ID NO: 61506 - RNA, 1401 nt, Artificial Sequence; identical to SEQ ID NO: 61125
  derived and/or modified CDS sequence (wt) from neuraminidase__InfluenzaB__AGX20364

SEQ ID NO: 61507 - RNA, 1401 nt, Artificial Sequence; identical to SEQ ID NO: 60902
  derived and/or modified CDS sequence (wt) from neuraminidase__InfluenzaB__AGX20375

SEQ ID NO: 61508 - RNA, 1401 nt, Artificial Sequence
  derived and/or modified CDS sequence (wt) from neuraminidase__InfluenzaB__AGX20386
augcuaccuucaacuauacaaacguuaacccuauuucucacaucagggggaguauuauuaucacuauaugugucagcuuuauuaucauacuuacuauauucggauauauugcuaaaauucucaccaacagaaauaacugcaccaacaaugucauuggauugugcaaacgcaucaaauguucaggcugugaaccguucugcaacaaaaggggugacauuucuucucccagaaccggaguggacacacccgcguuuaucuugcccgggcucaaccuuucagaaagcacuccuaauuagcccucauagauucggagaaaccaaaggaaacucagcucccuugauaauaagggaaccuuuuauugcuuguggaccaaaugaaugcaaacacuuugcucuaacccauuaugcagcccaaccagggggauacuacaauggaacaagaggagacagaaacaagcugaggcaucuaauuucagucaaauugggcaaaaucccaacaguagaaaacuccauuuuccacauggcagcauggagcggguccgcgugccaugaugguaaggaauggacauauaucggaguugauggcccugacaaugaugcauugcucaaaguaaaauauggagaagcauauacugacacauaccauuccuaugcaaacaaaauccuaagaacacaagaaagugccugcaauugcaucgggggaaauuguuaucuuaugauaacugauggcucagcuucagguauuagugaaugcagauuucuuaagauucgagagggccgaauaauaaaagaaauauuuccaacaggaagaguaaaacacacugaggaaugcacaugcggauuugccagcaauaaaaccauagaaugugccuguagagauaacaguuacacagcaaaaagaccuuuugucaaauuaaacguggagacugauacagcagaaauaagauugaugugcacagauacuuauuuggacacccccagaccagaugauggaagcauaacaggcccuugugaaucuaauggggacaaagggaguggaggcaucaaaggaggauuuguucaucaaagaauggaauccaagauuggaaggugguacucucgaacgaugucuaagacugaaaggauggggaugggacuguaugucaaguaugauggagacccaugggcugacagugaugcccuagcuuuuaguggaguaaugguuucaaugaaagaaccugguugguacuccuuuggcuucgaaauaaaagauaagaaaugcgauguccccuguauugggauagagaugguacaugaugguggaaaagagacuuggcacucagcagcaacagccauuuacuguuuaaugggcucaggacagcugcugugggacacugucacaggcguugacauggcucuguaa

SEQ ID NO: 61509 - RNA, 1401 nt, Artificial Sequence; identical to SEQ ID NO: 61125
  derived and/or modified CDS sequence (wt) from neuraminidase__InfluenzaB__AGX20397

SEQ ID NO: 61510 - RNA, 1401 nt, Artificial Sequence; identical to SEQ ID NO: 60902
  derived and/or modified CDS sequence (wt) from neuraminidase__InfluenzaB__AGX20408

SEQ ID NO: 61511 - RNA, 1401 nt, Artificial Sequence; identical to SEQ ID NO: 60884
  derived and/or modified CDS sequence (wt) from neuraminidase__InfluenzaB__AGX20419

SEQ ID NO: 61512 - RNA, 1401 nt, Artificial Sequence
  derived and/or modified CDS sequence (wt) from neuraminidase__InfluenzaB__AGX20430
augcuaccuucaacuauacaaacguuaacccuauuucucacaucagggggaguauuauuaucacuauaugugucagcuuuauuaucauacuuacuauauucggauauauugcuaaaauucucaccaacagaaauaacugcaccaacaaugucauuggauugugcaaacgcaucaaauguucaggcugugaaccguucugcaacaaaaggggugacauuucuucucccagaaccggaguggacauacccgcguuuaucuugcccgggcucaaccuuucagagagcacuccuaauuagcccucauagauucggagaagccaaaggaaacucagcucccuuaauaauaagggaaccuuuuauugcuuguggaccaaaugaaugcaaacacuuugcucuaacccauuaugcagcccaaccagggggauacuacaauggaacaagaggagacagaaacaagcugaggcaucuaauuucagucaaauugggcaaaaucccaacaguagaaaacuccauuuuccacauggcagcauggagcggguccgcuugccaugaugguaaggaauggacauauaucggaguugauggcccugacaaugaugcauugcucaaaguaaaauauggagaagcauauacugacacauaccauuccuaugcaaacaaaauccuaagaacacaagaaagugccugcaauugcaucgggggaaauuguuaucuuaugauaacugauggcucagcuucagguguuagugaaugcagauuucuuaagauucgagagggccgaauaauaaaagaaauauuuccaacaggaagaguaaaacacacugaggaaugcacaugcggauuugccagcaauaaaaccauagaaugugccuguagagauaacaguuacacagcaaaaagaccuuuugucaaauuaaacguggagacugauacagcagaaauaagauugaugugcacagauacuuauuuggacacccccagaccagaugauggaagcauaacaggcccuugugaaucuaauggggacaaagggaguggaggcaucaagggaggauuuguucaucaaagaauggaauccaagauuggaaggugguacucucgaacgaugucuaagacugaaaggauggggaugggacuguaugucaaguaugauggagacccaugggcugacagugaugcccuagcuuuuaguggaguaaugguuucaaugaaagaaccugguugguacucuuuuggcuucgaaauaaaagauaagaaaugcgauguccccuguauugggauagagaugguacaugaugguggaaaagagacuuggcacucagcagcaacagccauuuacuguuuaaugggcucaggacagcugcugugggacacugucacaggcguugacauggcucuguaa

SEQ ID NO: 61513 - RNA, 1401 nt, Artificial Sequence; identical to SEQ ID NO: 60884
  derived and/or modified CDS sequence (wt) from neuraminidase__InfluenzaB__AGX20441

SEQ ID NO: 61514 - RNA, 1401 nt, Artificial Sequence
  derived and/or modified CDS sequence (wt) from neuraminidase__InfluenzaB__AGX20452
augcuaccuucaacuauacaaacguuaacccuauuucucacaucagggggaguauuauuaucacuauaugugucagcuucauuaucauacuuacuauauucggauauauugcuaaaauucucaccaacagaaauaacugcaccaacaaugucauuggauugugcaaacgcaucaaauguucaggcugugaaccguucugcaacaaaaggggugacauuucuucucccagaaccggaguggacauacccgcguuuaucuugcccgggcucaaccuuucagaaagcacuccuaauuagcccucauagauucggagaaaccaaaggaaacucagcucccuugauaauaagggaaccuuuuauugcuuguggaccaaaugaaugcaaacacuuugcucuaacccauuaugcagcccaaccagggggauacuacaauggaacaagaggagacagaaacaagcugaggcaucuaauuucagucaaauugggcaaaaucccaacaguagaaaacuccauuuuccacauggcagcauggagcggguccgcgugccaugaugguaaggaauggacauauaucggaguugauggcccugacaaugaugcauugcucaaaguaaaauauggagaagcauauacugacacauaccauuccuaugcaaacaaaauccuaagaacacaagaaagugccugcaauugcaucgggggaaauuguuaucuuaugauaacugauggcucagcuucagguguuagugaaugcagauuucuuaagauucgagagggccgaauaauaaaagaaauauuuccaacaggaagaguaaaacacacugaggaaugcacaugcggauuugccagcaauaaaaccauagaaugugccuguagagauaacaguuacacagcaaaaagaccuuuugucaaauuaaacguggagacugauacagcagaaauaagauugaugugcacagauacuuauuuggacacccccagaccagaugauggaagcauaacaggcccuugugaaucuaauggggacaaagggaguggaggcaucaagggaggauuuguucaucaaagaauggaauccaagauuggaaggugguacucucgaacgaugucuaagacugaaaggauggggaugggacuguaugucaaguaugauggagacccaugggcugacagugaugcccuagcuuuuaguggaguaaugguuucaaugaaagaaccugguugguauuccuuuggcuucgaaauaagagauaagaaaugcgauguccccuguauugggauagagaugguacaugaugguggaaaagagacuuggcacucagcagcaacagccauuuacuguuuaaugggcucaggacagcugcugugggacacugucacagguguugacauggcucuguaa

SEQ ID NO: 61515 - RNA, 1401 nt, Artificial Sequence
  derived and/or modified CDS sequence (wt) from neuraminidase__InfluenzaB__AGX20463
augcuaccuucaacuauacaaacguuaacccuauuucucacaucagggggaguauuauuaucacuauaugugucagcuuuauuaucauacuuacuauauucggauauauugcuaaaauucucaccaacagaaauaacugcaccaacaaugucauuggauugugcaaacgcaucaaauguucaggcugugaaccguucugcaacaaaaggggugacauuucuucucccagaaccggaguggacauacccgcguuuaucuugcccgggcucaaccuuucagaaagcacuccuaauuagcccucauagauucggagaaaccaaaggaaacucagcucccuugauaauaagggaaccuuuuauugcuuguggaccaaaugaaugcaaacacuuugcucuaacccauuaugcagcccaaccagggggauacuacaauggaacaagaggagacagaaacaagcugaggcaucuaauuucagucaaauugggcaaaaucccaacaguagaaaacuccauuuuccacauggcagcauggagcggguccgcgugccaugaugguaaggaauggacauauaucggaguugauggcccugacaaugaugcauugcucaaaguaaaauauggagaagcauauacugacacauaccauuccuaugcaaacaaaauccuaagaacacaagaaagugccugcaauugcaucgggggaaauuguuaucuuaugauaacugauggcucagcuucagguguuagugaaugcagauuucuuaagauucgagagggccgaauaauaaaagaaauauuuccaacaggaagaguaaaacacacugaggaaugcacaugcggauuugccagcaauaaaaccauagaaugugccuguagagauaacaguuacacagcaaaaagaccuuuugucaaauuaaacguggagacugauacagcagaaauaagauugaugugcacagauacuuauuuggacacccccagaccagaugauggaagcauaacaggcccuugugaaucuaauggagacaaagggaguggaggcaucaagggaggauuuguucaucaaagaauggaauccaagauuggaaggugguacucucgaacgaugucuaagacugaaaggauggggaugggacuguaugucaaguaugauggagacccaugggcugacagugaugcccuagcuuuuaguggaguaaugguuucaaugaaagaaccugguugguacuccuuuggcuucgaaauaaaagauaagaaaugcgauguccccuguauugggauagagaugguacaugaugguggaaaagagacuuggcacucagcagcaacagccauuuacuguuugaugggcucaggacagcugcugugggacacugucacaggcguugacauggcucuguaa

SEQ ID NO: 61516 - RNA, 1401 nt, Artificial Sequence; identical to SEQ ID NO: 61125
  derived and/or modified CDS sequence (wt) from neuraminidase__InfluenzaB__AGX20474

SEQ ID NO: 61517 - RNA, 1401 nt, Artificial Sequence; identical to SEQ ID NO: 61125
  derived and/or modified CDS sequence (wt) from neuraminidase__InfluenzaB__AGX20485

SEQ ID NO: 61518 - RNA, 1401 nt, Artificial Sequence
  derived and/or modified CDS sequence (wt) from neuraminidase__InfluenzaB__AGX20496
augcuaccuucaacuauacaaacguuaacccuauuucucacaucagggggaguauuauuaucacuauaugugucagcuuuauuaucauacuuacuauauucggauauauugcuaaaauucucaccaacagaaauaacugcaccaacaaugucauuggauugugcaaacgcaucaaauguucaggcugugaaccguucugcaacaaaaggggugacauuucuucucccagaaccggaguggacauacccgcguuuaucuugcccgggcucaaccuuucagaaagcacuccuaauuagcccucauagauucggagaaaccaaaggaaacucagcucccuugauaauaagggaaccuuuuauugcuuguggaccaaaugaaugcaaacacuuugcucuaacccauuaugcagcccaaccagggggauacuacaauggaacaagaggagacagaaacaagcugaggcaucuaauuucagucaaauugggcaaaaucccaacaguagaaaacuccauuuuccacauggcagcauggagcggguccgcgugccaugaugguaaggaauggacauauaucggaguugauggcccugacaaugaugcauugcucaaaguaaaauauggagaagcauauacugacacauaccauuccuaugcaaacaaaauccuaagaacacaagaaagugccugcaauugcaucgggggaaauuguuaucuuaugauaacugauggcucagcuucagguauuagugaaugcagauuucuuaagauucgagagggccgaauaauaaaagaaauauuuccaacaggaagaguaaaacacacugaggaaugcacaugcggauuugccagcaauaaaaccauagaaugugccuguagagauaacaguuacacagcaaaaagaccuuuugucaaauuaaacguggagacugauacagcagaaauaagauugaugugcacagauacuuauuuagacacccccagaccagaugauggaagcauaacaggcccuugugaaucuaauggggacaaagggaguggaggcaucaaaggaggauuuguucaucaaagaauggaauccaagauuggaaggugguacucucgaacgaugucuaagacugaaaggauggggaugggacuguaugucaaguaugauggagacccaugggcugacagugaugcccuagcuuuuaguggaguaaugguuucaaugaaagaaccugguugguacuccuuuggcuucgaaauaaaagauaagaaaugcgauguccccuguauugggauagagaugguacaugaugguggaaaagagacuuggcacucagcagcaacagccauuuacuguuuaaugggcucaggacagcugcugugggacacugucacaggcguugacauggcucuguaa

SEQ ID NO: 61519 - RNA, 1401 nt, Artificial Sequence; identical to SEQ ID NO: 61125
  derived and/or modified CDS sequence (wt) from neuraminidase__InfluenzaB__AGX20507

SEQ ID NO: 61520 - RNA, 1401 nt, Artificial Sequence; identical to SEQ ID NO: 61515
  derived and/or modified CDS sequence (wt) from neuraminidase__InfluenzaB__AGX20518

SEQ ID NO: 61521 - RNA, 1401 nt, Artificial Sequence
  derived and/or modified CDS sequence (wt) from neuraminidase__InfluenzaB__AGX20529
augcuaccuucaacuauacaaacguuaacccuauuucucacaucagggggaguauuauuaucacuauaugugucagcuuuauuaucauacuuacuauauucggauauauugcuaaaauucucaccaacagaaauaacugcaccaacaaugucauuggauugugcaaacgcaucaaauguucaggcugugaaccguucugcaacaaaaggggugacauuucuucucccagaaccggaguggacauacccgcguuuaucuugcccgggcucaaccuuucagaaagcacuccuaauuagcccucauagauucggagaaaccaaaggaaacucagcucccuugauaauaagggaaccuuuuauugcuuguggaccaaaugaaugcaaacacuuugcucuaacccauuaugcagcccaaccagggggauacuacaauggaacaagaggagacagaaacaagcugaggcaucuaauuucagucaaauugggcaaaaucccaacaguagaaaacuccauuuuccacauggcagcauggagcggguccgcgugccaugaugguaaggaauggacauauaucggaguugacggcccugacaaugaugcauugcucaaaguaaaauauggagaagcauauacugacacauaccauuccuaugcaaacaaaauccuaagaacacaagaaagugccugcaauugcaucgggggaaauuguuaucuuaugauaacugauggcucagcuucagguguuagugaaugcagauuucuuaagauucgagagggccgaauaauaaaagaaauauuuccaacaggaagaguaaaacacacugaggaaugcacaugcggauuugccagcaauaaaaccauagaauguaccuguagagauaacaguuacacagcaaaaagaccuuuugucaaauuaaacguggagacugauacagcagaaauaagauugaugugcacagauacuuauuuggacacccccagaccagaugauggaagcauaacaggcccuugugaaucuaauggggacaaagggaguggaggcaucaagggaggauuuguucaucaaagaauggaauccaagauuggaaggugguacucucgaacgaugucuaagacugaaaggauggggaugggacuguaugucaaguaugauggagacccaugggcugacagugaugcccuagcuuuuaguggaguaaugguuucaaugaaagaaccugguugguacuccuuuggcuucgaaauaaaagauaagaaaugcgauguccccuguauugggauagagaugguacaugaugguggaaaagagacuuggcacucagcagcaacagccauuuacuguuugaugggcucaggacagcugcugugggacacugucacaggcguugacauggcucuguaa

SEQ ID NO: 61522 - RNA, 1401 nt, Artificial Sequence
  derived and/or modified CDS sequence (wt) from neuraminidase__InfluenzaB__AGX20540
augcuaccuucaacuauacaaacguuaacccuauuucucacaucagggggaguauuauuaucacuauaugugucagcuuuauuaucauacuuacuauauucggauauauugcuaaaauucucaccaacagaaauaacugcaccaacaaugucauuggauugugcaaacgcaucaaauguucaggcugugaaccguucugcaacaaaaggggugacauuucuucucccagaaccggaguggacauacccgcguuuaucuugcccgggcucaaccuuucagagagcacuccuaauuagcccucauagauucggagaaaccaaaggaaacucagcucccuugauaauaagggaaccuuuuauugcuuguggaccaaaugaaugcaaacacuuugcucuaacccauuaugcagcccaaccagggggauacuacaauggaacaagaggagacagaaacaagcugaggcaucuaauuucagucaaauugggcaaaaucccaacaguagaaaacuccauuuuccacauggcagcauggaguggguccgcuugccaugaugguaaggaauggacauauaucggaguugauggcccugacaaugaugcauugcucaaaguaaaauauggagaagcauauacugacacauaccauuccuaugcaaacaaaauccuaagaacacaagaaagugccugcaauugcaucgggggaaauuguuaucuuaugauaacugauggcucagcuucagguguuagugaaugcagauuucuuaagauucgagagggccgaauaauaaaagaaauauuuccaacaggaagaguaaaacacacugaggaaugcacaugcggauuugccagcaauaaaaccauagaaugugccuguagagauaacaguuacacagcaaaaagaccuuuugucaaauuaaacguggagacugauacagcagaaauaagauugaugugcacagauacuuauuuggacacccccagaccagaugauggaagcauaacaggcccuugugaaucuaauggggacaaagggaguggaggcaucaagggaggauuuguucaucaaagaauggaauccaagauuggaaggugguacucucgaacgaugucuaagacugaaaggauggggaugggacuguaugucaaguaugauggagacccaugggcugacagugaugcccuagcuuuuaguggaguaaugguuucaaugaaagaaccugguugguacucuuuuggcuucgaaauaaaagauaagaaaugugauguccccuguauugggauagagaugguacaugaugguggaaaagagacuuggcacucagcagcaacagccauuuacuguuuaaugggcucaggacagcugcugugggacacugucacaggcguugacauggcucuguaa

SEQ ID NO: 61523 - RNA, 1401 nt, Artificial Sequence; identical to SEQ ID NO: 61131
  derived and/or modified CDS sequence (wt) from neuraminidase__InfluenzaB__AGX20551

SEQ ID NO: 61524 - RNA, 1401 nt, Artificial Sequence; identical to SEQ ID NO: 60926
  derived and/or modified CDS sequence (wt) from neuraminidase__InfluenzaB__AGX20562

SEQ ID NO: 61525 - RNA, 1401 nt, Artificial Sequence; identical to SEQ ID NO: 61125
  derived and/or modified CDS sequence (wt) from neuraminidase__InfluenzaB__AGX20573

SEQ ID NO: 61526 - RNA, 1401 nt, Artificial Sequence
  derived and/or modified CDS sequence (wt) from neuraminidase__InfluenzaB__AGX20584
augcuaccuucaacuauacaaacguuaacccuauuucucacaucagggggaguauuauuaucacuauaugugucagcuucauuaucauacuuauuauauucggauauauugcuaaaauucucaucaacagaaauaacugcaccaacaaugccauuggauugugcaaacgcaucaaauguucaggcugugaaccguucugcaacaaaaggggugacacuucuucucccagaaccggaguggacauacccgcguuuaucuugcccgggcucaaccuuucagaaagcacuccuaauuagcccucauagauucggagaaaccaaaggaaacucagcucccuugauaauaagggaaccuuuuauugcuuguggaccaaaugaaugcaaacacuuugcucuaacccauuaugcagcucagccagggggauacuacaauggaacaagaggagacagaaacaagcugaggcaucuaauuucagucaaauugggcaaaaucccaacaguagaaaacuccauuuuccacauggcagcauggagcggguccgcgugccaugaugguaaggaauggacauauaucggaguugauggcccugacaauaaugcauugcucaaaguaaaauauggagaagcauacacugacacauaccauuccuaugcaaacaaaauccuaagaacacaagaaagugccugcaauugcaucggaggaaauuguuaucuuaugauaacugauggcucagcuucagguguuagugaaugcagauuucuuaagauucgagagggccgaauaauaaaagaaauauuuccaacaggaagaguaaaacacacugaggaaugcacaugcggauuugccagcaauaaaaccauagaaugugccuguagagauaacaguuacacagcaaaaagaccuuuugucaaauuaaacguggagacugauacagcagaaauaagauugaugugcacagauacuuauuuggacacccccagaccaaaugauggaagcauaacaggcccuugugaaucuaauggggacaaagggaguggaggcaucaagggaggauuuguucaucaaagaauggaauccaggauuggaaggugguacucucgaacgaugucuaaaacugaaaggauggggaugggacuguaugucaaguaugauggagacccauggacugacagugaugcccuaacuuuuaguggaguaaugguuucaaugaaagaaccugguugguacuccuuuggcuucgaaauaaaagauaagaaaugcgauguccccuguauugggauagagauggugcaugaugguggaaaagagacuuggcauucagcugcaacagccauuuacuguuuaaugggcucaggacagcugcugugggacacugucacagguguugacauggcucuguaa

SEQ ID NO: 61527 - RNA, 1401 nt, Artificial Sequence
  derived and/or modified CDS sequence (wt) from neuraminidase__InfluenzaB__AGX20595
augcuaccuucaacuauacaaacguuaacccuauuucucacaucagggggaguauuauuaucacuauaugugucagcuuuauuaucauacuuacuauauucggauauauugcuaaaauucucaccaacagaaauaacugcaccaacaaugucauuggauugugcaaacgcaucaaauguucaggcugugaaccguucugcaacaaaaggggugacauuucuucucccagaaccggaguggacauacccgcguuuaucuugcccgggcucaaccuuucagaaagcacuccuaauuagcccucauagauucggagaaaccaaaggaaacucagcucccuugauaauaagggaaccuuuuauugcuuguggaccaaaugaaugcaaacacuuugcucuaacccauuaugcagcccaaccagggggauacuacaauggaacaagaggagacagaaacaagcugaggcaucuaauuucagucaaauugggcaaaaucccaacaguagaaaacuccauuuuccacauggcagcauggagcggguccgcgugccaugaugguaaggaauggacauauaucggaguugauggcccugacaaugaugcauugcucaaaguaaaauauggagaagcauauacugacacauaccauuccuaugcaaacaaaauccuaagaacacaagaaagugccugcaauugcaucgggggaaauuguuaucuuaugauaacugauggcucagcuucagguguuagugaaugcagauuucuuaagauucgagagggccgaauaauaaaagaaauauuuccaacaggaagaguaaaacacacugaggaaugcacaugcggauuugccagcaauaaaaccauagaaugugccuguagagauaacaguuacacagcaaaaagaccuuuugucaaauuaaacguggagacugauacagcagaaauaagauugaugugcacagauacuuauuuggacacccccagaccagaugauggaagcauaacaggcccuugugaaucuaauggggacaaagggaguggaggcaucaagggaggauuuguucaucaaagaauggaauccaagauuggaaggugguacucucgaacgaugucuaagacugaaaggauggggaugggacuguaugucaaguaugauggagacccaugggcugacagugaugcccuagcuuuuaguggaguaaugguuucaaugaaagagccugguugguacuccuuuggcuucgaaauaaaagauaagaaaugcgauguccccuguauugggauagagaugguacaugaugguggaaaagagacuuggcacucagcagcaacagccauuuacuguuugaugggcucaggacagcugcugugggacacugucacaggcguugacauggcucuguaa

SEQ ID NO: 61528 - RNA, 1401 nt, Artificial Sequence; identical to SEQ ID NO: 61522
  derived and/or modified CDS sequence (wt) from neuraminidase__InfluenzaB__AGX20606

SEQ ID NO: 61529 - RNA, 1401 nt, Artificial Sequence; identical to SEQ ID NO: 61522
  derived and/or modified CDS sequence (wt) from neuraminidase__InfluenzaB__AGX20617

SEQ ID NO: 61530 - RNA, 1401 nt, Artificial Sequence
  derived and/or modified CDS sequence (wt) from neuraminidase__InfluenzaB__AGX20628
augcuaccuucaacuauacaaacguuaacccuauuucucacaucagggggaguauuauuaucacuauaugugucagcuuuauuaucauacuuacuauauucggauauauugcuaaaauucucaccaacagaaauaacugcaccaacaaugucauuggauugugcaaacgcaucaaauguucaggcugugaaccguucugcaacaaaaggagugacauuucuucucccagaaccggaguggacauacccgcguuuaucuugcccgggcucaaccuuucagagagcacuccuaauuagcccucauagauucggagaagccaaaggaaacucagcucccuugauaauaagggaaccuuuuauugcuuguggaccaaaugaaugcaaacacuuugcucuaacccauuaugcagcccaaccagggggauacuacaauggaacaagaggagacagaaacaagcugaggcaucuaauuucagucaaauugggcaaaaucccaacaguagaaaacuccauuuuccacauggcagcauggagcggguccgcuugccaugaugguaaggaauggacauauaucggaguugauggcccugacaaugaugcauugcucaaaguaaaauauggagaagcauauacugacacauaccauuccuaugcaaauaaaauccuaagaacacaagaaagugccugcaauugcaucgggggaaauuguuaucuuaugauaacugauggcucagcuucagguguuagugaaugcagauuucuuaagauucgagagggccgaauaauaaaagaaauauuuccaacaggaagaguaaaacacacugaggaaugcacaugcggauuugccagcaauaaaaccauagaaugugccuguagagauaacaguuacacagcaaaaagaccuuuugucaaauuaaacguggagacugauacagcagaaauaagauugaugugcacagauacuuauuuggacacccccagaccagaugauggaagcauaacaggcccuugugaaucuaauggggacaaagggaguggaggcaucaagggaggauuuguucaucaaagaauggaauccaagauuggaaggugguacucucgaacgaugucuaagacugaaaggauggggaugggacuguaugucaaguaugauggagacccaugggcugacagugaugcccuagcuuuuaguggaguaaugguuucaaugaaagaaccugguugguacucuuuuggcuucgaaauaaaagauaagaaaugcgauguccccuguauugggauagagaugguacaugaugguggaaaagagacuuggcacucagcagcaacagccauuuacuguuuaaugggcucaggacagcugcugugggacacugucacaggcguugacauggcucuguaa

SEQ ID NO: 61531 - RNA, 1401 nt, Artificial Sequence; identical to SEQ ID NO: 60927
  derived and/or modified CDS sequence (wt) from neuraminidase__InfluenzaB__AGX20639

SEQ ID NO: 61532 - RNA, 1401 nt, Artificial Sequence
  derived and/or modified CDS sequence (wt) from neuraminidase__InfluenzaB__AGX20650
augcuaccuucaacuauacaaacguuaacccuauuucucacaucagggggaguauuauuaucacuauaugugucagcuuuauuaucauacuuacuauauucggauauauugcuaaaauucucaccaacagaaauaacugcaccaacaaugucauuggauugugcaaacgcaucaaauguucaggcugugaaccguucugcaacaaaaggggugacauuucuucucccagaaccggaguggacauacccgcguuuaucuugcccgggcucaaccuuucagaaagcacuccuaauuagcccucauagauucggagaaaccaaaggaaacucagcucccuugauaauaagggaaccuuuuauugcuuguggaccaaaugaaugcaaacacuuugcucuaacccauuaugcagcccaaccagggggauacuacaauggaacaagaggagacagaaacaagcugaggcaucuaauuucagucaaauugggcaaaaucccaacaguagaaaacuccauuuuccacauggcagcauggagcggguccgcgugccaugaugguaaggaauggacauauaucggaguugauggcccugacaaugaugcauugcucaaaguaaaauauggagaagcauauacugacacauaccauuccuaugcaaacaaaauccuaagaacacaagaaaguaccugcaauugcaucgggggaaauuguuaucuuaugauaacugauggcucagcuucagguguuagugaaugcagauuucuuaagauucgagaggggcgaauaauaaaagaaauauuuccaacaggaagaguaaaacacacugaggaaugcacaugcggauuugccagcaauaaaaccauagaaugugccuguagagauaacaguuacacagcaaaaagaccuuuugucaaauuaaacguggagacugauacagcagaaauaagauugaugugcacagauacuuauuuggacacccccagaccagaugauggaagcauaacaggcccuugugaaucuaauggggacaaagggaguggaggcaucaagggaggauuuguucaucaaagaauggaauccaagauuggaaggugguacucucgaacgaugucuaagacugaaaggauggggaugggacuguaugucaaguaugauggagacccaugggcugacagugaugcccuagcuuuuaguggaguaaugguuucaaugaaagaaccugguugguacuccuuuggcuucgaaauaaaagauaagaaaugcgauguccccuguauugggauagagaugguacaugaugguggaaaagagacuuggcacucagcagcaacagccauuuacuguuugaugggcucaggacagcugcugugggacacugucacaggcguugacauggcucuguaa

SEQ ID NO: 61533 - RNA, 1401 nt, Artificial Sequence
  derived and/or modified CDS sequence (wt) from neuraminidase__InfluenzaB__AGX20661
augcuacccucaacuauacaaacguuaacccuauuucucacaucagggggaguauuauuaucacuauaugugucagcuucauuaucauacuuacuauauucggauauauugcuaaaauucucaccaacagaaauaacugcaccaacaaugccauuggauugugcaaacgcaucaaauguucaggcugugaaccguucugcaacaaaaggggugacacuucuucucccagaaccggaguggacauacccgcguuuaucuugcccgggcucaaccuuucagaaagcacuccuaauuagcccucauagauucggagaaaccaaaggaaacucagcucccuugauaauaagggaaccuuuuauugcuuguggaccaaaugaaugcaaacacuuugcucuaacccauuaugcagcccaaccagggggauacuacaauggaacaagaggagacagaaacaagcugaggcaucuaauuucagucaacuugggcaaaaucccaacaguagaaaacuccauuuuccacauggcagcauggagcggguccgcgugccaugaugguaaggaauggacauauaucggaguugauggcccugacaauaaugcauugcucaaaguaaaauauggagaagcauacacugacacauaccauuccuaugcaaacaacauccuaagaacacaagaaagugccugcaauugcaucgggggaaacuguuaucuuaugauaacugauggcucagcuucagguguuagugaaugcagauuucuuaagauucgagagggccgaauaauaaaagaaauauuuccaacaggaagaguaaaacacacugaggaaugcacaugcggauuugccagcaauaaaaccauagaaugugccuguagagauaacaguuacacagcaaaaagaccuuuugucaaauuaaacguggagacugauacagcagaaauaagauugaugugcacagauacuuauuuggacacccccagaccaaaugauggaagcauaacaggcccuugugaaucuaauggggacaaagggaguggaggcaucaagggaggauuuguucaucaaagaauggaauccaagauuggaaggugguacucucgaacgaugucuaaaacugaaaggauggggaugggacuguaugucaaguaugauggagacccauggacugacagugaugcccuagcuuuuaguggaguaaugguuucaaugaaagaaccugguugguacuccuuuggcuucgaaauaaaagauaagaaaugcgauguccccuguauugggauagagaugguacaugaugguggaaaagagacuuggcacucagcugcaacagccauuuacuguuuaaugggcucaggacagcugcugugggacacugucacagguguugacauggcucuguaa

SEQ ID NO: 61534 - RNA, 1401 nt, Artificial Sequence
  derived and/or modified CDS sequence (wt) from neuraminidase__InfluenzaB__AGX20683
augcuaccuucaacuauacaaauguuaacccuauuucucacaucagggggaguacuauuaucacuauaugugucagcuucauuaucauacuuacuauauucggauauauugcuaaaauucucaccaacagaaauaacugcaccaacaaugccauuggauugugcaaacgcaucaaauguucaugcugugaaccguucugcaacaaaaggggugacauuucuucucccagaaccggaguggacauacccgcguuuaucuugcccgggcucaaccuuucagaaagcacuccuaauuagcccucauagauucggagaaaccaaaggaaacucagcucccuugauaauaagggaaccuuuuauugcuuguggaccaaaugaaugcaaacacuuugcucuaacccauuaugcagcccaaccagggggauacuacaauggaacaagaggagacagaaacaagcugaggcaucuaauuucagucaaauugggcaaaaucccaacaguagaaaacuccauuuuccacauggcagcauggagcggguccgcaugccaugaugguaaggaauggacauauaucggaguugaugguccugacaauaaugcauugcucaaaauaaaauauggagaagcauauacugacacauaucauuccuaugcaaacaacauccuaagaacacaagaaagugccugcaauugcaucgggggaaauuguuaucuuaugauaacugauggcucagcuucagguguuagugaaugcagauuucuuaagauucgagagggccgaauaauaaaagaaauauuuccaacaggaagaguaaaacauacugaggagugcacaugcggauuugccagcaauaaaaccauagaaugugccuguagagauaacaguuacacagcaaaaagacccuuugucaaauuaaacguggaaacugauacagcagaaauaagauugaugugcacagauacuuauuuggacacccccagaccagaugauggaagcauaacaggcccuugugaaucuaauggggacaaagggaguggaggcaucaagggaggauuuguucaucaaagaauggcauccaagauugggaggugguacucucgaacgaugucuaaaacugaaaggaaggggaugggacuguaugucaaguaugauggagacccauggacugacagugaugcccuugcuuucaggggaguaaugguuucaaugaaagaaccugguugguacuccuuuggcuucgaaauaaaagauaagaaaugcgauguccccuguauugggauagagaugguacaugaugguggaaaagagacuuggcacucagcagcaacagccauuuacuguuuaaugggcucaggacagcugcugugggacacagucacaggugucgacauggcucuauaa

SEQ ID NO: 61535 - RNA, 1401 nt, Artificial Sequence
  derived and/or modified CDS sequence (wt) from neuraminidase__InfluenzaB__AGX20694
augcuaccuucaacuauacaaacguuaacccuauuucucacaucagggggaguauuauuaucacuauaugugucagcuucauuaucauacuuacuauauucggauauauugcuaaaauucucaccaacagaaauaacugcaccagcaaugccauuggauugugcaaacgcaucaaauguucaggcugugaaccguucugcaacaaaaggggugacacuucuucucccagaaccggaguggacauacccgcguuuaucuuguccgggcucaaccuuucagaaagcacuccuaauuagcccucauagauucggagaaaccaaaggaaacucagcucccuugauaauaagggaaccuuuuauugcuuguggaccaaaugaaugcaaacacuuugcucuaacccauuaugcagcccaaccagggggauacuacaauggaacaagaggagacagaaacaagcugaggcaucuaauuucagucaaauugggcaaaaucccaacaguagaaaacuccauuuuccacauggcagcauggagcggguccgcgugccaugaugguaaggaauggacauauaucggaguugauggcccugacaauaaugcauugcucaaaguaaaauauggagaagcauauacugacacauaccauuccuaugcaaacaaaauccuaagaacacaagaaagugccugcaauugcaucgggggaaauuguuaucuuaugauaacugauggcucagcuucagguguuagugaaugcagauuucuuaagauucgagagggccgaauaauaaaagaaauauuuccaacaggaagaguaaaacacacugaggaaugcacaugcggauuugccagcaauaaaaccauagaaugugccuguagagauaacaguuacacagcaaaaagaccuuuugucaaauuaaacguggagacugauacagcagaaauaagauugaugugcacagauacuuauuuggacacccccagaccaaaugauggaagcauaacaggcccuugugaaucugauggggacaaagggaguggaggcaucaagggaggauuuguucaucaaagaauggaauccaagauuggaaggugguacucucgaacgaugucuaaaacugaaaggaugggaaugggacuguaugucaaguaugauggagacccaugggcugacagugaugcccuagcuuuuaguggaguaaugguuucaaugaaagaaccugguugguacuccuuuggcuucgaaauaaaagauaagaaaugcgauguccccuguauugggauagagaugguacaugaugguggaaaagagacuuggcacucagcagcaacagccauuuacuguuuaaugggcucaggacagcugcugugggacacugucacagguguugacauggcucuguaa

SEQ ID NO: 61536 - RNA, 1401 nt, Artificial Sequence
  derived and/or modified CDS sequence (wt) from neuraminidase__InfluenzaB__AGX20705
augcuaccuucaacuauacaaacguuaacccuauuucucacaucagggggaguguuauuaucacuauaugugucagcuucauuaucauacuuacuauauucggguauauugcuaaaauucucaccaacagaaauaacugcaccaacaaugccauuggauugugcaaacgcaucagauguucaggcugugaaccguucugcaacaaaaggggugacacuucuucucccagaaccggaguggacauacccgcguuuaucuugcccgggcucaaccuuucagaaagcacuccuaauuagcccucauagauucggagaaaccaaaggaaacucagcucccuugauaauaagggaaccuuuuauugcuuguggaccaaaugaaugcaaacacuuugcucuaacccauuaugcagcccaaccagggggauacuacaauggaacaagaggagacagaaacaagcugaggcaucuaauuucagucaaauugggcaaaaucccaacaguagaaaacuccauuuuccacauggcagcauggagcggguccgcgugccaugaugguaaggaauggacauauaucggaguugacggcccugacaauaaugcauugcucaaaguaaaauauggagaagcauauacugacacauaccauuccuaugcaaacaaaauccuaagaacacaagaaagugccugcaauugcaucgggggaaauuguuaucuuaugauaacugauggcucagcuucagguguuagugaaugcagauuucuuaagauucgagagggccgaauaauaaaagaaauauucccaacaggaagaguaaaacacacugaggaaugcacaugcggauuugccagcaauaaaaccauagaaugugccuguagagauaacaguuacacagcaaaaagaccuuuugucaaauuaaacguggagacugauacagcagaaauaagauugaugugcacagauacuuauuuggacacccccagaccaaaugauggaagcauaacaggcccuugugaaucuaauggggacaaagggaguggaggcaucaagggaggauuuguucaucaaagaauggaauccaagauuggaaggugguacucucgaacgaugucuaaaacugaaaggauggggaugggacuguacgucaaguaugauggagacccaugggcugacagugaugcccuaacuuuuaguggaguaaugguuucaaugaaagaaccugguugguacuccuuuggcuucgaaauaaaagauaagaaaugcgauguccccuguauugggauagagaugguacaugaugguggaaaagagacuuggcacucagcagcaacagccauuuacuguuuaaugggcucaggacagcugcugugggacacugucacagguguugacauggcucuguaa

SEQ ID NO: 61537 - RNA, 1401 nt, Artificial Sequence
  derived and/or modified CDS sequence (wt) from neuraminidase__InfluenzaB__AGX20716
augcuaccuucaacuauacaaacguuaacccuauuucucacaucagggggaguauuauuaucacuauaugugucagcuucauuaucauacuuacuauauucggauauauugcuaaaauucucaccaacagaaauaacugcaccaacaaugccauuggauugugcaaacgcaucaaauguucaggcugugaaccguucugcaacaaaaggggugacacuucuucucccagaaccggaguggacauacccgcguuuaucuugcccgggcucaaccuuucagaaagcacuccuaauuagcccucauagauucggagaaaccaaaggaaacucagcucccuugauaauaagggaaccuuuuauugcuuguggaccaaaugaaugcaaacacuuugcucuaacccauuaugcagcccaaccagggggauacuacaauggaacaagaggagacagaaacaagcugaggcaucuaauuucagucaaauugggcaaaaucccaacaguagaaaacuccauuuuccacauggcagcauggagcggguccgcgugccaugaugguaaggaauggacauauaucggaguugaugguccugacaauaaugcauugcucaaaguaaaauauggagaagcauauacugacacauaccauuccuaugcaaacaaaauccuaagaacacaagaaagugccugcaauugcaucgggggaaauuguuaucuuaugauaacugauggcucagcuucagguguuagugaaugcagauuucuuaagauucgagagggccgaauaauaaaagaaauauuuccaacaggaagaguaaaacacacugaggaaugcacaugcggauuugccagcaauaaaaccauagaaugugccuguagagauaacaguuacacagcaaaaagaccuuuugucaaauuaaacguggagacugauacagcagaaauaagauugaugugcacagauacuuauuuggacacccccagaccaaaugauggaagcauaacaggcccuugugaaucugauggggacaaagggaguggaggcaucaagggaggauuuguucaucaaagaauagaauccaggauuggaaggugguacucucgaacgaugucuaaaacugaaaggauggggaugggacuguaugucaaguaugauggagacccaugggcugacagugaugcccuagcuuuuaguggaguaaugguuucaaugaaagaaccugguugguacuccuuuggcuucgaaauaaaagauaagaaaugcgauguccccuguauugggauagagaugguacaugaugguggaaaagagacuuggcacucagcagcaacagccauuuacuguuuaaugggcucaggacagcugcugugggacacugucacagguguugacauggcuuuguaa

SEQ ID NO: 61538 - RNA, 1401 nt, Artificial Sequence
  derived and/or modified CDS sequence (wt) from neuraminidase__InfluenzaB__AGX20727
augcuaccuucaacuauacaaacguuaacccuauuucucacaucagggggaguauuauuaucacuauaugugucagcuuuauuaucauacuuacuauauucggauauauugcuaaaauucucaccaacagaaauaacugcaccaacaaugucauuggauugugcaaacgcaucaaauguucaggcugugaaccguucugcaacaaaaggggugacauuucuucucccagaaccggaguggacauacccgcguuuaucuugcccgggcucaaccuuucagaaagcacuccuaauuagcccucauagauucggagaaaccaaaggaaacucagcucccuugauaauaagggaaccuuuuauugcuuguggaccaaaugaaugcaaacacuuugcucuaacccauuaugcagcccaaccagggggauacuacaauggaacaagaggagacagaaacaagcugaggcaucuaauuucagucaaauugggcaaaaucccaacaguagaaaacuccauuuuccacauggcagcauggagcggguccgcgugccaugaugguaaggaauggacauauaucggaguugauggcccugacaaugaugcauugcucaaaguaaaauauggagaagcauauacugacacauaccauuccuaugcaaacaaaauccuaagaacacaagaaagugccugcaauugcaucgggggaaauuguuaucuuaugauaacugauggcucagcuucagguguuagugaaugcagauuucuuaagauucgagagggccgaauaauaaaagaaauauuuccaacaggaagaguaaaacacacugaggaaugcacaugcggauuugccagcaauaaaaccauagaaugugccuguagagauaacaguuacacagcaaaaagaccuuuugucaaauuaaacguggagacugauacagcagaaauaagauugaugugcacagauacuuauuuggacacccccagaccagaugauggaagcacaacaggcccuugugaaucuaauggggacaaagggaguggaggcaucaagggaggauuuguucaucaaagaauggaauccaagauuggaaggugguacucucgaacgaugucuaagacugaaaggauggggaugggacuguaugucaaguaugauggagacccaugggcugacagugaugcccuagcuuuuaguggaguaaugguuucaaugaaagaaccugguugguacuccuuuggcuucgaaauaaaagauaagaaaugcgauguccccuguauugggauagagaugguacaugaugguggaaaagagacuuggcacucagcagcaacagccauuuacuguuuaaugggcucaggacagcugcugugggacacugucacaggcguugacauggcucuguaa

SEQ ID NO: 61539 - RNA, 1401 nt, Artificial Sequence; identical to SEQ ID NO: 61131
  derived and/or modified CDS sequence (wt) from neuraminidase__InfluenzaB__AGX20738

SEQ ID NO: 61540 - RNA, 1401 nt, Artificial Sequence; identical to SEQ ID NO: 61125
  derived and/or modified CDS sequence (wt) from neuraminidase__InfluenzaB__AGX20749

SEQ ID NO: 61541 - RNA, 1401 nt, Artificial Sequence
  derived and/or modified CDS sequence (wt) from neuraminidase__InfluenzaB__AGX20760
augcuaccuucaacuauacaaacguuaacccuauuucucacaucagggggaguauuauuaucacuauaugugucagcuucauuaucauacuuacuauauucggauauauugcuaaaauucucaccaacagaaauaacugcaccaacaaugccauuggauugugcaaacgcaucaaauguucaggcugugaaccguucugcaacaaaaggggugacacuucuucucccagaaccggaguggacauacccgcguuuaucuugcccgggcucaaccuuucagaaagcacuccuaauuagcccucauagauucggagaaaccaaaggaaacucagcucccuugauaauaagggaaccuuuuauugcuuguggaccaaaugaaugcaaacacuuugcucuaacccauuaugcagcccaaccagggggauacuacaauggaacaagaggagacagaaacaagcugaggcaucuaauuucagucaaauugggcaaaaucccaacaguagaaaacuccauuuuccacauggcagcauggagcggguccgcgugccaugaugguaaggaauggacauauaucggaguugaugguccugacaauaaugcauugcucaaaguaaaauauggagaagcauauacugacacauaccauuccuaugcaaacaaaauccuaagaacacaagaaagugccugcaauugcaucgggggaaauuguuaucuuaugauaacugauggcucagcuucagguguuagugaaugcagauuucuuaagauucgagagggccgaauaauaaaagaaauauuuccaacaggaagaguaaaacacacugaggaaugcacaugcggauuugccagcaauaaaaccauagaaugugccuguagagauaacaguuacacagcaaaaagaccuuuugucaaauuaaacguggagacugauacagcagaaauaagauugaugugcacagauacuuauuuggacacccccagaccaaaugauggaagcauaacaggcccuugugaaucugauggggacaaagggaguggaggcaucaagggaggauuuguucaucaaagaauggaauccaggauuggaaggugguacucucgaacgaugucuaaaacugaaaggauggggaugggacuguaugucaaguaugauggagacccaugggcugacagugaugcccuagcuuuuaguggaguaaugguuucaaugaaagaaccugguugguacuccuuuggcuucgaaauaaaagauaagaaaugcgauguccccuguauugggauagagaugguacaugaugguggaaaagagacuuggcacucagcagcaacagccauuuacuguuuaaugggcucaggacagcugcugugggacacugucacagguguugacauggcuuuguaa

SEQ ID NO: 61542 - RNA, 1401 nt, Artificial Sequence
  derived and/or modified CDS sequence (wt) from neuraminidase__InfluenzaB__AGX20771
augcuaccuucaacuauacaaacguuaacccuauuucucacaucagggggaguauuguuaucacuauaugugucagcuuuauuaucauacuuauuauauucggauauauugcuaaaauucucaccaacagaaauaacugcaccaacaaugucauuggauugugcaaacgcaucaaauguucaggcugugaaccguucugcaacaaaaggggugacauuucuucucccagaaccggaguggacauacccgcguuuaucuugcccgggcucaaccuuucagaaagcacuccuaauuagcccucauagauucggagaaaccaaaggaaacucagcucccuugauaauaagggaaccuuuuauugcuuguggaccaaaugaaugcaaacacuuugcucuaacccauuaugcagcccaaccagggggauacuacaauggaacaagaggagacagaaacaagcugaggcaucuaauuucagucaaauugggcaaaaucccaacaguagaaaacuccauuuuccacauggcagcauggagcggguccgcgugccaugaugguaaggaauggacauauaucggaguugauggcccugacaaugaugcauugcucaaaguaaaauauggagaagcauauacugacacauaccauuccuaugcaaacaaaauccuaagaacacaagaaagugccugcaauugcaucgggggaaauuguuaucuuaugauaacugauggcucagcuucagguguuagugaaugcagauuucuuaagauucgagagggccgaauaauaaaagaaauauuuccaacaggaagaguaaaacacacugaggaaugcacaugcggauuugccagcaauaaaaccauagaaugugccuguagagauaacaguuacacagcaaaaagaccuuuugucaaauuaaacguggagacugauacagcagaaauaagauugaugugcacagauacuuauuuggacacccccagaccagaugauggaagcauaacaggcccuugugaaucuaauggggacaaagggaguggaggcaucaagggaggauuuguucaucaaagaauggaauccaagauuggaaggugguacucucgaacgaugucuaagacugaaaggauggggaugggacuguaugucaaguaugauggagacccaugggcugacagugaugcccuagcuuuuaguggaguaaugguuucaaugaaagaaccugguugguacuccuuuggcuucgaaauaaaagauaagaaaugcgauguccccuguauugggauagagaugguacaugaugguggaaaagagacuuggcacucagcagcaacagccauuuacuguuugaugggcucaggacagcugcugugggacacugucacaggcguugacauggcucuguaa

SEQ ID NO: 61543 - RNA, 1401 nt, Artificial Sequence
  derived and/or modified CDS sequence (wt) from neuraminidase__InfluenzaB__AGX20782
augcuaccuucaacuauacaaacguuaacccuauuucucacaucagggggaguauuauuaucacuauaugugucagcuucauuaucauacuuacuauauucggauauauugcuaaaauucucaccaacagaaauaacugcaccaacaaugccauuggauugugcaaacgcaucaaauguucaggcugugaaccauucugcaacaaaaggggugacacuucuucucccagaaccggaguggacauacccgcguuuaucuugcccgggcucaaccuuucagaaagcacuccuaauuagcucucauagauucggagaaaccaaaggaaacucagcucccuugauaauaagggaaccuuuuguugcuuguggaccaaaugaaugcaaacacuuugcucuaacccauuaugcagcccaaccagggggauacuacaauggaacaagaggagacagaaacaagcuaaggcaucuaauuucagucaaauugggcaaaaucccaacaguagaaaacuccauuuuccacauggcagcauggagcggguccgcgugccaugaugguaaggaauggacauauaucggaguugauggcccugacaauaaugcauugcucaaaguaaaauauggagaagcauauacugacacauaccauuccuaugcaaacaaaauccuaagaacacaagaaagugccugcaauugcaucgggggaaauuguuaucuuaugauaacugauggcucagcuucagguguuagugaaugcagauuucuuaagauucgagagggccgaauaauaaaagaaauauuuccaacaggaagaguaaaacacacugaggaaugcacaugcggauuugccagcaauaaaaccauagaaugugccuguagagauaacaguuacacagcaaaaagaccuuuugucaaauuaaacguggagacugauacagcagaaauaagauugaugugcacagauacuuauuuggacacccccagaccaaaugauggaagcauaacaggcccuugugaaucugauggggacaaagggaguggaggcaucaagggaggauuuguucaucaaagaauggaauccaagauuggaaggugguacucucgaacgaugucuaggacugaaaggauggggaugggacuguaugucaaguaugauggagacccaugggcugacagugaugcccuagcuuuuaguggaguaaugguuucaaugaaagaaccugguugguacuccuuuggcuucgaaauaaaagauaagaaaugcgauguccccuguauugggauagagaugguacaugaugguggaaaagagacuuggcacucagcagcaacagccauuuacuguuuaaugggcucaggacagcugcugugggacacugucacagguguugacauggcucuguaa

SEQ ID NO: 61544 - RNA, 1401 nt, Artificial Sequence
  derived and/or modified CDS sequence (wt) from neuraminidase__InfluenzaB__AGX20793
augcuaccuucaacuauacaaacguuaacccuauuucucacaucagggggaguauuauuaucacuauaugugucagcuuuauuaucauacuuacuauauucggauauauugcuaaaauucucaccaacagaaauaacugcaccaacaaugucauuggauugugcaaacacaucaaauguucaggcugugaaccguucugcaacaaaaggggugacauuucuucucccagaaccggaguggacauacccgcguuugucuugcccgggcucaaccuuucagaaagcacuccuaauuagcccucauagauucggagaaaccaaaggaaacucagcucccuugauaauaagggaaccuuuuauugcuuguggaccaaaugaaugcaaacacuuugcucuaacccauuaugcagcccaaccagggggauacuacaauggaacaagaggagacagaaacaagcugaggcaucuaauuucagucaaauugggcaaaaucccaacaguagaaaacuccauuuuccacauggcagcauggagcggguccgcgugccaugaugguaaggaauggacauauaucggaguugauggcccugacaaugaugcauugcucaaaguaaaauauggagaagcauauacugacacauaccauuccuaugcaaacaaaauccuaagaacacaagaaagugccugcaauugcaucgggggaaauuguuaucuuaugauaacugauggcucagcuucagguguuagugaaugcagauuucuuaagauucgagagggccgaauaauaaaagaaauauuuccaacaggaagaguaaaacacacugaggaaugcacaugcggauuugccagcaauaaaaccauagaaugugccuguagagauaacaguuacacagcaaaaagaccuuuugucaaauuaaacguggagacugauacagcagaaauaagauugaugugcacagauacuuauuuggacacccccagaccagaugauggaagcauaacaggcccuugugaaucuaauggggacaaagggaguggaggcaucaagggaggauuuguucaucaaagaauggaauccaagauuggaaggugguacucucgaacgaugucuaagacugaaaggauggggaugggacuguaugucaaguaugauggagacccaugggcugacagugaugcccuagcuuuuaguggaguaaugguuucaaugaaagaaccugguugguacuccuuuggcuucgaaauaaaagauaagaaaugcgauguccccuguauugggauagagaugguacaugaugguggaaaagagacuuggcacucagcagcaacagccauuuacuguuuaaugggcucaggacagcugcugugggacacugucacaggcguuaacauggcucuguaa

SEQ ID NO: 61545 - RNA, 1401 nt, Artificial Sequence
  derived and/or modified CDS sequence (wt) from neuraminidase__InfluenzaB__AGX20804
augcuaccuucaacuauacaaacguuaacccuauuuaucacaucagggggaguauuguuaucacuauaugugucagcuuuauuaucauacuuacuauauucggauauauugcuaaaauucucaccaacagaaauaacugcaccaacaaugucauuggauugugcaaacgcaucaaauguucaggcugugaaccguucugcaacaaaaggggugacauuucuucucccagaaccggaguggacauacccgcguuuaucuugcccgggcucaaccuuucagaaagcacuccuaauuagcccucauagauucggagaaaccaaaggaaacucagcucccuugauaauaagggaaccuuuuauugcuuguggaccaaaugaaugcaaacacuuugcucuaacccauuaugcagcccaaccagggggauacuacaauggaacaagaggagacagaaacaagcugaggcaucuaauuucagucaaauugggcaaaaucccaacaguagaaaacuccauuuuccacauggcagcauggagcggguccgcgugccaugaugguaaggaauggacauauaucggaguugauggcccugacaaugaugcauugcucaaaguaaaauauggagaagcauauacugacacauaccauuccuaugcaaacaaaauccuaagaacacaagaaagugccugcaauugcaucgggggaaauuguuaucuuaugauaacugauggcucagcuucagguguuagugaaugcagauuucuuaagauucgagagggccgaauaauaaaagaaauauuuccaacaggaagaguaaaacacacugaggaaugcacaugcggauuugccagcaauaaaaccauagaaugugccuguagagauaacaguuacacagcaaaaagaccuuuugucaaauuaaacguggagacugauacagcagaaauaagauugaugugcacagauacuuauuuggacacccccagaccagaugauggaagcauaacaggcccuugugaaucuaauggggacaaagggaguggaggcaucaagggaggauuuguucaucaaagaauggaauccaagauuggaaggugguacucucgaacgaugucuaagacugaaaggauggggaugggacuguaugucaaguaugauggagacccaugggcugacagugaugcccuagcuuuuaguggaguaaugguuucaaugaaagaaccugguugguacuccuuuggcuucgaaauaaaagauaagaaaugcgauguccccuguauugggauagagaugguacaugaugguggaaaagagacuuggcacucagcagcaacagccauuuacuguuugaugggcucaggacagcugcugugggacacugucacaggcguugacauggcucuguaa

SEQ ID NO: 61546 - RNA, 1401 nt, Artificial Sequence; identical to SEQ ID NO: 61133
  derived and/or modified CDS sequence (wt) from neuraminidase__InfluenzaB__AGX20815

SEQ ID NO: 61547 - RNA, 1401 nt, Artificial Sequence; identical to SEQ ID NO: 61133
  derived and/or modified CDS sequence (wt) from neuraminidase__InfluenzaB__AGX20826

SEQ ID NO: 61548 - RNA, 1401 nt, Artificial Sequence; identical to SEQ ID NO: 61133
  derived and/or modified CDS sequence (wt) from neuraminidase__InfluenzaB__AGX20837

SEQ ID NO: 61549 - RNA, 1401 nt, Artificial Sequence; identical to SEQ ID NO: 61133
  derived and/or modified CDS sequence (wt) from neuraminidase__InfluenzaB__AGX20848

SEQ ID NO: 61550 - RNA, 1401 nt, Artificial Sequence
  derived and/or modified CDS sequence (wt) from neuraminidase__InfluenzaB__AGX20870
augcuaccuucaacuauacaaauguuaacccuauuucucacaucagggggaguacuauuaucacuauaugugucagcuucauuaucauacuuacuauauucggauauauugcuaaaauucucaccaacagaaauaacugcaccaacaaugccauuggauugugcaaacgcaucaaauguucaugcugugaaccguucugcaacaaaaggggugacauuucuucucccagaaccggaguggacauacccgcguuuaucuugcccgggcucaaccuuucagaaagcacuccuaauuagcccucauagauucggagaaaccaaaggaaacucagcucccuugauaauaagggaaccuuuuauugcuuguggaccaaaugaaugcaaacacuuugcucuaacccauuaugcagcccaaccagggggauacuacaauggaacaagaggagacagaaacaagcugaggcaucuaauuucagucaaauugggcaaaaucccaacaguagaaaacuccauuuuccacauggcagcauggagcggguccgcaugccaugaugguaaggaauggacauauaucggaguugaugguccugacaauaaugcauugcucaaaauaaaauauggagaagcauauacugacacauaucauuccuaugcaaacaacauccuaagaacacaagaaagugccugcaauugcaucgggggaaauuguuaucuuaugauaacugauggcucagcuucagguguuagugaaugcagauuucuuaagauucgagagggccgaauaauaaaagaaauauuuccaacaggaagaguaaaacauacugaggagugcacaugcggauuugccagcaauaaaaccauagaaugugccuguagagauaacaguuacacagcaaaaagacccuuugucaaauuaaacguggaaacugauacagcagaaauaagauugaugugcacagauacuuauuuggacacccccagaccagaugauggaagcauaacaggcccuugugaaucuaauggggacaaagggaguggaggcaucaagggaggauuuguucaucaaagaauggcauccaagauugggaggugguacucucgaacgaugucuaaaacugaaaggaaggggaugggacuguaugucaaguaugauggagaaccauggacugacagugaugcccuugcuuuuaggggaguaaugguuucaaugaaagaaccugguugguacuccuuuggcuucgaaauaaaagauaagaaaugcgauguccccuguauugggauagagaugguacaugacgguggaaaagagacuuggcacucagcagcaacagccauuuacuguuuaaugggcucaggacagcugcugugggacacagucacaggugucgacauggcucuauaa

SEQ ID NO: 61551 - RNA, 1401 nt, Artificial Sequence
  derived and/or modified CDS sequence (wt) from neuraminidase__InfluenzaB__AGX20881
augcuaccuucaacuauacaaauguuaacccuauuucucacaucagggggaguacuauuaucacuauaugugucagcuucauuaucauacuuacuauauucggauauauugcuaaaauucucaccaacagaaauaacugcaccaacaaugccauuggauugugcaaacgcaucaaauguucaugcugugaaccguucugcaacaaaaggggugacauuucuucucccagaaccggaguggacauacccgcguuuaucuugcccgggaucaaccuuucagaaagcacuccuaauuagcccucauagauucggagaaaccaaaggaaacucagcucccuugauaauaagggaaccuuuuauugcuuguggaccaaaugaaugcaaacacuuugcucuaacccauuaugcagcccaaccagggggauacuacaauggaacaagaggaaacagaaacaagcugaggcaucuaauuucagucaaauugggcaaaaucccaacaguagaaaacuccauuuuccacauggcagcauggagcggguccgcaugccaugaugguaaggaauggacauauaucggaguugaugguccugacaauaaugcauugcucaaaauaaaauauggagaagcauauacugacacauaucauuccuaugcaaacaacauccuaagaacacaagaaagugccugcaauugcaucgggggaaauuguuaucuuaugauaacugauggcucagcuucagguguuagugaaugcagauuucuuaagauucgagagggccgaauaauaaaagaaauauuuccaacaggaagaguaaaacauacugaggagugcacaugcggauuugccagcaauaaaaccauagaaugugccuguagagauaacaguuacacagcaaaaagacccuuugucaaauuaaacguggaaacugauacagcagaaauaagauugaugugcacagauaccuauuuggacacccccagaccggaugauggaagcauaacaggcccuugugaaucuaauggggacaaagggaguggaggcaucaagggaggauuuguucaucaaagaauggcauccaagauugggaggugguacucucgaacgaugucuaaaacugaaaggaaggggaugggacuguaugucaaguaugauggagacccauggacugacagugaugcccuugcuuuuaggggaguaaugguuucaaugaaagaaccugguugguacuccuuuggcuucgaaauaaaagauaagaaaugcgauguccccuguauugggauagagaugguacaugaugguggaaaagagacuuggcacucagcagcaacagccauuuacuguuuaaugggcucaggacagcugcugugggacacagucacaggugucgacauggcucuauaa

SEQ ID NO: 61552 - RNA, 1401 nt, Artificial Sequence
  derived and/or modified CDS sequence (wt) from neuraminidase__InfluenzaB__AGX20892
augcuaccuucaacuauacaaacguuaacccuauuucucacaucagggggaguauuauuaucacuauaugugucagcuuuauuaucauacuuacuauauucggauauauugcuaaaauucucaccaacagaaauaacugcaccaacaaugucauuggauugugcaaacgcaucaaauguucaggcugugaaccguucugcaacaaaaggggugacauuucuucucccagaaccggaguggacauacccgcguuuaucuugcccgggcucaaccuuucagagagcacuccuaauuagcccucauagauucggagaagccaaaggaaacucagcucccuugauaauaagggaaccuuuuauugcuuguggaccaaaugaaugcaaacacuuugcucuaacccauuaugcagcccaaccagggggauacuacaauggaacaagaggagacagaaacaagcugaggcaucuaauuucagucaaauugggcaaaaucccaacaguagagaacuccauuuuccacauggcagcauggagcggguccgcuugccaugaugguaaggaauggacauauaucggaguugauggcccugacaaugaugcauugcucaaaguaaaauauggagaagcauauacugacacauaccauuccuaugcaaacaaaauccuaagaacacaagaaagugccugcaauugcaucgggggaaauuguuaucuuaugauaacugauggcucagcuucagguguuagugaaugcagauuucuuaagauucgagagggccgaauaauaaaagaaauacuuccaacaggaagaguaaaacacacugaggaaugcacaugcggauuugccagcaauaaaaccauagaaugugccuguagagauaacaguuacacagcaaaaagaccuuuugucaaauuaaacguugagacugauacagcagaaauaagauugaugugcacagauacuuauuuggacacccccagaccagaugauggaagcauaacaggcccuugugaaucuaauggggacaaagggaguggaggcaucaagggaggauuuguucaucaaagaauggaauccaagauuggaaggugguacucucgaacgaugucuaagacugaaaggauggggaugggacuguaugucaaguaugauggagacccaugggcugacagugaugcccuagcuuuuaguggaguaaugguuucaaugaaagaaccugguugguacucuuuuggcuucgaaauaaaagauaagaaaugcgauguccccuguauugggauagagaugguacaugaugguggaaaagagacuuggcacucagcagcaacagccauuuacuguuuaaugggcucaggacagcugcugugggacacugucacaggcguugacauggcucuguaa

SEQ ID NO: 61553 - RNA, 1401 nt, Artificial Sequence; identical to SEQ ID NO: 61136
  derived and/or modified CDS sequence (wt) from neuraminidase__InfluenzaB__AGX20903

SEQ ID NO: 61554 - RNA, 1401 nt, Artificial Sequence; identical to SEQ ID NO: 61136
  derived and/or modified CDS sequence (wt) from neuraminidase__InfluenzaB__AGX20914

SEQ ID NO: 61555 - RNA, 1401 nt, Artificial Sequence
  derived and/or modified CDS sequence (wt) from neuraminidase__InfluenzaB__AGX20925
augcuaccuucaacuauacaaacguuaacccuauuucucacaucagggggaguauuguuaucacuauaugugucagcuuuauuaucauacuuacuauauucggauauauugcuaaaauucucaccaacagaaauaacugcaccaacaaugucauuggauugugcaaacgcaucaaauguucaggcugugaaccguucugcaacaaaaggggugacauuucuucucccagaaccggaguggacauacccgcguuuaucuugcccgggcucaaccuuucagaaagcacuccuaauuagcccucauagauucggagaaaccaaaggaaacucagcucccuugauaauaagggaaccuuuuauugcuuguggaccaaaugaaugcaaacacuuugcucuaacccauuaugcagcccaaccagggggauacuacaauggaacaagaggagacagaaacaagcugaggcaucuaauuucagucaaauugggcaaaaucccaacaguagaaaacuccauuuuccacauggcagcauggagcggguccgcgugccaugaugguaaggaauggacauauaucggaguugauggcccugacaaugaugcauugcucaaaguaaaauauggagaagcauauacugacacauaccauuccuaugcaaacaaaauccuaagaacacaagaaagugccugcaauugcaucgggggaaauuguuaucuuaugauaacugauggcucagcuucagguguuagugaaugcagauuucuuaagauucaagagggccgaauaauaaaagaaauauuuccaacaggaagaguaaaacacacugaggaaugcacaugcggauuugccagcaauaaaaccauagaaugugccuguagagauaacaguuacacagcaaaaagaccuuuugucaaauuaaacguggagacugauacagcagaaauaagauugaugugcacagauacuuauuuggacacccccagaccagaugauggaagcauaacaggcccuugugaaucuaauggggacaaagggaguggaggcaucaagggaggauuuguucaucaaagaauggaauccaagauuggaaggugguacucucgaacgaugucuaagacugaaaggauggggaugggacuguaugucaaguaugauggagacccaugggcugacagugaugcccuagcuuuuaguggaguaaugguuucaaugaaagaaccugguugguacuccuuuggcuucgaaauaaaagauaagaaaugcgauguccccuguauugggauagagaugguacaugaugguggaaaagagacuuggcacucagcagcaacagccauuuacuguuugaugggcucaggacagcugcugugggacacugucacaggcguugacauggcucuguaa

SEQ ID NO: 61556 - RNA, 1401 nt, Artificial Sequence
  derived and/or modified CDS sequence (wt) from neuraminidase__InfluenzaB__AGX20936
augcuaccuucaacuauacaaacguuaacccuauuucucacaucagggggaguauuauuaucacuauaugugucagcuuuauuaucauacuuacuauauucggauauauugccaaaauucucaccaacagaaauaacugcaccaacaaugucauuggauugugcaaacgcaucaaauguucaggcugugaaccguucugcaacaaaaggggugacauuucuucucccagaaccggaguggacauacccgcguuuaucuugcccgggcucaaccuuucagaaagcacuccuaauuagcccucauagauucggagaaaccaaaggaaacucagcucccuugauaauaagggaaccuuuuauugcuuguggaccaaaugaaugcaaacacuuugcucuaacccauuaugcagcccaaccagggggauacuacaauggaacaagaggagacagaaacaagcugaggcaucuaauuucagucaaauugggcaaaaucccaacaguagaaaacuccauuuuccacauggcagcauggagcggguccgcuugccaugaugguaaggaauggacauauaucggaguugauggcccugacaaugaugcauugcucaaaguaaaauauggagaagcauauacugacacauaccauuccuaugcaaacaaaauccuaagaacacaagaaagugccugcaauugcaucgggggaaauuguuaucuuaugauaacugauggcucagcuucagguguuagugagugcagauuucuuaagauucgagagggccgaauaauaaaagaaauauuuccaacaggaagaguaaaacacacugaggaaugcacaugcggauuugccagcaauaaaaccauagaaugugccuguagagauaacaguuacacagcaaaaagaccuuuugucaaauuaaacguggagacugauacagcagaaauaagauugaugugcacagauacuuauuuggacacccccagaccagaugauggaagcauaacaggcccuugugaaucuaauggggacaaagggaguggaggcaucaagggaggauuuguucaucaaagaauggaauccaagauuggaaggugguacucucgaacgaugucuaagacugaaaggauggggaugggacuguauguuaaguaugauggagacccaugggcugacagugaugcccuaguuuuuaguggaguaaugguuucaaugaaagaaccugguugguacuccuuuggcuucgaaauaaaagauaagaaaugcgauguccccuguauugggauagagauggugcaugaugguggaaaagagacuuggcacucagcagcaacagccauuuacuguuuaaugggcucaggacagcugcugugggacacugucacaggcguugacauggcucuguaa

SEQ ID NO: 61557 - RNA, 1401 nt, Artificial Sequence; identical to SEQ ID NO: 61132
  derived and/or modified CDS sequence (wt) from neuraminidase__InfluenzaB__AGX20947

SEQ ID NO: 61558 - RNA, 1401 nt, Artificial Sequence
  derived and/or modified CDS sequence (wt) from neuraminidase__InfluenzaB__AGX20958
augcuaccuucaacuauacaaacguuaacccuauuucucacaucagggggaguauuguuaucacuauaugugucagcuuuauuaucauacuuacuauauucggauauauugcuaaaauucucaccaacagaaauaacuacaccaacaaugucauuggauuguacaaacgcaucaaauguucaggcugugaaccguucugcaacaaaaggggugacauuucuucucccagaaccggaguggacauacccgcguuuaucuugcccgggcucaaccuuucagaaagcacuccuaauuagcccucauagauucggagaaaccaaaggaaacucagcucccuugauaauaagggaaccuuuuauugcuuguggaccaaaugaaugcaaacacuuugcucuaacccauuaugcagcccaaccagggggauacuacaauggaacaagaggagacagaaacaagcugaggcaucuaauuucagucaaauugggcaaaaucccaacaguagaaaacuccauuuuccacauggcagcauggagcggguccgcgugccaugaugguaaggaauggacauauaucggaguugauggcccugacaaugaugcauugcucaaaguaaaauauggagaagcauauacugacacauaccauuccuaugcaaacaaaauccuaagaacacaagaaagugccugcaauugcaucgggggaaauuguuaucuuaugauaacugauggcucagcuucagguguuagugaaugcagauuucuuaagauucaagagggccgaauaauaaaagaaauauuuccaacaggaagaguaaaacacacugaggaaugcacaugcggauuugccagcaauaaaaccauagaaugugccuguagagauaacaguuacacagcaaaaagaccuuuugucaaauuaaacguggagacugauacagcagaaauaagauugaugugcacagauacuuauuuggacacccccagaccagaugauggaagcauaacaggcccuugugaaucuaauggggacaaagggaguggaggcaucaagggaggauuuguucaucaaagaauggaauccaagauuggaaggugguacucucgaacgaugucuaagacugaaaggauggggaugggacuguaugucaaguaugauggagacccaugggcugacagugaugcccuagcuuuuaguggaguaaugguuucaaugaaagaaccugguugguacuccuuuggcuucgaaauaaaagauaagaaaugcgauguccccuguauugggauagagaugguacaugaugguggaaaagagacuuggcacucagcagcaacagccauuuacuguuugaugggcucaggacagcugcugugggacacugucacaggcguugacauggcucuguaa

SEQ ID NO: 61559 - RNA, 1401 nt, Artificial Sequence; identical to SEQ ID NO: 61131
  derived and/or modified CDS sequence (wt) from neuraminidase__InfluenzaB__AGX20969

SEQ ID NO: 61560 - RNA, 1401 nt, Artificial Sequence
  derived and/or modified CDS sequence (wt) from neuraminidase__InfluenzaB__AGX20980
augcuaccuucaacuauacaaacguuaacccuauuucucacaucagggggaguauuauuaucacuauaugugucagcuuuauuaucauacuuacuauauucggauauauugcuaaaauucucaccaacagaaauaacugcaccaacaaugucauuggauugugcaaacacaucaaauguucaggcugugaaccguucugcaacaaaaggggugacauuucuucucccagaaccggaguggacauacccgcguuugucuugcccgggcucaaccuuucagaaagcacuccuaauuagcccucauagauucggagaaaccaaaggaaacucagcucccuugauaauaagggaaccuuuuauugcuuguggaccaaaugaaugcaaacacuuugcucuaacccauuaugcagcccaaccagggggauacuacaauggaacaagaggagacagaaacaagcugaggcaucuaauuucagucaaauugggcaaaaucccaacaguagaaaacuccauuuuccacauggcagcauggagcggauccgcgugccaugaugguaaggaauggacauauaucggaguugauggcccugacaaugaugcauugcucaaaguaaaauauggagaagcauauacugacacauaccauuccuaugcaaacaaaauccuaagaacacaagaaagugccugcaauugcaucgggggaaauuguuaucuuaugauaacugauggcucagcuucagguguuagugaaugcagauuucuuaagauucgagagggccgaauaauaaaagaaauauuuccaacaggaagaguaaaacacacugaggaaugcacaugcggauuugccagcaauaaaaccauagaaugugccuguagagauaacaguuacacagcaaaaagaccuuuugucaaauuaaacguggagacugauacagcagaaauaagauugaugugcacagauacuuauuuggacacccccagaccagaugauggaagcauaacaggcccuugugaaucuaauggggacaaagggaguggaggcaucaagggaggauuuguucaucaaagaauggaauccaagauuggaaggugguacucucgaacgaugucuaagacugaaaggauggggaugggacuguaugucaaguaugauggagacccaugggcugacagugaugcccuagcuuuuaguggaguaaugguuucaaugaaagaaccugguugguacuccuuuggcuucgaaauaaaagauaagaaaugcgauguccccuguauugggauagagaugguacaugaugguggaaaagagacuuggcacucagcagcaacagccauuuacuguuuaaugggcucaggacagcugcugugggacacugucacaggcguuaacauggcucuguaa

SEQ ID NO: 61561 - RNA, 1401 nt, Artificial Sequence
  derived and/or modified CDS sequence (wt) from neuraminidase__InfluenzaB__AGX20991
augcuaccuucaacuauacaaacguuaacccuauuucucacaucagggggaguauuauuaucacuauaugugucagcuuuauuaucauacuuacuauauucggauauauugccaaaauucucaccaacagaaauaacugcaccaacaaugucauuggauugugcaaacgcaucaaauguucaggcugugaaccguucugcaacaaaaggggugacauuucuucucccagaaccggaguggacauacccgcguuuaucuugcccgggcucaaccuuucagaaagcacuccuaauuagcccucauagauucggagaaaccaaaggaaacucagcucccuugauaauaagggaaccuuuuauugcuuguggaccaaaugaaugcaaacacuuugcucuaacccauuaugcagcccaaccagggggauacuacaauggaacaagaggagacagaaacaagcugaggcaucuaauuucagucaaauugggcaaaaucccaacaguagaaaacuccauuuuccacauggcagcauggagcggguccgcuugccaugaugguaaggaauggacauauaucggaguugauggcccugacaaugaugcauugcucaaaguaaaauauggagaagcauauacugacacauaccauuccuaugcaaacaaaauccuaagaacacaagaaagugccugcaauugcaucgggggaaauuguuaucuuaugauaacugauggcucagcuucagguguuagugagugcagauuucuuaagauucgaaagggccgaauaauaaaagaaauauuuccaacaggaagaguaaaacacacugaggaaugcacaugcggauuugccagcaauaaaaccauagaaugugccuguagagauaacaguuacacagcaaaaagaccuuuugucaaauuaaacguggagacugauacagcagaaauaagauugaugugcacagauacuuauuuggacacccccagaccagaugauggaagcauaacaggcccuugugaaucuaauggggacaaagggaguggaggcaucaagggaggauuuguucaucaaagaauggaauccaagauuggaaggugguacucucgaacgaugucuaagacugaaaggauggggaugggacuguauguuaaguaugauggagacccaugggcugacagugaugcccuaguuuuuaguggaguaaugguuucaaugaaagaaccugguugguacuccuuuggcuucgaaauaaaagauaagaaaugcgauguccccuguauugggauagagauggugcaugaugguggaaaagagacuuggcacucagcagcaacagccauuuacuguuuaaugggcucaggacagcugcugugggacacugucacaggcguugacauggcucuguaa

SEQ ID NO: 61562 - RNA, 1401 nt, Artificial Sequence; identical to SEQ ID NO: 61136
  derived and/or modified CDS sequence (wt) from neuraminidase__InfluenzaB__AGX21002

SEQ ID NO: 61563 - RNA, 1401 nt, Artificial Sequence
  derived and/or modified CDS sequence (wt) from neuraminidase__InfluenzaB__AGX21013
augcuaccuucaacuauacaaacguuaacccuauuucucacaucagggggaguauuguuaucacuauaugugucagcuuuauuaucauacuuacuauauucggauauauugcuaaaauucucaccaacagaaauaacugcaccaacaaugucauuggauugugcaaacgcaucaaauguucaggcugugaaccguucugcaacaaaaggggugacauuucuucucccagaaccggaguggacauacccgcguuuaucuugcccgggcucaaccuuucagaaagcacuccuaauuagcccucauagauucggagaaaccaaaggaaacucagcucccuugauaauaagggaaccuuuuauugcuuguggaccaaaugaaugcaaacacuuugcuuuaacccauuaugcagcccaaccagggggauacuacaauggaacaagaggagacagaaacaagcugaggcaucuaauuucagucaaauugggcaaaaucccaacaguagaaaacuccauuuuccacauggcagcauggagcggguccgcgugccaugaugguaaggaauggacauauaucggaguugauggcccugacaaugaugcauugcucaaaguaaaauauggagaagcauauacugacacauaccauuccuaugcaaacaaaauccuaagaacacaagaaagugccugcaauugcaucgggggaaauuguuaucuuaugauaacugauggcucagcuucagguguuagugaaugcagauuucuuaagauucgagagggccgaauaauaaaagaaauauuuccaacaggaagaguaaaacacacugaggaaugcacaugcggauuugccagcaauaaaaccauagaaugugccuguagagauaacaguuacacagcaaaaagaccuuuugucaaauuaaacguggagacugauacagcagaaauaagauugaugugcacaaauacuuauuuggacacccccagaccagaugauggaagcauaacaggcccuugugaaucuaauggggacaaagggaguggaggcaucaagggaggauuuguucaucaaagaauggaauccaagauuggaaggugguacucucgaacgaugucuaagacugaaaggauggggaugggacuguaugucaaguaugauggagacccaugggcugacagugaugcccuagcuuuuaguggaguaaugguuucaaugaaagaaccugguugguacuccuuuggcuucgaaauaaaagauaagaaaugcgauguccccuguauugggauagagaugguacaugaugguggaaaagagacuuggcacucagcagcaacagccauuuacuguuugaugggcucaggacagcugcugugggacacugucacaggcguugacauggcucuguaa

SEQ ID NO: 61564 - RNA, 1401 nt, Artificial Sequence
  derived and/or modified CDS sequence (wt) from neuraminidase__InfluenzaB__AGX21024
augcuaccuucaacuauacaaacguuaacccuauuucucacaucagggggaguauuauuaucacuauaugugucagcuucauuaucauacuuacuauauucggauauauugcuaaaauucucaccaacagaaauaacugcaccaacaaugccauuggauugugcaaacgcaucaaauguucaggcugugaaccguucugcaacaaaaggagugacacuucuucucccagaaccggaguggacauacccgcguuuaucuugcccgggcucaaccuuucagaaagcacuccuaauuagcccuaauagauucggagaaaccaaaggaaacucagcucccuugauaauaagggaaccuuuuauugcuuguggaccaaaugaaugcaaacacuuugcucuaacccauuaugcagcccaaccagggggauacuacaauggaacaagaggagacagaaacaagcugaggcaucuaauuucagucaaauugggcaaaaucccaacaguagaaaacuccauuuuccacauggcagcauggagcggguccgcgugccaugaugguaaggaauggacauauaucggaguugauggcccugacaauaaugcauugcucaaaguaaaauauggagaagcauauacugacacauaccauuccuaugcaaacaaaauccuaagaacacaagaaagugccugcaauugcaucgggggaaauuguuaucuuaugauaacugauggcucagcuucagguguuagugaaugcagauuucuuaagauucgagagggccgaauaauaaaagaaauauuuccaacaggaagaguaaaacacacugaggaaugcacaugcggauuugccagcaauaaaaccauagaaugugccuguagagauaacaguuacacagcaaaaagaccuuuugucaaauuaaauguggagacugauacagcagaaguaagauugaugugcacagauacuuauuuggacacccccagaccaaaugauggaagcauaacaggcccuugugaaucugauggggacaaggggaguggaggcaucaagggaggauuuguucaucaaagaauggaauccaagauuggaaggugguacucucgaacgaugucuaaaacugaaaggauggggaugggacuguaugucaaguaugauggagacccaugggcugacagugaugcccuaacuuuuaguggaguaaugguuucaaugaaagaaccugguugguacuccuuuggcuucgaaauaaaagauaagaaaugcgauguccccuguauugggauagagaugguacaugaugguggaaaagagacuuggcacucagcagcaacagccauuuacuguuuaaugggcucaggacagcugcugugggacacugucacagguguugacauggcucuguaa

SEQ ID NO: 61565 - RNA, 1401 nt, Artificial Sequence; identical to SEQ ID NO: 61136
  derived and/or modified CDS sequence (wt) from neuraminidase__InfluenzaB__AGX21035

SEQ ID NO: 61566 - RNA, 1401 nt, Artificial Sequence
  derived and/or modified CDS sequence (wt) from neuraminidase__InfluenzaB__AGX21046
augcuaccuucaacuauacaaacguuaacccuauuucucacaucagggggaguauuauuaucacuauaugugucagcuucauuaucauacuuacuauauucggauauauugcuaaaauucucaccaacagaaauaacugcaccagcaaugccauuggauugugcaaacgcaucaaauguucaggcugugaaccguucugcaacaaaaggggugacacuucuucucccagaaccggaguggacauacccgcguuuaucuugcccgggcucaaccuuucagaaagcacuccuaauuagcccucauagauucggagaaaccaaaggaaacucagcucccuugauaauaagggaaccuuuuauugcuuguggaccaaaugaaugcaaacacuuugcucuaacccauuaugcagcccaaccagggggauacuacaauggaacaagaggagacagaaacaagcugaggcaucuaauuucagucaaauugggcaaaaucccaacaguagaaaacuccauuuuccacauggcagcauggagcggguccgcgugccaugaugguaaggaauggacauauaucggaguugauggcccugacaauaaugcauugcucaaaguaaaauauggagaagcauauacugacacauaccauuccuaugcaaacaaaauccuaagaacacaagaaagugccugcaauugcaucgggggaaauuguuaucuuaugauaacugauggcucagcuucagguguuagugaaugcagauuucuuaagauucgagagggccgaauaauaaaagaaauauuuccaacaggaagaguaaaacacacugaggaaugcacaugcggauuugccagcaauaaaaccauagaaugugccuguagagauaacaguuacacagcaaaaagaccuuuugucaaauuaaacguggagacugauacagcagaaauaagauugaugugcacagauacuuauuuggacacccccagaccaaaugauggaagcauaacaggcccuugugaaucugauggggacaaagggaguggaggcaucaagggaggauuuguucaucaaagaauggaauccaagauuggaaggugguacucucgaacgaugucuaaaacugaaaggauggggaugggacuguaugucaaguaugauggagacccaugggcugacagugaugcccuagcuuuuaguggaguaaugguuucaaugaaagaaccugguugguacuccuuuggcuucgaaauaaaagauaagaaaugcgauguccccuguauugggauagagaugguacaugaugguggaaaagagacuuggcacucagcagcaacagccauuuacuguuuaaugggcucaggacagcugcugugggacacugucacagguguugacauggcuuuguaa

SEQ ID NO: 61567 - RNA, 1401 nt, Artificial Sequence; identical to SEQ ID NO: 61134
  derived and/or modified CDS sequence (wt) from neuraminidase__InfluenzaB__AGX21057

SEQ ID NO: 61568 - RNA, 1401 nt, Artificial Sequence; identical to SEQ ID NO: 61552
  derived and/or modified CDS sequence (wt) from neuraminidase__InfluenzaB__AGX21068

SEQ ID NO: 61569 - RNA, 1401 nt, Artificial Sequence
  derived and/or modified CDS sequence (wt) from neuraminidase__InfluenzaB__AGX21079
augcuaccuucaacuauacaaacguuaacccuauuucucacaucagggggaguauuauuaucacuauaugugucagcuucauuaucauacuuacuauauucggauauauugcuaaaauucucaccaacagaaauaacugcaccagcaaugccauuggauugugcaaacgcaucaaauguucaggcugugaaccguucugcaacaaaaggggugacacuucuucucccagaaccggaguggacauacccgcguuuaucuugcccgggcucaaccuuucagaaagcacuccuaauuagcccucauagauucggagaaaccaaaggaaacucagcucccuugauaauaagggaaccuuuuauugcuuguggaccaaaugaaugcaaacacuuugcucuaacccauuaugcagcccaaccagggggauacuacaauggaacaagaggagacagaaacaagcugaggcaucuaauuucagucaaauugggcaaaaucccaacaguagaaaacuccauuuuccacauggcagcauggagcggguccgcgugccaugaugguaaggaauggacauauaucggaguugauggcccugacaauaaugcauugcucaaaguaaaauauggagaagcguauacugacacauaccauuccuaugcaagcaaaauccuaagaacacaagaaagugccugcaauugcaucgggggaaauuguuaucuuaugauaacugauggcucagcuucagguguuagugaaugcagauuucuuaagauucgagagggccgaauaauaaaagaaauauuuccaacaggaagaguaaaacacacugaggaaugcacaugcggauuugccagcaauaaaaccauagaaugugccuguagagauaacaguuacacagcaaaaagaccuuuugucaaauuaaacguggagacugauacagcagaaauaagauugaugugcacagauacuuauuuggacacccccagaccaaaugauggaagcauaacaggcccuugugaaucugauggggacaaagggaguggaggcaucaagggaggauuuguucaucaaagaauggaauccaagauuggaaggugguacucucgaacgaugucuaaaacugaaaggauggggaugggacuguaugucaaguaugauggagacccaugggcugacagugaugcccuagcuuuuaguggaguaaugguuucaaugaaagaaccugguugguacuccuuuggcuucgaaauaaaagauaagaaaugcgauguccccuguauugggauagagaugguacaugaugguggaaaagagacuuggcacucagcagcaacagccauuuacuguuuaaugggcucaggacagcugcugugggacacugucacagguguugacauggcucuguaa

SEQ ID NO: 61570 - RNA, 1401 nt, Artificial Sequence; identical to SEQ ID NO: 61134
  derived and/or modified CDS sequence (wt) from neuraminidase__InfluenzaB__AGX21088

SEQ ID NO: 61571 - RNA, 1401 nt, Artificial Sequence; identical to SEQ ID NO: 61134
  derived and/or modified CDS sequence (wt) from neuraminidase__InfluenzaB__AGX21099

SEQ ID NO: 61572 - RNA, 1401 nt, Artificial Sequence
  derived and/or modified CDS sequence (wt) from neuraminidase__InfluenzaB__AGX21110
augcuaccuucaacuauacaaacauuaacccuauuucucacaucagggggaguauuguuaucacuauaugugucagcuuuauuaucauacuuacuauauucggauauauugcuaaaauucucaccaacagaaauaacugcaccaacaaugucauuggauugugcaaacgcaucaaauguucaggcugugaaccguuuugcaacaaaaggggugacauuucuucucccagaaccggaguggacauacccgcguuuaucuugcccgggcucaaccuuucagaaagcacuccuaauuagcccucauagauucggagaaaccaaaggaaacucagcucccuugauaauaagggaaccuuuuauugcuuguggaccaaaugaaugcaaacacuuugcucuaacccauuaugcagcccaaccagggggauacuacaauggaacaagaggagacagaaacaagcugaggcaucuaauuucagucaaauugggcaaaaucccaacaguagaaaacuccauuuuccacauggcagcauggagcggguccgcgugccaugaugguaaggaauggacauauaucggaguugauggcccugacaaugaugcauugcucaaaguaaaauauggagaagcauauacugacacauaccauuccuaugcaaacaaaauccuaagaacacaagaaagugccugcaauugcaucgggggaaauuguuaucuuaugauaacugauggcucagcuucagguguuagugaaugcagauuucuuaagauucgagagggccgaauaauaaaagaaauauuuccaacaggaagaguaaaacacacugaggaaugcacaugcggauuugccagcaauaaaaccauagaaugugccuguagagauaacaguuacacagcaaaaagaccuuuugucaaauuaaacguggagacugauacagcagaaauaagauugaugugcacagauacuuauuuggacacccccagaccagaugauggaagcauaacaggcccuugugagucuaauggggacaaagggaguggaggcaucaagggaggauuuguucaucaaagaauggaauccaagauuggaaggugguacucucgaacgaugucuaagacugaaaggauggggaugggacuguaugucaaguaugauggagacccaugggcugacagugaugcccuagcuuuuaguggaguaaugguuucaaugaaagaaccugguugguacuccuuuggcuucgaaauaaaagauaagaaaugcgauguccccuguauugggauagagaugguacaugaugguggaaaagagacuuggcacucagcagcaacagccauuuacuguuugaugggcucaggacagcugcugugggacacugucacaggcguugacauggcucuguaa

SEQ ID NO: 61573 - RNA, 1401 nt, Artificial Sequence
  derived and/or modified CDS sequence (wt) from neuraminidase__InfluenzaB__AGX21121
augcuaccuucaacuauacaaacguuaacccuauuucucacaucagggggaguauuguuaucacuauaugugucagcuuuauuaucauacuuacuauauucggauauauugcuaaaauucucaccaacagaaauaacugcaccaacaaugucauuggauugugcaaacgcaucaaauguucaggcugugaaccguucugcaacaaaaggggugacauuucuucucccagaaccggaguggacauacccacguuuaucuugcccgggcucaaccuuucagaaagcacuccuaauuagcccucauagauucggagaaaccaaaggaaacucagcucccuugauaauaagggaaccuuuuauugcuuguggaccaaaugaaugcaaacacuuugcucuaacccauuaugcagcccaaccagggggauacuacaauggaacaagaggagacagaaacaagcugaggcaucuaauuucagucaaauugggcaaaaucccaacaguagaaaacuccauuuuccacauggcagcauggagcggguccgcgugccaugaugguaaggaauggacauauaucggaguugauggcccugacaaugaugcauugcucaaaguaaaauauggagaagcauauacugacacauaccauuccuaugcaaacaaaauccuaagaacacaagaaagugccugcaauugcaucgggggaaauuguuaucuuaugauaacugauggcucagcuucagguguuagugaaugcagauuucuuaagauucgagagggccgaauaacaaaagaaauauuuccaacaggaagaguaaaacacacugaggaaugcacaugcggauuugccagcaauaaaaccauagaaugugccuguagagauaacaguuacacagcaaaaagaccuuuugucaaauuaaacguggagacugauacagcagaaauaagauugaugugcacagauacuuauuuggacacccccagaccagaugauggaagcauaacaggcccuugugaaucuaauggggacaaagggaguggaggcaucaagggaggauuuguucaucaaagaauggaauccaagauuggaaggugguacucucgaacgaugucuaagacugaaaggauggggaugggacuguaugucaaguaugauggagacccaugggcugacagugaugcccuagcuuuuaguggaguaaugguuucaaugaaagaaccugguugguacuccuuuggcuucgaaauaaaagauaagaaaugcgauguccccuguauugggauagagaugguacaugaugguggaaaagagacuuggcacucagcagcaacagccauuuacuguuugaugggcucaggacagcugcugugggacacugucacaggcguugacauggcucuguaa

SEQ ID NO: 61574 - RNA, 1401 nt, Artificial Sequence
  derived and/or modified CDS sequence (wt) from neuraminidase__InfluenzaB__AGX21132
augcuaccuucaacuauacaaacguuaacccuauuucucacaucagggggaguauuauuaucacuauaugugucagcuucauuaucauacuuacuauauucggauauauugcuaaaauucucaccaacagaaauaacugcaccagcaaugccauuggauugugcaaacgcaucaaauguucaggcugugaaccguucugcaacaaaaggggugacacuucuucucccagaaccggaguggacauacccgcguuuaucuugcccgggcucaaccuuucagaaagcacuccuaauuagcccucauagauucggagaaaccaaaggaaacucagcucccuugauaauaagggaaccuuuuauugcuuguggaccaaaugaaugcaaacacuuugcucuaacccauuaugcagcccaaccagggggauacuacaauggaacaagaggagacagaaacaagcugaggcaucuaauuucagucaaauugggcaaaaucccaacaguagaaaacuccauuuuccacauggcagcauggagcggguccgcgugccaugaugguaaggaauggacauauaucgggguugauggcccugacaauaaugcauugcucaaaguaaaauauggagaagcauauacugacacauaccauuccuaugcaaacaaaauccuaagaacacaagaaagugccugcaauugcaucgggggaaauuguuaucuuaugauaacugauggcucagcuucagguguuagugaaugcagauuucuuaagauucgagagggccgaauaauaaaagaaauauuuccaacaggaagaguaaaacacacugaggaaugcacaugcggauuugccagcaauaaaaccauagaaugugccuguagagauaacaguuacacagcaaaaagaccuuuugucaaauuaaacguggagacugauacagcagaaauaagauugaugugcacagauacuuauuuggacacccccagaccaaaugauggaagcauaacaggcccuugugaaucugauggggacaaagggaguggaggcaucaagggaggauuuguucaucaaagaauggaauccaagauuggaaggugguacucucgaacgaugucuaaaacugaaaggauggggaugggacuguaugucaaguaugauggagacccaugggcugacagugaugcccuagcuuuuaguggaguaaugguuucaaugaaagaaccugguugguacuccuuuggcuucgaaauaaaagauaagaaaugcgauguccccuguauugggauagagaugguacaugaugguggaaaagagacuuggcacucagcagcaacagccauuuacuguuuaaugggcucaggacagcugcugugggacacugucacagguguugacauggcuuuguaa

SEQ ID NO: 61575 - RNA, 1401 nt, Artificial Sequence
  derived and/or modified CDS sequence (wt) from neuraminidase__InfluenzaB__AGX21143
augcuaccuucaacuauacaaacguuaacccuauuucucacaucagggggaguauuguuaucacuauaugugucagcuuuauuaucauacuuacuauauucggauauauugcuaaaauucucaccaacagaaauaacugcaccaacaaugucauuggauugugcaaacgcaucaaauguucaggcugugaaccguucugcaacaaaaggggugacauuucuucucccagaaccggaguggacauacccgcguuuaucuugcccgggcucaaccuuucagaaagcacuccuaauuagcccucauagauucggagaaaccaaaggaaacucagcucccuugauaauaagggaaccuuuuauugcuuguggaccaaaugaaugcaaacacuuugcucuaacccauuaugcagcccaaccagggggauacuacaauggaacaagaggagacagaaacaagcugaggcaucuaauuucagucaaauugggcaaaaucccaacaguagaaaacuccauuuuccacauggcagcauggagcggguccgcgugccaugaugguaaggaauggacauauaucggaguugauggcccugacaaugaugcauugcucaaaguaaaauauggagaagcauauacugacacauaccauuccuaugcaaacaaaauccuaagaacacaagaaagugccugcaauugcaucgggggaaauuguuaucuuaugauaacugauggcucagcuucagguguuagugaaugcagauuucuuaagauucgagagggccgaauaauaaaagaaauauuuccaacaggaagaguaaaacacacugaggaaugcacaugcggauuugccagcaauaaaaccauagaaugugccuguagagauaacaguuacacagcaaaaagaccuuuugucaaauuaaacguggagacugauacagcagaaauaagauugaugugcacagauacuuauuuggacacccccagaccagaugauggaagcauaacaggcccuugugaaucuaauggggacaaagggaguggaggcaucaagggaggauuuguucaucaaagaauggaauccaagauuggaaggugguacucucgaacgaugucuaagacugaaaggauggggaugggacuguaugucaaguaugauggagacccaugggcugacagugaugcccuagcuuuuaguggaguaaugguuucaaugaaagaaccugguugguacuccuuuggcuucgaaauaaaagauaagaaaugcgauguccccuguauugggauagagaugguacaugaugguggaaaagagacuuggcacucagcagcaacagccauuuacuguuugaugggcucaggacagcugcugugggacacugucacaggcguugacauggcucuguaa

SEQ ID NO: 61576 - RNA, 1401 nt, Artificial Sequence; identical to SEQ ID NO: 61136
  derived and/or modified CDS sequence (wt) from neuraminidase__InfluenzaB__AGX21154

SEQ ID NO: 61577 - RNA, 1401 nt, Artificial Sequence
  derived and/or modified CDS sequence (wt) from neuraminidase__InfluenzaB__AGX21165
augcuaccuucaacuauacaaacguuaacccuauuucucacaucagggggaguauuguuaucacuauaugugucagcuuuauuaucauacuuacuauauucggauauauugcuaaaauucucaccaacagaaauaacugcaccaacaaugucauuggauugugcaaacgcaucaaauguucaggcugugaaccguucugcaacaaaaggggugacauuucuucucccagaaccggaguggacauacccgcguuuaucuugcccgggcucaaccuuucagaaagcacuccuaauuagcccucauagauucggagaaaccaaaggaaacucagcucccuugauaauaagggaaccuuuuauugcuuguggaccaaaugaaugcaaacacuuugcucuaacccauuaugcagcccaaccagggggauacuacaauggaacaagaggagacagaaacaagcuaaggcaucuaauuucagucaaauugggcaaaaucccaacaguagaaaacuccauuuuccacauggcagcauggagcggguccgcgugccaugaugguaaggaauggacauauaucggaguugauggcccugacaaugaugcauugcucaaaguaaaauauggagaagcauauacugacacauaccauuccuaugcaaacaaaauccuaagaacacaagaaagugccugcaauugcaucgggggaaauuguuaucuuaugauaacugauggcucagcuucagguguuagugaaugcagauuucuuaagauucgagagggccgaauaauaaaagaaauauuuccaacaggaagaguaaaacacacugaggaaugcacaugcggauuugccagcaauaaaaccauagaaugugccuguagagauaacaguuacacagcaaaaagaccuuuugucaaauuaaacauggagacugauacagcagaaauaagauugaugugcacagauacuuauuuggacacccccagaccagaugauggaagcauaacaggcccuugugaaucuaauggggacaaagggaguggaggcaucaagggaggauuuguucaucaaagaauggaauccaagauuggaaggugguacucucgaacgaugucuaagacugaaaggauggggaugggacuguaugucaaguaugauggagacccaugggcugacagugaugcccuagcuuuuaguggaguaaugguuucaaugaaagaaccugguugguacuccuuuggcuucgaaauaaaagauaagaaaugcgauguccccuguauugggauagagaugguacaugaugguggaaaagagacuuggcacucagcagcaacagccauuuacuguuugaugggcucaggacagcugcugugggacacugucacaggcguugacauggcucuguaa

SEQ ID NO: 61578 - RNA, 1401 nt, Artificial Sequence
  derived and/or modified CDS sequence (wt) from neuraminidase__InfluenzaB__AGX21176
augcuaccuucaacuauacaaauguuaacccuauuucucacaucagggggaguacuauuaucacuauaugugucagcuucauuaucauacuuacuauauucggauauauugcuaaaauucucaccaacagaaauaacugcaccaacaaugccauuggauugugcaaacgcaucaaauguucaugcugugaaccguucugcaacaaaaggggugacauuucuucucccagaaccggaguggacauacccgcguuuaucuugcccgggaucaaccuuucagaaagcacuccuaauuagcccucauagauucggagaaaccaaaggaaacucagcucccuugauaauaagggaaccuuuuauugcuuguggaccaaaugaaugcaaacacuuugcucuaacccauuaugcagcccaaccagggggauacuacaauggaacaagaggagacagaaacaagcugaggcaucuaauuucagucaaauugggcaaaaucccaacaguagaaaacuccauuuuccacauggcagcauggagcggguccgcaugccaugaugguaaggaauggacauauaucggaguugaugguccugacaauaaugcauugcucaaaauaaaauauggagaagcauauacugacacauaucauuccuaugcaaacaacauccuaagaacacaagaaagugccugcaauugcaucgggggaaauuguuaucuuaugauaacugauggcucagcuucagguguuagugaaugcagauuucuuaagauucgagagggccgaauaauaaaagaaauauuuccaacaggaagaguaaaacauacugaggagugcacaugcggauuugccagcaauaaaaccauagaaugugccuguagagauaacaguuacacagcaaaaagacccuuugucaaauuaaauguggaaacugauacagcagaaauaagauugaugugcacagauaccuauuuggacacccccagaccggaugauggaagcauaacaggcccuugugaaucuaacggggacaaagggaguggaggcaucaagggaggauuuguucaucaaagaauggcauccaagauugggaggugguacucucgaacgaugucuaaaacugaaaggaaggggaugggacuguaugucaaguaugauggagacccauggacugacagugaugcccuugcuuuuaggggaguaaugguuucaaugaaagaaccugguugguacuccuuuggcuucgaaauaaaagauaagaaaugcgauguccccuguauugggauagagaugguacaugaugguggaaaagagacuuggcacucagcagcaacagccauuuacuguuuaaugggcucaggacagcugcugugggacacagucacaggugucgacauggcucuauaa

SEQ ID NO: 61579 - RNA, 1401 nt, Artificial Sequence
  derived and/or modified CDS sequence (wt) from neuraminidase__InfluenzaB__AGX21187
augcuaccuucaacuauacaaacguuaacccuauuucucacaucagggggaguauuauuaucacuauaugugucagcuucauuaucauacuuacuauauucggauauauugcuaaaauucucaccaacagaaauaacugcaccaacaaugccauuggauugugcaaacgcaucaaauguucaggcugugaaccguucugcaacaaaaggagugacacuucuucucccagaaccggaguggacauacccgcguuuaucuugcccgggcucaaccuuucagaaagcacuccuaauuagcccucauagauucggagaaaccaaaggaaacucagcucccuugauaauaagggaaccuuuuauugcuuguggaccaaaugaaugcaaacacuuugcucuaacccauuaugcagcccaaccagggggauacuacaauggaacaagaggagacagaaacaagcugaggcaucuaauuucagucaaauugggcaaaaucccaacaguagaaaacuccauuuuccacauggcagcauggagcggguccgcgugccaugaugguaaggaauggacauauaucggaguugauggcccugacaauaaugcauugcucaaaguaaaauauggagaagcauauacugacacauaccauuccuaugcaaacaaaauccuaagaacacaagaaagugccugcaauugcaucgggggaaauuguuaucuuaugauaacugauggcucagcuucagguguuagugaaugcagauuucuuaagauucgagagggccgaauaauaaaagaaauauuuccaacaggaagaguaaaacacacugaggaaugcacaugcggauuugccagcaauaaaaccauagaaugugucuguagagauaacaguuacacagcaaaaagaccuuuugucaaauuaaauguggagacugauacagcagaaguaagauugaugugcacagauacuuauuuggacacccccagaccaaaugauggaagcauaacaggcccuugugaaucugauggggacaaggggaguggaggcaucaagggaggauuuguucaucaaagaauggaauccaagauuggaaggugguacucucgaacgaugucuaaaacugaaaggauggggaugggacuguaugucaaguaugauggagacccaugggcugacagugaugcccuaacuuuuaguggaguaaugguuucaaugaaagaaccugguugguacuccuuuggcuucgaaauaaaagauaagaaaugcgauguccccuguauugggauagagaugguacaugaugguggaaaagagacuuggcacucagcagcaacagccauuuacuguuuaaugggcucaggacagcugcugugggacacugucacagguguugacauggcucuguaa

SEQ ID NO: 61580 - RNA, 1401 nt, Artificial Sequence
  derived and/or modified CDS sequence (wt) from neuraminidase__InfluenzaB__AGX21198
augcuaccuucaacuauacaaauguuaacccuauuucucacaucagggggaguacuauuaucacuauaugugucagcuucauuaucauacuuacuauauucggauauauugcuaaaauucucaccaacagaaauaacugcaccaacaaugccauuggauugugcaaacgcaucaaauguucaugcugugaaccguucugcaacaaaaggggugacauuucuucucccagaaccggaguggacauacccgcguuuaucuugcccgggaucaaccuuucagaaagcacuccuaauuagcccucauagauucggagaaaccaaaggaaacucagcucccuugauaauaagggaaccuuuuauugcuugugaaccaaaugaaugcaaacacuuugcucuaacccauuaugcagcccaaccagggggauacuacaauggaacaagaggagacagaaacaagcugaggcaucuaauuucagucaaauugggcaaaaucccaacaguagaaaacuccauuuuccacauggcagcauggagcggguccgcaugccaugaugguaaggaauggacauauaucggaguugaugguccugacaauaaugcauugcucaaaauaaaauauggagaagcauauacugacacauaucauuccuaugcaaacaacauccuaagaacacaagaaagugccugcaauugcaucgggggaaauuguuaucuuaugauaacugauggcucagcuucagguguuagugaaugcagauuucuuaagauucgagagggccgaauaauaaaagaaauauuuccaacaggaagaguaaaacauacugaggagugcacaugcggauuugccagcaauaaaaccauagaaugugccuguagagauaacaguuacacagcaaaaagacccuuugucaaauuaaacguggaaacugauacagcagaaauaagacugaugugcacagauaccuauuuggacacccccagaccggaugauggaagcauaacaggcccuugugaaucuaauggggacaaagggaguggaggcaucaagggaggauuuguucaucaaagaauggcauccaagauugggaggugguacucucgaacgaugucuaaaacugaaaggaaggggaugggacuguaugucaaguaugauggagacccauggacugacagugaugcccuugcuuuuaggggaguaaugguuucaaugaaagaaccugguugguacuccuuuggcuucgaaauaaaagauaagaaaugcgauguccccuguauugggauagagaugguacaugaugguggaaaagagacuuggcacucagcagcaacagccauuuacuguuuaaugggcucaggacagcugcugugggacacagucacaggugucgacauggcucuauaa

SEQ ID NO: 61581 - RNA, 1401 nt, Artificial Sequence
  derived and/or modified CDS sequence (wt) from neuraminidase__InfluenzaB__AGX21209
augcuaccuucaacuauacaaauguuaacccuauuucucacaucagggggaguacuauuaucacuauaugugucagcuucauuaucauacuuacuauauucggauauauugcuaaaauucucaccaacagaaauaacugcaccaacaaugccauuggauugugcaaacgcaucaaauguucaugcugugaaccguucugcaacaaaaggggugacauuucuucucccagaaccggaguggacauacccgcguuuaucuugcccgggaucaaccuuucagaaagcacuccuaauuagcccucauagauucggagaaaccaaaggaaacucagcucccuugauaauaagggaaccuuuuauugcuuguggaccaaaugaaugcaaacacuuugcucuaacccauuaugcagcccaaccagggggauacuacaauggaacaagaggagacagaaacaagcugaggcaucuaauuucagucaaauugggcaaaaucccaacaguagaaaacuccauuuuccacauggcagcauggagcggguccgcaugccaugaugguaaggaauggacauauaucggaguugaugguccugacaauaaugcauugcucaaaauaaaauauggagaagcauauacugacacauaucauuccuaugcaaacaacauccuaagaacacaagaaagugccugcaauugcaucgggggaaauuguuaucuuaugauaacugauggcucagcuucagguguuagugaaugcagauuucuuaagauucgagagggccgaauaauaaaagaaauauuuccaacaggaagaguaaaacauacugaggagugcacaugcggauuugccagcaauaaaaccauagaaugugccuguagagauaacaguuacacagcaaaaagacccuuugucaaauuaaacguggaaacugauacagcagaaauaagauugaugugcacagauaccuauuuggacacccccagaccggaugauggaagcauaacaggcccuugugaaucuaauggggacaaagggaguggaggcaucaagggaggauuuguucaucaaagaauggcauccaagauugggaggugguacucucgaacaaugucuaaaacugaaaggaaggggaugggacuguaugucaaguaugauggagacccauggacugacagugaugcccuugcuuuuaggggaguaaugguuucaaugaaagaaccugguugguacuccuuuggcuucgaaauaaaagauaagaaaugcgauguccccuguauugggauagagaugguacaugaugguggaaaagagacuuggcacucagcagcaacagccauuuacuguuuaaugggcucaggacaacugcugugggacacagucacaggugucgacauggcucuauaa

SEQ ID NO: 61582 - RNA, 1401 nt, Artificial Sequence
  derived and/or modified CDS sequence (wt) from neuraminidase__InfluenzaB__AGX21220
augcuaccuucaacuauacaaacguuaacccuauuucucacaucagggggaguauuauuaucacuauaugugucagcuucauuaucauacuuacuauauucggauauauugcuaaaauucucaccaacagaaauaacugcaccagcaaugccauuggauugugcaaacgcaucaaauguucaggcugugaaccguucugcaacaaaaggggugacacuucuucucccagaaccggaguggacauacccgcguuuaucuugcccgggcucaaccuuucagaaagcacuccuaauuagcccucauagauucggagaaaccaaaggaaacucagcucccuugauaauaagggaaccuuuuauugcuuguggaccaaaugaaugcaaacacuuugcucuaacccauuaugcagcccaaccagggggauacuacaauggaacaagaggagacagaaacaagcugaggcaucuaauuucagucaaauugggcaaaaucccaacaguagaaaacuccauuuuccacauggcagcauggagcggguccgcgugccaugaugguaaggaauggacauauaucggaguugauggcccugacaauaaugcauugcucaaaguaaaauauggagaagcguauacugacacauaccauuccuaugcaaacaaaauccuaagaacacaagaaagugccugcaauugcaucgggggaaauuguuaucuuaugauaacugauggcucagcuucagguguuagugaaugcagauuucuuaagauucgagagggccgaauaauaaaagaaauauuuccaacaggaagaguaaaacacacugaggaaugcacaugcggauuugccagcaauaaaaccauagaaugugccuguagagauaacaguuacacagcaaaaagaccuuuugucaaauuaaacguggagacugauacagcagaaauaagauugaugugcacagauacuuauuuggacacccccagaccaaaugauggaagcauaacaggcccuugugaaucugauggggacaaagggaguggagguaucaagggaggauuuguucaucaaagaauggaauccaagauuggaaggugguacucucgaacgaugucuaaaacugaaaggauggggaugggacuguaugucaaguaugauggagacccaugggcugacagugaugcccuagcuuuuaguggaguaaugguuucaaugaaagaaccugguugguacuccuuuggcuucgaaauaaaagauaagaaaugcgauguccccuguauugggauagagaugguacaugaugguggaaaagagacuuggcacucagcagcaacagccauuuacuguuuaaugggcucaggacagcugcugugggacacugucacagguguugacauggcucuguaa

SEQ ID NO: 61583 - RNA, 1401 nt, Artificial Sequence
  derived and/or modified CDS sequence (wt) from neuraminidase__InfluenzaB__AGX21231
augcuaccuucaacuauacaaacguuaacccuauuucucacaucagggggaguauuauuaucacuauaugugucagcuuuauuaucauacuuacuauauucggauauauugcuaaaauucucaccaacagaaauaacugcaccaacaaugucauuggauugugcaaacgcaucaaauguucaggcugugaaccguucugcaacaaaaggggugacauuucuucucccagaaucggaguggacauacccgcguuuaucuugcccgggcucaaccuuucagaaagcacuccuaauuagcccucauagauucggagaaaccaaaggaaacucagcucccuugauaauaagggaaccuuuuauugcuuguggaccaaaugaaugcaaacacuuugcucuaacccauuaugcagcccaaccagggggauacuacaauggaacaagaggagacagaaacaagcugaggcaucuaauuucagucaaauugggcaaaaucccaacaguagaaaacuccauuuuccacauggcagcauggagcggguccgcgugccaugaugguaaggaauggacauauaucggaguugauggcccugacaaugaugcauugcucaaaguaaaauauggagaagcauauacugacacauaccauuccuaugcaaacaaaauccuaagaacacaagaaagugccugcaauugcaucgggggaaauuguuaucuuaugauaacugauggcucagcuucagguguuagugaaugcagauuucuuaagauucgagagggccgaauaauaaaagaaauauuuccaacaggaagaguaaaacacacugaggaaugcacaugcggauuugccagcaauaaaaccauagaaugugccuguagagauaacaguuacacagcaaaaagaccuuuugucaaauuaaacguggagacugauacagcagaaauaagauugaugugcacagauacuuauuuggacacccccagaccagaugauggaagcauaacaggcccuugugaaucuaauggggacaaagggaguggaggcaucaagggaggauuuguucaucaaagaauggaauccaagauuggaaggugguacucucgaacgaugucuaagacugaaaggauggggaugggacuguaugucaaguaugauggagacccaugggcugacagugaugcccuagcuuuuaguggaguaaugguuucaaugaaagaaccugguugguacuccuuuggcuucgaaauaaaagauaagaaaugcgauguccccuguauugggauagagaugguacaugaugguggaaaagagacuuggcacucagcagcaacagccauuuacuguuugaugggcucaggacagcugcugugggacacugucacaggcguugacauggcucuguaa

SEQ ID NO: 61584 - RNA, 1401 nt, Artificial Sequence; identical to SEQ ID NO: 61134
  derived and/or modified CDS sequence (wt) from neuraminidase__InfluenzaB__AGX21242

SEQ ID NO: 61585 - RNA, 1401 nt, Artificial Sequence
  derived and/or modified CDS sequence (wt) from neuraminidase__InfluenzaB__AGX21253
augcuaccuucaacuauacaaauguuaacccuauuucucacaucagggggaguacuauuaucacuauaugugucagcuucauuaucauacuuacuauauucggauauauugcuaaaauucucaccaacagaaauaacugcaccaacaaugccauuggauugugcaaacgcaucaaauguucaugcugugaaccguucugcaacaaaaggggugacauuucuucucccagaaccggaguggacauacccgcguuuaucuugcccgggcucaaccuuucagaaagcacuccuaauuagcccucauagauucggagaaaccaaaggaaacucagcucccuugauaauaagggaaccuuuuauugcuuguggaccaaaugaaugcaaacacuuugcucuaacccauuaugcagcccaaccagggggauacuacaauggaacaagaggagacagaaacaagcugaggcaucuaauuucagucaaauugggcaaaaucccaacaguagaaaacuccauuuuccacauggcagcauggagcggguccgcaugccaugaugguaaggaauggacauauaucggaguugaugguccugacaauaaugcauugcucaaaauaaaauauggagaagcauauacugacacauaucauuccuaugcaaacaacauccuaagaacacaagaaagugccugcaauugcaucgggggaaauuguuaucuuaugauaacugauggcucagcuucagguguuagugaaugcagauuucuuaagauucgagagggccgaauaauaaaagaaauauuuccaacaggaagaguaaaacauacugaggagugcacaugcggauuugccagcaauaaaaccauagaaugugccuguagagauaacaguuacacagcaaaaagacccuuugucaaauuaaacguggaaacugauacagcagaaauaagauugaugugcacagauacuuauuuggacacccccagaccagaugauggaagcauaacaggcccuugugaaucuaauggggacaaagggaguggaggcaucaagggaggauuuguucaucaaagaauggcauccaaaauugggaggugguacucucgaacgaugucuaaaacugaaaggaaggggaugggacuguaugucaaguaugauggagacccauggacugacagugaugcccuugcuuuuaggggaguaaugguuucaaugaaagaaccugguugguacuccuuuggcuucgaaauaaaagauaagaaaugcgauguccccuguauugggauagagaugguacaugaugguggaaaagagacuuggcacucagcagcaacagccauuuacuguuuaaugggcucaggacagcugcugugggacacagucacaggugucgacauggcucuauaa

SEQ ID NO: 61586 - RNA, 1401 nt, Artificial Sequence
  derived and/or modified CDS sequence (wt) from neuraminidase__InfluenzaB__AGX21264
augcuaccuucaacuauacaaacguuaacccuauuucucacaucagggggaguauuauuaucacuauaugugucagcuucauuaucauacuuacuauauucggauauauugcuaaaauucucaacaacagaaauaacugcaccaacaaugccauuggauugugcaaacgcaucaaauguucaggcugugaaccguucugcaacaaaaggggugacacuucuucucccagaaccggaguggacauacccgcguuuaucuugcccgggcucaaccuuucagaaagcacuccuaauuagcccucauagauucggagaaaacaaaggaaacucagcucccuugauaauaagggaaccuuuuauugcuuguggaccaaaugaaugcaaacacuuugcucuaacccauuaugcagcccaaccagggggauacuacaauggaacaagaggagacagaaacaagcugaggcaucuaauuucagucaaauugggcaaaaucccaacaguagaaaacuccauuuuccacauggcagcauggagcggguccgcgugccaugaugguaaggaauggacauauaucggaguugauggcccugacaauaaugcauugcucaaaguaaaauauggagaagcauauacugacacauaccauuccuaugcaaacaaaauccuaagaacacaagaaagugccugcaauugcaucgggggaaauuguuaucuuaugauaacugauggcucagcuucagguguuagugaaugcagauuucuuaagauucgagagggccgaauaauaaaagaaauauuuccaacaggaagaguaaaacacacugaggaaugcacaugcggauuugccagcaauaaaaccauagaaugugccuguagagauaacaguuacacagcaaaaagaccuuuugucaaauuaaacguggagacugauacagcagaaauaagauugaugugcacagauacuuauuuggacacccccagaccaaaugauggaagcauaacaggcccuugugaaucugauggggacaaagggaguggaggcaucaagggaggauuuguucaucaaagaauggaauccaagauuggaaggugguacucucgaacgaugucuaaaacugaaaggauggggaugggacuguaugucaaguaugauggagacccaugggcugacagugaugcccuagcuuuuaguggaguaaugguuucaaugaaagaaccuaguugguacuccuuuggcuucgaaauaaaagauaagaaaugcgauguccccuguauugggauagagaugguacaugaugguggaaaagagacuuggcacucagcagcaacagccauuuacuguuuaaugggcucaggacagcugcugugggacacugucacagguguugacauggcucuguaa

SEQ ID NO: 61587 - RNA, 1401 nt, Artificial Sequence
  derived and/or modified CDS sequence (wt) from neuraminidase__InfluenzaB__AGX21275
augcuaccuucaacuauacaaacguuaacccuauuucucacaucagggggaguauuguuaucacuauaugugucagcuuuauuaucauacuuacuauauucggauauauugcuaaaauucucaccaacagaaauaacugcaccaacaaugucauuggauugugcaaacgcaucaaauguucaggcugugaaccguucugcaacaaaaggggugacauuucuucucccagaaccggaguggacauacccgcguuuaucuugcccgggcucaaccuuucagaaagcacuccuaauuagcccucauagauucggagaaaccaaaggaaacucagcucccuugauaauaagggaaccuuuuauugcuuguggaccaaaugaaugcaaacacuuugcucuaacccauuaugcagcccaaccagggggauacuacaauggaacaagaggagacagaaacaagcugaggcaucuaauuucagucaaauugggcaaaaucccaacaguagaaaacuccauuuuccacauggcagcauggagcggguccgcgugccaugaugguaaggaauggacauauaucggaguugauggcccugacaaugaugcauugcucaaaguaaaauauggagaagcauauacugacacauaccauuccuaugcaaacaaaauccuaagaacacaagaaagugccugcaauugcaucgggggaaauuguuaucuuaugauaacugauggcucagcuucagguguuagugaaugcagauuucuuaagauucgagagggccgaauaauaaaagaaauauuuccaacaggaagaguaaaacacacugaggaaugcacaugcggauuugccagcaauaaaaccauagaaugugccuguagagauaacaguuacacagcaaaaagaccuuuugucaaauuaaacguggagacugauacagcagaaauaagauugaugugcacagauacuuauuuggacacccccagaccagaugauggaagcauaacaggcccuugugaaucuaauggggacaaagggaguggaggcaucaagggaggauuuguucaucaaagaauggaauccaagauuggaaggugguacucucgaacgaugucuaagacugaaaggauggggaugggacuguaugucaaguaugauggagacccaugggcugacagugaugcccuagcuuuuaguggagucaugguuucaaugaaagaaccugguugguacuccuuuggcuucgaaauaaaagauaagaaaugcgauguccccuguauugggauagagaugguacaugaugguggaaaagagacuuggcacucagcagcaacagccauuuacuguuugaugggcucaggacagcugcugugggacacugucacaggcguugacauggcucuguaa

SEQ ID NO: 61588 - RNA, 1401 nt, Artificial Sequence; identical to SEQ ID NO: 61136
  derived and/or modified CDS sequence (wt) from neuraminidase__InfluenzaB__AGX21286

SEQ ID NO: 61589 - RNA, 1401 nt, Artificial Sequence
  derived and/or modified CDS sequence (wt) from neuraminidase__InfluenzaB__AGX21297
augcuaccuucaacuauacaaacguuaacccuauuucucacaucagggggaguauuauuaucacuauaugugucagcuucauuaucauacuuacuauauucggauauauugcuaaaauucucaccaacagaaauaacugcaccaacaaugccauuggauugugcaaacgcaucaaauguucaggcugugaaccguucugcaacaaaaggagugacacuucuucucccagaaccggauuggacauacccgcguuuaucuugcccgggcucaaccuuucagaaagcacuccuaauuagcccucauagauucggagaaaccaaaggaaacucagcucccuugauaauaagggaaccuuuuauugcuuguggaccaaaugaaugcaaacacuuugcucuaacccauuaugcagcccaaccagggggauacuacaauggaacaagaggagacagaaacaagcugaggcaucuaauuucagucaaauugggcaaaaucccaacaguagaaaacuccauuuuccacauggcagcauggagcggguccgcgugccaugaugguaaggaauggacauauaucggaguugauggcccugacaauaaugcauugcucaaaguaaaauauggagaagcauauacugacacauaccauuccuaugcaaacaaaauccuaagaacacaagaaagugccugcaauugcaucgggggaaauuguuaucuuaugauaacugauggcucagcuucagguguuagugaaugcagguuucuuaagauucgagagggccgaauaauaaaagaaauauuuccaacaggaagaguaaaacacacugaggaaugcacaugcggauuugccagcaauaaaaccauagaaugugcauguagagauaacaguuacacagcaaaaagaccuuuugucaaauuaaauguggagacugauacagcagaaguaagauugaugugcacagauacuuauuuggacacccccagaccaaaugauggaagcauaacaggcccuugugaaucugauggggacaaggggaguggaggcaucaagggaggauuuguucaucaaagaauggaauccaagauuggaaggugguacucucgaacgaugucuaaaacugaaaggauggggaugggacuguaugucaaguaugauggagacccaugggcugacagugaugcccuaacuuuuaguggaguaaugguuucaaugaaagaaccugguugguacuccuuuggcuucgaaauaaaagauaagaaaugcgauguccccuguauugggauagagaugguacaugaugguggaaaagagacuuggcacucagcagcaacagccauuuacuguuuaaugggcucaggacagcugcugugggacacugucacagguguugacauggcucuguaa

SEQ ID NO: 61590 - RNA, 1401 nt, Artificial Sequence
  derived and/or modified CDS sequence (wt) from neuraminidase__InfluenzaB__AGX21308
augcuaccuucaacuauacaaauguuaacccuauuucucacaucagggggaguacuauuaucacuauaugugucagcuucauuaucauacuuacuauauucggauauauugcuaaaauucucaccaacagaaauaacugcaccaacaaugccauuggauugugcaaacgcaucaaauguucaugcugugaaccguucugcaacaaaaggggugacauuucuucucccagaaccggaguggacauacccgcguuuaucuugcccgggaucaaccuuucagaaagcacuccuaauuagcccucauagauucggagaaaccaaaggaaacucagcucccuugauaauaagggaaccuuuuauugcuuguggaccaaaugaaugcaaacacuuugcucuaacccauuaugcagcccaaccagggggauacuacaauggaacaagaggagacagaaacaagcugaggcaucuaauuucagucaaauugggcaaaaucccaacaguagaaaacuccauuuuccacauggcagcauggagcggguccgcaugccaugaugguaaggaauggacauauaucggaguugaugguccugacaauaaugcauugcucaaaauaaaauauggagaagcauauacugacacauaucauuccuaugcaaacaacauccuaagaacacaagaaagugccugcaauugcaucgggggaaauuguuaucuuaugauaacugauggcucagcuucagguguuagugaaugcagauuucuuaagauucgagagggccgaauaauaaaagaaauauuuccaacaggaagaguaaaacauacugaggagugcacaugcggauuugccagcaauaaaaccauagaaugugccuguagagauaacaguuacacagcaaaaagacccuuugucaaauuaaacguggaaacugauacagcagaaauaagauugaugugcacagauaccuauuuggacacccccagaccggaugauggaagcauaacaggcccuugugaaucuaauggggacaaagggaguggaggcaucaagggaggauuuguucaucaaagaauggcauccaagauugggaggugguacucucgaacgaugucuaaaacugaaaggaaggggaugggacuguaugucaaguaugauggagacccauggacugacagugaugcccuugcucuuaggggaguaaugguuucaaugaaagaaccugguugguacuccuuuggcuucgaaauaaaagauaagaaaugcgauguccccuguauugggauagagaugguacaugaugguggaaaagagacuuggcacucagcagcaacagccauuuacuguuuaaugggcucaggacagcugcugugggacacagucacaggugucgacauggcucuauaa

SEQ ID NO: 61591 - RNA, 1401 nt, Artificial Sequence
  derived and/or modified CDS sequence (wt) from neuraminidase__InfluenzaB__AGX21319
augcuaccuucaacuauacaaacguuaacccuauuucucacaucagggggaguauuauuaucacuauaugugucagcuucauuaucauacuuacuauauucggauauauugcuaaaauucucaccaacagaaauaacugcaccaacaaugccauuggauugugcaaacgcaucaaauguucaggcggugaaccguucugcaacaaaaggggugacacuucuucucccagaaccggaguggacauacccgcguuuaucuugcccgggcucaaccuuucagaaagcacuccuaauuagcccucauagauucggagaaaccaaaggaaacucagcucccuugauaauaagggaaccuuuuauugcuuguggaccaaaugaaugcaaacacuuugcucuaacucauuaugcagcccaaccagggggauacuacaauggaacaagaggagacagaaacaagcugaggcaucuaauuucagucaaauugggcaaaaucccaacaguagaaaacuccauuuuccacauggcagcauggagcggguccgcgugccaugaugguaaggaauggacauauaucggaguugauggcccugacaauaaugcauugcucaaaguaaaauauggagaagcauauacugacacauaccauuccuaugcaaacaaaauccuaagaacacaagaaagugccugcaauugcaucgggggaaauuguuaucuuaugauaacugauggcucagcuucagguguuagugaaugcagauuucuuaagauucgagagggccgaauaauaaaagaaauauuuccaacaggaagaguaaaacacacugaggaaugcacaugcggauuugccagcaauaaaaccauagaaugugccugcagagauaacaguuacacagcaaaaagaccuuuugucaaauuaaacguggagacugauacagcagaaauaagauugaugugcacagauacuuauuuggacacccccagaccaaaugauggaagcauaacaggcccuugugaaucugauggggacaaagggaguggaggcaucaagggaggauuuguucaucaaagaauggaauccaagauuggaaggugguacucucgaacgaugucuaaaacugaaaggauggggaugggacuguaugucaaguaugauggagacccaugggcugacagugaugcccuagcuuuuaguggaguaaugguuucaaugaaagaaccugguugguacuccuuuggcuucgaaauaaaagauaagaaaugcgauguccccuguauugggauagagaugguacaugaugguggaaaagagacuuggcacucagcagcaacagccauuuacuguuuaaugggcucaggacagcugcugugggacacugucacagguguugacauggcucuguaa

SEQ ID NO: 61592 - RNA, 1401 nt, Artificial Sequence; identical to SEQ ID NO: 61575
  derived and/or modified CDS sequence (wt) from neuraminidase__InfluenzaB__AGX21330

SEQ ID NO: 61593 - RNA, 1401 nt, Artificial Sequence; identical to SEQ ID NO: 61132
  derived and/or modified CDS sequence (wt) from neuraminidase__InfluenzaB__AGX21341

SEQ ID NO: 61594 - RNA, 1401 nt, Artificial Sequence; identical to SEQ ID NO: 61134
  derived and/or modified CDS sequence (wt) from neuraminidase__InfluenzaB__AGX21352

SEQ ID NO: 61595 - RNA, 1401 nt, Artificial Sequence
  derived and/or modified CDS sequence (wt) from neuraminidase__InfluenzaB__AGX21363
augcuaccuucaacuauacaaacguuaacccuauuucucacaucagggggaguauuauuaucacuauaugugucagcuucauuaucauacuuacuauauucggauauauugcuaaaauucucaccaacagaaauaacugcaccaacaaugccauuggauugugcaaacgcaucaaauguucaggcugugaaccguucugcaacaaaaggggugacacuucuucucccagaaccggaguggacauacccgcguuuaucuugcccgggcucaaccuuucagaaagcacuccuaauuagcucucauagauucggagaaaccaaaggaaacucagcucccuugauaauaagggaaccuuucguugcuuguggaccaaaugaaugcaaacacuuugcucuaacccauuaugcagcccaaccagggggauacuacaauggaacaagaggagacagaaacaagcuaaggcaucuaauuucagucaaauugggcaaaaucccaacaguagaaaacuccauuuuccacauggcagcauggagcggguccgcgugccaugaugguaaggaauggacauauaucggaguugauggcccugacaauaaugcauugcucaaaguaaaauauggagaagcauauacugacacauaccauuccuaugcaaacaaaauccuaagaacacaagaaagugccugcaauugcaucgggggaaauuguuaucuuaugauaacugauggcucagcuucagguguuagugaaugcagauuucuuaagauucgagagggccgaauaauaaaagaaauauuuccaacaggaagaguaaaacacacugaggaaugcacaugcggauuugccagcaauaaaaccauagaaugugccuguagagauaacaguuacacagcaaaaagaccuuuugucaaauuaaacguggagacugauacagcagaaauaagauugaugugcacagauacuuauuuggacacccccagaccaaaugauggaagcauaacaggcccuugugaaucugauggggacaaagggaguggaggcauuaagggaggauuuguucaucaaagaauggaauccaagauuggaaggugguacucucgaacgaugucuaaaacugaaaggauggggaugggacuguaugucaaguaugauggagacccaugggcugacagugaugcccuagcuuuuaguggaguaaugguuucaaugaaagaaccugguugguacuccuuuggcuucgaaauaaaagauaagaaaugcgauguccccuguauugggauagagaugguacaugaugguggaaaagagacuuggcacucagcagcaacagccauuuacuguuuaaugggcucaggacagcugcugugggacacugucacagguguugacauggcucuguaa

SEQ ID NO: 61596 - RNA, 1401 nt, Artificial Sequence; identical to SEQ ID NO: 61575
  derived and/or modified CDS sequence (wt) from neuraminidase__InfluenzaB__AGX21374

SEQ ID NO: 61597 - RNA, 1401 nt, Artificial Sequence; identical to SEQ ID NO: 61136
  derived and/or modified CDS sequence (wt) from neuraminidase__InfluenzaB__AGX21385

SEQ ID NO: 61598 - RNA, 1401 nt, Artificial Sequence; identical to SEQ ID NO: 61136
  derived and/or modified CDS sequence (wt) from neuraminidase__InfluenzaB__AGX21396

SEQ ID NO: 61599 - RNA, 1401 nt, Artificial Sequence; identical to SEQ ID NO: 61575
  derived and/or modified CDS sequence (wt) from neuraminidase__InfluenzaB__AGX21407

SEQ ID NO: 61600 - RNA, 1401 nt, Artificial Sequence
  derived and/or modified CDS sequence (wt) from neuraminidase__InfluenzaB__AGX21418
augcuaccuucaacuauacaaacauuaacccuauuucucacaucagggggaguauuguuaucacuauaugugucagcuuuauuaucauacuuacuauauucggauauauugcuaaaauucucaccaacagaaauaacugcaccaacaaugucauuggauugugcaaacgcaucaaauguucaggcugugaaccguucugcaacaaaaggggugacauuucuucucccagaaccggaguggacauacccgcguuuaucuugcccgggcucaaccuuucagaaagcacuccuaauuagcccucauagauucggagaaaccaaaggaaacucagcucccuugauaauaagggaaccuuuuauugcuuguggaccaaaugaaugcaaacacuuugcucuaacccauuaugcagcccaaccagggggauacuacaauggaacaagaggagacagaaacaagcugaggcaucuaauuucagucaaauugggcaaaaucccaacaguagaaaacuccauuuuccacauggcagcauggagcggguccgcgugccaugaugguaaggaauggacauauaucggaguugauggcccugacaaugaugcauugcucaaaguaaaauauggagaagcauauacugacacauaccauuccuaugcaaacaaaauccuaagaacacaagaaagugccugcaauugcaucgggggaaauuguuaucuuaugauaacugauggcucagcuucagguguuagugaaugcagauuucuuaagauucgagagggccgaauaauaaaagaaauauuuccaacaggaagaguaaaacacacugaggaaugcacaugcggauuugccagcaauaaaaccauagaaugugccuguagagauaacaguuacacagcaaaaagaccuuuugucaaauuaaacguggagacugauacggcagaaauaagauugaugugcacagauacuuauuuggacacccccagaccagaugauggaagcauaacaggcccuugugaaucuaauggggacaaagggaguggaggcaucaagggaggauuuguucaucaaagaauggaauccaagauuggaaggugguacucucgaacgaugucuaagacugaaaggauggggaugggacuguaugucaaguaugauggagacccaugggcugacagugaugcccuagcuuuuaguggaguaaugguuucaaugaaagaaccugguugguacuccuuuggcuucgaaauaaaagauaagaaaugcgauguccccuguauugggauagagaugguacaugaugguggaaaagagacuuggcacucagcagcaacagccauuuacuguuugaugggcucaggacagcugcugugggacacugucacaggcguugacauggcucuguaa

SEQ ID NO: 61601 - RNA, 1401 nt, Artificial Sequence
  derived and/or modified CDS sequence (wt) from neuraminidase__InfluenzaB__AGX21429
augcuaccuucaacuauacaaacguuaacccuauuucucacaucagggggaguauuguuaucacuauaugugucagcuuuauuaucauacuuacuacauucggauauauugcuaaaauucucaccaacagaaauaacugcaccaacaaugucauuggauugugcaaacgcaucaaauguucaggcugugaaccguucuguaacaaaaggggugacauuucuucucccagaaccggaguggacauacccgcguuuaucuugcccgggcucaaccuuucagaaagcacuccuaauuagcccucauagauucggagaaaccaaaggaaacucagcucccuugauaauaagggaaccuuuuauugcuuguggaccaaaugaaugcaaacacuuugcucuaacccauuaugcagcccaaccagggggauacuacaauggaacaagaggagacagaaacaagcugaggcaucuaauuucagucaaauugggcaaaaucccaacaguagaaaacuccauuuuccacauggcagcauggagcggguccgcgugccaugaugguaaggaauggacauauaucggaguugauggcccugacaaugaugcauugcucaaaguaaaauauggagaagcauauacugacacauaccauuccuaugcaaacaaaauccuaagaacacaagaaagugccugcaauugcaucgggggaaauuguuaucuuaugauaacugauggcucagcuucagguguuagugaaugcagauuucuuaagauucgagagggccgaauaauaaaagaaauauuuccaacaggaagaguaaaacacacugaggaaugcacaugcggauuugccagcaauaaaaccauagaaugugccuguagagauaacaguuacacagcaaaaagaccuuuugucaaauuaaacguggagacugauacagcagaaauaagauugaugugcacagauacuuauuuggacacccccagaccagaugauggaagcauaacaggcccuugugaaucuaauggggacaaagggaguggaggcaucaagggaggauuuguucaucaaagaauggaauccaagauuggaaggugguacucucgaacgaugucuaagacugaaaggauggggaugggacuguaugucaaguaugauggagacccaugggcugacagugaugcccuagcuuuuaguggaguaaugguuucaaugaaagaaccugguugguacuccuuuggcuucgaaauaaaagauaagaaaugcgauguccccuguauugggauagagaugguacaugaugguggaaaagagacuuggcacucagcagcaacagccauuuacuguuugaugggcucaggacagcugcugugggacacugucacaggcguugacauggcucuguaa

SEQ ID NO: 61602 - RNA, 1401 nt, Artificial Sequence; identical to SEQ ID NO: 61136
  derived and/or modified CDS sequence (wt) from neuraminidase__InfluenzaB__AGX21440

SEQ ID NO: 61603 - RNA, 1401 nt, Artificial Sequence; identical to SEQ ID NO: 61136
  derived and/or modified CDS sequence (wt) from neuraminidase__InfluenzaB__AGX21451

SEQ ID NO: 61604 - RNA, 1401 nt, Artificial Sequence; identical to SEQ ID NO: 61552
  derived and/or modified CDS sequence (wt) from neuraminidase__InfluenzaB__AGX21462

SEQ ID NO: 61605 - RNA, 1401 nt, Artificial Sequence
  derived and/or modified CDS sequence (wt) from neuraminidase__InfluenzaB__AGX21473
augcuaccuucaacuauacaaacguuaacccuauuucucacaucagggggaguauuauuaucacuauaugugucagcuuuauuaucauacuuacuauauucggauauauugcuaaaauucucaccaacagaaauaacugcaccaacaaugucauuggauugugcaaacgcaucaaauguucaggcugugaaccguucugcaacaaaaggggugacauuucuucucccagaaccggaguggacauacccgcguuuaucuugcccgggcucaaccuuucagagagcacuccuaauuagcccucauagauucggagaagccaaaggaaacucagcucccuugauaauaagggaaccuuuuauugcuuguggaccaaaugaaugcaaacacuuugcucuaacccauuaugcagcccaaccagggggguacuacaauggaacaagaggagacagaaacaagcugaggcaucuaauuucagucaaauugggcaaaaucccaacaguagagaacuccauuuuccacauggcagcauggagcggguccgcuugccaugaugguaaggaauggacauauaucggaguugauggcccugacaaugaugcauugcucaaaguaaaauauggagaagcauauacugacacauaccauuccuaugcaaacaaaauccuaagaacacaagaaagugccugcaauugcaucgggggaaauuguuaucuuaugauaacugauggcucagcuucagguguuagugaaugcagauuucuuaagauucgagagggccgaauaauaaaagaaauacuuccaacaggaagaguaaaacacacugaggaaugcacaugcggauuugccagcaauaaaaccauagaaugugccuguagagauaacaguuacacagcaaaaagaccuuuugucaaauuaaacguugagacugauacagcagaaauaagauugaugugcacagauacuuauuuggacacccccagaccagaugauggaagcauaacaggcccuugugaaucuaauggggacaaagggaguggaggcaucaagggaggauuuguucaucaaagaauggaauccaagauuggaaggugguacucucgaacgaugucuaagacugaaaggauggggaugggacuguaugucaaguaugauggagacccaugggcugacagugaugcccuaguuuuuaguggaguaaugguuucaaugaaagaaccugguugguacucuuuuggcuucgaaauaaaagauaagaaaugcgauguccccuguauugggauagagaugguacaugaugguggaaaagagacuuggcacucagcagcaacagccauuuacuguuuaaugggcucaggacagcugcugugggacacugucacaggcguugacauggcucuguaa

SEQ ID NO: 61606 - RNA, 1401 nt, Artificial Sequence
  derived and/or modified CDS sequence (wt) from neuraminidase__InfluenzaB__AGX21484
augcuaccuucaacuauacaaacguuaacccuauuucucacaucagggggaguauuauuaucacuauaugugucagcuucauuaucauacuuacuauauucggauauauugcuaaaauucucaccaacagaaauaacugcaccaacaaugccauuggauugugcaaacgcaucaaauguucaggcugugaaccguucugcaacaaaaggggugacacuucuucucccagaaccggaguggacauacccgcguuuaucuugcccgggcucaaccuuucagaaagcacuccuaauuagcccucauagauucggagaaaccaaaggaaacucagcucccuugauaauaagggaaccuuuuauugcuuguggaccaaaugaaugcaaacacuuugcucuaacucauuaugcagcccaaccagggggauacuacaauggaacaagaggagacagaaacaagcugaggcaucuaauuucagucaaauugggcaaaaucccaacaguagaaaacuccauuuuccacauggcagcauggagcggguccgcgugccaugaugguaaggaauggacauauaucgggguugauggcccugacaauaaugcauugcucaaaguaaaauauggagaagcauauacugacacauaccauuccuaugcaaacaaaauccuaagaacacaagaaagugccugcaauugcaucgggggaaauuguuaucuuaugauaacugauggcucagcuucagguguuagugaaugcagauuucuuaagauucgagagggccgaauaauaaaagaaauauuuccaacaggaagaguaaaacacacugaggaaugcacaugcggauuugccagcaauaaaaccauagaaugugccugcagagauaacaguuacacagcaaaaagaccuuuugucaaauuaaacguggagacugauacagcagaaauaagauugaugugcacagauacuuauuuggacacccccagaccaaaugauggaagcauaacaggcccuugugaaucugauggggacaaagggaguggaggcaucaagggaggauuuguucaucaaagaauggaauccaagauuggaaggugguacucucgaacgaugucuaaaacugaaaggauggggaugggacuguaugucaaguaugauggagacccaugggcugacagugaugcccuagcuuuuaguggaguaaugguuucaaugaaagaaccugguugguacuccuuuggcuucgaaauaaaagauaagaaaugcgauguccccuguauugggauagagaugguacaugaugguggaaaagagacuuggcacucagcagcaacagccauuuacuguuuaaugggcucaggacagcugcugugggacacugucacagguguugacauggcucuguaa

SEQ ID NO: 61607 - RNA, 1401 nt, Artificial Sequence; identical to SEQ ID NO: 61136
  derived and/or modified CDS sequence (wt) from neuraminidase__InfluenzaB__AGX21495

SEQ ID NO: 61608 - RNA, 1401 nt, Artificial Sequence
  derived and/or modified CDS sequence (wt) from neuraminidase__InfluenzaB__AGX21506
augcuaccuucaacuauacaaauguuaacccuauuucucacaucagggggaguacuauuaucacuauaugugucagcuucauuaucauacuuacuauauucggauauauugcuaaaauucucaccaacagaaauaacugcaccaacaaugccauuggauugugcaaacgcaucaaauguucaugcugugaaccguucugcaacaaaaggggugacauuucuucucccagaaccggaguggacauacccgcguuugucuugcccgggaucaaccuuucagaaagcacuccuaauuagcccucauagauucggagaaaccaaaggaaacucagcucccuugauaauaagggaaccuuuuauugcuuguggaccaaaugaaugcaaacacuuugcucuaacccauuaugcagcccaaccagggggauacuacaauggaacaagaggagacagaaacaagcugaggcaucuaauuucagucaaauugggcaaaaucccaacaguagaaaacuccauuuuccacauggcagcauggagcggguccgcaugccaugaugguaaggaauggacauauaucggaguugaugguccugacaauaaugcauugcucaaaauaaaauauggagaagcauauacugacacauaucauuccuaugcaaacaacauccuaagaacacaagaaagugccugcaauugcaucgggggaaauuguuaucuuaugauaacugauggcucagcuucagguguuagugaaugcagauuucuuaagauucgagagggccgaauaauaaaagaaauauuuccaacaggaagaguaaaacauacugaggagugcacaugcggauuugccagcaauaaaaccauagaaugugccuguagagauaacaguuacacagcaaaaagacccuuugucaaauuaaacguggaaacugauacagcagaaauaagauugaugugcacagauaccuauuuggacacccccagaccggaugauggaagcauaacaggcccuugugaaucuaauggggacaaagggaguggaggcaucaagggaggauuuguucaucaaagaauggcauccaagauugggaggugguacucucgaacgaugucuaaaacugaaaggaaggggaugggacuguaugucaaguaugauggagacccauggacugacagugaugcccuugcuuuuaggggaguaaugguuucaaugaaagaaccugguugguacuccuuuggcuucgaaauaaaagauaagaaaugcgauguccccuguauugggauagagaugguacaugaugguggaaaagagacuuggcacucagcagcaacagccauuuacuguuuaaugggcucaggacagcugcugugggacacagucacaggugucgacauggcucuauaa

SEQ ID NO: 61609 - RNA, 1401 nt, Artificial Sequence
  derived and/or modified CDS sequence (wt) from neuraminidase__InfluenzaB__AGX21517
augcuaccuucaacuauacaaacguuaacccuauuucucacaucagggggaguauuguuaucacuauaugugucagcuuuauuaucauacuuacuauauucgaauauauugcuaaaauucucaccaacagaaauaacugcaccaacaaugucauuggauugugcaaacgcaucaaauguucaggcugugaaccguucugcaacaaaaggggugacauuucuucucccagaaccggaguggacauacccgcguuuaucuugcccgggcucaaccuuucagaaagcacuccuaauuagcccucauagauucggagaaaccaaaggaaacucagcucccuugauaauaagggaaccuuuuauugcuuguggaccaaaugaaugcaaacacuuugcucuaacccauuaugcagcccaaccagggggauacuacaauggaacaagaggagacagaaacaagcugaggcaucuaauuucagucaaauugggcaaaaucccaacaguagaaaacuccauuuuccacauggcagcauggagcggguccgcgugccaugaugguaaggaauggacauauaucggaguugauggcccugacaaugaugcauugcucaaaguaaaauauggagaagcauauacugacacauaccauuccuaugcaaacaaaauccuaagaacacaagaaagugccugcaauugcaucgggggaaauuguuaucuuaugauaacugauggcucagcuucagguguuagugaaugcagauuucuuaagauucgagagggccgaauaauaaaagaaauauuuccaacaggaagaguaaaacacacugaggaaugcacaugcggauuugccagcaauaaaaccauagaaugugccuguagagauaacaguuacacagcaaaaagaccuuuugucaaauuaaacguggagacugauacagcagaaauaagauugaugugcacagauacuuauuuggacacccccagaccagaugauggaagcauaacaggccccugugaaucuaauggggacaaagggaguggaggcaucaagggaggauuuguucaucaaagaauggaauccaagauuggaaggugguacucucgaacgaugucuaagacugaaaggauggggaugggacuguaugucaaguaugauggagacccaugggcugacagugaugcccuagcuuuuaguggaguaaugguuucaaugaaagaaccugguugguacuccuuuggcuucgaaauaaaagauaagaaaugcgauguccccuguauugggauagagaugguacaugaugguggaaaagagacuuggcacucagcagcaacagccauuuacuguuuaaugggcucaggacagcugcugugggacacugucacaggcguugacauggcucuguaa

SEQ ID NO: 61610 - RNA, 1401 nt, Artificial Sequence
  derived and/or modified CDS sequence (wt) from neuraminidase__InfluenzaB__AGX21528
augcuaccuucaacuauacaaacguuaacccuauuucucacaucagggggaguauuauuaucacuauaugugucagcuucauuaucauacuuacuauauucggauauauugcuaaaauucucaccaacagaaauaacugcaccaacaaugccauuggauugugcaaacgcaucaaauguucaggcugugaaccguucugcaacaaaaggagugacacuucuucucccagaaccggaguggacauacccgcguuuaucuugcccgggcucaaccuuucagaaagcacuccuaauuagcccucauagauucggagaaaccaaaggaaacucagcccccuugauaauaagggaaccuuuuauugcuuguggaccaaaugaaugcaaacacuuugcucuaacccauuaugcagcccaaccagggggauacuacaauggaacaagaggagacagaaacaagcugaggcaucuaauuucagucaaauugggcaaaaucccaacaguagaaaacuccauuuuccacauggcagcauggagcggguccgcgugccaugaugguaaggaauggacauauaucggaguugauggcccugacaauaaugcauugcucaaaguaaaauauggagaagcauauacugacacauaccauuccuaugcaaacaaaauccuaagaacacaagaaagugccugcaauugcaucgggggaaauuguuaucuuaugauaacugauggcucagcuucagguguuagugaaugcagauuucuuaagauucgagagggccgaauaauaaaagaaauauuuccaacaggaagaguaaaacacacugaggaaugcacaugcggauuugccagcaauaaaaccauagaaugugccuguagagauaacaguuacacagcaaaaagaccuuuugucaaauuaaauguggagacugauacagcagaaguaagauugaugugcacagauacuuauuuggacacccccagaccaaaugauggaagcauaacaggcccuugugaaucugacggggacaagggaaguggaggcaucaagggaggauuuguucaucaaagaauggaauccaagauuggaaggugguacucucgaacgaugucuaaaacugaaaggauggggaugggacuguaugucaaguaugauggagacccaugggcugacagugaugcccuaacuuuuaguggaguaaugguuucaaugaaagaaccugguugguacuccuuuggcuucgaaauaaaagauaagaaaugcgauguccccuguauugggauagagaugguacaugauaguggaaaagagacuuggcacucagcagcaacagccauuuacuguuuaaugggcucaggacagcugcugugggacacugucacagguguugacauggcucuguaa

SEQ ID NO: 61611 - RNA, 1401 nt, Artificial Sequence
  derived and/or modified CDS sequence (wt) from neuraminidase__InfluenzaB__AGX21539
augcuaccuucaacuauacaaauguuaacccuauuucucacaucagggggaguacuauuaucacuauaugugucagcuucauuaucauacuuacuauauucggauauauugcuaaaauucucaccaacagaaauaacugcaccaacaaugccauuggauugugcaaacgcaucaaauguucaugcugugaaccguucugcaacaaaaggggugacauuucuucucccagaaccggaguggacauacccgcguuuaucuugcccgggaucaaccuuucagaaagcacuccuaauuagcccucauagauucggagaaaccaaaggaaacucagcucccuugauaauaagggaaccuuuuauugcuuguggaccaaaugaaugcaaacacuuugcucuaacccauuaugcagcccaaccagggggauacuacaauggaacaagaggagacagaaacaagcugaggcaucuaauuucagucaaauugggcaaaaucccaacaguagaaaacuccauuuuccacauggcagcauggagcggguccgcaugccaugaugguaaggaauggacauauaucggaguugaugguccugacaauaaugcauugcucaaaauaaaauauggagaagcauauacugacacauaucauuccuaugcaaacaacauccuaagaacacaagaaagugccugcaauugcaucgggggaaauuguuaucuuaugauaacugauggcucagcuucagguguuagugaaugcagauuucuuaagauucgagagggccgaauaauaaaagaaauauuuccaacaggaagaguaaaacauacugaggagugcacaugcggauuugccagcaauaaaaccauagaaugugccuguagagauaacaguuacacagcaaaaagacccuuugucaaauuaaacguggaaacugauacagcagaaauaagauugaugugcacagauaccuauuuggacacccccagaccggaugauggaagcauaacaggcccuugugaaucuaauggggacaaagggaguggaggcaucaagggaggauuuguucaucaaagaauggcauccaagauugggaggugguacucucgaacgaugucuaaaacugaaaggaaggggaugggacuguaugucaaauaugauggagacccauggacugacagugaugcccuugcuuuuaggggaguaaugguuucaaugaaagaaccugguugguacuccuuuggcuucgaaauaaaagauaagaaaugcgauguccccuguauugggauagagaugguacaugaugguggaaaagagacuuggcacucagcagcaacagccauuuacuguuuaaugggcucaggacagcugcugugggacacagucacaggugucgacauggcucuauaa

SEQ ID NO: 61612 - RNA, 1401 nt, Artificial Sequence
  derived and/or modified CDS sequence (wt) from neuraminidase__InfluenzaB__AGX21550
augcuaccuucaacuauacaaacguuaacccuauuucucacaucagggggaguauuauuaucacuauaugugucagcuucauuaucauacuuacuauauucggauauauugcuaaaauucucaccaacagaaauaacugcaccaacaaugccauuggauugugcaaacgcaucaaauguucaggcugugaaccguucugcaacaaaaggagugacacuucuucucccagaaccggaguggacauacccgcguuuaucuugcccgggcucaaccuuucaaaaagcacuccuaauuagcccucauagauucggagaaaccaaaggaaacucagcucccuugauaauaagggaaccuuuuauugcuuguggaccaaaugaaugcaaacacuuugcucuaacccauuaugcagcccaaccagggggauacuacaauggaacaagaggagacagaaacaagcugaggcaucuaauuucagucaaauugggcaaaaucccaacaguagaaaacuccauuuuccacauggcagcauggagcggguccgcgugccaugaugguaaggaauggacauauaucggaguugauggcccugacaauaaugcauugcucaaaguaaaauauggagaagcauauacugacacauaccauuccuaugcaaacaaaauccuaagaacacaagaaagugccugcaauugcaucgggggaaauuguuaucuuaugauaacugauggcucagcuucagguguuagugaaugcagauuucuuaagauucgagagggccgaauaauaaaagaaauauuuccagcaggaagaguaaaacacacugaggaaugcacaugcggauuugccagcaauaaaaccauagaaugugccuguagagauaacaguuacacagcaaaaagaccuuuugucaaauuaaauguggagacugauacagcagaaguaagauugaugugcacagauacuuauuuggacacccccagaccaaaugauggaagcauaacaggcccuugugaaucugauggggacaaggggaguggaggcaucaagggaggauuuguucaucaaagaauggaauccaagauuggaaggugguacucucgaacgaugucuaaaacugaaaggauggggaugggacuguaugucaaguaugauggagacccaugggcugacagugaugcccuaacuuuuaguggaguaaugguuucaaugaaagaaccugguugguacuccuuuggcuucgaaauaaaagauaagaaaugcgauguccccuguauugggauagagaugguacaugaugguggaaaagagacuuggcacucagcagcaacagccauuuacuguuuaaugggcucaggacagcugcugugggacacugucacagguguugacauggcucuguaa

SEQ ID NO: 61613 - RNA, 1401 nt, Artificial Sequence
  derived and/or modified CDS sequence (wt) from neuraminidase__InfluenzaB__AGX21561
augcuaccuucaacuauacaaacguuaacccuauuucucacaucagggggaguauuauuaucacuauaugugucagcuucauuaucauacuuacuauauucggauauauugcuaaaauucucaccaacagaaauaacugcaccaacaaugccauuggauugugcaaacgcaucaaauguucaggcugugaaccguucugcaacaaaaggagugacacuucuucucccagaaccggaguggacauacccgcguuuaucuugcccgggcucaaccuuucagaaagcacuccuaauuagcccucauagauucggagaaaccaaaggaaacucagcucccuugauaauaagggaaccuuuuauugcuuguggaccaaaugaaugcaaacacuuugcucuaacccauuaugcagcccaaccagggggauacuacaauggaacaagaggagacagaaacaagcugaggcaucuaauuucagucaaauugggcaaaaucccaacaguagaaaacuccauuuuccacauggcagcauggagcggguccgcgugccaugaugguaaggaauggacauauaucggaguugauggcccugacaauaaugcauugcucaaaguaaaauauggagaagcauauacugacacauaccauuccuaugcaaacaaaauccuaagaacacaagaaagugccugcaauugcaucgggggaaauuguuaucuuaugauaacugauggcucagcuucagguguuagugaaugcagauuucuuaagguucgagagggccgaauaauaaaagaaauauuuccaacaggaagaguaaaacacacugaggaaugcacaugcggauuugccagcaauaaaaccauagaaugugccuguagagauaacaguuacacagcaaaaagaccuuuugucaaauuaaauguggagacugauacagcagaaguaagauugaugugcacagauacuuauuuggacacccccagaccaaaugauggaagcauaacaggcccuugugaaucugauggggacaaggggaguggaggcaucaagggaggauuuguucaucaaagaauggaauccaagauuggaaggugguacucucgaacgaugucuaaaacugaaaggauggggaugggacuguaugucaaguaugauggagacccaugggcugacagugaugcccuaacuuuuaguggaguaaugguuucaaugaaagaaccugguugguacuccuuuggcuucgaaauaaaagauaagaaaugcgauguccccuguauugggauagagaugguacaugaugguggaaaagagacuuggcacucagcagcaacagccauuuacuguuuaaugggcucaggacagcugcugugggacacugucacagguguugacauggcucuguaa

SEQ ID NO: 61614 - RNA, 1401 nt, Artificial Sequence; identical to SEQ ID NO: 61606
  derived and/or modified CDS sequence (wt) from neuraminidase__InfluenzaB__AGX21572

SEQ ID NO: 61615 - RNA, 1401 nt, Artificial Sequence
  derived and/or modified CDS sequence (wt) from neuraminidase__InfluenzaB__AGX21583
augcuaccuucaacuauacaaacguuaacccuauuucucacaucagggggaguauuauuaucacuauaugugucagcuuuauuaucauacuuacuauauucggauauauugcuaaaauucucaccaacagaaauaacugcaccaacaaugucauuggauugugcaaacgcaucaaauguucaggcugugaaccguucugcaacaaaaggggugacauuucuucucccagaaccggaguggacauacccgcguuuaucuugcccgggcucaaccuuucagagagcacuccuaauuagcccucauagauucggagaagccaaaggaaacucagcucccuugauaauaagggaaccuuuuauugcuuguggaccaaaugaaugcaaacacuuugcucuaacccauuaugcagcccaaccagggggauacuacaauggaacaagaggagacagaaacaagcugaggcaucuaauuucagucaaauugggcaaaaucccaacaguagagaacuccauuuuccacauggcagcauggagcggguccgcuugccaugaugguaaggaauggacauauaucggaguugauggcccugacaaugaugcauugcucaaaguaaaauacggagaagcauauacugacacauaccauuccuaugcaaacaaaauccuaagaacacaagaaagugccugcaauugcaucgggggaaauuguuaucuuaugauaacugauggcucagcuucagguguuagugaaugcagauuucuuaagauucgagagggccgaauaauaaaagaaauacuuccaacaggaagaguaaaacacacugaggaaugcacaugcggauuugccagcaauaaaaccauagaaugugccuguagagauaacaguuacacagcaaaaagaccuuuugucaaauuaaacguugagacugauacagcagaaauaagauugaugugcacagauacuuauuuggacacccccagaccagaugauggaagcauaacaggcccuugugaaucuaauggggacaaagggaguggaggcaucaagggaggauuuguucaucaaagaauggaauccaagauuggaaggugguacucucgaacgaugucuaagacugaaaggauggggauggaacuguaugucaaguaugauggagacccaugggcugacagugaugcccuagcuuuuaguggaguaaugguuucaaugaaagaaccugguugguacucuuuuggcuucgaaauaaaagauaagaaaugcgauguccccuguauugggauagagaugguacaugaugguggaaaagagacuuggcacucagcagcaacagccauuuacuguuuaaugggcucaggacagcugcugugggacacugucacaggcguugacauggcucuguaa

SEQ ID NO: 61616 - RNA, 1401 nt, Artificial Sequence
  derived and/or modified CDS sequence (wt) from neuraminidase__InfluenzaB__AGX21594
augcuaccuucaacuauacaaacguuaacccuauuucucacaucagggggaguauuauuaucacuauaugugucagcuucauuaucauacuuacuauauucggauauauugcuaaaauucucaccaacagaaauaacugcaccaacaaugccauuggauugugcaaacgcaucaaauguucaggcugugaaccguucugcaacaaaaggggugacacuucuucucccagaaccggaguggacauacccgcguuuaucuugcccgggcucaaccuuucagaaagcacuccuaauuagcccucauagauucggagaaaccaaaggaaacucagcucccuugauaauaagggaaccuuuuauugcuuguggaccaaaugaaugcaaacacuuugcucuaacucauuaugcagcccaaccagggggauacuacaauggaacaagaggagacagaaacaagcugaggcaucuaauuucagucaaauugggcaaaaucccaacaguagaaaacuccauuuuccacauggcagcauggagcggguccgcgugccaugaugguaaggaauggacauauaucggaguugauggcccugacaauaaugcauugcucaaaguaaaauauggagaagcauauacugacacauaccauuccuaugcaaacaaaauccuaagaacacaagaaagugccugcaauugcaucgggggaaauuguuaucuuaugauaacugauggcucagcuucagguguuagugaaugcagauuucuuaagauucgagagggccgaauaauaaaagaaauauuuccaacaggaagaguaaaacacacugaggaaugcacaugcggauuugccagcaauaaaaccauagaaugugccugcagagauaacaguuacacagcaaaaagaccuuuugucaaauuaaacguggagacugauacagcagaaauaagauugaugugcacagauacuuauuuggacacccccagaccaaaugauggaagcauaacaggcccuugugaaucugauggggacaaagggaguggaggcaucaagggaggauuuguucaucaaagaauggaauccaagauuggaaggugguacucucgaacgaugucuaaaacugaaaggauggggaugggacuguaugucaaguaugauggagacccaugggcugacagugaugcccuagcuuuuaguggaguaaugguuucaaugaaagaaccugguugguacuccuuuggcuucgaaauaaaagauaagaaaugcgauguccccuguauugggauagagaugguacaugaugguggaaaagagacuuggcacucagcagcaacagccauuuacuguuuaaugggcucaggacagcugcugugggacacugucacagguguugacauggcucuguaa

SEQ ID NO: 61617 - RNA, 1401 nt, Artificial Sequence
  derived and/or modified CDS sequence (wt) from neuraminidase__InfluenzaB__AGX21605
augcuaccuucaacuauacaaacguuaacccuauuucucacaucagggggaguauuauuaucacuauaugugucagcuucauuaucauacuuacuauauucggauauauugcuaaaauucucaccaacagaaauaacugcaccaacaaugccauuggauugugcaaacgcaucaaauguucaggcugugaaccguucugcaacaaaaggagugacacuucuucucccagaaccggaguggacauacccgcguuuaucuugcccgggcucaaccuuucagaaagcacuccuaauuagcccucauagauucggagaaaccaaaggaaacucagcucccuugauaauaagggaaccuuuuauugcuuguggaccaaaugaaugcaaacacuuugcucuaacccauuaugcagcccaaccagggggauacuacaauggaacaagaggagacagaaacaagcugaggcaucuaauuucagucaaauugggcaaaaucccaacaguagaaaacuccauuuuccacauggcagcauggagcggguccgcgugccaugaugguaaggaauggacauauaucggaguugaugguccugacaauaaugcauugcucaaaguaaaauauggagaagcauauacugacacauaccauuccuaugcaaacaaaauccuaagaacacaagaaagugccugcaauugcaucgggggaaauuguuaucuuaugauaacugauggcucagcuucagguguuagugaaugcagauuucuuaagauucgagagggccgaauaauaaaagaaauauuuccaacaggaagaguaaaacacacugaggaaugcacaugcggauuugccagcaauaaaaccauagaaugugccuguagagauaacaguuacacagcaaaaagaccuuuugucaaauuaaauguggagacugauacagcagaaguaagauugaugugcacagauacuuauuuggacacccccagaccaaaugauggaagcauaacaggcccuugugaaucugauggggacaaggggaguggaggcaucaagggaggauuuguucaucaaagaauggaauccaagauuggaaggugguacucucgaacgaugucuaaaacugaaaggauggggaugggacuguaugucaaguaugauggagacccaugggcugacagugaugcccuaacuuuuaguggaguaaugguuucaaugaaagaaccugguugguacuccuuuggcuucgaaauaaaagauaagaaaugcgauguccccuguauugggauagagaugguacaugaugguggaaaagagacuuggcacucagcagcaacagccauuuacuguuuaaugggcucaggacagcugcugugggacacugucacagguguugacauggcucuguaa

SEQ ID NO: 61618 - RNA, 1401 nt, Artificial Sequence
  derived and/or modified CDS sequence (wt) from neuraminidase__InfluenzaB__AGX21615
augcuaccuucaacuauacaaacguuaacccuauuucucacaucagggggaguauuauuaucacuauaugugucagcuucauuaucauacuuacuauauucggauauauugcuaaaauucucaacaacagaaauaacugcaccaacaaugccauuggauugugcaaacgcaucaaauguucaggcugugaaccguucugcaacaaaaggggugacacuucuucucccagaaccggaguggacauacccgcguuuaucuugcccgggcucaaccuuucagaaagcacuccuaauuagcccucauagauucggagaaaacaaaggaaacucagcucccuugauaauaagggaaccuuuuauugcuuguggaccaaaugaaugcaaacacuuugcucuaacccauuaugcagcccaaccagggggauacuacaauggaacaagaggagacagaaacaagcugaggcaucuaauuucagucaaauugggcaaaaucccaacaguagaaaacuccauuuuccacauggcagcauggagcggguccgcgugccaugaugguaaggaauggacauauaucggaguugauggcccugacaauaaugcauugcucaaaguaaaauauggagaagcauauacugacacauaccauuccuaugcaaacaaaauccuaagaacacaagaaagugccugcaauugcaucgggggaaauuguuaucuuaugauaacugauggcucagcuucagguguuagugaaugcagauuucuuaagauucgagagggccgaauaauaaaagaaauauuuccaacaggaagaguaaaacacacugaggaaugcacaugcggauuugccagcaauaaaaccauagaaugugccuguagagauaacaguuacacagcaaaaagaccuuuugucaaauuaaacguggagacugauacagcagaaauaagauugaugugcacagauacuuauuuggacacccccagaccaaaugauggaagcauaacaggcccuugugaaucugauggggacaaagggaguggaggcaucaagggaggauuuguucaucaaagaauggaauccaagauuggaaggugguacucucgaacgaugucuaaaacugaaaggauggggaugggacuguaugucaaguaugauggagacccaugggcugacagugaugcccuagcuuuuaguggaguaaugguuucaaugaaagaaccugguugguacuccuuuggcuucgaaauaaaagauaagaaaugcgauguccccuguauugggauagagaugguacaugaugguggaaaagagacuuggcacucagcagcaacagccauuuacuguuuaaugggcucaggacagcugcugugggacacugucacagguguugacauggcucuguaa

SEQ ID NO: 61619 - RNA, 1401 nt, Artificial Sequence; identical to SEQ ID NO: 61136
  derived and/or modified CDS sequence (wt) from neuraminidase__InfluenzaB__AGX21626

SEQ ID NO: 61620 - RNA, 1401 nt, Artificial Sequence
  derived and/or modified CDS sequence (wt) from neuraminidase__InfluenzaB__AGX21637
augcuaccuucaacuauacaaauguuaacccuauuucucacaucagggggaguacuauuaucacuauaugugucagcuucauuaucauacuuacuauauucggauauauugcuaaaauucucaccaacagaaauaacugcaccaacaaugccauuggauugugcaaacgcaucaaauguucaugcugugaaccguucugcaacaaaaggggugacauuucuucucccagaaccggaguggacauacccgcguuuaucuugcccgggaucaaccuuucagaaagcacuccuaauuagcccucauagauucggagaaaccaaaggaaacucagcucccuugauaauaagggaaccuuuuauugcuuguggaccaaaugaaugcaaacacuuugcucuaacccauuaugcagcccaaccagggggauacuacaauggaacaagaggagacagaaacaagcugaggcaucuaauuucagucaaauugggcaaaaucccaacaguagaaaacuccauuuuccacauggcagcauggagcggguccgcaugccaugaugguaaggaauggacauauaucggaguugaugguccugacaauaaugcauugcucaaaauaaaauauggagaagcauauacugacacauaucauuccuaugcaaacaacauccuaagaacacaagaaagugccugcaauugcaucgggggaaauuguuaucuuaugauaacugauggcucagcuucagguguuagugaaugcagauuucuuaagauucgagagggccgaauaauaaaagaaauauuuccaacaggaagaguaaaacauacugaggagugcacaugcggauuugccagcaauaaaaccauagaaugugccuguagagauaacaguuacacagcaaaaagacccuuugucaaauuaaacguggaaacugauacagcagaaauaagauugaugugcacagauaccuauuuggacacccccagaccggaugauggaagcauaacaggcccuugugaaucuaauggggacaaagggaguggaggcaucaagggaggauuuguucaucaaagaauggcauccaagauugggaggugguacucucgaacgaugucuaaaacugaaaggaaggggaugggacuguaugucaaguaugauggagacccauggacugacagugaugcccuugcuuuuaggggaguaaugguuucaaugaaagaaccugguugguacuccuuuggcuucgaaauaaaagauaagaaaugcgauguccccugcauugggauagagaugguacaugaugguggaaaagagacuuggcacucagcagcaacagccauuuacuguuuaaugggcucaggacagcugcugugggacacagucacaggugucgacauggcucuauaa

SEQ ID NO: 61621 - RNA, 1401 nt, Artificial Sequence; identical to SEQ ID NO: 61136
  derived and/or modified CDS sequence (wt) from neuraminidase__InfluenzaB__AGX21648

SEQ ID NO: 61622 - RNA, 1401 nt, Artificial Sequence
  derived and/or modified CDS sequence (wt) from neuraminidase__InfluenzaB__AGX21659
augcuaccuucaacuauacaaacauuaacccuauuucucacaucagggggaguauuguuaucacuauaugugucagcuuuauuaucauacuuacuauauucggauauauugcuaaaauucucaccaacagaaauaacugcaccaacaaugucauuggauugugcaaacgcaucaaauguucaggcugugaaccguucugcaacaaaaggggugacauuucuucucccagaaccggaguggacauacccgcguuuaucuugcccgggcucaaccuuucagaaagcacuccuaauuagcccucauagauucggagaaaccaaaggaaacucagcucccuugauaauaagggaaccuuuuauugcuuguggaccaaaugaaugcaaacacuuugcucuaacccauuaugcagcccaaccagggggauacuacaauggaacaagaggagacagaaacaagcugaggcaucuaguuucagucaaauugggcaaaaucccaacaguagaaaacuccauuuuccacauggcagcauggagcggguccgcgugccaugaugguaaggaauggacauauaucggaguugauggcccugacaaugaugcauugcucaaaguaaaauauggagaagcauauacugacacauaccauuccuaugcaaacaaaauccuaagaacacaagaaagugccugcaauugcaucgggggaaauuguuaucuuaugauaacugauggcucagcuucagguguuagugaaugcagauuucuuaagauucgagagggccgaauaauaaaagaaauauuuccaacaggaagaguaaaacacacugaggaaugcacaugcggauuugccagcaauaaaaccauagaaugugccuguagagauaacaguuacacagcaaaaagaccuuuugucaaauuaaacguggagacugauacagcagaaauaagauugaugugcacagauacuuauuuggacacccccagaccagaugauggaagcauaacaggcccuugugaaucuaauggggacaaagggaguggaggcaucaagggaggauuuguucaucaaagaauggaauccaagauuggaaggugguacucucgaacgaugucuaagacugaaaggauggggaugggacuguaugucaaguaugguggagacccaugggcugacagugaugcccuagcuuuuaguggaguaaugguuucaaugaaagaaccugguugguacuccuuuggcuucgaaauaaaagauaagaaaugcgauguccccuguauugggauagagaugguacaugaugguggaaaagagacuuggcacucagcagcaacagccauuuacuguuugaugggcucaggacagcugcugugggacacugucacaggcguugacauggcucuguaa

SEQ ID NO: 61623 - RNA, 1401 nt, Artificial Sequence
  derived and/or modified CDS sequence (wt) from neuraminidase__InfluenzaB__AGX21670
augcuaccuucaacuauacaaacguuaacccuauuucucacaucagggggaguauuguuaucacuauaugugucagcuuuauuaucauacuuacuauauucggauauauugcuaaaauucucaccaacagaaauaacugcaccaacaaugucauuggauugugcaaacgcaucaaauguucaggcugugaaccguucugcaacaaaaggggugacauuucuucucccagaaccggaguggacauacccgcguuuaucuugcccgggcucaaccuuucagaaagcacuccuaauuagcccucauagauucggagaaaccaaaggaaacucagcucccuugauaauaagggaaccuuuuauugcuuguggaccaaaugaaugcaaacacuuugcucuaacccauuaugcagcccaaccagggggauacuacaauggaacaagaggagacagaaacaagcugaggcaucuaauuucagucaaauugggcaaaaucccaacaguagaaaacuccauuuuccacauggcagcauggagcggguccgcgugccaugaugguaaggaauggacauauaucggaguugauggcccugacaaugaugcauugcucaaaguaaaauauggagaagcauauacugacacauaccauuccuaugcaaacaaaauccuaagaacacaagaaagugccugcaauugcaucgggggaaauuguuaucuuaugauaacugauggcucagcuucagguguuagugaaugcagauuucuuaagauucgagagggccgaauaauaaaagaaauauuuccaacaggaagaguaaaacacacugaggaaugcacaugcggauuugccagcaauaaaaccauagaaugugccuguagagauaacaguuacacagcaaaaagaccuuuugucaaauuaaacguggagacugauacagcagaaauaagauugaugugcacagauacuuauuuggacacccccagaccagaugauggaagcauaacaggccccugugaaucuaauggggacaaagggaguggaggcaucaagggaggauuuguucaucaaagaauggaauccaagauuggaaggugguacucucgaacgaugucuaagacugaaaggauggggaugggacuguaugucaaguaugauggagacccaugggcugacagugaugcccuagcuuuuaguggaguaaugguuucaaugaaagaaccugguugguacuccuuuggcuucgaaauaaaagauaagaaaugcgauguccccuguauugggacagagaugguacaugaugguggaaaagagacuuggcacucagcagcaacagccauuuacuguuuaaugggcucaggacagcugcugugggacacugucacaggcguugacauggcucuguaa

SEQ ID NO: 61624 - RNA, 1401 nt, Artificial Sequence
  derived and/or modified CDS sequence (wt) from neuraminidase__InfluenzaB__AGX21681
augcuaccuucaacuauacaaauguuaacccuauuucucacaucagggggaguacuauuaucacuauaugugucagcuucauuaucauacuuacuauauucggauauauugcuaaaauucucaccaacagaaauaacugcaccaacaaugccauuggauugugcaaacgcaucaaauguucaugcugugaaccguucugcaacaaaaggggugacauuucuucucccagaaccggaguggacauacccgcguuuaucuugcccgggaucaaccuuucagaaagcacuccuaauuagcccucauagauucggagaaaccaaaggaaacucagcucccuugauaauaagggaaccuuuuauugcuuguggaccaaaugaaugcaaacacuuugcucuaacccauuaugcagcccaaccagggggauacuacaauggaacaagaggagacagaaacaagcugaggcaucuaauuucagucaaauugggcaaaaucccaacaguagaaaacuccauuuuccacauggcagcauggagcggguccgcaugccaugaugguaaggaauggacauauaucggaguugaugguccugacaauaaugcauugcucaaaauaaaauauggagaagcauauacugacacauaucauuccuaugcaaacaacauccuaagaacacaagaaagugccugcaauugcaucgggggaaauuguuaucuuaugauaacugauggcucagcuucagguguuagugaaugcagauuucuuaagauucgagagggccgaauaauaaaagaaauauuuccaacaggaagaguaaaacauacugaggagugcacaugcggauuugccagcaauaaaaccauagaaugugccuguagagauaacaguuacacagcaaaaagacccuuugucaaauuaaacguggaaacugauacagcagaaauaagauugaugugcacagauaccuauuuggacacccccagaccggaugauggaagcauaacaggcccuugugaaucuaauggggacaaagggaauggaggcaucaagggaggauuuguucaucaaagaauggcauccaagauugggaggugguacucucgaacgaugucuaaaacugaaaggaaggggaugggacuguaugucaaguaugauggagacccauggacugacagugaugcccuugcuuuuaggggaguaaugguuucaaugaaagaaccugguugguacuccuuuggcuucgaaauaaaagauaagaaaugcgauguccccuguauugggauagagaugguacaugaugguggaaaagagacuuggcacucagcagcaacagccauuuacuguuuaaugggcucaggacagcugcugugggacacagucacaggugucgacauggcucuauaa

SEQ ID NO: 61625 - RNA, 1401 nt, Artificial Sequence; identical to SEQ ID NO: 61132
  derived and/or modified CDS sequence (wt) from neuraminidase__InfluenzaB__AGX21692

SEQ ID NO: 61626 - RNA, 1401 nt, Artificial Sequence
  derived and/or modified CDS sequence (wt) from neuraminidase__InfluenzaB__AGX21703
augcuaccuucaacuauacaaacguuaacccuauuucucacaucagggggaguauuauuaucacuauaugugucagcuucauuaucauacuuacuauauucggauauauugcuaaaauucucaccaacagaaauaacugcaccaacaaugccauuggauugugcaaacgcaucaaauguucaggcugugaaccguucugcaacaaaaggagugacacuucuucucccagaaccggaguggacauacccgcguuuaucuugcccgggcucaaccuuucagaaagcacuccuaauuagcccucauagauucggagaaaccaaaggaaacucagcucccuugauaauaagggaaccuuuuauugcuuguggaccaaaugaaugcaaacacuuugcucuaacccauuaugcagcccaaccagggggauacuacaauggaacaagaggagacagaaacaagcugaggcaucuaauuucagucaaauugggcaaaaucccaacaguagaaaacuccauuuuccacauggcagcauggagcggguccgcgugccaugaugguaaggaauggacauauaucggaguugauggcccugacaauaaugcauugcucaaaguaaaauauggagaagcauauacugacacauaccauuccuaugcaaacaaaauccuaagaacacaagaaagugccugcaauugcaucgggggaaauuguuaucuuaugauaacugauggcucagcuucagguguuagugaaugcagauuucuuaagauucgagagggccgaauaauaaaagaaauauuuccaacaggaagaguaaaacacacugaggaaugcacaugcggguuugccagcaauaaaaccauagaaugugccuguagagauaacaguuacacagcaaaaagaccuuuugucaaauuaaauguggagacugauacagcagaaguaagauugaugugcacagauacuuauuuggacacccccagaccaaaugauggaagcauaacaggcccuugugaaucugauggggacaaggggaguggaggcaucaagggaggauuuguucaucaaagaauggaauccaagauuggaaggugguacucucgaacgaugucuaaaacugaaaggauggggaugggacuguaugucaaguaugauggagacccaugggcugacagugaugcccuaacuuuuaguggaguaaugguuucaaugaaagaaccugguugguacuccuuuggcuucgaaauaaaagauaagaaaugcgauguccccuguauugggauagagaugguacaugaugguggaaaagagacuuggcacucagcagcaacagccauuuacuguuuaaugggcucaggacagcugcugugggacacugucacagguguugacauggcucuguaa

SEQ ID NO: 61627 - RNA, 1401 nt, Artificial Sequence
  derived and/or modified CDS sequence (wt) from neuraminidase__InfluenzaB__AGX21714
augcuaccuucaacuauacaaacguuaacccuauuucucacaucagggggaguauuauuaucacuauaugugucagcuucauuaucauacuuacuauauucggauauauugcuaaaauucucaccaacagaaauaacugcaccagcaaugccauuggauugugcaaacgcaucaaauguucaggcugugaaccgcucugcaacaaaaggguugacacuucuucucccagaaccggaguggacauacccgcguuuaucuugcccgggcucaaccuuucagaaagcacuucuaauuagcccucauagauucggagaaaccaaaggaaacucagcucccuugauaauaagggaaccuuuuauugcuuguggaccaaaugaaugcaaacacuuugcucuaacccauuaugcagcccaaccagggggauacuacaauggaacaagaggagacagaaacaagcugaggcaucuaauuucagucaaauugggcaaaaucccaacaguagaaaacuccauuuuccacauggcagcauggagcggguccgcgugccaugaugguaaggaauggacauauaucggaguugauggcccugacaauaaugcauugcucaaaguaaaauauggagaagcauauacugacacauaccauuccuaugcaaacaaaauccuaagaacacaagaaagugccugcaauugcaucgggggaaauuguuaucuuaugauaacugauggcucagcuucagguguuagugaaugcagauuucuuaagauucgagagggccgaauaauaaaagaaauauuuccaacaggaagaguaaaacacacugaggaaugcacaugcggauuugccagcaauaaaaccauagaaugugccuguagagauaacaguuacacagcaaaaagaccuuuugucaaauuaaacguggagacugauacagcagaaauaagauugaugugcacagauacuuauuuggacacccccagaccaaaugauggaagcauaacaggcccuugugaaucugauggggacaaagggaguggaggcaucaagggaggauuuguucaucaaagaauggaauccaagauuggaaggugguacucucgaacgaugucuaaaacugaaaggauggggaugggacuguaugucaaguaugauggagacccaugggcugacagugaugcccuagcuuuuaguggaguaaugguuucaaugaaagaaccugguugguacuccuuuggcuucgaaauaaaagauaagaaaugcgauguccccuguauugggauagagaugguacaugaugguggaaaagagacuuggcacucagcagcaacagccauuuacuguuuaaugggcucaggacagcugcugugggacacugucacagguguugacauggcuuuguaa

SEQ ID NO: 61628 - RNA, 1401 nt, Artificial Sequence
  derived and/or modified CDS sequence (wt) from neuraminidase__InfluenzaB__AGX21725
augcuaccuucaacuauacaaauguuaacccuauuucucacaucagggggaguacuauuaucacuauaugugucagcuucauuaucauacuuacuauauucggauauauugcuaaaauucucaccaacagaaauaacugcaccaacaaugccauuggauugugcaaacgcaucaaauguucaugcugugaaccguucugcaacaaaaggggugacauuucuucucccagaaccggaguggacauacccgcguuuaucuugcccgggaucaaccuuucagagagcacuccuaauuagcccucauagauucggagaaaccaaaggaaacucagcucccuugauaauaagggaaccuuuuauugcuuguggaccaaaugaaugcaaacacuuugcucuaacccauuaugcagcccaaccagggggauacuacaauggaacaagaggagacagaaacaagcugaggcaucuaauuucagucaaauugggcaaaaucccaacaguagaaaacuccauuuuccacauggcagcauggagcggguccgcaugccaugaugguaaggaauggacauauaucggaguugaugguccugacaauaaugcauugcucaaaauaaaauauggagaagcauauacugacacauaucauuccuaugcaaacaacauccuaagaacacaagaaagugccugcaauugcaucgggggaaauuguuaucuuaugauaacugauggcucagcuucagguguuagugaaugcagauuucuuaagauucgagagggccgaauaauaaaagaaauauuuccaacaggaagaguaaaacauacugaggagugcacaugcggauuugccagcaauaaaaccauagaaugugccuguagagauaacaguuacacagcaaaaagacccuuugucaaauuaaacguggaaacugauacagcagaaauaagauugaugugcacagauaccuauuuggacacccccagaccagaugauggaagcauaacaggcccuugugaaucuaauggggacaaagggaguggaggcaucaagggaggauuuguucaucaaagaauggcauccaagauugggaggugguacucucgaacgaugucuaaaacugaaaggaaggggaugggacuguaugucaaguaugauggagacccauggacugacagugaugcccuugcuuuuaggggaguaaugguuucaaugaaagaaccugguugguacuccuuuggcuucgaaauaaaagauaagaaaugcgauguccccuguauugggauagagaugguacaugaugguggaaaagagacuuggcacucagcagcaacagccauuuacuguuuaaugggcucaggacagcugcugugggacacagucacaggugucgacauggcucuauaa

SEQ ID NO: 61629 - RNA, 1401 nt, Artificial Sequence
  derived and/or modified CDS sequence (wt) from neuraminidase__InfluenzaB__AGX21747
augcuaccuucaacuauacaaacguuaacccuauuucucacaucagggggaguguuauuaucacuauaugugucagcuucacugucauacuuacuauauucggauauauugcuaaaaguuucacaaacagaaauaacugcaccaacaaugccauuggauugugcaaacgcaucaaauguucaggcugugaaccguucugcaacaaaagggguaacacuucuucucccagaaccggaguggacguacccucguuuaucuugcccgggcucaaccuuucagaaagcacuccuaauuagcccucauagauucggagaaaccaaaggaaacucagcucccuugauaauaagggaaccuuuuauugcuuguggaccaaaggaaugcaaacacuuugcucuaacccauuaugcagcucaaccagggggauacuacaauggaacaagagaagacagaaacaagcugaggcaucuaauuucagucaaauugggaaaaaucccaacaguagaaaacucuauuuuccacauggcagcuuggagcggguccgcaugccaugaugguagagaauggacauauaucggaguugauggcccugacaguaaugcauugcucaaaauaaaauauggagaagcauauacugacacauaccauuccuaugcaaaaaacauccuaaggacacaagaaagugccugcaauugcauugggggagauuguuaucuuaugauaacugauggcucagcuucagggauuagugaaugcagauuccuuaagauucgagagggccgaauaauaaaagaaauauuuccaacaggaagaguaaaacauacugaagaaugcacaugcggauuugccagcaauaaaaccauagaaugugccuguagagauaacaguuacacagcaaaaagacccuuugucaaauuaaauguggagacugauacagcggaaauaagauugaugugcacagagacuuauuuggacacccccagaccagaugauggaagcauaacagggccuugcgaaucuaauggggacaaagggaguggaggcaucaagggaggauuuguucaucaaagaauggcauccaagauuggaaggugguacucucgaacgaugucuaaaacuaaaagaauggggaugggacuguaugucaaguaugauggagacccauggacugacagugaagcccuugcucuuaguggaguaaugguuucaauggaagaaccugguugguauuccuuuggcuucgaaauaaaagauaagaaaugugauguccccuguauugggauagaaaugguacaugauggugggaaaacgacuuggcacucagcagcaacagccauuuacuguuuaaugggcucaggacaacugcugugggacacugucacagguguugauauggcucuguaa

SEQ ID NO: 61630 - RNA, 1401 nt, Artificial Sequence
  derived and/or modified CDS sequence (wt) from neuraminidase__InfluenzaB__AGX21758
augcuaccuucaacuauacaaacguuaacccuauuucucacaucagggggaguguuauuaucacuauaugugucagcuucacugucauacuuacuauauucggauauauugcuaaaauuuacaccaacagaaauaacuguaccaacaaugccauuggauugugcaaacgcaucaaauguucaggcugugaaccguucugcaacaaaaggggugacacuucuucucccagaaccggaguggacauacccgcguuuaucuugcccgggcucaaccuuucagaaagcacuccuaauuagcccucauagauucggagaaaccaaaggaaacucagcucccuugauaauaagggaaccuuuuauugcuuguggaccaaaggaaugcaaacacuuugcucuaacccauuaugcagcccaaccagggggauacuacaauggaacaagagaagacagaaacaagcugaggcaucuaauuucagucaaauugggcaaaaucccaacaguagaaaacuccauuuuccacauggcagcauggagcggguccgcaugccaugaugguaaagaauggacauauaucggaguugauggcccugacaguaaugcauugcucaaaauaaaauauggagaagcauauacugacacauaccauuccuaugcaaacaacauccuaagaacacaagaaagugccugcaauugcaucgggggaaauuguuaucuuaugauaacugauggcucagcuucagguauuagugaaugcagauuucuuaagauucgagagggccggauaauaaaagaaauauuuccaacaggaagaguaaagcauacugaagaaugcacaugcggauuugccagcaauaaaaccauagaaugugcuuguagagauaacaguuacacagcaaaaagacccuuugucaaauuaaauguggagacugacacagcagaaauaagauugaugugcacagagacuuauuuggacacccccagaccagaugauggaagcauaacagggccuugugaaucuaaugggaauaaagggaguggaggcaucaagggaggauuuguucaucaaagaauggcauccaagauuggaaggugguacucucgaacgaugucuaaaacuaaaaggauggggaugggacuguaugucaaguaugauggagacccauggacugacagugaugcccuugcucuuaguggaguaaugguuucaauggaagaaccugguugguacuccuuuggcuucgaaauaaaggauaagaaaugugauguccccuguauugggauagagaugguacaugaugguggaaaggagacuuggcacucagcagcaacagccauuuacuguuuaaugggcucaggacaacugcuaugggacacugucacagguguugauauggcucuauaa

SEQ ID NO: 61631 - RNA, 1401 nt, Artificial Sequence
  derived and/or modified CDS sequence (wt) from neuraminidase__InfluenzaB__AGX21769
augcuaccuucaacuauacaaacguuaacccuauuucucacaucagggggaguguuauuaucacuauaugugucagcuucacugucauacuuacuauauucggauauauugcuaaaauuuucacaaacagaaauaacugcaccaacaaugccauuggauugugcaaacgcaucaaauguucaggcugcgaaccguucugcaacaaaaggggugacacuucuucucccagaaccggaguggacguacccucguuuaucuugcccgggcucaaccuuucagaaagcacuccuaauuagcccccauagauucggagaaaccaaaggaaacucagcucccuugauaauaagggaaccuuuuauugcuuguggaccaaaagaaugcaaacacuuugcucuaacccauuaugcagcucaaccagggggauauuacaauggaacaagagaagacagaaacaagcugaggcaucuaauuucagucaaauugggcaaaaucccaacaguagaaaacucuauuuuccacauggcagcuuggagcggguccgcaugccaugaugguagagaauggacauauaucggaguugauggccccgacaguaaugcauugcucaaaauaaaauauggagaagcauauacugacacauaccauuccuaugcaaaaaacauccuaaggacacaagaaagugccugcaauugcaucgggggagauuguuaucuuaugauaacugauggcucagcuucagggauuagugaaugcagauuccuuaagauucgagagggccgaauaauaaaagaaauauuuccaacaggaagaguaaaacauacugaagaaugcacaugcggauuugccagcaacaaaaccauagaaugugccuguagagauaacaguuacacagcaaaaagacccuuugucaaauuaaauguggagacugauacagcggaaauaagauugaugugcacaaagacuuauuuggacacccccagaccaaaugauggaagcauaacagggccuugcgaaucugauggggacaaagggaguggaggcaucaagggaggauuuguucaucaaagaauggcauccaagauuggaaggugguacucucgaacgaugucuaaaacuaaaagaauggggaugggacuguaugucaaguaugauggagacccauggacugacagugaagcccuugcucuuaguggaguaaugguuucaauggaagaaccugguugguauuccuuuggauucgaaauaaaagauaagaaaugugauguccccuguauugggauagaaaugguacaugauggugggaaaacgacuuggcacucagcagcaacagccauuuacuguuuaaugggcucaggacaacugcugugggacacugucacagguguugauauggcucuguaa

SEQ ID NO: 61632 - RNA, 1401 nt, Artificial Sequence
  derived and/or modified CDS sequence (wt) from neuraminidase__InfluenzaB__AGX21780
augcuaccuucaacuauacaaacguuaacccuauuucucacaucagggggaguguuauuaucacuauaugugucagcuucacugucauacuuacuauauucggauauauugcuaaaauuuucacaaacagaaauaacugcaccaacaaugccauuggauugugcaaacgcaucaaauguucaggcugugaaccguucugcaacaaaaggggugacacuucuucucccagaaccggaguggacguacccucguuuaucuugcccgggcucaaccuuucagaaagcacuccuaauuagcccccauagauucggagaaaccaaaggaaacucagcucccuugauaauaagggaaccuuuuauugcuuguggaccaaaggaaugcaaacacuuugcucuaacccauuaugcagcucaaccagggggauacuacaauggaacaagagaagacagaaacaagcugaggcaucuaauuucagucaaauugggaaaaaucccaacaguagaaaacucuauuuuccacauggcugcuuggagcggguccgcaugccaugaugguagagaauggacauauaucggaguugauggccccgacaguaaugcauugcucaaaauaaaauauggagaagcauauacugacacauaccauuccuaugcaaaaaacauccuaaggacacaagaaagugccugcaauugcaucgggggagauuguuaucuuaugauaacugauggcucagcuucagggauuagugaaugcagauuccuuaagauucgagagggccgaauaauaaaagaaauauuuccaacaggaagaguaaaacauacugaagaaugcacaugcggauuugccagcaacaaaaccauagaaugugccuguagagauaacaguuacacagcaaaaagacccuuugucaaauuaaauguggagacugauacagcggaaauaagauugaugugcacagagacuuauuuggacacccccagaccaaaugauggaagcauaacagggccuugcgaaucuaauggggacaaagggaguggaggcaucaagggaggauuuguucaucaaagaauggaauccaagauuggaaggugguacucucgaacgaugucuaaaacuaaaagaauggggaugggacuguaugucaaguaugauggagacccauggacugacagugaagcccuugcucuuaguggaguaaugguuucaauggaagaaccugguugguauuccuuuggcuucgaaauaaaagauaagaaaugugauguccccuguauugggauagaaaugguacaugauggugggaaaacgacuuggcacucagcagcaacagccauuuacuguuuaaugggcucaggacaauugcugugggacacugucacagguguugauaugacucuguaa

SEQ ID NO: 61633 - RNA, 1401 nt, Artificial Sequence
  derived and/or modified CDS sequence (wt) from neuraminidase__InfluenzaB__AGX21791
augcuaccuucaacuauacaaacguuaacccuauuucucacaucagggggaguauuauuaucacuauaugugucagcuucauugucauacuuacuauauucggauauauugcuaaaauucucaccaacagaaauaacugcaccaacaaugccauuggauugugcaaacgcaucaaauguucaggcugugaaccguucugcaacaaaaggggugacacuucuucucccagaaccggaguggacauacccgcguuuaucuugcccgggcucaaccuuucagaaagcacuccuaauuagcccucauagguucggagaaaccaaaggaaacucagcucccuugauaauaagagaaccuuuuauugcuuguggaccaaaggaaugcaaacacuuugcucuaacccauuaugcagcccaaccagggggauacuacaguggaacaagaggagacagaaacaagcugaggcaucuaauuucagucaaauugggcaaaaucccaacaguagaaaacuccauuuuccacauggcagcauggagcggguccgcaugccaugaugguaaagaauggacauauaucggaguugauggcccugacaauaaugcauugcucaaaauaaaauauggagaagcauauacugacacauaccauuccuaugcaaacaacauccuaagaacacaagaaagugccugcaauugcaucgggggaaauuguuaucuuaugauaacugauggcucagcuucagguauuagugaaugcagauuucuuaagauucgagagggccgaauaauaaaagaaauauuuccaacaggaagaguaaaacauacugaagaaugcacaugcggauuugccagcaauaaaaccauagaaugugccuguagagauaacaauuacacagcaaaaagacccuuugucaaauuaaacguggagacugauacagcagaaauaagauugaugugcacagagacuuauuuggacacccccagaccagaugauggaagcauaacagggccuugugaaucuaauggggacaaagggaguggaggcaucaagggaggauuuguucaucaaagaauggcauccaagauuggaaggugguacucucgaacgaugucuaaaaauaaaaggauggggaugggacuguaugucaaguaugauggagacccaugggcugacagugaugcccuugcucuuaguggaguaaugguuucaauggaagaaccugguugguacuccuuuggcuucgaaauaaaagauaagaaaugugauguccccuguauugggauagagaugguacaugaugguggaaaagagacuuggcacucagcagcaacagccauuuacuguuuaaugggcucaggacagcugcugugggacacugucacagguguugauauggcucuguaa

SEQ ID NO: 61634 - RNA, 1401 nt, Artificial Sequence
  derived and/or modified CDS sequence (wt) from neuraminidase__InfluenzaB__AGX21802
augcuaccuucaacuauacaaacguuaacccuauuucucacaucagggggaguguuauuaucacuauaugugucagcuucacugucauacuuacuauauucggauauauugcuaaaauuuucacaaacagaaauaacugcaccaacaaugccauuggauugugcaaacgcaucaaauguucaggcugcgaaccguucugcaacaaaaggggugacacuucuucucccagaaccggaguggacguacccucguuuaucuugcccgggcucaaccuuucagaaagcacuccuaauuagcccccauagauucggagaaaccaaaggaaacucagcucccuugauaauaagggaaccuuuuauugcuuguggaccaaaagaaugcaaacacuuugcucuaacccauuaugcagcucaaccagggggauauuacaauggaacaagagaagacagaaacaagcugaggcaucuaauuucagucaaauugggcaaaaucccaacaguagaaaacucuauuuuccacauggcagcuuggagcggguccgcaugccaugaugguagagaauggacauauaucggaguugauggccccgacaguaaugcauugcucaaaauaaaauauggagaagcauauacugacacauaccauuccuaugcaaaaaacauccuaaggacacaagaaagugccugcaauugcaucgggggagauuguuaucuuaugauaacugauggcucagcuucagggauuagugaaugcagauuccuuaagauucgagagggccgaauaauaaaagaaauauuuccaacaggaagaguaaaacauacugaagaaugcacaugcggauuugccagcaacaaaaccauagaaugugccuguagagauaacaguuacacagcaaaaagacccuuugucaaauuaaauguggagacugauacagcggaaauaagauugaugugcacagagacuuauuuggacacccccagaccaaaugauggaagcauaacagggccuugcgaaucugauggggacaaagggaguggaggcaucaagggaggauuuguucaucaaagaauggcauccaagauuggaaggugguacucucgaacgaugucuaaaacuaaaagaauggggaugggacuguaugucaaguaugauggagacccauggacugacagugaagcccuugcucuuaguggaguaaugguuucaauggaagaaccugguugguauuccuuuggauucgaaauaaaagauaagaaaugugauguccccuguauugggauagaaaugguacaugauggugggaaaacgacuuggcacucagcagcaacagccauuuacuguuuaaugggcucaggacaacugcugugggacacugucacagguguugauauggcucuguaa

SEQ ID NO: 61635 - RNA, 1401 nt, Artificial Sequence
  derived and/or modified CDS sequence (wt) from neuraminidase__InfluenzaB__AGX21813
augcuaccuucaacuauacaaacguuaacccuauuucucacaucagggggaguguuauuaucacuauaugugucagcuucacugucauacuuacuauauucggauauauugcuaaaauuuucacaaacagaaauaacugcaccaaaaaugccauuggauugugcaaacgcaucaaauguucaggcugcgaaccguucugcaacaaaaggggugacacuucuucucccagaaccggaguggacguacccucguuuaucuugcccgggcucaaccuuucagaaagcacuccuaauuagcccccauagauucggagaaaccaaaggaaacucagcucccuugauaauaagggaaccuuuuauugcuuguggaccaaaagaaugcaaacauuuugcucuaacccauuaugcagcucaaccagggggauauuacaauggaacaagagaagacagaaacaagcugaggcaucuaauuucagucaaauugggcaaaaucccaacaguagaaaacucuauuuuccacauggcagcuuggagcggguccgcaugccaugaugguagagaauggacauauaucggaguugauggccccgacaguaaugcauugcucaaaauaaaauauggagaagcauauacugacacauaccauuccuaugcaaaaaacauccuaaggacacaagaaagugccugcaauugcaucgggggagauuguuaucuuaugauaacugauggcucagcuucagggauuagugaaugcagauuccuuaagauucgagagggccgaauaauaaaagaaauauuuccaacaggaagaguaaaacauacugaagaaugcacaugcggauuugccagcaacaaaaccauagaaugugccuguagagauaacaguuacacagcaaaaagacccuuugucaaauuaaauguggagacugauacagcggaaauaagauugaugugcacagagacuuauuuggacacccccagaccaaaugauggaagcauaacagggccuugcgaaucugauggggacaaagggaguggaggcaucaagggaggauuuguucaucaaagaauggcauccaagauuggaaggugguacucucgaacgaugucuaaaacuaaaagaauggggaugggacuguaugucaaguaugauggagacccauggacugacagugaagcccuugcucuuaguggaguaaugguuucaauggaagaaccugguugguauuccuuuggauucgaaauaaaagauaagaaaugugauguccccuguauugggauagaaaugguacaugauggugggaaaacgacuuggcacucagcagcaacagccauuuacuguuuaaugggcucaggacaacugcugugggacacugucacagguguugauauggcucuguaa

SEQ ID NO: 61636 - RNA, 1401 nt, Artificial Sequence
  derived and/or modified CDS sequence (wt) from neuraminidase__InfluenzaB__AGX21824
augcuaccuucaacuauacaaacguuaacccuauuucucacaucagggggaguguuauuaucacuauaugugucagcuucauugucauacuuacuauauucggauauauugcuaaaauuuucacaaacagaaauaacugcaccaauaaugccauuggauugugcaaacgcaucaaauguucaggcugugaaccguucugcaacaaaaggggugacacuucuucucccagaaccggaguggacguacccucguuuaucuugcccgggcucaaccuuucagaaagcacuccuaauuagcccccauagauucggagaaaccaaaggaaacucagcucccuugauaauaagggaaccuuuuauugcuuguggaccaaaggaaugcaaacacuuugcucugacccauuaugcagcucaaccagggggauacuacaauggaacaagagaagacagaaacaagcugaggcaucuaauuucagucaaauugggcaaaaucccaacaguagaaaacucuauuuuccacauggcagcuuggagcggguccgcaugccaugaugguagagaauggacauauaucggaguugauggccccgacaguaaugcauugcucaaaauaaaauauggagaagcauauacugacacauaccauuccuaugcaaaaaacauccuaaggacacaagaaagugccugcaauugcaucgggggagauuguuaucuuaugauaacugauggcccagcuucaggaauuagugaaugcagauuccuuaagauucgagagggccgaauaauaaaagaaauauuuccaacaggaagaguaaaaaauacugaggaaugcacaugcggauuugccagcaacaaaaccauagaaugugccuguagagauaacaguuacacagcaaaaagacccuuugucaaauuaaauguggagacugauacagcggaaauaagauugaugugcacagagacuuauuuggacacccccagaccaaaugauggaagcauaacagggccuugcgaaucuaauggggacaaagggaguggaggcaucaagggaggauuuguucaucaaagaauggcauccaagauuggaaggugguacucucgaacgaugucuaaaacuaaaagaauggggaugggacuguauguaaaguaugauggagacccauggacugacagugaagcccuugcucuuaguggaguaaugguuucaauggaagaaccugguugguauuccuuuggcuucgaaauaaaagauaagaaaugugauguccccuguauugggauagaaaugguacaugauggugggaaaacgacuuggcacucagcagcaacagccauuuacuguuuaaugggcucaggacaacugcugugggacacugucacagguguugauauggcucuguaa

SEQ ID NO: 61637 - RNA, 1401 nt, Artificial Sequence
  derived and/or modified CDS sequence (wt) from neuraminidase__InfluenzaB__AGX21835
augcuaccuucaacuauacaaacguuaacccuauuucucacaucagggggaguguuauuaucacuauaugugucagcuucauugucauacuuacuauauucggauauauugcuaaaauuuucacaaacagaaauaacugcaccaauaaugccauuggauugugcaaacgcaucaaauguucaggcugugaaccguucugcaacaaaaggggugacacuucuucucccagaaccggaguggacguacccucguuuaucuugcccgggcucaaccuuucagaaagcacuccuaauuagcccccauagauucggagaaaccaaaggaaacucagcucccuugauaauaagggaaccuuuuauugcuuguggaccaaaggaaugcaaacacuuugcucuaacccauuaugcagcucaaccagggggauacuacaauggaacaagagaagacagaaacaagcugaggcaucuaauuucagucaaauugggcaaaaucccaacaguagaaaacucuauuuuccacauggcagcuuggagcggguccgcaugccaugaugguagagaauggacauauaucggaguugauggccccgacaguaaugcauugcucaaaauaaaauauggagaagcauauacugacacauaccauuccuaugcaaaaaacauccuaaggacacaagaaagugccugcaauugcaucgggggagauuguuaucuuaugauaacugauggcccagcuucagggauuagugaaugcagauuccuuaagauucgagagggccgaauaauaaaagaaauauuuccaacaggaagaguaaaacauacugaggaaugcacaugcggauuugccagcaacaaaaccauagaaugugccuguagagauaacaguuacacagcaaaaagacccuuugucaaauuaaauguggagacugauacagcggaaauaagauugaugugcacagagacuuauuuggacacccccagaccaaaugauggaagcauaacagggccuugcgaaucuaauggggacaaagggaguggaggcaucaagggaggauuuguucaucaaagaauggcauccaagauuggaaggugguacucucgaacgaugucuaaaacuaaaagaauggggaugggacuguauguaaaguaugauggagacccauggacugacagugaagcccuugcucuuaguggaguaaugguuucaauggaagaaccugguugguauuccuuuggcuucgaaauaaaagauaagaaaugugauguccccuguauugggauagaaaugguacaugauggugggaaaacgacuuggcacucagcagcaacagccauuuacuguuuaaugggcucaggacaacugcugugggacacugucacagguguugauauggcucuguaa

SEQ ID NO: 61638 - RNA, 1401 nt, Artificial Sequence; identical to SEQ ID NO: 61144
  derived and/or modified CDS sequence (wt) from neuraminidase__InfluenzaB__AGX21846

SEQ ID NO: 61639 - RNA, 1401 nt, Artificial Sequence
  derived and/or modified CDS sequence (wt) from neuraminidase__InfluenzaB__AGX21857
augcuacccucaacuauacaaacguuaacccuauuccucacaucagggggaguguuauuaucacuauaugugucagcuucacugucauacuuacuauauucggauauauugcuaaaguuuucaacaacagaaauaacugcaccaacaaugccauuggauugugcaaacgcaucaaauguucaggcugugaaccguucugcaacaaaaggggugacauuucuucucccagaaccggaguggacauacccgcguuuaucuugcccgggcucaaccuuucagaaagcacuccuaauuagcccucauagauucggagaaaccaaaggaaacucagcucccuugauaauaagggaaccuuuuauugcuuguggaccaaaggaaugcaaacacuuugcucuaacccauuaugcagcccaaccagggggauacuacaauggaacaagagaagacagaaacaagcugaggcaucuaauuucagucaaauugggcaaaaucccaacaguagaaaacuccauuuuucacauggcagcauggagcggguccgcaugccaugaugguaaagaauggacauauaucggaguugauggcccugacaguaaugcauugcucaaaauaaaauauggagaagcauauacugacacauaccauuccuaugcaaacaacauccuaagaacacaagaaagugccugcaauugcaucgggggaaauuguuaucuuaugauaacugauggcucagcuucagguauuagugagugcagauuucuuaagauucgagagggccgaauaauaaaagaaauauuuccaacaggaagaguaaaacauacugaagaaugcacaugcggauuugccagcaauaaaaccauagaaugugccuguagagauaacaguuacacagcaaaaaggcccuuugucaaacuaaauguggagacugauacagcagaaauaagauugaugugcacagagacuuauuuggacacccccagaccagaugauggaagcauaacagggccuugugaaucuaaugggaacaaagggaguggaggcaucaagggaggauuuguucaucaaagaauggcauccaaaauuggaaggugguacucucgaacaaugucuaaaaccaaaaggaugggaaugggacuguaugucaaguaugauggagacccauggacugacagugaugcccuugcucuuaguggaguaaugguuucaauggaagaaccugguugguacucauuuggcuucgaaauaaaagauaagaaaugugauguccccuguauugggauagagaugguacaugaugguggaaaggagacuuggcacucagcagcaacagccauuuacuguuuaaugggcucaggacaacuguugugggacacugucacagguguugauauggcucuguaa

SEQ ID NO: 61640 - RNA, 1401 nt, Artificial Sequence
  derived and/or modified CDS sequence (wt) from neuraminidase__InfluenzaB__AGX21868
augcuaccuucaacuauacaaacguuaacccuauuucucacaucagggggaguguuauuaucacuauaugugucagcuucauugucauacuuacuauauucggauauauugcuaaaauuuucacaaacagaaauaacugcaccaauaaugccauuggauugugcaaacgcaucaaauguucaggcugugaaccguucugcaacaaaaggggugacacuucuucucccagaaccggaguggacguacccucguuuaucuugcccgggaucaaccuuucagaaagcacuccuaauuagcccccauagauucggagaaaccaaaggaaacucagcucccuugauaauaagggaaccuuuuauugcuuguggaccaaaagaaugcaaacacuuugcucuaacccauuaugcagcucaaccagggggauacuacaauggaacaagagaagacagaaacaagcugaggcaucuaauuucagucaaauugggcaaaaucccaacaguagaaaacucuauuuuccacauggcagcuuggagcggguccgcaugccaugaugguagagaauggacauauaucggaguugauggcccugacaguaaugcauugcucaaaauaaaauauggagaagcauauacugacacauaccauuccuaugcaaaaaacauccuaaggacacaagaaagugccugcaauugcaucgggggagauuguuaucuuaugauaacugauggcccagcuucagggauuagugaaugcagauuccuuaagauucgagagggccgaauaauaaaagaaauauuuccaacaggaagaguaaaacauacugaggaaugcacaugcggauuugccagcaacaaaaccauagaaugugccuguagagauaacaguuacacagcaaaaagacccuuugucaaauuaaauguggagacugauacagcggaaauaagauugaugugcacagagacuuauuuggacacccccagaccaaaugauggaagcauaacagggccuugcgaaucuaauggggacaaagggaguggaggcaucaagggaggauuuguucaucaaagaauggcauccaagauuggaaggugguacucucgaacgaugucuaaaacuaaaagaauggggaugggacuguauguaaaguaugauggagacccauggacugacagugaagcccuugcucuuaguggaguaaugguuucaauggaagaaccugguugguauuccuuuggcuucgaaauaaaagauaagaaaugugauguccccuguauugggauagaaaugguacaugauggugggaaaacgacuuggcacucagcagcaacagccauuuacuguuuaaugggcucaggacagcugcugugggacacugucacagguguugauauggcucuguag

SEQ ID NO: 61641 - RNA, 1401 nt, Artificial Sequence; identical to SEQ ID NO: 61141
  derived and/or modified CDS sequence (wt) from neuraminidase__InfluenzaB__AGX21879

SEQ ID NO: 61642 - RNA, 1401 nt, Artificial Sequence
  derived and/or modified CDS sequence (wt) from neuraminidase__InfluenzaB__AGX21890
augcuaccuucaacuauacaaacguuaacccuauuucucacaucagggggaguguuauuaucacuauaugugucagcuucauugucauacuuacuauauucggauauauugcuaaaauuuucacaaacagaaauaauugcaccaauaaugccauuggauugugcaaacgcaucaaauguucaggcugugaaccauucugcaacaaaaggggugacacuucuucucccagaaccggaguggacguacccucguuuaucuugcccgggcucaaccuuucagaaagcacuccuaauuagcccccauagauucggagaaaccaaaggaaacucagcucccuugauaauaagggaaccuuuuauugcuuguggaccaaaggaaugcaaacacuuugcucuaacccauuaugcagcucaaccagggggauacuacaauggaacaagagaagacagaaacaagcugaggcaucuaauuucagucaaauugggcaaaaucccaacaguagaaaacucuauuuuccacauggcagcuuggagcggguccgcaugccaugaugguagagaauggacauauaucggaguugauggccccgacaguaaugcauugcucaaaauaaaauauggagaagcauauacugacacauaccauuccuaugcaaaaaacauccuaaggacacaagaaagugccugcaauugcaucgggggagauuguuaucuuaugauaacugauggcccagcuucagggauuagugaaugcagauuccuuaagauucgagagggccgaauaauaaaagaaauauuuccaacaggaagaguaaaacauacugaggaaugcacaugcggauuugccagcaacaaaaccauagaaugugccuguagagauaacaguuacacagcaaaaagacccuuugucaaauuaaauguggagacugauacagcagaaauaagauugaugugcacagagacuuauuuggacacccccagaccaaaugauggaagcauaacagggccuugcgaaucuaauggggacaaagggaguggaggcaucaagggaggauuuguucaucaaagaauggcauccaagauuggaaggugguacucucgaacgaugucuaaaacuaaaagaauggggaugggacuguauguaaaguaugauggagacccauggacugacagugaagcccuugcucuuaguggaguaaugguuucaauggaagaaccugguugguauuccuuuggcuucgaaauaaaagauaagaaaugugauguccccuguauugggauagaaaugguacaugauggugggaaaacgacuuggcacucagcagcaacagccauuuacuguuuaaugggcucaggacaacugcugugggacacugucacagguguugauauggcucuguaa

SEQ ID NO: 61643 - RNA, 1401 nt, Artificial Sequence; identical to SEQ ID NO: 61264
  derived and/or modified CDS sequence (wt) from neuraminidase__InfluenzaB__AGX21901

SEQ ID NO: 61644 - RNA, 1401 nt, Artificial Sequence
  derived and/or modified CDS sequence (wt) from neuraminidase__InfluenzaB__AGX21912
augcuaccuucaacuauacaaacguuaacccuauuucucacaucagggggaguguuauuaucacuauaugugucagcuucauugucauacuuacuauauucggauauauugcuaaaauuuucacaaacagaaauaacugcaccaauaaugccauuggauugugcaaacgcaucaaauguucaggcugugaaccguucugcaacaaaaggggugacacuucuucucccagaaccggaguggacguacccucguuuaucuugcccgggcucaaccuuucagaaagcacuccuaauuagcccccauagauucggagaaaccaaaggaaacucagcucccuugauaauaagggaaccuuuuauugcuuguggaccaaaggaaugcaaacacuuugcucuaacccauuaugcagcucaaccagggggauacuacaauggaacaagagaagacagaaacaagcugaggcaucuaauuucagucaaauugggcaaaaucccaacaguagaaaacucuauuuuccacauggcagcuuggagcggguccgcaugccaugaugguagagaauggacauauaucggaguugauggccccgacaguaaugcauugcucaaaauaaaauauggagaagcauauacugacacauaccauuccuaugcaaaaaacauccuaaggacacaagaaagugccugcaauugcaucgggggagauuguuaucuuaugauaacugauggcccagcuucagggauuagugaaugcagauuccuuaagauucgagagggccgaauaauaaaagaaauauuuccaacaggaagaguaaaacauacugaggaaugcacaugcggauuugccagcaacaaaaccauagaaugugccuguagagauaacaguuacacagcaaaaagacccuuugucaaauuaaauguggagacugauacagcggaaauaagauugaugugcacagagacuuauuuggacacccccagaccaaaugauggaagcauaacagggccuugcgaaucuaauggggacaaagggaguggaggcaucaagggaggauuuguucaucaaagaauggcauccaagauuggaaggugguacucucgaacgaugucuaaaacuaaaagaauggggaugggacuguauguaaaguaugauggagacccauggacugacagugaagcccuugcucuuaguggaguaaugguuucaauggaagaaccugguugguauuccuuugguuucgaaauaaaagauaagaaaugugauguccccuguauugggauagaaaugguacaugauggugggaaaacgacuuggcacucagcagcaacagccauuuacuguuuaaugggcucaggacaacugcugugggacacugucacagguguugauauggcucuguaa

SEQ ID NO: 61645 - RNA, 1401 nt, Artificial Sequence
  derived and/or modified CDS sequence (wt) from neuraminidase__InfluenzaB__AGX21923
augcuaccuucaacuauacaaacguuaacccuauuucucacaucagggggaguguuauuaucacuauaugugucagcuucauugucauacuuacuauauucggauauauugcuaaaauuuucacaaacagaaauaacugcaccaauaaugccauuggauuguacaaacgcaucaaauguucaggcugugaaccguucugcaacaaaaggggugacacuucuucucccagaaccggaguggacguacccucguuuaucuugcccgggcucaaccuuucagaaagcacuccuaauuagcccccauagauucggagaaaccaaaggaaacucagcucccuugauaauaagggaaccuuuuauugcuuguggaccaaaggaaugcaaacacuuugcucuaacccauuaugcagcucaaccagggggauacuacaauggaacaagagaagacagaaacaagcugaggcaucuaauuucagucaaauugggcaaaaucccaacaguagaaaacucuauuuuccacauggcagcuuggagcggguccgcaugccaugaugguagagaauggacauauaucggaguugauggucccgacaguaaugcauugcucaaaauaaaauauggagaagcauauacugacacauaccacuccuaugcaaaaaacauccuaaggacacaagaaagugccugcaauugcaucgggggagauuguuaucuuaugauaacugauggcccagcuucagggauuagugaaugcagauuccuuaagauucgagagggccgaauaauaaaagaaauauuuccaacaggaagaguaaaacauacugaggaaugcacaugcggauuugccagcaacaaaaccauagaaugugccuguagagauaacaguuacacagcaaaaagacccuuugucaaauuaaauguggagacugauacagcggaaauaagauugaugugcacagagacuuauuuggacacccccagaccaaaugauggaagcauaacagggccuugcgaaucuaauggggacaaagggaguggaggcaucaagggaggauuuguucaucaaagaauggcauccaagauuggaaggugguacucucgaacgaugucuaaaacuaaaagaauggggaugggacuguauguaaaguaugauggagacccauggacugacagugaagcccuugcucuuaguggaguaaugguuucaauggaagaaccugguugguauuccuuuggcuucgaaauaaaagauaagaaaugugauguccccuguauugggauagaaaugguacaugauggugggaaaacgacuuggcacucagcagcaacagccauuuacuguuuaaugggcucaggacaacugcugugggacacugucacagguguugauauggcucuguaa

SEQ ID NO: 61646 - RNA, 1401 nt, Artificial Sequence; identical to SEQ ID NO: 61642
  derived and/or modified CDS sequence (wt) from neuraminidase__InfluenzaB__AGX21934

SEQ ID NO: 61647 - RNA, 1401 nt, Artificial Sequence
  derived and/or modified CDS sequence (wt) from neuraminidase__InfluenzaB__AGX21945
augcuacccucaacuauacaaacguuaacccuauuccucacaucagggggaguguuauuaucacuauaugugucagcuucacugucauacuuacuauauucggauauauugcuaaaguuuucaacaacagaaauaacugcaccaacaaugccauuggauugugcaaacgcaucaaauguucaggcugugaaccguucugcaacaaaaggggugacauuucuucucccagaaccggaguggacauacccgcguuuaucuugcccgggcucaaccuuucagaaagcacuccuaauuagcccucauagauucggagaaaccaaaggaaacucagcucccuugauaauaagggaaccuuuuauugcuuguggaccaaaggaaugcaaacacuuugcucuaacccauuaugcagcccaaccagggggauacuacaauggaacaagagaagacagaaacaagcugaggcaucuaauuucagucaaauugggcaaaaucccaacaguagaaaacuccauuuuucacauggcagcauggagcggguccgcaugccaugaugguaaagaauggacauauaucggaguugauggcccugacaguaaugcauugcucaaaauaaaauauggagaagcauauacugacacauaccauuccuaugcaaacaacauccuaagaacacaagaaagugccugcaauugcaucgggggaaauuguuaucuuaugauaacugauggcucagcuucagguauuagugagugcagauuucuuaagauucgagagggccgaauaauaaaagaaauauuuccaacaggaagaguaaaacauacugaagaaugcacaugcggauuugccagcaauaaaaccauagaaugugccuguagagauaacaguuacacagcaaaaagacccuuugucaaacuaaauguggagacugauacagcagaaauaagauugaugugcacagagacuuauuuggacacccccagaccagaugauggaagcauaacagggccuugugaaucuaaugggaacaaagggaguggaggcaucaagggaggauuuguucaucaaagaauggcauccaaaauuggaaggugguacucucgaacaaugucuaaaaccaaaaggaugggaaugggacuguaugucaaguaugauggagacccauggacugacagugaugcccuugcucuuaguggaguaaugguuucaauggaagaaccugguugguacucauuuggcuucgaaauaaaagauaagaaaugugauguccccuguauugggauagagaugguacaugaugguggaaaggagacuuggcacucagcagcaacagccauuuacuguuuaaugggcucaggacaacuguugugggacacugucacagguguugauauggcucuguaa

SEQ ID NO: 61648 - RNA, 1401 nt, Artificial Sequence
  derived and/or modified CDS sequence (wt) from neuraminidase__InfluenzaB__AGX21956
augcuaccuucaacuauacaaacguuaacccuauuucucacaucagggggaguguuauuaucacuauaugugucagcuucauugucauacuuacuauauucggauauauugcuaaaauuuucacaaacagaaauaacugcaccaauaaugccauuggauugugcaaacacaucaaauauucaggcugugaaccguucugcaacaaaaggggugacacuucuucucccagaaccggaguggacguacccucguuuaucuugcccgggcucaaccuuucagaaagcacuccuaauuagcccccauagauucggagaaaccaaaggaaacucagcucccuugauaauaagggaaccuuuuauugcuuguggaccaaaggaaugcaaacacuuugcucuaacccauuaugcagcucaaccagggggauacuacaauggaacaagagaagacagaaacaagcugaggcaucuaauuucagucaaauugggcaaaaucccaacaguagaaaacucuauuuuccacauggcagcuuggagcggguccgcaugccaugaugguagagaauggacauauaucggaguugauggcccugacaguaaugcauugcucaaaauaaaauauggagaagcauauacugacacauaccauuccuaugcaaaaaacauccuaaggacacaagaaagugccugcaauugcaucgggggagauuguuaucuuaugauaacugauggcccagcuucagggauuagugaaugcagauuccuuaagauucgagagggccgaauaauaaaagaaauauuuccaacaggaagaguaaaacauacugaggaaugcacaugcggauuugccagcaacaaaaccauagaaugugccuguagagauaacaguuacacagcaaaaagacccuuugucaaauuaaauguggagacugauacagcggaaauaagauugaugugcacagagacuuauuuggacacccccagaccaaaugauggaagcauaacagggccuugcgaaucuaauggggacaaagggaguggaggcaucaagggaggauuuguucaucaaagaauggcauccaagauuggaaggugguacucucgaacgaugucuaaaacuaaaagaauggggaugggacuguauguaaaguaugauggagacccauggacugacagugaagcccuugcucuuaguggaguaaugguuucaauggaagaaccugguugguauuccuuuggcuucgaaauaaaagauaagaaaugugauguccccuguauugggauagaaaugguacaugauggugggaaaacgacuuggcacucagcagcaacagccauuuacuguuuaaugggcucaggacaacugcugugggacacugucacagguguugauauggcucuguaa

SEQ ID NO: 61649 - RNA, 1401 nt, Artificial Sequence; identical to SEQ ID NO: 61647
  derived and/or modified CDS sequence (wt) from neuraminidase__InfluenzaB__AGX21967

SEQ ID NO: 61650 - RNA, 1401 nt, Artificial Sequence
  derived and/or modified CDS sequence (wt) from neuraminidase__InfluenzaB__AGX21978
augcuaccuucaacuauacaaacguuaacccuauuucucacaucagggggaguauuauuaucacuauaugugucagcuucauugucauacuuacuauauucggauauauugcuaaaauuuucacaaacagaaauaacugcaccaauaaugccauuggauugugcaaacgcaucaaauguucaggcugugaaccguucugcaacaaaaggggugacacuucuucucccagaaccggaguggacguacccucguuuaucuugcccgggcucaaccuuucagaaagcacuccuaauuagcccccauagauucggagaaaccaaaggaaacucagcucccuugauaauaagggaaccuuuuauugcuuguggaccaaaggaaugcaaacacuuugcucuaacccauuaugcagcucaaccagggggauacuacaauggaacaagagaagacagaaacaagcugaggcaucuaauuucagucaaauugggcaaaaucccaacaguagaaaacucuauuuuccacauggcagcuuggagcggguccgcaugccaugaugguagagaauggacauauaucggaguugauggcccugacaguaaugcauugcucaaaauaaaauauggagaagcauauacugacacauaccauuccuaugcaaaaaacauccuaaggacacaagaaagugccugcaauugcaucgggggagauuguuaucuuaugauaacugauggcccagcuucagggauuagugaaugcagauuccuuaagauucgagagggccgaauaauaaaagaaauauucccaacaggaagaguaaaacauacugaggaaugcacaugcggauuugccagcaacaaaaccauagaaugugccuguagagacaacaguuacacagcaaaaagacccuuugucaaauuaaauguggagacugauacagcggaaauaagauugaugugcacagagacuuauuuggacacccccagaccaaaugauggaagcauaacagggccuugcgaaucuaauggggacaaagggaguggaggcaucaagggaggauuuguucaucaaagaauggcauccaagauuggaaggugguacucucgaacgaugucuaaaacuaaaagaauggggaugggacuguauguaaaguaugauggagacccauggacugacagugaagcccuugcucuuaguggaguaaugguuucaauggaagaaccugguugguauuccuuuggcuucgaaauaaaagauaagaaaugugauguccccuguauugggauagaaaugguacaugauggugggaaaacgacuuggcacucagcagcaacagccauuuacuguuuaaugggcucaggacaacugcugugggacacugucacagguguugauauggcucuguaa

SEQ ID NO: 61651 - RNA, 1401 nt, Artificial Sequence; identical to SEQ ID NO: 61647
  derived and/or modified CDS sequence (wt) from neuraminidase__InfluenzaB__AGX21989

SEQ ID NO: 61652 - RNA, 1401 nt, Artificial Sequence; identical to SEQ ID NO: 61141
  derived and/or modified CDS sequence (wt) from neuraminidase__InfluenzaB__AGX22000

SEQ ID NO: 61653 - RNA, 1401 nt, Artificial Sequence
  derived and/or modified CDS sequence (wt) from neuraminidase__InfluenzaB__AGX22011
augcuaccuucaacuauacaaacguuaacccuauuucucacaucagggggaguguuauuaucacuauaugugucagcuucauugucauacuuacuauauucggauauauugcuaaaauuuucacaaacagaaauaacugcaccaauaaugccauuggauugugcaaacgcaucaaauguucaggcugugaaccguucugcaacaaaaggggugacacuucuucucccagaaccggaguggacguauccucguuuaucuugcccgggcucaaccuuucagaaagcacuccuaauuagcccccauagauucggagaaaccaaaggaaacucagcucccuugauaauaagggaaccuuuuauugcuuguggaccaaaggaaugcaaacacuuugcucuaacccauuaugcagcuaagccagggggauacuacaauggaacaagagaagacagaaacaagcugaggcaucuaauuucagucaaauugggcaaaaucccaacaguagaaaacucuauuuuccacauggcagcuuggagcggguccgcaugccaugaugguagagaauggacauacaucggaguugauggccccgacaguaaugcauugcucaaaauaaaauauggagaagcauauacugacacauaccauuccuaugcaaaaaacauccuaaggacacaagaaagugccugcaauugcaucgggggagauuguuaucuuaugauaacugauggcccagcuucagggauuagugaaugcagauuccuuaagauucgagagggccgaauaauaaaagaaauauuuccaacaggaagaguaaaacauacugaggaaugcacaugcggauuugccagcaacaaaaccauagaaugugccuguagagauaacaauuacacagcaaaaagacccuuugucaaauuaaauguggagacugauacagcggaaauaagauugaugugcacagagacuuauuuggacacccccagaccaaaugauggaagcauaacagggccuugcgaaucuaauggggacaaagggaguggaggcaucaaaggaggauuuguucaucaaagaauggcauccaagauuggaaggugguacucucgaacgaugucuaaaacuaaaagaauggggaugggacuguauguaaaguaugauggagacccauggacugauagugaagcccuugcucuuaguggaguaaugguuucaauggaagaaccugguugguauuccuuuggcuucgaaauaaaagauaagaaaugugauguccccuguauugggauagaaaugguacaugauggugggaaaacgacuuggcacucagcagcaacagccauuuacuguuuaaugggcucaggacaacugcugugggacacugucacagguguugauauggcucuguaa

SEQ ID NO: 61654 - RNA, 1401 nt, Artificial Sequence; identical to SEQ ID NO: 61264
  derived and/or modified CDS sequence (wt) from neuraminidase__InfluenzaB__AGX22033

SEQ ID NO: 61655 - RNA, 1401 nt, Artificial Sequence; identical to SEQ ID NO: 61264
  derived and/or modified CDS sequence (wt) from neuraminidase__InfluenzaB__AGX22044

SEQ ID NO: 61656 - RNA, 1401 nt, Artificial Sequence
  derived and/or modified CDS sequence (wt) from neuraminidase__InfluenzaB__AGX22055
augcuaccuucaacuauacaaacguuaacccuauuucucacaucagggggaguguuauuaucacuauaugugucagcuucauugucauacuuacuauauucggauauauugcuaaaauuuucacaaacagaaauaacugcgccaauaaugccauuggauugugcaaacgcaucaaauguucaggcugugaaccguucugcaacaaaaggggugacacuucuucucccagaaccggaguggacguauccucguuuaucuugcccgggcucaaccuuucagaaagcacuccuaauuagcccccauagauucggagaaaccaaaggaaacucagcucccuugauaauaagggaaccuuuuauugcuuguggaccaaaggaaugcaaacacuuugcucuaacccauuaugcagcucagccagggggauacuacaauggaacaagagaagacagaaacaagcugaggcaucuaauuucagucaaauugggcaaaaucccaacaguagaaaacucuauuuuccacauggcagcuuggagcggguccgcaugccaugaugguagagaauggacauacaucggaguugauggccccgacaguaaugcauugcucaaaauaaaauauggagaagcauauacugacacauaccauuccuaugcaaaaaacauccuaaggacacaagaaagugccugcaauugcaucgggggagauuguuaucuuaugauaacugauggcccagcuucagggauuagugaaugcagauuccuuaagauucgagagggccgaauaauaaaagaaauauuuccaacaggaagaguaaaacauacugaggaaugcacaugcggauuugccagcaacaaaaccauagaaugugccuguagagauaacaauuacacagcaaaaagacccuuugucaaauuaaauguggagacugauacagcggaaauaagauugaugugcacagagacuuauuuggacacccccagaccaaaugauggaagcauaacagggccuugcgaaucuaauggggacaaagggaguggaggcaucaaaggaggauuuguucaucaaagaauggcauccaagauuggaaggugguacucucgaacgaugucuaaaacuaaaagaauggggaugggacuguauguaaaguaugauggagacccauggacugauagugaagcccuugcucuuaguggaguaaugguuucaauggaagaaccugguugguauuccuuuggcuucgaaauaaaagauaagaaaugugauguccccuguauuggaauagaaaugguacaugauggugggaaaacgacuuggcacucagcagcaacagccauuuacuguuuaaugggcucaggacaacugcugugggacacugucacagguguugauauggcucuguaa

SEQ ID NO: 61657 - RNA, 1401 nt, Artificial Sequence; identical to SEQ ID NO: 61264
  derived and/or modified CDS sequence (wt) from neuraminidase__InfluenzaB__AGX22066

SEQ ID NO: 61658 - RNA, 1401 nt, Artificial Sequence
  derived and/or modified CDS sequence (wt) from neuraminidase__InfluenzaB__AGX22077
augcuaccuucaacuauacaaacguuaacccuauuucucacaucagggggaguguuauuaucacuauaugugucagcuucauugucauacuuacuauauucggauauauugcuaaaauuuucacaaacagaaauaauugcaccaauaaugccauuggauugugcaaacgcaucaaauguucaggcugugaaccauucugcaacaaaaggggugacacuucuucucccagaaccggaguggacguacccucguuuaucuugcccgggcucaaccuuucagaaagcacuccuaauuagcccccauagauucggagaaaccaaaggaaacucagcucccuugauaauaagggaaccuuuuauugcuuguggaccaaaggaaugcaaacacuuugcucuaacccauuaugcagcucaaccagggggguacuacaauggaacaagagaagacagaaacaagcugaggcaucuaauuucagucaaauugggcaaaaucccaacaguagaaaacucuauuuuccacauggcagcuuggagcggguccgcaugccaugaugguagagaauggacauauaucggaguugauggccccgacaguaaugcauugcucaaaauaaaauauggagaagcauauacugacacauaccauuccuaugcaaaaaacauccuaaggacacaagaaagugccugcaauugcaucgggggagauuguuaucuuaugauaacugauggcccagcuucagggauuagugaaugcagauuccuuaagauucgagagggccgaauaauaaaagaaauauuuccaacaggaagaguaaaacauacugaggaaugcacaugcggauuugccagcaacaaaaccauagaaugugccuguagagauaacaguuacacagcaaaaagacccuuugucaaauuaaauguggagacugauacagcagaaauaagauugaugugcacagagacuuauuuggacacccccagaccaaaugauggaagcauaacagggccuugcgaaucuaauggggacaaagggaguggaggcaucaagggaggauuuguucaucaaagaauggcauccaagauuggaaggugguacucucgaacgaugucuaaaacuaaaagaauggggaugggacuguauguaaaguaugauggagacccauggacugacagugaagcccuugcucuuaguggaguaaugguuucaauggaagaaccugguugguauuccuuuggcuucgaaauaaaagauaagaaaugugauguccccuguauugggauagaaaugguacaugauggugggaaaacgacuuggcacucagcagcaacagccauuuacuguuuaaugggcucaggacaacugcugugggacacugucacagguguugauauggcucuguaa

SEQ ID NO: 61659 - RNA, 1401 nt, Artificial Sequence
  derived and/or modified CDS sequence (wt) from neuraminidase__InfluenzaB__AGX22088
augcuacccucaacuauacaaacguuaacccuauuccucacaucagggggaguguuauuaucacuauaugugucagcuucacuaucauacuuacuauauucggauauauugcuaaaauuuucaacaacagaaauaacugcaccaacaaugccauuggauugugcaaacgcaucaaauguucaggcugugaaccguucugcaacaaaaggggugacacuucuucucccagaaccggaguggacauacccgcguuuaucuugcccgggcucaaccuuucagaaagcacuccuaauuagcccucauagauucggagaaaccaaaggaaacucagcucccuugauaauaagggaaccuuuuauugcuuguggaccaaaggaaugcaaacacuuugcucuaacccauuaugcagcccaaccagggggauacuacaauggaacaagagaagacagaaacaagcugaggcaucuaauuucagucaaauugggcaaaaucccaacaguagaaaacuccauuuuccacauggcagcauggagcggguccgcaugccaugaugguaaagaauggacauauaucggaguugauggcccugacaguaaugcauugcucaaaauaaaauauggagaagcauacacugacacauaccauuccuaugcaaacaacauccuaagaacacaagaaagugccugcaauugcaucgggggaaauuguuaucuuaugauaacugauggcucagcuucagguauuagugagugcagauuucuuaagauucgagagggccgaauaauaaaagaaauauuuccaacaggaagaguaaaacauacugaagaaugcacaugcggauuugccagcaauaaaaccauagaaugugccuguagagauaacaguuacacagcaaaaagacccuuugucaaauuaaauguggagacugauacagcagaaauaagauugaugugcacagagacuuauuuggacacccccagaccagaugauggaagcauaacagggccuugugaaucuaaugggaauaaagggaguggaggcaucaagggaggauuuguucaucaaagaauggcauccaaaauuggaaggugguacucucgaacaaugucuaaaaccaaaaggaugggaaugggacuguaugucaaguaugauggagacccauggacugacagugaugcccuugcucuuaguggaguaaugguuucaauggaagaaccugguugguacucauuuggcuucgaaauaaaagauaagaaaugugauguccccuguauugggauagagaugguacaugaugguggaaaggagacuuggcacucagcagcaacagccauuuacuguuuaaugggcucaggacaacuguugugggacacugucacagguguugauauggcucuguaa

SEQ ID NO: 61660 - RNA, 1401 nt, Artificial Sequence
  derived and/or modified CDS sequence (wt) from neuraminidase__InfluenzaB__AGX22099
augcuacccucaacuauacaaacguuaacccuauuccucacaucagggggaguguuauuaucacuauaugugucagcuucacugucauacuuacuauauucggauauauugcuaaaguuuucaacaacagaaauaacugcaccaacaaugccauuggauugugcaaacgcaucaaauguucaggcugugaaccguucugcaacaaaaggggugacauuucuucucccagaaccggaguggacauacccgcguuuaucuugcccgggcucaaccuuucagaaagcacuccuaauuagcccucauagauucggagaaaccaaaggaaacucagcucccuugauaauaagggaaccuuuuauugcuuguggaccaaaggaaugcaaacacuuugcucuaacccauuaugcagcccaaccagggggauacuacaauggaacaagagaagacagaaacaagcugaggcaucuaauuucagucaaauugggcaaaaucccaacaguagaaaacuccauuuuucacauggcagcauggagcggguccgcaugccaugaugguaaagaauggacauauaucggaguugauggcccugacaguaaugcauugcucaaaauaaaauauggagaagcauauacugacacauaccauuccuaugcaaacaacauccuaagaacacaagaaagugccugcaauugcaucgggggaaauuguuaucuuaugauaacugauggcucagcuucagguauuagugaaugcagauuucuuaagauucgagagggccgaauaauaaaagaaauauuuccaacaggaagaguaaaacauacugaagaaugcacaugcggauuugccagcaauaaaaccauagaaugugccuguagagauaacaguuacacagcaaaaagacccuuugucaaacuaaauguggagacugauacagcagaaauaagauugaugugcacagagacuuauuuggacacccccagaccagaugauggaagcauaacagggccuugugaaucuaaugggaacaaagggaguggaggcaucaagggaggauuuguucaucaaagaauggcauccaaaauuggaaggugguacucucgaacaaugucuaaaaccaaaaggaugggaaugggacuguaugucaaguaugauggagacccauggacugacagugaugcccuugcucuuaguggaguaaugguuucaauggaagaaccugguugguacucauuuggcuucgaaauaaaagauaagaaaugugauguccccuguauugggauagagaugguacaugaugguggaaaggagacuuggcacucagcagcaacagccauuuacuguuuaaugggcucaggacaacuguugugggacacugucacagguguugauauggcucuguaa

SEQ ID NO: 61661 - RNA, 1401 nt, Artificial Sequence; identical to SEQ ID NO: 61141
  derived and/or modified CDS sequence (wt) from neuraminidase__InfluenzaB__AGX22110

SEQ ID NO: 61662 - RNA, 1401 nt, Artificial Sequence; identical to SEQ ID NO: 61144
  derived and/or modified CDS sequence (wt) from neuraminidase__InfluenzaB__AGX22132

SEQ ID NO: 61663 - RNA, 1401 nt, Artificial Sequence
  derived and/or modified CDS sequence (wt) from neuraminidase__InfluenzaB__AGX22143
augcuaccuucaacuauacaaacguuaacccuauuucucacaucagggggaguguuauuaucacuauaugugucagcuucauugucauacuuacuauauucggauauauugcuaaaauuuucacaaacagaaauaacugcaccaauaaugccauuggauugugcaaacgcaucaaauguucaggcuguaaaccguucugcaacaaaaggggugacacuucuucucccagaaccggaguggacguacccucguuuaucuugcccgggcucaaccuuucagaaagcacuccuaauuagcccccauagauucggagaaaccaaaggaaacucagcucccuugauaauaagggaaccuuuuauugcuuguggaccaaaggaaugcaaacacuuugcucuaacccauuaugcagcucaaccagggggauacuacaauggaacaagagaagacagaaacaagcugaggcaucuaauuucagucaaauugggcaaaaucccaacaguagaaaacucuauuuuccacauggcagcuuggagcggguccgcaugccaugaugguagagaauggacauauaucggaguugauggccccgacaguaaugcauugcucaaaauaaaauauggagaagcauauacugacacauaccauuccuaugcaaaaaacauccuaaggacacaagaaagugccugcaauugcaucgggggagauuguuaucuuaugauaacugauggcccagcuucagggauuagugaaugcagauuccuuaagauucgagagggccgaauaauaaaagaaauauuuccaacaggaagaguaaaacauacugaggaaugcacaugcggauuugccagcaacaaaaccauagaaugugccuguagagauaacaguuacacagcaaaaagacccuuugucaaauuaaauguggagacugauacagcggaaauaagauugaugugcacagagacuuauuuggacacccccagaccgaaugauggaagcauaacagggccuugcgaaucuaauggggacaaagggaguggaggcaucaagggaggauuuguucaucaaagaauggcauccaagauuggaaggugguacucucgaacgauuucuaaaacuaaaagaauggggaugggacuguauguaaaguaugauggagacccauggacugacagugaagcccuugcucuuaguggaguaaugguuucaauggaagaaccugguugguauuccuuuggcuucgaaauaaaagauaagaaaugugauguccccuguauugggauagaaaugguacaugauggugggaaaacgacuuggcacucagcagcaacagccauuuacuguuuaaugggcucaggacaacugcugugggacacugucacagguguugauauggcucuguaa

SEQ ID NO: 61664 - RNA, 1401 nt, Artificial Sequence; identical to SEQ ID NO: 61663
  derived and/or modified CDS sequence (wt) from neuraminidase__InfluenzaB__AGX22154

SEQ ID NO: 61665 - RNA, 1401 nt, Artificial Sequence; identical to SEQ ID NO: 61663
  derived and/or modified CDS sequence (wt) from neuraminidase__InfluenzaB__AGX22165

SEQ ID NO: 61666 - RNA, 1401 nt, Artificial Sequence; identical to SEQ ID NO: 61642
  derived and/or modified CDS sequence (wt) from neuraminidase__InfluenzaB__AGX22176

SEQ ID NO: 61667 - RNA, 1401 nt, Artificial Sequence; identical to SEQ ID NO: 61663
  derived and/or modified CDS sequence (wt) from neuraminidase__InfluenzaB__AGX22187

SEQ ID NO: 61668 - RNA, 1401 nt, Artificial Sequence; identical to SEQ ID NO: 61663
  derived and/or modified CDS sequence (wt) from neuraminidase__InfluenzaB__AGX22198

SEQ ID NO: 61669 - RNA, 1401 nt, Artificial Sequence; identical to SEQ ID NO: 61663
  derived and/or modified CDS sequence (wt) from neuraminidase__InfluenzaB__AGX22209

SEQ ID NO: 61670 - RNA, 1401 nt, Artificial Sequence; identical to SEQ ID NO: 61141
  derived and/or modified CDS sequence (wt) from neuraminidase__InfluenzaB__AGX22220

SEQ ID NO: 61671 - RNA, 1401 nt, Artificial Sequence; identical to SEQ ID NO: 61647
  derived and/or modified CDS sequence (wt) from neuraminidase__InfluenzaB__AGX22231

SEQ ID NO: 61672 - RNA, 1401 nt, Artificial Sequence; identical to SEQ ID NO: 61642
  derived and/or modified CDS sequence (wt) from neuraminidase__InfluenzaB__AGX22242

SEQ ID NO: 61673 - RNA, 1401 nt, Artificial Sequence; identical to SEQ ID NO: 61141
  derived and/or modified CDS sequence (wt) from neuraminidase__InfluenzaB__AGX22253

SEQ ID NO: 61674 - RNA, 1401 nt, Artificial Sequence
  derived and/or modified CDS sequence (wt) from neuraminidase__InfluenzaB__AGX22264
augcuaccuucaacuauacaaacguuaacccuauuucucacaucagggggaguguuauuaucacuauaugugucagcuucauugucauacuuacuauauucggauauauugcuaaaauuuucacaaacagaaauaacugcaccaauaaugccauuggauugugcaaacgcaucaaauguucaggcugugaaccgcucugcaacaaaaggggugacacuucuucucccagaaccggaguggacguacccucguuuaucuugcccgggcucaaccuuucagaaagcacuccuaauuagcccccauagauucggagaaaccaaaggaaacucagcucccuugauaauaagggaaccuuuuauugcuuguggaccaaaggaaugcaaacacuuugcucuaacccauuaugcagcucaaccagggggauacuacaauggaacaagagaagacagaaacaagcugaggcaucuaauuucagucaaauugggcaaaaucccaacaguagaaaacucuauuuuccacauggcagcuuggagcggguccgcaugccaugaugguagagaauggacauauaucggaguugauggccccgacaguaaugcauugcucaaaauaaaauauggagaagcauauacugacacauaccauuccuaugcaaaaaacauccuaaggacacaagaaagugccugcaauugcaucgggggagauuguuaucuuaugauaacugauggcccagcuucagggauuagugaaugcagauuccuuaagauucgagagggccgaauaauaaaagaaauauuuccaacaggaagaguaaaacauacugaggaaugcacaugcggauuugccagcaacaaaaccauagaaugugccuguagagauaacaguuacacagcaaaaagacccuuuguuaaauuaaauguggagacugauacagcggaaauaagauugaugugcacagagacuuauuuggacacccccagaccaaaugauggaagcauaacagggccuugcgaaucuaauggggacaaagggaguggaggcaucaagggaggauuuguucaucaaagaauggcauccaagauuggaaggugguacucucgaacgaugucuaaaacuaaaagaauggggauggggcuguauguaaaguaugauggagacccauggacugacagugaagcccuugcucuuaguggaguaaugguuucaauggaagaaccugguugguauuccuuugguuucgaaauaaaagauaagaaaugugauguccccuguauugggauagaaaugguacaugauggugggaaaacgacuuggcacucagcagcaacagccauuuacuguuuaaugggcucaggacaacugcugugggacacugucacagguguugauauggcucuguaa

SEQ ID NO: 61675 - RNA, 1401 nt, Artificial Sequence; identical to SEQ ID NO: 61141
  derived and/or modified CDS sequence (wt) from neuraminidase__InfluenzaB__AGX22275

SEQ ID NO: 61676 - RNA, 1401 nt, Artificial Sequence; identical to SEQ ID NO: 61264
  derived and/or modified CDS sequence (wt) from neuraminidase__InfluenzaB__AGX22286

SEQ ID NO: 61677 - RNA, 1401 nt, Artificial Sequence
  derived and/or modified CDS sequence (wt) from neuraminidase__InfluenzaB__AGX22297
augcuaccuucaacuauacaaacguuaacccuauuucucacauuagggggaguguuguuaucacuauaugugucagcuucauugucauacuuacuauauucggauauauugcuaaaauuuucacaaacagaaauaacugcaccaauaaugccauuggauugugcaaacgcaucaaauguucaggcugugaaccguucugcaacaaaaggggugacacuucuucucccagaaccggaguggacguacccucguuuaucuugcccgggcucaaccuuucagaaagcacuccuaauuagcccccauagauucggagaaaccaaaggaaacucagcucccuugauaauaagggaaccuuuuauugcuuguggaccaaaggaaugcaaacacuuugcucuaacccauuaugcagcccaaccagggggauacuacaauggaacaagagaagacagaaacaagcugaggcaucuaauuucagucaaauugggcaaaaucccaacaguagaaaacucuauuuuccacauggcagcuuggagcggguccgcaugccaugaugguagagaauggacauauaucggaguugauggccccgacaguaaugcauugcucaaaauaaaauauggagaagcauauacugacacauaccauuccuaugcaaaaaacauccuaaggacacaagaaagugccugcaauugcaucgggggagauuguuaucuuaugauaacugauggcccagcuucagggauuagugaaugcagauuccuuaagauucgagagggccgaauaauaaaagaaauauuuccaacaggaagaguaaaacauacugaggaaugcacaugcggauuugccagcaacaaaaccauagaaugugccuguagagauaacaguuacacagcaaaaagacccuuugucaaauuaaauguggagacugauacagcggaaauaagauugaugugcacagagacuuauuuggacacccccagaccaaaugauggaagcauaacagggccuugcgaaucuaauggggacaaagggaguggaggcaucaagggaggauuuguucaucaaagaauggcauccaagauuggaaggugguacucucgaacgaugucuaaaacuaaaagaauggggaugggacuguauguaaaguaugauggagacccauggacugacagugaagcccuugcucuuaguggaguaaugguuucaauggaagaaccugguugguauuccuuuggcuucgaaauaaaagauaagaaaugugauguccccuguauugggauagaaaugguacaugauggugggaaaacgacuuggcacucagcagcaacagccauuuacuguuuaaugggcucaggacaacugcugugggacacugucacagguguugauauggcucuguaa

SEQ ID NO: 61678 - RNA, 1401 nt, Artificial Sequence; identical to SEQ ID NO: 61264
  derived and/or modified CDS sequence (wt) from neuraminidase__InfluenzaB__AGX22308

SEQ ID NO: 61679 - RNA, 1401 nt, Artificial Sequence
  derived and/or modified CDS sequence (wt) from neuraminidase__InfluenzaB__AGX22330
augcuaccuucaacuauacaaacguuaacccuauuucucacaucagggggaguguuauuaucacuauaugugucagcuucauugucauacuuacuauauucggauauauugcuaaaauuuucacaaacagaaauaacugcaccaauaaugccauuggauugugcaaacgcaucaaauguucaggcugugaaccguucugcaacaaaaggggugacacuucuucucccagaaccggaguggacguacccucguuuaucuugcccgggcucaaccuuucagaaagcacuccuaauuagcccccauagauucggagaaaccaaaggaaacucagcucccuugauaauaagggaaccuuuuauugcuuguggaccaaaggaaugcaaacacuuugcucuaacccauuaugcagcucaaccagggggauacuacaauggaacaagagaagacagaaacaagcugaggcaucuaauuucagucaaauugggcaaaaucccaacaguagaaaacuccauuuuccacaugacagcuuggagcggguccgcaugccaugaugguaaagaauggacauauaucggaguugauggccccgacaguaaugcauugcucaaaauaaaauauggagaagcauauacugacacauaccauuccuaugcaaaaaacauccuaaggacacaagaaagugccugcaauugcaucgggggagauuguuaucuuaugauaacugauggcccagcuucagggauuagugaaugcagauuccuuaagauucgagagggccgaauaauaaaagaaauauuuccaacaggaagaguaaaacauacugaggaaugcacaugcggauuugccagcaacaaaaccauagaaugugccuguagagauaacaguuacacagcaaaaagacccuuugucaaauuaaauguggagacugauacagcggaaauaagauugaugugcacagagacuuauuuggacacccccagaccaaaugauggaagcauaacagggccuugcgaaucugauggggacaaagggaguggaggcaucaagggaggauuuguucaucaaagaauggcaaccaagauuggaaggugguacucucgaacgaugucuaaaacuaaaagaauggggaugggacuguauguaaaguaugauggagacccauggacugacagugaagcccuugcucuuaguggaguaaugguuucaauggaagaaccugguugguauuccuuuggcuucgaaauaaaagauaagaaaugugauguccccuguauugggauagaaaugguacaugauggugggaaaacgacuuggcacucagcagcaacagccauuuacuguuuaaugggcucaggacaacugcugugggacacugucacagguguugauauggcucuguaa

SEQ ID NO: 61680 - RNA, 1401 nt, Artificial Sequence; identical to SEQ ID NO: 61660
  derived and/or modified CDS sequence (wt) from neuraminidase__InfluenzaB__AGX22341

SEQ ID NO: 61681 - RNA, 1401 nt, Artificial Sequence; identical to SEQ ID NO: 61660
  derived and/or modified CDS sequence (wt) from neuraminidase__InfluenzaB__AGX22352

SEQ ID NO: 61682 - RNA, 1401 nt, Artificial Sequence; identical to SEQ ID NO: 61660
  derived and/or modified CDS sequence (wt) from neuraminidase__InfluenzaB__AGX22363

SEQ ID NO: 61683 - RNA, 1401 nt, Artificial Sequence; identical to SEQ ID NO: 61141
  derived and/or modified CDS sequence (wt) from neuraminidase__InfluenzaB__AGX22374

SEQ ID NO: 61684 - RNA, 1401 nt, Artificial Sequence; identical to SEQ ID NO: 61264
  derived and/or modified CDS sequence (wt) from neuraminidase__InfluenzaB__AGX22385

SEQ ID NO: 61685 - RNA, 1401 nt, Artificial Sequence
  derived and/or modified CDS sequence (wt) from neuraminidase__InfluenzaB__AGX22396
augcuaccuucaacuauacaaacguuaacccuauuucucacaucagggggaguguuauuaucacuauaugugucagcuucauugucauacuuacuauauucggauauauugcuaaaauuuucacaaacagaaauaacugcaccaauaaugccauuggauugugcaaacgcaucaaauguucaggcugugaaccguucugcaacaaaaggggugacacuucuucucccagaaccggaguggacguacccucguuuaucuugcccgggcucaaccuuucagaaagcacuccuaauuagcccccauagauucggagaaaccaaaggaaacucagcucccuugauaauaagggaaccuuuuauugcuuguggaccaaaggaaugcaaacacuuugcucuaacccauuaugcagcucaaccagggggauacuacaauggaacaagagaagacagaaacaagcugaggcaucuaauuucagucaaauugggcaaaaucccaacaguagaaaacucuauuuuccacauggcagcuuggagcggguccgcaugccaugaugguagagaauggacauauaucggaguugauggccccgacaguaaugcauugcucaaaauaaaauauggagaagcauauacugacacauaccauuccuaugcaaaaaacauccuaaggacacaagaaagugccugcaauugcaucgggggagauuguuaucuuaugauaacugauggcccagcuucagggauuagugaaugcagauuccuuaagauucgagagggccgaauaauaaaagaaauauuuccaacaggaagaguaaaacauacugaggaaugcacaugcggauuugccagcaacaaaaccauagaaugugccuguagagauaacaguuacacagcaaaaagacccuuuguuaaauuaaauguggagacugauacagcggaaauaagauugaugugcacagagacuuauuuggacacccccagaccaaaugauggaagcauaacagggccuugcgagucuaauggggacaaagggaguggaggcaucaagggaggauuuguucaucaaagaauggcauccaagauuggaaggugguacucucgaacgaugucuaaaacuaaaagaauggggauggggcuguauguaaaguaugauggagacccauggacugacagugaagcccuugcucuuaguggaguaaugguuucaauggaagaaccugguugguauuccuuugguuucgaaauaaaagauaagaaaugugauguccccuguauugggauagaaaugguacaugauggugggaaaacgacuuggcacucagcagcaacagccauuuacuguuuaaugggcucaggacaacugcugugggacacugucacagguguugauauggcucuguaa

SEQ ID NO: 61686 - RNA, 1401 nt, Artificial Sequence
  derived and/or modified CDS sequence (wt) from neuraminidase__InfluenzaB__AGX22407
augcuaccuucaacuauacaaacguuaacccuauuucucacaucagggggaguguuauuaucacuauaugugucagcuucauugucauacuuacuauauucggauauauugcuaaaauuuucacaaacagaaauaauugcaccaauaaugccauuggauugugcaaacgcaucaaauguucaggcugugaaccauucugcaacaaaaggggugacacuucuucucccagaaccggaguggacguacccucguuuaucuugcccgggcucaaccuuucagaaagcacuccuaauuagcccccauagauucggagaaaccaaaggaaacucagcucccuugauaauaagggaaccuuuuauugcuuguggaccaaaggaaugcaaacacuuugcucuaacccauuaugcagcucaaccagggggauacuacaauggaacaagagaagacagaaacaagcugaggcaucuaauuucagucaaauugggcaaaaucccaacaguagaaaacucuauuuuccacauggcagcuuggagcggguccgcaugccaugaugguagagaauggacauauaucggaguugauggccccgacaguaaugcauugcucaaaauaaaauauggagaagcauauacugacacauaccauuccuaugcaaaaaacauccuaaggacacaagaaagugccugcaauugcaucgggggagauuguuaucuuaugauaacugauggcccagcuucagggauuagugaaugcagauuccuuaagauucgagagggccgaauaauaaaagaaauauuuccaacaggaagaguaaaacauacugaggaaugcacaugcggauuugccagcaacaaaaccauagaaugugccuguagagauaacaguuacacagcaaaaagacccuuugucaaauuaaauguggagacugauacagcagaaauaagauugaugugcacagagacuuauuuggacacccccagaccaaaugauggaagcauaacagggccuugcgaaucuaauggggacaaagggaguggaggcaucaagggaggauuuguucaucaaagaauggcauccaagauuggaaggugguacucucgaacgaugucuaaaacuaaaagaauggggaugggauuguauguaaaguaugauggagacccauggacugacagugaagcccuugcucuuaguggaguaaugguuucaauggaagaaccugguugguauuccuuuggcuucgaaauaaaagauaagaaaugugauguccccuguauugggauagaaaugguacaugauggugggaaaacgacuuggcacucagcagcaacagccauuuacuguuuaaugggcucaggacaacugcugugggacacugucacagguguugauauggcucuguaa

SEQ ID NO: 61687 - RNA, 1401 nt, Artificial Sequence
  derived and/or modified CDS sequence (wt) from neuraminidase__InfluenzaB__AGX22418
augcuaccuucaacuauacaaacguuaacccuauuucucacaucagggggaguguuauuaucacuauaugugucagcuucauugucauacuuacuauauucggauauauugcuaaaauuuucacaaacagaaauaauugcaccaauaaugccauuggauugugcaaacgcaucaaauguucaggcugugaaccauucugcaacaaaaggggugacacuucuucucccagaaccggaguggacguacccucguuuaucuugcccgggcucaaccuuucagaaagcacuccuaauuagcccccauagauucggagaaaccaaaggaaacucagcucccuugauaauaagggaaccuuuuauugcuuguggaccaaaggaaugcaaacacuuugcucuaacccauuaugcagcucaaccagggagauacuacaauggaacaagagaagacagaaacaagcugaggcaucuaauuucagucaaauugggcaaaaucccaacaguagaaaacucuauuuuccacauggcagcuuggagcggguccgcaugccaugaugguagagaauggacauauaucggaguugauggccccgacaguaaugcauugcucaaaauaaaauauggagaagcauauacugacacauaccauuccuaugcaaaaaacauccuaaggacacaagaaagugccugcaauugcaucgggggagauuguuaucuuaugauaacugauggcccagcuucagggauuagugaaugcagauuccuuaagauucgagagggccgaauaauaaaagaaauauuuccaacaggaagaguaaaacauacugaggaaugcacaugcggauuugccagcaacaaaaccauagaaugugccuguagagauaacaguuacacagcaaaaagacccuuugucaaauuaaauguggagacugauacagcagaaauaagauugaugugcacagagacuuauuuggacacccccagaccaaaugauggaagcauaacagggccuugcgaaucuaauggggacaaagggaguggaggcaucaagggaggauuuguucaucaaagaauggcauccaagauuggaaggugguacucucgaacgaugucuaaaacuaaaagaauggggaugggacuguauguaaaguaugauggagacccauggacugacagugaagcccuugcucuuaguggaguaaugguuucaauggaagaaccugguugguauuccuuuggcuucgaaauaaaagauaagaaaugugauguccccuguauugggauagaaaugguacaugauggugggaaaacgacuuggcacucagcagcaacagccauuuacuguuuaaugggcucaggacaacugcugugggacacugucacagguguugauauggcucuguaa

SEQ ID NO: 61688 - RNA, 1401 nt, Artificial Sequence; identical to SEQ ID NO: 61141
  derived and/or modified CDS sequence (wt) from neuraminidase__InfluenzaB__AGX22429

SEQ ID NO: 61689 - RNA, 1401 nt, Artificial Sequence; identical to SEQ ID NO: 61141
  derived and/or modified CDS sequence (wt) from neuraminidase__InfluenzaB__AGX22440

SEQ ID NO: 61690 - RNA, 1401 nt, Artificial Sequence; identical to SEQ ID NO: 61141
  derived and/or modified CDS sequence (wt) from neuraminidase__InfluenzaB__AGX22449

SEQ ID NO: 61691 - RNA, 1401 nt, Artificial Sequence
  derived and/or modified CDS sequence (wt) from neuraminidase__InfluenzaB__AGX22460
augcuaccuucaacuauacaaacguuaacccuauuucucacaucagggggaguguuauuaucacuauaugugucagcuucauugucauacuuacuauauucggauauauugcuaaaauuuucacaaacagaaauaacugcaccaacaaugccauuggauugugcaaacgcaucaaauguucaggcugugaaccguucugcaacaaaaggggugacacuucuucucccagaacuggaguggacguacccucguuuaucuugcccgggcucaacuuuucagaaagcacuccuaauuagcccccauagauucggagaaaccaaaggaaacucagcucccuugauaauaagggaaccuuuuauugcuuguggaccaaaggaaugcaaacacuuugcucuaacccauuaugcagcucaaccagggggauacuacaauggaacaagagaagacagaaacaagcugaggcaucuaauuucagucaaauugggcaaaaucccaacaguagaaaacucuauuuuccacauggcagcuuggagcggguccgcaugccaugaugguagagaauggacauaugucggaguugauggccccgacaguaaugcauugcucaaaauaaaauauggagaagcauauacugacacauaccauuccuaugcaaaaaacauccuaaggacacaagaaagugccugcaauugcaucgggggagauuguuaucuuaugauaacugauggcccagcuucagggauuagugaaugcagauuccuuaagauucgagagggccgaauaauaaaagaaauauuuccaacaggaagaguaaaacauacugaggaaugcacaugcggauuugccagcaacaaaaccauagaaugugccuguagagauaacaguuacacagcaaaaagacccuuugucaaauuagauguggagacugauacagcggaaauaagauuaaugugcacagagacuuauuuggacacccccagaccaaaugauggaagcauaacagggccuugcgaagcuaauggggauaaagggaguggaggcaucaagggaggauuuguucaccaaagaauggcauccaagauuggaaggugguacucucgaacgaugucuaaaacuaaaagaauggggaugggacuguaugucaaguaugauggagacccauggacugacagugaagcccuugcucuuaguggaguaaugguuucaauggaagaaccugguugguauuccuuuggcuucgaaauaaaagauaagaaaugugauguccccuguauugggauagaaaugguacaugauggugggaaaacgacuuggcacucagcagcaacagccauuuacuguuuaaugggcucaggacaacugcugugggacacugucacagguguugauauggcucuguaa

SEQ ID NO: 61692 - RNA, 1401 nt, Artificial Sequence
  derived and/or modified CDS sequence (wt) from neuraminidase__InfluenzaB__AGX22471
augcuaccuucaacuauacaaacguuaacccuauuucucacaucagggggaguguuauuaucacuauaugugucagcuucauugucauacuuacuauauucggauauauugcuaaaauuuucacaaacagaaauaacugcaccaauaaugccauuggauugugcaaacgcaucaaauguucaggcugugaaccguucugcaacaaaaggggugacacuucuucucccagaaccggaguggacguacccucguuuaucuugcccgggcucaaccuuucagaaagcacuccuaauuagcccccauagauucggagaaaccaaaggaaacucagcucccuugauaauaagggaaccuuuuauugcuuguggaccaaaggaaugcaaacacuuugcucuaacccauuaugcagcucaaccagggggauacuacaauggaacaagagaagacagaaacaagcugaggcaucuaauuucagucaaauugggcaaaaucccaacaguagaaaacucuauuuuccacauggcagcuuggagcggguccgcaugccaugaugguagagaauggacauauaucggaguugauggccccgacaguaaugcauugcucaaaauaaaauauggagaagcauauacugacacauaccauuccuaugcaaaaaacauccuaaggacacaagaaagugccugcaauugcaucgggggagauuguuaucuuaugauaacugauggcccagcuucagggauuagugaaugcagauuccuuaagauucgagagggccgaauaauaaaagaaauauuuccaacaggaagaguaaaacauacugaggaaugcacaugcggauuugccagcaacaaaaccauagaaugugccuguagagauaacaguuacacagcaaaaagacccuuuguuaaauuaaauguggagacugauacagcggaaauaagauugaugugcacagagacuuauuuggacacccccagaccaaaugauggaagcauaacagggccuugcgaaucuaauggggacaaagggaguggaggcaucaagggaggauuuguucaucaaagaauggcauccaagauuggaaggugguacucucgaacgaugucuaaaacuaaaagaauggggauggggcuguaugugaaguaugauggagacccauggacugacagugaagcccuugcucuuaguggaguaaugguuucaauggaagaaccugguugguauuccuuugguuucgaaauaaaagacaagaaaugugauguccccuguauugggauagaaaugguacaugauggugggaaaacgacuuggcacucagcagcaacagccauuuacuguuuaaugggcucaggacaacugcugugggacacugucacagguguugauauggcucuguaa

SEQ ID NO: 61693 - RNA, 1401 nt, Artificial Sequence; identical to SEQ ID NO: 61692
  derived and/or modified CDS sequence (wt) from neuraminidase__InfluenzaB__AGX22482

SEQ ID NO: 61694 - RNA, 1401 nt, Artificial Sequence
  derived and/or modified CDS sequence (wt) from neuraminidase__InfluenzaB__AGX22493
augcuaccuucaacuauacaaacguuaacccuauuucucacaucagggggaguguuauuaucacuauaugugucagcuucauugucauacuuacuauauucggauauauugcuaaaauuuucacaaacagaaauaacugcaccaauaaugccauuggauugugcaaacgcaucaaauguucaggcugugaaccguucugcaacaaaaggagugacacuucuucucccagaaccggaguggacguacccucguuuaucuugcccgggcucaaccuuucagaaagcacuccuaauuagcccccauagauucggagaaaccaaaggaaacucagcucccuugauaauaagggaaccuuuuauugcuuguggaccaaaggaaugcaaacacuuugcucuaacccauuaugcagcucaaccagggggauacuacaauggaacaagagaagacagaaacaagcugaggcaucuaauuucagucaaauugggcaaaaucccaacaguagaaaacucuauuuuccacauggcagcuuggagcggguccgcaugccaugaugguagagaauggacauauaucggaguugauggccccgacaguaaugcauugcucaaaauaaaauauggagaagcauauacugacacauaccauuccuaugcaaaaaacauccuaaggacacaagaaagugccugcaauugcaucgggggagauuguuaucuuaugauaacugauggcccagcuucagggauuagugaaugcagauuccuuaagauucgagagggccgaauaauaaaagagauauuuccaacaggaagaguaaaacauacugaggaaugcacaugcggauuugccagcaacaaaaccauagaaugugccuguagagauaacaguuacacagcaaaaagacccuuugucaaauuaaauguggagacugauacagcggagauaagauugaugugcacagagacuuauuuggacacccccagaccaaaugauggaagcauaacagggccuugcgaaucuaauggggacaaagggaguggaggcaucaagggaggauuuguucaucaaagaauggcauccaagauuggaaggugguacucucgaacgaugucuaaaacuaaaagaauggggaugggacuguauguaaaguaugauggagacccauggacugacagugaagcccuugcucuuaguggaguaaugguuucaauggaagaaccugguugguauuccuuuggcuucgaaauaaaagauaagaaaugugauguccccuguauugggauagaaaugguacaugauggugggaaaacgacuuggcacucagcagcaacagccauuuacuguuuaaugggcucaggacaacugcugugggacacugucacagguguugauauggcucuguaa

SEQ ID NO: 61695 - RNA, 1401 nt, Artificial Sequence
  derived and/or modified CDS sequence (wt) from neuraminidase__InfluenzaB__AGX22504
augcuacccucaacuauacaaacguuaacccuauuccucacaucagggggaguguuauuaucacuauaugugucagcuucacugucauacuuacuauauucggauauauugcuaaaauuuucaacaacagaaauaacugcaccaacaauaccauuggauugugcaaacgcaucaaauguucaggcugugaaccguucugcaacaaaaggggugacacuucuucucccagaaccggaguggacauacccgcguuuaucuugcccgggcucaaccuuucagaaagcacuccuaauuagcccucauagauucggagaaaccaaaggaaacucagcucccuugauaauaagggaaccuuuuauugcuuguggaccaaaggaaugcaaacacuuugcucuaacccauuaugcagcccaaccagggggauacuacaauggaacaagagaagacagaaacaagcugaggcaucuaauuucagucaaauugggcaaaaucccaacaguagaaaacuccauuuuccacauggcagcauggagcggguccgcaugccaugaugguaaagaauggacauauaucggaguugauggcccugacaguaaugcauugcucaaaauaaaauauggagaagcauauacugacacauaccauuccuaugcaaacaacauccuaagaacacaagaaagugccugcaauugcaucgggggaaacuguuaucuuaugauaacugauggcucagcuucagguauuagugagugcagauuucuuaagauucgagagggccgaauaauaaaagaaauauuuccaacaggaagaguaaaacauacugaagaaugcacaugcggauuugccagcaauaaaaccauagaaugugccuguagagauaacaguuacacagcaaaaagacccuuugucaaauuaaauguggagacugauacagcagaaauaagauugaugugcacagagacuuauuuggacacccccagaccagaugauggaagcauaacagggccuugugaaucuaaugggaauaaagggaguggaggcaucaagggaggauuuguucaucaaagaauggcauccaaaauuggaaggugguacucucgaacaaugucuaaaaccaaaaggaugggaaugggacuguaugucaaguaugauggagacccauggacugacagugaugcccuugcucuuaguggaguaaugguuucaauggaagaaccugguugguacucauuuggcuucgaaauaaaagauaagaaaugugauguccccuguauugggauagagaugguacaugaugguggaaaggagacuuggcacucagcagcaacagccauuuacuguuuaaugggcucaggacaacuguugugggacacugucacagguguugauauggcucuguaa

SEQ ID NO: 61696 - RNA, 1401 nt, Artificial Sequence; identical to SEQ ID NO: 61141
  derived and/or modified CDS sequence (wt) from neuraminidase__InfluenzaB__AGX22515

SEQ ID NO: 61697 - RNA, 1401 nt, Artificial Sequence
  derived and/or modified CDS sequence (wt) from neuraminidase__InfluenzaB__AGX22526
augcuaccuucaacuauacaaacguuaacccuauuucucacaucagggggaguguuauuaucacuauaugugucagcuucauugucauacuuacuauauucggauauauugcaaaaauuuucacaaacagaaauaacugcaccaauaaugccauuggauugugcaaacgcaucaaauguucaggcugugaaccguucugcaacaaaaggggugacacuucuucucccagaaccggaguggacauacccucguuuaucuugcccgggcucaaccuuucagaaagcacuccuaauuagcccccauagauucggagaaaccaaaggaaacucagcucccuugauaauaagggaaccuuuuauugcuuguggaccaacggaaugcaaacacuuugcucuaacccauuaugcagcucaaccagggggauacuacaauggaacaagagaagacagaaacaagcugaggcaucuaauuucagucaaauugggcaaaaucccaacaguagaaaacuccauuuuccacauggcagcuuggagcggguccgcaugccaugaugguaaagaauggacauauaucggaguugauggccccgacaguaaugcauugcucaaaauaaaauauggagaagcauauacugacacauaccauuccuaugcaaaaaacaucuuaaggacacaagaaagugccugcaauugcaucgggggagauuguuaucuuaugauaacugauggcccagcuucagggauuagugaaugcagauuccuuaagauucgagagggccgaauaauaaaagaaauauuuccaacaggaagaguaaaacauacugaggaaugcacaugcggauuugccagcaacaaaaccauagaaugugcuuguagagauaacaguuacacagcaaaaagacccuuugucaaauuaaauguggagacugauacagcggaaauaagauugaugugcacagagacuuauuuggacacccccagaccaaaugauggaagcauaacagggccuugcgaaucugauggggacaaagggaguggaggcaucaagggaggauuuguucaucaaagaauggcauccaagauuggaaggugguacucucgaacgaugucuaaaacuaaaagaauggggaugggacuguauguaaaguaugauggagacccauggacugacagugaagcccuugcucuuaguggaguaaugguuucaauggaagaaccugguugguauuccuuuggcuucgaaauaaaagauaagaaaugugauguccccuguauugggauagaaaugguacaugauggugggaaaacgacuuggcacucagcagcaacagccauuuacuguuuaaugggcucaggacaacugcugugggacacugucacagguguugauauggcucuguaa

SEQ ID NO: 61698 - RNA, 1401 nt, Artificial Sequence
  derived and/or modified CDS sequence (wt) from neuraminidase__InfluenzaB__AGX22548
augcuaccuucaacuauacaaacguuaacccuauuucucacaucagggggaguguuauuaucacuauaugugucagcuucauugucauacuuacuauauucggauauauugcuaaaauuuucacaaacagaaauaacugcaccaauaaugccauuggauugugcaaacgcaucaaauguucaggcugugaaccguucugcagcaaaaggggugacacuucuucucccagaaccggaguggacauacccucguuuaucuugcccgggcucaaccuuucagaaagcacuccuaauuagcccccauagauucggagaaaccaaaggaaacucagcucccuugauaauaagggaaccuuuuauugcuuguggaccaacggaaugcaaacacuuugcucuaacccauuaugcagcucaaccagggggauacuacaauggaacaagagaagacagaaacaagcugaggcaucuaauuucagucaaauugggcaaaaucccaacaguagaaaacuccauuuuccacauggcagcuuggagcgggucugcaugccaugaugguaaagaauggacauauaucggaguugauggccccgacaguaaugcauugcucaaaauaaaauauggagaagcauauacugacacauaccauuccuaugcaaaaaacauccuaaggacacaagaaagugccugcaauugcaucgggggagauuguuaucuuaugauaacugauggcccagcuucagggauuagugaaugcagauuccuuaagauucgagagggccgaauaauaaaagaaauauuuccaacaggaagaguaaaacauacugaggaaugcacaugcggauuugccagcaacaaaaccauagaaugugcuuguagagauaacaguuacacagcaaaaagacccuuugucaaauuaaauguggagacugauacagcggaaauaagauugaugugcacagagacuuauuuggacacccccagaccaaaugauggaagcauaacagggccuugcgaaucugauggggacaaagggaguggaggcaucaagggaggauuuguucaucaaagaauggcauccaagauuggaaggugguacucucgaacgaugucuaaaacuaaaagaauggggaugggacuguauguaaaguaugauggagacccauggacugacagugaagcccuugcucuuaguggaguaaugguuucaauggaagaaccugguugguauuccuuuggcuucgaaauaaaagauaagaaaugugauguccccuguauugggauagaaaugguacaugauggugggaaaacgacuuggcacucagcagcaacagccauuuacuguuuaaugggcucaggacaacugcugugggacacugucacagguguugauauggcucuguaa

SEQ ID NO: 61699 - RNA, 1401 nt, Artificial Sequence; identical to SEQ ID NO: 60639
  derived and/or modified CDS sequence (wt) from neuraminidase__InfluenzaB__AGX22559

SEQ ID NO: 61700 - RNA, 1401 nt, Artificial Sequence; identical to SEQ ID NO: 61149
  derived and/or modified CDS sequence (wt) from neuraminidase__InfluenzaB__AGX22570

SEQ ID NO: 61701 - RNA, 1401 nt, Artificial Sequence
  derived and/or modified CDS sequence (wt) from neuraminidase__InfluenzaB__AGX22581
augcuaccuucaacuauacaaacguuaacccuauuucucacaucagggggaguguuauuaucacuauaugugucagcuucauugucauacuuacuauauucggauauauugcuaaaauuuucacaaacagaaauaacugcaccaauaaugccauuggauugugcaaacgcaucaaauguucaggcugugaaccguucugcaacaaaaggggugacacuucuucucccagaaccggaauggacguauccucguuuaucuugcccgggcucaaccuuucagaaagcacuccuaauuagcccccauagauucggagaaaccaaaggaaacucagcucccuugauaauaagggaaccuuuuauugcuuguggaccaaaggaaugcaaacacuuugcucuaacccauuaugcagcucagccagggggauacuacaauggaacaagagaagacagaaacaagcugaggcaucuaauuucagucaaauugggcaaaaucccaacaguagaaaacucuauuuuccacauggcagcuuggagcggguccgcaugccaugaugguagagaauggacauacaucggaguugauggccccgacaauaaugcauugcucaaaauaaaauauggagaagcauauacugacacauaccauuccuaugcaaaaaacauccuaaggacacaagaaagugccugcaauugcaucgggggagauuguuaucuuaugauaacugauggcccagcuucagggauuagugaaugcagauuccuuaagauucgagagggccgaauaauaaaagaaauauuuccaacaggaagaguaaaacauacugaggaaugcacaugcggauuugccagcaacaaaaccauagaaugugccuguagagauaacaauuacacagcaaaaagacccuuugucaaauuaaauguggagacugauacagcggaaauaagauugaugugcacagagacuuauuuggacacccccagaccaaaugauggaagcauaacagggccuugcgaaucuaauggggacaaagggaguggaggcaucaaaggaggauuuguucaucaaagaauggcauccaagauuggaaggugguacucucgaacgaugucuaaaacuaaaagaauggggaugggacuguauguaaaguaugauggagacccauggacugauagugaagcccuugcucuuaguggaguaaugguuucaauggaagaaccugguugguauuccuuuggcuucgaaauaaaagauaagaaaugugauguccccuguauugggauagaaaugguacaugauggugggaaaacgacuuggcacucagcagcaacagccauuuacuguuuaaugggcucaggacaacugcugugggacacugucacagguguugauauggcucuguaa

SEQ ID NO: 61702 - RNA, 1401 nt, Artificial Sequence
  derived and/or modified CDS sequence (wt) from neuraminidase__InfluenzaB__AGX22592
augcuaccuucaacuauacaaacguuaacccuauuucucacaucagggggaguguuauuaucacuauaugugucagcuucauugucauacuuacuauauucggauauauugcuaaaauuuucacaaacagaaauaacugcaccaauaaugccauuggauugugcaaacgcaucaaauguucaggcugugaaccguucugcagcaaaaggggugacacuucuucucccagaaccggaguggacauacccucguuuaucuugcccgggcucaaccuuucagaaagcacuccuaauuagcccccauagauucggagaaaccaaaggaaacucagcucccuugauaauaagggaaccuuuuauugcuuguggaccaacggaaugcaaacacuuugcucuaacccauuaugcagcucaaccagggggauacuacaauggaacaagagaagacagaaacaagcugaggcaucuaauuucagucaaauugggcaaaauuccaacaguagaaaacuccauuuuccacauggcagcuuggagcggguccgcaugccaugaugguaaagaauggacauauaucggaguugauggccccgacaguaaugcauugcucaaaauaaaauauggagaagcuuauacugacacauaccauuccuaugcaaaaaacauccuaaggacacaagaaagugccugcaauugcaucgggggagauuguuaucuuaugauaacugauggcccagcuucagggauuagugaaugcagauuccuuaagauucgagagggccgaauaauaaaagaaauauuuccaacaggaagaguaaaacauacugaggaaugcacaugcggauuugccagcaacaaaaccauagaaugugcuuguagagauaacaguuacacagcaaaaagacccuuugucaaauuaaauguggagacugauacagcggaaauaagauugaugugcacagagacuuauuuggacacccccagaccaaaugauggaagcauaacagggccuugcgaaucugauggggacaaagggaguggaggcaucaagggaggauuuguucaucaaagaauggcauccaagauuggaaggugguacucucgaacgaugucuaaaacuaaaagaauggggaugggacuguauguaaaguaugauggagacccauggacugacagugaagcccuugcucuuaguggaguaaugguuucaauggaagaaccugguugguauuccuuuggcuucgaaauaaaagauaagaaaugugauguccccuguauugggauagaaaugguacaugauggugggaaaacgacuuggcacucagcagcaacagccauuuacuguuuaaugggcucaggacaacugcugugggacacugucacagguguugauauggcucuguaa

SEQ ID NO: 61703 - RNA, 1401 nt, Artificial Sequence; identical to SEQ ID NO: 60865
  derived and/or modified CDS sequence (wt) from neuraminidase__InfluenzaB__AGX22603

SEQ ID NO: 61704 - RNA, 1401 nt, Artificial Sequence; identical to SEQ ID NO: 61040
  derived and/or modified CDS sequence (wt) from neuraminidase__InfluenzaB__AGX22614

SEQ ID NO: 61705 - RNA, 1401 nt, Artificial Sequence; identical to SEQ ID NO: 60865
  derived and/or modified CDS sequence (wt) from neuraminidase__InfluenzaB__AGX22625

SEQ ID NO: 61706 - RNA, 1401 nt, Artificial Sequence
  derived and/or modified CDS sequence (wt) from neuraminidase__InfluenzaB__AGX22636
augcuaccuucaacuauacaaacguuaacccuauuucucacaucagggggaguguuauuaucacuauaugugucagcuucauugucauacuuacuauauucggauauauugcuaaaauuuucacaaacagaaauaacugcaccaauaaugccauuggauugugcaaacgcaucaaauguucaggcugugaaccguucugcagcaaaagggguggcacuucuucucccagaaccggaguggacauacccucguuuaucuugcccgggcucaaccuuucagaaagcacuccuaauuagcccccauagauucggagaaaccaaaggaaacucagcucccuugauaauaagggaaccuuuuauugcuuguggaccaacggaaugcaaacacuuugcucuaacccauuaugcagcucaaccagggggauacuacaauggaacaagagaagacagaaacaagcugaggcaucuaauuucagucaaauugggcaaaaucccaacaguagaaaacuccauuuuccacauggcagcuuggagcggguccgcaugccaugaugguaaagaauggacauauaucggaguugauggccccgacaguaaugcauugcucaaaauaaaauauggagaagcauauacugacacauaccauuccuaugcaaaaaacauccuaaggacacaagaaagugccugcaauugcaucgggggagauuguuaucuuaugauaacugauggcccagcuucagggauuagugaaugcagauuccuuaagauucgagagggccgaauaauaaaagaaauauuuccaacaggaagaguaaaacauacugaggaaugcacaugcggauuugccagcaacaaaaccauagaaugugcuuguagagauaacaguuacacagcaaaaagacccuuugucaaauuaaauguggagacugauacagcggaaauaagauugaugugcacagagacuuauuuggacacccccagaccaaaugauggaagcauaacagggccuugcgaaucugauggggacaaagggaguggaggcaucaagggaggauuuguucaucaaagaauggcauccaagauuggaaggugguacucucgaacgaugucuaaaacuaaaagaauggggaugggacuguauguaaaguaugauggagacccauggacugacagugaagcccuugcucuuaguggaguaaugguuucaauggaagaaccugguugguauuccuuuggcuucgaaauaaaagauaagaaaugugauguccccuguauugggauagaaaugguacaugauggugggaaaacgacuuggcacucagcagcaacagccauuuacuguuuaaugggcucaggacaacugcugugggacacugucacagguguugauauggcucuguaa

SEQ ID NO: 61707 - RNA, 1401 nt, Artificial Sequence; identical to SEQ ID NO: 61698
  derived and/or modified CDS sequence (wt) from neuraminidase__InfluenzaB__AGX22647

SEQ ID NO: 61708 - RNA, 1401 nt, Artificial Sequence; identical to SEQ ID NO: 60639
  derived and/or modified CDS sequence (wt) from neuraminidase__InfluenzaB__AGX22658

SEQ ID NO: 61709 - RNA, 1401 nt, Artificial Sequence; identical to SEQ ID NO: 61149
  derived and/or modified CDS sequence (wt) from neuraminidase__InfluenzaB__AGX22669

SEQ ID NO: 61710 - RNA, 1401 nt, Artificial Sequence; identical to SEQ ID NO: 61702
  derived and/or modified CDS sequence (wt) from neuraminidase__InfluenzaB__AGX22680

SEQ ID NO: 61711 - RNA, 1401 nt, Artificial Sequence; identical to SEQ ID NO: 60865
  derived and/or modified CDS sequence (wt) from neuraminidase__InfluenzaB__AGX22691

SEQ ID NO: 61712 - RNA, 1401 nt, Artificial Sequence; identical to SEQ ID NO: 61149
  derived and/or modified CDS sequence (wt) from neuraminidase__InfluenzaB__AGX22702

SEQ ID NO: 61713 - RNA, 1401 nt, Artificial Sequence
  derived and/or modified CDS sequence (wt) from neuraminidase__InfluenzaB__AGX22713
augcuaccuucaacuauacaaacguuaacccuauuucucacaucagggggaguguuauuaucacuauaugugucagcuucauugucauacuuacuauauucggauauauugcuaaaauuuucacaaacagaaauaacugcaccaauaaugccauuggauugugcaaacgcaucaaauguucaggcugugaaccguucugcagcaaaaggggugacacuucuucucccagaaccggaguggacauacccucguuuaucuugcccgggcucaaccuuucagaaagcacuccuaauuagcccccauagauucggagaaaccaaaggaaacucagcucccuugauaauaagggaaccuuuuauugcuuguggaccaacggaaugcaaacacuuugcucuaacccauuaugcagcucaaccagggggauacuacaauggaacaagagaagacagaaacaagcugaggcaucuaauuucagucaaauugggcaaaaucccaacaguagaaaacuccauuuuccacauggcagcuuggagcggguccgcaugccaugaugguaaagaauggacauauaucggaguugauggccccgacaguaaugcauugcucaaaauaaaauauggagaagcauauacugacacauaccauuccuaugcaaaaaacauccuaaggacacaagaaagugccugcaauugcaucgggggagauuguuaucuuaugauaacugauggcccagcuucagggauuagugaaugcagauuccuuaagauucgagagggccgaauaauaaaagaaauauuuccaacaggaagaguaaaacauacugaggaaugcacaugcggauuugccagcaacaaaacaauagaaugugcuuguagagauaacaguuacacagcaaaaagacccuuugucaaauuaaauguggagacugauacagcggaaauaagauugaugugcacagagacuuauuuggacacccccagaccaaaugauggaagcauaacagggccuugcgaaucugauggggacaaagggaguggaggcaucaagggaggauuuguucaucaaagaauggcauccaagauuggaaggugguacucucgaacgaugucuaaaacuaaaagaauggggaugggacuguauguaaaguaugauggagacccauggacugacagugaagcccuugcucuuaguggaguaaugguuucaauggaagaaccugguugguauuccuuuggcuucgaaauaaaagauaagaaaugugauguccccuguauugggauagaaaugguacaugauggugggaaaacgacuuggcacucagcagcaacagccauuuacuguuuaaugggcucaggacaacugcugugggacacugucacagguguugauauggcucuguaa

SEQ ID NO: 61714 - RNA, 1401 nt, Artificial Sequence
  derived and/or modified CDS sequence (wt) from neuraminidase__InfluenzaB__AGX22724
augcuaccuucaacuauacaaacguuaacccuauuucucacaucagggggaguguuauuaucacuauaugugucagcuuuauugucauacuuacuauauucggauauauugcuaaaauuuucacaaacagaaauaacugcaccaauaaugccauuggauugugcaaacgcaucaaauguucaggcugugaaccguucugcaacaaaaggggugacacuucuucucccagaaccggaguggacguacccucguuuaucuugcccgggcucaaccuuucagaaagcacuccuaauuagcccccauagauucggagaaaccaaaggaaacucagcucccuugauaauaagggaaccuuuuauugcuuguggaccaaaggaaugcaaacacuuugcucuaacucauuaugcagcucaaccagggggauacuacaauggaacaagagaagacagaaacaagcugaggcaucuaauuucagucaaauugggcaaaaucccaacaguagaaaacuccauuuuccacauggcagcuuggagcggguccgcaugccaugaugguagagaauggacauauaucggaguugauggccccgacaguaaugcauugcucaaaauaaaauauggagaagcauauacugacacauaccauuccuaugcaaaaaacauccuaaggacacaagaaagugccugcaauugcaucgggggagauuguuaucuuaugauaacugauggcccagcuucagggauuagugaaugcagauuccuuaagauucgggagggccgaauaauaaaagaaauauuuccaacaggaagaguaaaacauacugaggaaugcacaugcggauuugccagcaacaaaaccauagaaugugccuguagagauaacaguuacacagcaaaaagacccuuugucaaauuaaauguggagacugauacagcggaaauaagauugaugugcacagagacuuauuuggacacccccagaccaaaugauggaagcauaacagggccuugcgaaucuaauggggacaaaggaaguggaggcaucaagggaggauuuguucaucaaagaauggcaucaaagauuggaaggugguacucucgaacaaugucuaaaacuaaaagaauggggaugggacuguauguaaaguaugauggagacccauggacugacagugaagcccuugcucuuaguggaguaaugguuucaauggaagaaccugguugguauuccuuuggcuucgaaauaaaagauaagaaaugugauguccccuguauugggauagaaaugguacaugauggugggaaaacgacuuggcauucagcagcaacagccauuuacuguuuaaugggcucaggacaacugcugugggacacugucacagguguugauauggcucuguaa

SEQ ID NO: 61715 - RNA, 1401 nt, Artificial Sequence; identical to SEQ ID NO: 61149
  derived and/or modified CDS sequence (wt) from neuraminidase__InfluenzaB__AGX22735

SEQ ID NO: 61716 - RNA, 1401 nt, Artificial Sequence
  derived and/or modified CDS sequence (wt) from neuraminidase__InfluenzaB__AGX22746
augcuaccuucaacuauacaaacguuaacccuauuucucacaucagggggagugcuauuaucacuauaugugucagcuucauugucauacuuacuauauucggauauauugcuaaaauuuucacaaacagaaauaacugcaccaauaaugccauuggauugugcaaacgcaucaaauguucaggcugugaaccguucugcaacaaaaggggugacacuucuucucccagaaccggaguggacauacccucguuuaucuugcccgggcucaaccuuucagaaagcacuccuaauuagcccccauagauucggagaaaccaaaggaaacucagcucccuugauaauaagggaaccuuuuauugcuuguggaccaacggaaugcaaacacuuugcucuaacccauuaugcagcucaaccagggggauacuacaauagaacaagagaagacagaaacaagcugaggcaucuaauuucagucaaauugggcaaaaucccaacaguagaaaacuccauuuuccacauggcagcuuggagcggguccgcaugccaugaugguaaagaauggacauauaucggaguugauggcccugacaguaaugcauugcucaaaauaaaauauggagaagcauauacugacacauaccauuccuaugcaaaaaacauccuaaggacacaagaaagugccugcaauugcaucgggggagauuguuaucuuaugauaacugauggcccagcuucagggauuagugaaugcagauuccuuaagauucgagagggccgaauaauaaaagaaauauuuccaacaggaagaguaaaacauacugaggaaugcacaugcggauuugccagcaacaaaaccauagaaugugcuuguagagauaacaguuacacagcaaaaagacccuuugucaaauuaaauguggagacugauacagcggaaauaagauugaugugcacagagacuuauuuggacacccccagaccaaaugauggaagcauaacagggccuugcgaaucugauggggacaaagggaguggaggcaucaagggaggauuuguucaucaaagaauggcauccaagauuggaagaugguacucucgaacgaugucuaaaacuaaaagaauggggaugggacuguauguaaaguaugauggagacccauggacugacagugaagcccuugcucuuaguggaguaaugguuucaauggaagaaccugguugguauuccuuuggcuucgaaauaaaagauaagaaaugugauguccccuguauugggauagaaaugguacaugauggugggaaaacgacuuggcacucagcagcaacagccauuuacuguuuaaugggcucaggacaacugcugugggacacugucacagguguugauauggcucuguaa

SEQ ID NO: 61717 - RNA, 1401 nt, Artificial Sequence; identical to SEQ ID NO: 61149
  derived and/or modified CDS sequence (wt) from neuraminidase__InfluenzaB__AGX22757

SEQ ID NO: 61718 - RNA, 1401 nt, Artificial Sequence; identical to SEQ ID NO: 61149
  derived and/or modified CDS sequence (wt) from neuraminidase__InfluenzaB__AGX22768

SEQ ID NO: 61719 - RNA, 1401 nt, Artificial Sequence; identical to SEQ ID NO: 61141
  derived and/or modified CDS sequence (wt) from neuraminidase__InfluenzaB__AGX22779

SEQ ID NO: 61720 - RNA, 1401 nt, Artificial Sequence; identical to SEQ ID NO: 61149
  derived and/or modified CDS sequence (wt) from neuraminidase__InfluenzaB__AGX22790

SEQ ID NO: 61721 - RNA, 1401 nt, Artificial Sequence
  derived and/or modified CDS sequence (wt) from neuraminidase__InfluenzaB__AGX22801
augcuaccuucaacuauacaaacguuaacccuauuucucacaucagggggaguguuauuaucacuauaugugucagcuucauugucauacuuacuauauucggauauauugcuaaaauuuucacaaacagaaauaacugcaccaauaaugccauuggauugugcaaacgcaucaaauguucaggcugugaaccguucugcagcaaaaggggugacacuucuucucccagaaccggaguggacauacccucguuuaucuugcccgggcucaaccuuucagaaagcacuccuaauuagcccccauagauucggagaaaccaaaggaaacucagcucccuugauaauaagggaaccuuuuauugcuuguggaccaacggaaugcaaacacuuugcucuaacccauuaugcagcucaaccagggggauacuacaauggaacaagaggagacagaaacaagcugaggcaucuaauuucagucaaauugggcaaaaucccaacaguagaaaacuccauuuuccacauggcagcuuggagcggguccgcaugccaugaugguaaagaauggacauauaucggaguugauggccccgacaguaaugcauugcucaaaauaaaauauggagaagcauauacugacacauaccauuccuaugcaaaaaacauccuaaggacacaagaaagugccugcaauugcaucgggggaaauuguuaucuuaugauaacugauggcucagcuucagguguuagugaaugcagauuucuuaagauucgagagggccgaauaauaaaagaaauauuuccaacaggaagaguaaaacauacugaggaaugcacaugcggauuugccagcaacaaaaccauagaaugugcuuguagagauaacaguuacacagcaaaaagacccuuugucaaauuaaauguggagacugauacagcggaaauaagauugaugugcacagagacuuauuuggacacccccagaccaaaugauggaagcauaacagggccuugcgaaucugauggggacaaagggaguggaggcaucaagggaggauuuguucaucaaagaauggcauccaagauuggaaggugguacucucgaacgaugucuaaaacuaaaagaauggggaugggacuguauguaaaguaugauggagacccauggacugacagugaagcccuugcucuuaguggaguaaugguuucaauggaagaaccugguugguauuccuuuggcuucgaaauaaaagauaagaaaugugauguccccuguauugggauagaaaugguacaugauggugggaaaacgacuuggcacucagcagcaacagccauuuacuguuuaaugggcucaggacaacugcugugggacacugucacagguguugauauggcucuguaa

SEQ ID NO: 61722 - RNA, 1401 nt, Artificial Sequence
  derived and/or modified CDS sequence (wt) from neuraminidase__InfluenzaB__AGX22812
augcuaccuucaacuauacaaacguuaacccuauuucucacaucagggggaguguuauuaucacuauaugugucagcuucauugucauacuuacuauauucggauauauugcuaaaauuuucacaaacagaaauaacugcaccaauaaugccauuggauugugcaaacgcaucaaauguucaggcugugaaccguucugcagcaaaaggggugacacuucuucucccagaaccggaguggacauacccucguuuaucuugcccgggcucaaccuuucagaaagcacuccuaauuagcccccauagauucggagaaaccaaaggaaacucagcucccuugauaauaagggaaccuuuuauugcuuguggaccaacggaaugcaaacacuuugcucuaacccauuaugcagcucaaccagggggauacuacaauggaacaagagaagacagaaacaagcugaggcaucuaauuucagucaaauugggcaaaaucccaacaguagaaaacuccauuuuccacauggcagcuuggagcggguccgcaugccaugaugguaaagaauggacauauaucggaguugauggccccgacaguaaugcauugcucaaaauaaaauauggagaagcuuauacugacacauaccauuccuaugcaaaaaacauccuaaggacacaagaaagugccugcaauugcaucgggggagauuguuaucuuaugauaacugauggcccagcuucagggauuagugaaugcagauuccuuaagauucgagagggccgaauaauaaaagaaauauuuccaacaggaagaguaaaacauacugaggaaugcacaugcggauuugccagcaacaaaaccauagaaugugcuuguagagauaacaguuacacagcaaaaagacccuuugucaaauuaaauguggagacugauacagcggaaauaagauugaugugcacagagacuuauuuggacacccccagaccaaaugauggaagcauaacagggccuugcgaaucugauggggacaaagggaguggaggcaucaagggaggauuuguucaucaaagaauggcauccaagauuggaaggugguacucucgaacgaugucuaaaacuaaaagaauggggaugggacuguacguaaaguaugauggagacccauggacugacagugaagcccuugcucuuaguggaguaaugguuucaauggaagaaccugguugguauuccuuuggcuucgaaauaaaagauaagaaaugugauguccccuguauugggauagaaaugguacaugauggugggaaaacgacuuggcacucagcagcaacagccauuuacuguuuaaugggcucaggacaacugcugugggacacugucacagguguugauauggcucuguaa

SEQ ID NO: 61723 - RNA, 1401 nt, Artificial Sequence; identical to SEQ ID NO: 61149
  derived and/or modified CDS sequence (wt) from neuraminidase__InfluenzaB__AGX22823

SEQ ID NO: 61724 - RNA, 1401 nt, Artificial Sequence; identical to SEQ ID NO: 61149
  derived and/or modified CDS sequence (wt) from neuraminidase__InfluenzaB__AGX22834

SEQ ID NO: 61725 - RNA, 1401 nt, Artificial Sequence; identical to SEQ ID NO: 61149
  derived and/or modified CDS sequence (wt) from neuraminidase__InfluenzaB__AGX22845

SEQ ID NO: 61726 - RNA, 1401 nt, Artificial Sequence; identical to SEQ ID NO: 61698
  derived and/or modified CDS sequence (wt) from neuraminidase__InfluenzaB__AGX22856

SEQ ID NO: 61727 - RNA, 1401 nt, Artificial Sequence; identical to SEQ ID NO: 61149
  derived and/or modified CDS sequence (wt) from neuraminidase__InfluenzaB__AGX22867

SEQ ID NO: 61728 - RNA, 1401 nt, Artificial Sequence; identical to SEQ ID NO: 61149
  derived and/or modified CDS sequence (wt) from neuraminidase__InfluenzaB__AGX22878

SEQ ID NO: 61729 - RNA, 1401 nt, Artificial Sequence
  derived and/or modified CDS sequence (wt) from neuraminidase__InfluenzaB__AGX22889
augcuaccuucaacuauacaaacguuaacccuauuucucacaucagggggaguguuauuaucacuauaugugucagcuucauugucauacuuacuauauucggauauauugcuaaaauuuucacaaacagaaauaacugcaccaauaaugccauuggauugugcaaacgcaucaaauguucaggcugugaaccguucugcagcaaaaggggugacacuucuucucccagaaccggaguggacauacccucguuuaucuugcccgggcucaaccuuucagaaagcacuccuaauuagcccccauagauucggagaaaccaaaggaaacucagcucccuugauaauaagggaaccuuuuauugcuuguggaccaacggaaugcaaacacuuugcucuaacccauuaugcagcucaaccagggggauacuacaauggaacaagagaagacagaaacaagcugaggcaucuaauuucagucaaauugggcaaaaucccaacaguagaaaacuccauuuuccacauggcagcuuggagcggguccgcaugccaugaugguaaagaauggacauauaucggaguugauggccccgacaguaaugcauugcucaaaauaaaauauggagaagcauauacugacacauaccauuccuaugcaaaaaacauccuaaggacacaagaaagugccugcaauugcaucgggggagauuguuaucuuaugauaacugauggcccagcuucagggauuagugaaugcagauuccuuaagauucgagagggccgaauaauaaaagaaauauuuccaacaggaagaguaaaacauacugaggaaugcacaugcggauuugccagcaacaaaaccauagaaugugcuuguagagauaacagucacacagcaaaaagacccuuugucaaauuaaauguggagacugauacagcggaaauaagauugaugugcacagagacuuauuuggacacccccagaccaaaugauggaagcauaacagggccuugcgaaucugauggggacaaagggaguggaggcaucaagggaggauuuguucaucaaagaauggcauccaagauuggaaggugguacucucgaacgaugucuaaaacuaaaagaauggggaugggacuguauguaaaguaugauggagacccauggacugacagugaagcccuugcucuuaguggaguaaugguuucaauggaagaaccugguugguauuccuuuggcuucgaaauaaaagauaagaaaugugauguccccuguauugggauagaaaugguacaugauggugggaaaacgacuuggcacucagcagcaacagccauuuacuguuuaaugggcucaggacaacugcugugggacacugucacagguguugauauggcucuguaa

SEQ ID NO: 61730 - RNA, 1401 nt, Artificial Sequence
  derived and/or modified CDS sequence (wt) from neuraminidase__InfluenzaB__AGX22900
augcuaccuucaacuauacaaacguuaacccuauuucucacaucagggggaguguuauuaucacuauaugugucagcuucauugucauacuuacuauauucggauauauugcuaaaauuuucacaaacagaaauaacugcaccaauaaugccauuggauugugcaaacgcaucaaauguucaggcugugaaccguucugcaacaaaaggggugacacuucuucucccagaaccggaguggacauacccucguuuaucuugcccgggcucaaccuuucagaaagcacuccuaauuagcccccauagauucggagaaaccaaaggaaacucagcucccuugauaauaagggaaccuuuuauugcuuguggaccaacggaaugcaaacacuuugcucuaacccauuaugcagcucaaccagggggauacuacaauggaacaagagaagacagaaacaagcugaggcaucuaauuucagucaaauugggcaaaaucccaacaguagaaaacuccauuuuccacauggcagcuuggagcggguccgcaugccaugaugguaaagaauggacauauaucggaguugauggcccugacaguaaugcauugcucaaaauaaaauauggagaagcauauacugacacauaccauuccuaugcaaaaaacauccuaaggacacaagaaagugccugcaauugcaucgggggagauuguuaucuuaugauaacugauggcccagcuucagggauuagugaaugcagauuccuuaagauucgagagggccgaauaauaaaagaaauauuuccaacaggaagaguaaaacauacugaggaaugcacaugcggauuugccagcaacaaaaccauagaaugugcuuguagagauaacaguuacacagcaaaaagacccuuugucaaauuaaauguggagacugauacagcggaaauaagauugaugugcacagagacuuauuuggacacccccagaccaaaugauggaagcauaacagggccuugcgaaucugauggggacaaagggaguggaggcaucaagggaggauuuguucaucaaagaauggcauccaagauuggaagaugguacucucgaacgaugucuaaaacuaaaagaauggggaugggacuguauguaaaguaugauggagacccauggacugacagugaagcccuugcucuuaguggaguaaugguuucaauggaagaaccugguugguauuccuuuggcuucgaaauaaaagauaagaaaugugauguccccuguauugggauagaaaugguacaugauggugggaaaacgacuuggcacucagcagcaacagccauuuacuguuuaaugggcucaggacaacugcugugggacacugucacagguguugauauggcucuguaa

SEQ ID NO: 61731 - RNA, 1401 nt, Artificial Sequence
  derived and/or modified CDS sequence (wt) from neuraminidase__InfluenzaB__AGX22911
augcuaccuucaacuauacaaacguuaacccuauuucucacaucagggggaguguuauuaucacuauaugugucagcuucauugucauacuuacuauauucggauauauugcuaaaauuuucacaaacagaaauaacugcaccaauaaugccauuggauugugcaaacgcaucaaauguucaggcugugaaccguucugcagcaaaaggggugacacuucuucucccagaaccggaguggacauacccucguuuaucuugcccgggcucaaccuuucagaaagcacuccuaauuagcccccauagauucggagaaaccaaaggaaacucagcucccuugauaauaagggaaccuuuuauugcuuguggaccaacggaaugcaaacacuuugcucuaacccauuaugcagcucaaccagggggauacuacaauggaacaagagaagacagaaacaagcugaggcaucuaauuucagucaaauugggcaaaaucccaacaguagaaaacuccauuuuccacauggcagcuuggagcggguccgcaugccaugaugguaaagaauggacauauaucggaguugauggccccgacaguaaugcauugcucaaaauaaaauauggagaagcauauacugacacauaccauuccuaugcaaaaaacauccuaaggacacaagaaagugccugcaauugcaucgggggagauuguuaucuuaugauaacugauggcccagcuucagggacuagugaaugcagauuccuuaagauucgagagggccgaauaauaaaagaaauauuuccaacaggaagaguaaaacauacugaggaaugcacaugcggauuugccagcaacaaaaccauagaaugugcuuguagagauaacaguuacacagcaaaaagacccuuugucaaauuaaauguggagacugauacagcggaaauaagauugaugugcacagagacuuauuuggacacccccagaccaaaugauggaagcauaacagggccuugcgaaucugauggggacaaagggaguggaggcaucaagggaggauuuguucaucaaagaauggcauccaagauuggaaggugguacucucgaacgaugucuaaaacuaaaagaauggggaugggacuguauguaaaguaugauggagacccauggacugacagugaagcccuugcucuuaguggaguaaugguuucaauggaagaaccugguugguauuccuuuggcuucgaaauaaaagauaagaaaugugauguccccuguauugggauagaaaugguacaugauggugggaaaacgacuuggcacucagcagcaacagccauuuacuguuuaaugggcucaggacaacugcugugggacacugucacagguguugauauggcucuguaa

SEQ ID NO: 61732 - RNA, 1401 nt, Artificial Sequence
  derived and/or modified CDS sequence (wt) from neuraminidase__InfluenzaB__AGX22922
augcuaccuucaacuauacaaacguuaacccuauuucucacaucagggggaguguuauuaucacuauaugugucagcuucauugucauacuuacuauauucggauauauugcuaaaauuuucacaaacagaaauaacugcaccaauaaugccauuggauugugcaaacgcaucaaauguucaggcugugaaccguucugcaacaaaaggggugacacuucuucucccagaaccggaguggacauacccucguuuaucuugcccgggcucaaccuuucagaaagcacuccuaauuagcccccauagauucggagaaaccaaaggaaacucagcucccuugauaauaagggaaccuuuuauugcuuguggaccaacggaaugcaaacacuuugcucuaacccauuaugcagcucaaccagggggauacuacaauggaacaagagaagacagaaacaagcugaggcaucuaauuucagucaaauugggcaaaaucccaacaguagaaaacuccauuuuccacauggcagcuuggagcggguccgcaugccaugaugguaaagaauggacauauaucggaguugauggccccgacaguaaugcauugcucaaaauaaaauauggagaagcauauacugacacauaccauuccuaugcaaaaaacauccuaaggacacaagaaagugccugcaauugcaucgggggagauuguuaucuuaugauaacugauggcccagccucagggauuagugaaugcagauuccuuaagauucgagagggccgaauaauaaaagaaauauuuccaacaggaagaguaaaacauacugaggaaugcacaugcggauuugccagcaacaaaaccauagaaugugcuuguagagauaacaguuacacagcaaaaagacccuuugucaaauuaaauguggagacugauacagcggaaauaagauugaugugcacagagacuuauuuggacacccccagaccaaaugauggaagcauaacagggccuugcgaaucugauggggacaaagggaguggaggcaucaagggaggauuuguucaucaaagaauggcauccaagauuggaaggugguacucucgaacgaugucuaaaacuaaaagaauggggaugggacuguauguaaaguaugauggagacccauggacugacaaugaagcccuugcucuuaguggaguaaugguuucaauggaagaaccugguugguauuccuuuggcuucgaaauaaaagauaagaaaugugauguccccuguauugggauagaaaugguacaugauggugggaaaacgacuuggcacucagcagcaacagccauuuacuguuuaaugggcucaggacaacugcugugggacacugucacagguguugauauggcucuguaa

SEQ ID NO: 61733 - RNA, 1401 nt, Artificial Sequence
  derived and/or modified CDS sequence (wt) from neuraminidase__InfluenzaB__AGX22933
augcuaccuucaacuauacaaacguuaacccuauuucucacaucagggggaguguuauuaucacuauaugugucagcuucauugucauacuuacuauauucggauauauugcuaaaauuuucacaaacagaaauaacugcaccaauaaugccauuggauugugcaaacgcaucaaauguucaggcugugaaccguucugcagcaaaaggggugacacuucuucucccagaaccggaguggacauacccucguuuaucuugcccgggcucaaccuuucagaaagcacuccuaauuagcccccauagauucggagaaaccaaaggaaacucagcccccuugauaauaagggaaccuuuuauugcuuguggaccaacggaaugcaaacacuuugcucuaacccauuaugcagcucaaccagggggauacuacaauggaacaagagaagacagaaacaagcugaggcaucuaauuucagucaaauugggcaaaaucccaacaguagaaaacuccauuuuccacauggcagcuuggagcggguccgcaugccaugaugguaaagaauggacauauaucggaguugauggccccgacaguaaugcauugcucaaaauaaaauauggagaagcauauacugacacauaccauuccuaugcaaaaaacauccuaaggacacaagaaagugccugcaauugcaucgggggagauuguuaucuuaugauaacugauggcccagcuucagggauuagugaaugcagauuccuuaagauucgagagggccgaauaauaaaagaaauauuuccaacaggaagaguaaaacauacugaggaaugcacaugcggauuugccagcaacaaaaccauagaaugugcuuguagagauaacaguuacacagcaaaaagacccuuugucaaauuaaauguggagacugauacagcggaaauaagauugaugugcacagagacuuauuuggacacccccagaccaaaugauggaagcauaacagggccuugcgaaucugauggggacaaagggaguggaggcaucaagggaggauuuguucaucaaagaauggcauccaagauuggaaggugguacucucgaacgaugucuaaaacuaaaagaauggggaugggacuguauguaaaguaugauggagacccauggacugacagugaagcccuugcucuuaguggaguaaugguuucaauggaagaaccugguugguauuccuuuggcuucgaaauaaaagauaagaaaugugauguccccuguauugggauagaaaugguacaugauggugggaaaacgacuuggcacucagcagcaacagccauuuacuguuuaaugggcucaggacaacugcugugggacacugucacagguguugauauggcucuguaa

SEQ ID NO: 61734 - RNA, 1401 nt, Artificial Sequence; identical to SEQ ID NO: 61149
  derived and/or modified CDS sequence (wt) from neuraminidase__InfluenzaB__AGX22944

SEQ ID NO: 61735 - RNA, 1401 nt, Artificial Sequence; identical to SEQ ID NO: 60865
  derived and/or modified CDS sequence (wt) from neuraminidase__InfluenzaB__AGX22955

SEQ ID NO: 61736 - RNA, 1401 nt, Artificial Sequence
  derived and/or modified CDS sequence (wt) from neuraminidase__InfluenzaB__AGX22966
augcuaccuucaacuauacaaacguuaacccuauuucucacaucagggggaguguuauuaucacuauaugugucagcuucauugucauacuuacuauauucggauauauugcuaaaauuuucacaaacagaaauaacugcaccaauaaugccauuggauugugcaaacgcaucaaauguucaggcugugaaccguucugcagcaaaaggggugacacuucuucucccagaaccggaguggacauacccucguuuaucuugcccgggcucaaccuuucagaaagcacuccuaauuagcccccauagauucggagaaaccaaaggaaacucagcccccuugauaauaagggaaccuuuuauugcuuguggaccaacggaaugcaaacacuuugcucuaacccauuaugcagcucaaccagggggauacuacaauggaacaagagaagacagaaacaagcugaggcaucuaauuucagucaaauugggcaaaaucccaacaguagaaaacuccauuuuccacauggcagcuuggagcggguccgcaugccaugaugguaaagaauggacauauaucggaguugauggccccgacaguaaugcauugcucaaaauaaaauauggagaagcauauacugacacauaccauuccuaugcaaaaaacauccuaaggacacaagaaagugccugcaauugcaucgggggagauuguuaucuuaugauaacugauggcccagcuucagggauuagugaaugcagauuccuuaagauucgagagggccgaauaauaaaagaaauauuuccaacaggaagaguaaaacauacugaggaaugcacaugcggauuugccagcaacaaaaccauagaaugugcuuguagagauaacaguuacacagcaaaaagacccuuugucaaauuaaauguggagacugauacagcggaaauaagauugaugugcacagagacuuauuuggacacccccagaccaaaugauggaagcauaacagggccuugcgaaucugauggggacaaagggaguggaggcaucaagggaggauuuguucaucaaagaauggcauccaagauuggaaggugguacucucgaacgaugucuaaaacuaaaagaauggggaugggacuguauguaaaguaugauggagacccauggacugacagugaagcccuugcucuuaguggaguaaugguuucaauggaagaaccugguugguauuccuuuggcuucgaaauaaaagauaagaaaugugauguccccuguauugggauagaaaugguacaugauggugggaaaacuacuuggcacucagcagcaacagccauuuacuguuuaaugggcucaggacaacugcugugggacacugucacagguguugauauggcucuguaa

SEQ ID NO: 61737 - RNA, 1401 nt, Artificial Sequence
  derived and/or modified CDS sequence (wt) from neuraminidase__InfluenzaB__AGX22977
augcuaccuucaacuauacaaacguuaacccuauuucucacaucagggggaguguuauuaucacuauaugugucagcuucauugucauacuuacuauauucggauauauugcuaaaauuuucacaaacagaaauaacugcaccaauaaugccauuggauugugcaaacgcaucaaauguucaggcugugaaccguucugcaacaaaaggggugacacuucuucucccagaaccggaguggacauacccucguuuaucuugcccgggcucaaccuuucagaaagcacuccuaauuagcccccauagauucggggaaaccaaaggaaacucagcucccuugauaauaagggaaccuuuuauugcuuguggaccaacggaaugcaaacacuuugcucuaacccauuaugcagcucaaccagggggauacuacaauggaacaagagaagacagaaacaagcugaggcaucuaauuucagucaaauugggcaaaaucccaacaguagaaaacuccauuuuccacauggcagcuuggagcggguccgcaugccaugaugguaaagaauggacauauaucggaguugauggccccgacaguaaugcauugcucaaaauaaaauauggagaagcauauacugacacauaccauuccuaugcaaaaaacauccuaaggacacaagaaagugccugcaauugcaucgggggagauuguuaucuuaugauaacugauggcccagccucagggauuagugaaugcagauuccuuaagauucgagagggccgaauaauaaaagaaauauuuccaacaggaagaguaaaacauacugaggaaugcacaugcggauuugccagcaacaaaaccauagaaugugcuuguagagauaacaguuacacagcaaaaagacccuuugucaaauuaaauguggagacugauacagcggaaauaagauugaugugcacagagacuuauuuggacacccccagaccaaaugauggaagcauaacagggccuugcgaaucugauggggacaaagggaguggaggcaucaagggaggauuuguucaucaaagaauggcauccaagauuggaaggugguacucucgaacgaugucuaaaacuaaaagaauggggaugggacuguauguaaaguaugauggagacccauggacugacagugaagcccuugcucuuaguggaguaaugguuucaauggaagaaccugguugguauuccuuuggcuucgaaauaaaagauaagaaaugugauguccccuguauugggauagaaaugguacaugauggugggaaaacgacuuggcacucagcagcaacagccauuuacuguuuaaugggcucaggacaacugcugugggacacugucacagguguugauauggcucuguaa

SEQ ID NO: 61738 - RNA, 1401 nt, Artificial Sequence
  derived and/or modified CDS sequence (wt) from neuraminidase__InfluenzaB__AGX22988
augcuaccuucaacuauacaaacguuaacccuauuucucacaucagggggaguguuauuaucacuauaugugucagcuucauugucauacuuacuauauucggauauauugcuaaaauuuucacaaacagaaauaacugcaccaauaaugccauuggauugugcaaacgcaucaaauguucaggcugugaaccguucugcagcaaaaggggugacacuucuucucccagaaccggaguggacauacccucguuuaucuugcccgggcucaaccuuucagaaagcacuccuaauuagcccccauagauucggagaaaccaaaggaaacucagcccccuugauaauaagggaaccuuuuauugcuuguggaccaacggaaugcaaacacuuugcucuaacccauuaugcagcucaaccagggggauacuacaauggaacaagagaagacagaaacaagcugaggcaucuaauuucagucaaauugggcaaaaucccaacaguagaaaacuccauuuuccacauggcagcuuggagcggguccgcaugccaugaugguaaagaauggacauauaucggaguugauggccccgacaguaaugcauugcucaaaauaaaauauggagaagcauauacugacacauaccauuccuaugcaaaaaacauccuaaggacacaagaaagugccugcaauugcaucgggggagauuguuaucuuaugauaacugauggcccagcuucagggauuagugaaugcagauuccuuaagauucgagagggccgaauaauaaaagaaauauuuccaacaggaagaguaaaacauacugaggaaugcacaugcggauuugccagcaacaaaaccauagaaugugcuuguagagauaacaguuacacagcaaaaagacccuuugucaaauuaaauguggagacugauacagcggaaauaagauugaugugcacagagacuuauuuggacacccccagaccaaaugauggaagcauaacagggccuugcgaaucugauggggacaaagggaauggaggcaucaagggaggauuuguucaucaaagaauggcauccaagauuggaaggugguacucucgaacgaugucuaaaacuaaaagaauggggaugggacuguauguaaaguaugauggagacccauggacugacagugaagcccuugcucuuaguggaguaaugguuucaauggaagaaccugguugguauuccuuuggcuucgaaauaaaagauaagaaaugugauguccccuguauugggauagaaaugguacaugauggugggaaaacuacuuggcacucagcagcaacagccauuuacuguuuaaugggcucaggacaacugcugugggacacugucacagguguugauauggcucuguaa

SEQ ID NO: 61739 - RNA, 1401 nt, Artificial Sequence
  derived and/or modified CDS sequence (wt) from neuraminidase__InfluenzaB__AGX22999
augcuaccuucaacuauacaaacguuaacccuauuucucacaucagggggaguguuauuaucacuauaugugucagcuucauugucauacuuacuauauucggauauauugcuaaaauuuucacaaacagaaauaacugcaccaauaaugccauuggauugugcaaacgcaucaaauguucaggcugugaaccguucugcagcaaaaggggugacacuucuucucccagaaccggagugggcauacccucguuuaucuugcccgggcucaaccuuucaaaaagcacuccuaauuagcccccauagauucggagaaaccaaaggaaacucagcucccuugauaauaagggaaccuuuuauugcuuguggaccaacggaaugcaaacacuuugcucuaacccauuaugcagcucaaccagggggauacuacaauggaacaagagaagacagaaacaagcugaggcaucuaauuucagucaaauugggcaaaaucccaacaguagaaaacuccauuuuccacauggcagcuuggagcggguccgcaugccaugaugguaaagaauggacauauaucggaguugauggccccgacaguaaugcauugcucaaaauaaaauauggagaagcauauacugacacauaccauuccuaugcaaaaaacauccuaaggacacaagaaagugccugcaauugcaucgggggagauuguuaucuuaugauaacugauggcccagcuucagggauuagugaaugcagauuccuuaagauucgagagggccgaauaauaaaagaaauauuuccaacaggaagaguaaaacauacugaggaaugcacaugcggauuugccagcaacaaaaccauagaaugugcuuguagagauaacaguuacacagcaaaaagacccuuugucaaauuaaauguggagacugauacagcggaaauaagauugaugugcacagagacuuauuuggacacccccagaccaaaugauggaagcauaacagggccuugcgaaucugauggggacaaagggaguggaggcaucaagggaggauuuguucaucaaagaauggcauccaagauuggaaggugguacucucgaacgaugucuaaaacuaaaagaauggggaugggacuguauguaaaguaugauggagacccauggacugacagugaagcccuugcucuuaguggaguaaugguuucaauggaagaaccugguugguauuccuuuggcuucgaaauaaaagauaagaaaugugauguccccuguauugggauagaaaugguacaugauggugggaaaacgacuuggcacucagcagcgacagccauuuacuguuuaaugggcucaggacaacugcugugggacacugucacagguguugauauggcucuguaa

SEQ ID NO: 61740 - RNA, 1401 nt, Artificial Sequence
  derived and/or modified CDS sequence (wt) from neuraminidase__InfluenzaB__AGX23010
augcuaccuucaacuauacaaacguuaacccuauuucucacaucagggggaguguuauuaucacuauaugugucagcuucauugucauacuuacuauauucggauauauugcuaaaauuuucacaaacagaaauaacugcaccaauaaugccauuggauugugcaaacgcaucaaauguucaggcugugaaccguucugcagcaaaaggggugacacuucuucucccagaaccggagugggcauacccucguuuaucuugcccgggcucaaccuuucagaaagcacuccuaauuagcccccauagauucggagaaaccaaaggaaacucagcucccuugauaauaagggaaccuuuuauugcuuguggaccaacggaaugcaaacacuuugcucuaacccauuaugcagcucaaccagggggauacuacaauggaacaagagaagacagaaacaagcugaggcaucuaauuucagucaaauugggcaaaaucccaacaguagaaaacuccauuuuccacauggcagcuuggagcggguccgcaugccaugaugguaaagaauggacauauaucggaguugauggccccgacaguaaugcauugcucaaaauaaaauauggagaagcauauacugacacauaccauuccuaugcaaaaaacauccuaaggacacaagaaagugccugcaauugcaucgggggagauuguuaucuuaugauaacugauggcccagcuucagggauuagugaaugcagauuccuuaagauucgagagggccgaauaauaaaagaaauauuuccaacaggaagaguaaaacauacugaggaaugcacaugcggauuugccagcaacaaaaccauagaaugugcuuguagagauaacaguuacacagcaaaaagacccuuugucaaauuaaauguggagacugauacagcggaaauaagauugaugugcacagagacuuauuuggacacccccagaccaaaugauggaagcauaacagggccuugcgaaucugauggggacaaagggaguggaggcaucaagggaggauuuguucaucaaagaauggcauccaagauuggaaggugguacucucgaacgaugucuaaaacuaaaagaauggggaugggacuguauguaaaguaugauggagacccauggacugacagugaagcccuugcucuuaguggaguaaugguuucaauggaagaaccugguugguauuccuuuggcuucgaaauaaaagauaagaaaugugauguccccuguauugggauagaaaugguacaugauggugggaaaacgacuuggcacucagcagcgacagccauuuacuguuuaaugggcucaggacaacugcugugggacacugucacagguguugauauggcucuguaa

SEQ ID NO: 61741 - RNA, 1401 nt, Artificial Sequence
  derived and/or modified CDS sequence (wt) from neuraminidase__InfluenzaB__AGX23021
augcuaccuucaacuauacaaacguuaacccuauuucucacaucagggggaguguuauuaucacuauaugugucagcuucauugucauacuuacuauauucggauauauugcuaaaauuuucacaaacagaaauaacugcaccaauaaugccauuggauugugcaaacgcaucaaauguucaggcugugaaccguucugcaacaaaaggggugacacuucuucucccagaaccggaguggacauacccucguuuaucuugcccgggcucaaccuuucagaaagcacuccuaauuagcccccauagauucggagaaaccaaaggaaacucagcucccuugauaauaagggaaccuuuuauugcuuguggaccaacggaaugcaaacacuuugcucuaacccauuaugcagcucaaccagggggauacuacaauggaacaagagaagacagaaacaagcugaggcaucuaauuucagucaaauugggcaaaaucccaacaguagaaaacuccauuuuccacauggcagcuuggagcggguccgcaugccaugaugguaaagaauggacauauaucggaguugauggccccgacaguaaugcauugcucaaaauaaaauauggagaagcauauacugacacauaccauuccuaugcaaaaaacauccuaaggacacaagaaagugccugcaauugcaucgggggagauuguuaucuuaugauaacugauggcccagcuucagggauuagugaaugcagauuccuuaagauucgagagggccgaauaauaaaagaaauauuuccaacaggaagaguaaaacauacugaggaaugcacaugcggauuugccagcaacaaaaccauagaaugugccuguagagauaacaguuacacagcaaaaagacccuuugucaaauuaaauguggagacugauacagcagaaauaagauugaugugcacagagacuuauuuggacacccccagaccaaaugauggaagcauaacagggccuugcgaaucugauggggacaaagggaguggaggcaucaagggaggauuuguucaucaaagaauggcauccaagauuggaaggugguacucucgaacgaugucuaaaacuaaaagaauggggaugggacuguauguaaaguaugauggagacccauggacugacagugaagcccuugcucuuaguggaguaaugguuucaauggaagaaccugguugguauuccuuuggcuucgaaauaaaagauaagaaaugugauguccccuguauugggauagaaaugguacaugauggugggaaaacgacuuggcacucagcagcaacagccauuuacuguuuaaugggcucaggacaacugcugugggacacugucacagguguugauauggcucuguaa

SEQ ID NO: 61742 - RNA, 1401 nt, Artificial Sequence; identical to SEQ ID NO: 60865
  derived and/or modified CDS sequence (wt) from neuraminidase__InfluenzaB__AGX23032

SEQ ID NO: 61743 - RNA, 1401 nt, Artificial Sequence
  derived and/or modified CDS sequence (wt) from neuraminidase__InfluenzaB__AGX23043
augcuaccuucaacuauacaaacguuaacccuauuucucacaucagggggaguguuauuaucacuauaugugucagcuucauugucauacuuacuauauucggauauauugcuaaaauuuucacaaacagaaauaacugcaccaauaaugccauuggauugugcaaacgcaucaaauguucaggcugugaaccguucugcagcaaaaggggugacacuucuucucccagaaccggaguggacauacccucguuuaucuugcccgggcucaaccuuucagaaagcacuccuaauuagcccccauagauucggagaaaccaaaggaaacucagcccccuugauaauaagggaaccuuuuauugcuuguggaccaacggaaugcaaacacuuugcucuaacccauuaugcagcucaaccagggggauacuacaauggaacaagagaagacagaaacaagcugaggcaucuaauuucagucaaauugggcaaaaucccaacaguagaaaacuccauuuuccacauggcagcuuggagcggguccgcaugccaugaugguaaagaauggacauauaucggaguugauggccccgacaguaaugcauugcucaaaauaaaauauggagaagcauauacugacacauaccauuccuaugcaaaaaacauccuaaggacacaagaaagugccugcaauugcaucgggggagauuguuaucuuaugauaacugauggcccagcuuuagggauuagugaaugcagauuccuuaagauucgagagggccgaauaauaaaagaaauauuuccaacaggaagaguaaaacauacugaggaaugcacaugcggauuugccagcaacaaaaccauagaaugugcuuguagagauaacaguuacacagcaaaaagacccuuugucaaauuaaauguggagacugauacagcggaaauaagauugaugugcacagagacuuauuuggacacccccagaccaaaugauggaagcauaacagggccuugcgaaucugauggggacaaagggaguggaggcaucaagggaggauuuguucaucaaagaauggcauccaagauuggaaggugguacucucgaacgaugucuaaaacuaaaagaauggggaugggacuguauguaaaguaugauggagacccauggacugacagugaagcccuugcucuuaguggaguaaugguuucaauggaagaaccugguugguauuccuuuggcuucgaaauaaaagauaagaaaugugauguccccuguauugggauagaaaugguacaugauggugggaaaacuacuuggcacucagcagcaacagccauuuacuguuuaaugggcucaggacaacugcugugggacacugucacagguguugauauggcucuguaa

SEQ ID NO: 61744 - RNA, 1401 nt, Artificial Sequence
  derived and/or modified CDS sequence (wt) from neuraminidase__InfluenzaB__AGX23054
augcuaccuucaacuauacaaacguuaacccuauuucucacaucagggggaguguuauuaucacuauaugugucagcuucauugucauacuuacuauauucggauauauugcuaaaauuuucgcaaacagaaauaacugcaccaauaaugccauuggauugugcaaacgcaucaaauguucaggcugugaaccguucugcaacaaaaggggugacacuucuucucccagaaccggaguggacauacccucguuuaucuugcccgggcucaaccuuucagaaagcacuccuaauuagcccccauagauucggagaaaccaaaggaaacucagcucccuugauaauaagggaaccuuuuauugcuuguggaccaacggaaugcaaacacuuugcucuaacccauuaugcagcucaaccagggggauacuacaauggaacaagagaagacagaaacaagcugaggcaucuaauuucagucaaauugggcaaaaucccaacaguagaaaacuccauuuuccacauggcagcuuggagcggguccgcaugccaugaugguaaagaauggacauauaucggaguugauggccccgacaguaaugcauugcucaaaauaaaauauggagaagcauauacugacacauaccauuccuaugcaaaaaacauccuaaggacacaagaaagugccugcaauugcaucgggggagauuguuaucuuaugauaacugauggcccagccucagggauuagugaaugcagauuccuuaagauucgagagggccgaauaauaaaagaaauauuuccaacaggaagaguaaaacauacugaggaaugcacaugcggauuugccagcaacaaaaccauagaaugugcuuguagagauaacaguuacacagcaaaaagacccuuugucaaauuaaauguggagacugauacagcggaaauaagauugaugugcacagagacuuauuuggacacccccagaccaaaugauggaagcauaacagggccuugcgaaucugauggggacaaagggaguggaggcaucaagggaggauuuguucaucaaagaauggcauccaagauuggaaggugguacucucgaacgaugucuaaaacuaaaagaauggggaugggacuguauguaaaguaugauggagacccauggacugacagugaagcccuugcucuuaguggaguaaugguuucaauggaagaaccugguugguauuccuuuggcuucgaaauaaaagauaagaaaugugauguccccuguauugggauagaaaugguacaugauggugggaaaacgacuuggcacucagcagcaacagccauuuacuguuuaaugggcucaggacaacugcugugggacacugucacagguguugauauggcucuguaa

SEQ ID NO: 61745 - RNA, 1401 nt, Artificial Sequence; identical to SEQ ID NO: 61744
  derived and/or modified CDS sequence (wt) from neuraminidase__InfluenzaB__AGX23065

SEQ ID NO: 61746 - RNA, 1401 nt, Artificial Sequence
  derived and/or modified CDS sequence (wt) from neuraminidase__InfluenzaB__AGX23076
augcuaccuucaacuauacaaacguuaacccuauuucucacaucagggggaguguuauuaucacuauaugugucagcuucauugucauacuuacuauauucggauauauugcuaaaauuuucacaaacagaaauaacugcaccaauaaugccauuggauugugcaaacgcaucaaauguucaggcugugaaccguucugcaacaaaaggggugacacuucuucucccagaaccggaguggacauacccucguuuaucuugcccgggcucaaccuuucagaaagcacuccuaauuagcccccauagauucggagaaaccaaaggaaacucagcucccuugauaauaagggaaccuuuuauugcuuguggaccaacggaaugcaaacacuuugcucuaacccauuaugcagcucaaccagggggauacuacaauggaacaagagaagacagaaacaagcugaggcaucuaauuucagucaaauugggcaaaaucccaacaguagaaaacuccauuuuccacauggcagcuuggagcggguccgcaugccaugaugguaaagaauggacauauaucggaguugauggccccgacaguaaugcauugcucaaaauaaaauauggagaagcauauacugacacauaccauuccuaugcaaaaaacauccuaaggacacaagaaagugccugcaauugcaucgggggagauuguuaucuuaugauaacugauggcccagcuucagggauuagugaaugcagauuccuuaagauucgagagggccgaauaauaaaagaaauauucccaacaggaagaguaaaacauacugaggaaugcacaugcggauuugccagcaacaaaaccauagaaugugcuuguagagauaacaguuacacagcaaaaagacccuuugucaaauuaaauguggagacugauacagcggagauaagauugaugugcacagagacuuauuuggacacccccagaccaaaugauggaagcauaacagggccuugcgaaucugauggggacaaagggaguggaggcaucaagggaggauuuguucaucaaagaauggcauccaagauuggaaggugguacucucgaacgaugucuaaaacuaaaagaauggggaugggacuguauguaaaguaugauggagacccauggacugacagugaagcccuugcucuuaguggaguaaugguuucaauggaagaaccugguugguauuccuuuggcuucgaaauaaaagauaagaaaugugauguccccuguauugggauagaaaugguacaugauggugggaaaacgacuuggcacucagcagcaacagccauuuacuguuuaaugggcucaggacaacugcugugggacacugucacagguguugauauggcucuguaa

SEQ ID NO: 61747 - RNA, 1401 nt, Artificial Sequence
  derived and/or modified CDS sequence (wt) from neuraminidase__InfluenzaB__AGX23087
augcuaccuucaacuauacaaacguuaacccuauuucucacaucagggggaguguuauuaucacuauaugugucagcuucauugucauacuuacuauauucggauauauugcuaaaauuuucacaaacagaaauaacugcaccaauaaugccauuggauugugcaaacgcaucaaauguucaggcugugaaccguucugcagcaaaaggggugacacuucuucucccagaaccggaguggacauacccucguuuaucuugcccgggcucaaccuuucagaaagcacuccuaauuagcccccauagauucggagaaaccaaaggaaacucagcucccuugauaauaagggaaccuuuuauugcuuguggaccaacggaaugcaaacacuuugcucuaacccauuaugcagcucaaccagggggauacuacaauggaacaagagaagacagaaacaagcugaggcaucuaauuucagucaaauugggcaaaaucccaacaguagaaaacuccauuuuccacauggcagcuuggagcggguccgcaugccaugaugguaaagaauggacauauaucggaguugauggccccgacaguaaugcauugcucaaaauaaaauauggagaagcuuauacugacacauaccauuccuaugcaaaaaacauccuaaggacgcaagaaagugccugcaauugcaucgggggagauuguuaucuuaugauaacugauggcccagcuucagggauuagugaaugcagauuccuuaagauucgagagggccgaauaauaaaagaaauauuuccaacaggaagaguaaaacauacugaggaaugcacaugcggauuugccagcaacaaaaccauagaaugugcuuguagagauaacaguuacacagcaaaaagacccuuugucaaauuaaauguggagacugauacagcggaaauaagauugaugugcacagagacuuauuuggacacccccagaccaaaugauggaagcauaacagggccuugcgaaucugauggggacaaagggaguggaggcaucaagggaggauuuguucaucaaagaauggcauccaagauuggaaggugguacucucgaacgaugucuaaaacuaaaagaauggggaugggacuguauguaaaguaugauggagacccauggacugacagugaagcccuugcucuuaguggaguaaugguuucaauggaagaaccugguugguauuccuuuggcuucgaaauaaaagauaagaaaugugauguccccuguauugggauagaaaugguacaugauggugggaaaacgacuuggcacucagcagcaacagccauuuacuguuuaaugggcucaggacaacugcugugggacacugucacagguguugauauggcucuguaa

SEQ ID NO: 61748 - RNA, 1401 nt, Artificial Sequence
  derived and/or modified CDS sequence (wt) from neuraminidase__InfluenzaB__AGX23098
augcuaccuucaacuauacaaacguuaacccuauuucucacaucagggggaguguuauuaucacuauaugugucagcuucauugucauacuuacuauauucggauauauugcuaaaauuuucacaaacagaaauaacugcaccaauaaugccauuggauugugcaaacgcaucaaauguucaggcugugaaccguucugcaacaaaaggggugacacuucuucucccagaaccggaguggacauacccucguuuaucuugcccgggcucaaccuuucagaaagcacuccuaauuagcccccauagauucggagaaaccaaaggaaacucagcucccuugauaauaagggaaccuuuuauugcuuguggaccaacggaaugcaaacacuuugcucuaacccauuaugcagcucaaccagggggauacuacaauggaacaagagaagacagaaacaagcugaggcaucuaauuucagucaaauugggcaaaaucccaacaguagaaaacuccauuuuccacauggcagcuuggagcggguccgcaugccaugaugguaaagaauggacauauaucggaguugauggccccgacaguaaugcauugcucaaaauaaaauauggagaagcauauacugacacauaccauuccuaugcaaaaaacauccuaaggacacaagaaagugccugcaauugcaucgggggagauuguuaucuuaugauaacugauggcccagcuucagggauuagugaaugcagauuccuuaagauucgagagggccgaauaauaaaagaaauauuuccaacaggaagaguaaaacauacugaggaaugcacaugcggauuugccagcaacaaaaccauagaaugugcuuguagagauaacaguuacacagcaaaaagacccuuugucaaauuaaauguggagacugauacagcggaaauaagauugaugugcacagagacuuauuuggacacccccagaccaaaugauggaagcauaacagggccuugcgaaucugauggggacaaagggaguggaggcaucaagggaggauuuguucaucaaagaauggcauccaagauuggaaggugguacucucgaacgaugucuaaaacuaaaagaaugggaaugggacuguauguaaaguaugauggagacccauggacugacagugaagcccuugcucuuaguggaguaaugguuucaauggaagaaccugguugguauuccuuuggcuucgaaauaaaagauaagaaaugugauguccccuguauugggauagaaaugguacaugauggugggaaaacgacuuggcacucagcagcaacagccauuuacuguuuaaugggcucaggacaacugcugugggacacugucacagguguugauauggcucuguga

SEQ ID NO: 61749 - RNA, 1401 nt, Artificial Sequence
  derived and/or modified CDS sequence (wt) from neuraminidase__InfluenzaB__AGX23109
augcuaccuucaacuauacaaacguuaacccuauuucucacaucagggggaguguuauuaucacuauaugugucagcuucauugucauacuuacuauauucggauauauugcuaaaauuuucacaaacagaaauaacugcaccaauaaugccauuggauugugcaaacgcaucaaauguucaggcugugaaccguucugcaacaaaaggggugacacuucuucucccagaaccggaguggacauacccucguuuaucuugcccgggcucaaccuuucagaaagcacuccuaauuagcccccauagauucggagaaaccaaaggaaacucagcucccuugauaauaagggaaccuuuuauugcuuguggaccaacggaaugcaaacacuuugcucuaacccauuaugcagcucaaccagggggauacuacaauggaacaagagaagacagaaacaagcugaggcaucuaauuucagucaaguugggcaaaaucccaacaguagaaaacuccauuuuccauauggcagcuuggagcggguccgcaugccaugaugguaaagaauggacauauaucggaguugauggccccgacaguaaugcauugcucaaaauaaaauauggagaagcauauacugacacauaccauuccuaugcaaaaaacauccuaaggacacaagaaagugccugcaauugcaucaggggagauuguuaucuuaugauaacugauggcccagcuucagggauuagugaaugcagauuccuuaagauucgagagggccgaauaauaaaagaaauauuuccaacaggaagaguaaaacauacugaggaaugcacaugcggauuugccagcaacaaaaccauagaaugugcuuguagagauaacaguuacacagcaaaaagacccuuugucaaauuaaauguggagacugauacagcggaaauaagauugaugugcacagagacuuauuuggacacccccagaccaaaugauggaagcauaacagggccuugcgaaucugauggggacaaagggaguggaggcaucaagggaggauuuguucaucaaagaauggcauccaagauuggaaggugguacucucgaacgaugucuaaaacuaaaagaauggggaugggacuguauguaaaguaugauggagacccauggacugacagugaagcccuugcucuuaguggaguaaugguuucaauggaagaaccugguugguauuccuuuggcuucgaaauaaaagauaagaaaugugauguccccuguauugggauagaaaugguacaugauggugggaaaacgacuuggcacucagcagcaacagccauuuacuguuuaaugggcucaggacaacugcugugggacacugucacagguguugauauggcucuguaa

SEQ ID NO: 61750 - RNA, 1401 nt, Artificial Sequence
  derived and/or modified CDS sequence (wt) from neuraminidase__InfluenzaB__AGX23120
augcuaccuucaacuauacaaacguuaacccuauuucucacaucagggggaguguuauuaucacuauaugugucagcuucauugucauacuuacuauauucggauauauugcuaaaauuuucacaaacagaaauaacugcaccaauaaugccauuggauugugcaaacgcaucaaauguucaggcugugaaccguucugcagcaaaaggggugacacuucuucucccagaaccggaguggacauacccucguuuaucuugcccgggcucaaccuuucagaaagcacuccuaauuagcccccauagauucggagaaaccaaaggaaacucagcucccuugauaauaagggaaccuuuuauugcuuguggaccaacggaaugcaaacacuuugcucuaacccauuaugcagcucaaccagggggauacuacaauggaacaagagaagacagaaacaagcugaggcaucuaauuucagucaaauugggcaaaaucccaacaguagaaaacuccauuuuccacauggcagcuuggagcggguccgcaugccaugaugguaaagaauggacauauaucggaguugauggccccgacaguaaugcauugcucaaaauaaaauauggagaagcuuauacugacacauaccauuccuaugcaaaaaacauccuaaggacacaagaaagugccugcaauugcaucgggggagauuguuaucuuaugauaacugauggcccagcuucagggauuagugaaugcagauuccuuaagauucgagagggccgaauaauaaaagaaauauuuccaacaggaagaguaaaacauacugaggaaugcacaugcggauuugccagcaacaaaaccauagaaugugcuuguagagauaacaguuacacagcaaaaagacccuuugucaaauuaaauguggagacugauacagcggaaauaagauugaugugcacagagacuuauuuggacacccccagaccaaaugauggaagcauaacagggccuugcgaaucugauggggacaaagggaguggaggcaucaagggaggauuuguucaucaaagaauggcauccaagauuggaaggugguacucucgaacuaugucuaaaacuaaaagaauggggaugggacuguauguaaaguaugauggagacccauggacugacagugaagcccuugcucuuaguggaguaaugguuucaauggaagaaccugguugguauuccuuuggcuucgaaauaaaagauaagaaaugugauguccccuguauugggauagaaaugguacaugauggugggaaaacgacuuggcacucagcagcaacagccauuuacuguuuaaugggcucaggacaacugcugugggacacugucacagguguugauauggcucuguaa

SEQ ID NO: 61751 - RNA, 1401 nt, Artificial Sequence
  derived and/or modified CDS sequence (wt) from neuraminidase__InfluenzaB__AGX23131
augcuaccuucaacuauacaaacguuaacccuauuucucacaucagggggaguguuauuaucacuauaugugucagcuucauugucauacuuacuauauucggauauauugcuaaaauuuucacaaacagaaauaauugcaccaauaaugccauuggauugugcaaacgcaucaaauguucaggcugugaaccguucugcagcaaaaggggugacacuucuucucccagaaccggaguggacauacccucguuuaucuugcccgggcucaaccuuucagaaagcacuccuaauuagcccccauagauucggagaaaccaaaggaaacucagcccccuugauaauaagggaaccuuuuauugcuuguggaccaacggaaugcaaacacuuugcucuaacccauuaugcagcucaaccagggggauacuacaauggaacaagagaagacagaaacaagcugaggcaucuaauuucagucaaauugggcaaaaucccaacaguagaaaacuccauuuuccacauggcagcuuggagcggguccgcaugccaugaugguaaagaauggacauauaucggaguugauggccccgacaguaaugcauugcucaaaauaaaauauggagaagcauauacugacacauaccauuccuaugcaaaaaacauccuaaggacacaagaaagugccugcaauugcaucgggggagauuguuaucuuaugauaacugauggcccagcuucagggauuagugaaugcagauuccuuaagauucgagagggccgaauaauaaaagaaauauuuccaacaggaagaguaaaacauacugaggaaugcacaugcggauuugccagcaacaaaaccauagaaugugcuuguagagauaacaguuacacagcaaaaagacccuuugucaaauuaaauguggagacugauacagcggaaauaagauugaugugcacagagacuuauuuggacacccccagaccaaaugauggaagcauaacagggccuugcgaaucugauggggacaaagggaguggaggcaucaagggaggauuuguucaucaaagaauggcauccaagauuggaaggugguacucucgaacgaugucuaaaacuaaaagaauggggaugggacuguauguaaaguaugauggagacccauggacugacagugaagcccuugcucuuaguggaguaaugguuucaauggaagaaccugguugguauuccuuuggcuucgaaauaaaagauaagaaaugugauguccccuguauugggauagaaaugguacaugauggugggaaaacgacuuggcacucagcagcaacagccauuuacuguuuaaugggcucaggacaacugcugugggacacugucacagguguugauauggcucuguaa

SEQ ID NO: 61752 - RNA, 1401 nt, Artificial Sequence
  derived and/or modified CDS sequence (wt) from neuraminidase__InfluenzaB__AGX23142
augcuaccuucaacuauacaaacguuaacccuauuucucacaucagggggaguguuauuaucacuauaugugucagcuucauugucauacuuacuauauucggauauauugcuaaaauuuucacaaacagaaauaacugcaccaauaaugccauuggauugugcaaacgcaucaaauguucaggcugugaaccguucugcagcaaaaggggugacacuucuucucccagaaccggaguggacauacccucguuuaucuugcccgggcucaaccuuucagaaagcacuccuaauuagcccccauagauucggagaaaccaaaggaaacucagcucccuugauaauaagggaaccuuuuauugcuuguggaccaacggaaugcaaacacuuugcucuaacccauuaugcagcucaaccagggggauacuacaauggaacaagagaagacagaaacaagcugaggcaucuaauuucagucaaauugggcaaaaucccaacaguagaaaacuccauuuuccacauggcagcuuggagcggguccgcaugccaugaugguaaagaauggacauauaucggaguugauggccccgacaguaaugcauugcucaaaauaaaauauggagaagcauauacugacacauaccauuccuaugcaaaaaacauacuaaggacacaagaaagugccugcaauugcaucgggggagauuguuaucuuaugauaacugauggcccagcuucagggauuagugaaugcagauuccuuaagauucgagagggccgaauaauaaaagaaauauuuccaacaggaagaguaaaacauacugaggaaugcacaugcggauuugccagcaacaaaaccauagaaugugcuuguagagauaacaguuacacagcaaaaagacccuuugucaaauuaaauguggagacugauacagcggaaauaagauugaugugcacagagacuuauuuggacacccccagaccaaaugauggaagcauaacagggccuugcgaaucugauggggacaaagggaguggaggcaucaagggaggauuuguucaucaaagaauggcauccaagauuggaaggugguacucucgaacgaugucuaaaacuaaaagaauggggaugggacuguauguaaaguaugauggagacccauggacugacagugaagcccuugcucuuaguggaguaaugguuucaauggaagaaccugguugguauuccuuuggcuucgaaauaaaagauaagaaaugugauguccccuguauugggauagaaaugguacaugauggugggaaaacgacuuggcacucagcagcaacagccauuuacuguuuaaugggcucaggacaacugcugugggacacugucacagguguugauauggcucuguaa

SEQ ID NO: 61753 - RNA, 1401 nt, Artificial Sequence
  derived and/or modified CDS sequence (wt) from neuraminidase__InfluenzaB__AGX23153
augcuaccuucaacuauacaaacguuaacccuauuucucacaucagggggaguguuauuaucacuauaugugucagcuucauugucauacuuacuauauucggauauauugcuaaaauuuucacaaacagaaauaacugcaccaauaaugccauuggauugugcaaacgcaucaaauguucaggcugugaaccguucugcaacaaaaggggugacacuucuucucccagaaccggaguggacauacccucguuuaucuugcccgggcucaaccuuucagaaagcacuccuaauuagcccccauagauucggagaaaccaaaggaaacucagcucccuugauaauaagggaaccuuuuauugcuuguggaccaacggaaugcaaacacuuugcucuaacccauuaugcagcucaaccagggggauacuacaauggaacaagagaagacagaaacaagcugaggcaucuaauuucagucaaauugggcaaaaucccaacaguagaaaacuccauuuuccacauggcagcuuggagcggguccgcaugccaugaugguaaagaauggacauauaucggaguugauggccccgacaguaaugcauugcucaaaauaaaauauggagaagcauauacugacacauaccauuccuaugcaaaaaacauccuaaggacacaagaaagugccugcaauugcaucgggggagauuguuaucuuaugauaacugauggcccggccucagggauuagugaaugcagauuccuuaagauucgagagggccgaauaauaaaagaaauauuuccaacaggaagaguaaaacauacugaggaaugcacaugcggauuugccagcaacaaaaccauagaaugugcuuguagagauaacaguuacacagcaaaaagacccuuugucaaauuaaauguggagacugauacagcggaaauaagauugaugugcacagagacuuauuuggacacccccagaccaaaugauggaagcauaacagggccuugcgaaucugauggggacaaagggaguggaggcaucaagggaggauuuguucaucaaagaauggcauccaagauuggaaggugguacucucgaacgaugucuaaaacuaaaagaauggggaugggacuguauguaaaguaugauggagacccauggacugacagugaagcccuugcucuuaguggaguaaugguuucaauggaagaaccugguugguauuccuuuggcuucgaaauaaaagauaagaaaugugauguccccuguauugggauagaaaugguacaugauggugggaaaacgacuuggcacucagcagcaacagccauuuacuguuuaaugggcucaggacaacugcugugggacacugucacagguguugauauggcucuguaa

SEQ ID NO: 61754 - RNA, 1401 nt, Artificial Sequence; identical to SEQ ID NO: 61744
  derived and/or modified CDS sequence (wt) from neuraminidase__InfluenzaB__AGX23164

SEQ ID NO: 61755 - RNA, 1401 nt, Artificial Sequence; identical to SEQ ID NO: 61744
  derived and/or modified CDS sequence (wt) from neuraminidase__InfluenzaB__AGX23175

SEQ ID NO: 61756 - RNA, 1401 nt, Artificial Sequence
  derived and/or modified CDS sequence (wt) from neuraminidase__InfluenzaB__AGX23186
augcuaccuucaacuacacaaacguuaacccuauuucucacaucagggggaguguuauuaucacuauaugugucagcuucauugucauacuuacuauauucggauauauugcuaaaauuuucacaaacagaaauaacugcaccaauaaugccauuggauugugcaaacgcaucaaauguucaggcugugaaccguucugcagcaaaaggggugacacuucuucucccagaaccggaguggacauacccucguuuaucuugcccgggcucaaccuuucagaaagcacuccuaauuagcccccauagauucggagaaaccaaaggaaacucagcucccuugauaauaagggaaccuuuuauugcuuguggaccaacggaaugcaaacacuuugcucuaacccauuaugcagcucaaccagggggauacuacaauggaacaagagaagacagaaacaagcugaggcaucuaauuucagucaaauugggcaaaaucccaacaguagaaaacuccauuuuccacauggcagcuuggagcggguccgcaugccaugaugguaaagaauggacauauaucggaguugauggccccgacaguaaugcauugcucaaaauaaaauauggagaagcauauacugacacauaccauuccuaugcaaaaaacauccugaggacacaagaaagugccugcaauugcaucgggggagauuguuaucuuaugauaacugauggcccagcuucagggauuagugaaugcagauuccuuaagauucgagagggccgaauaauaaaagaaauauuuccaacaggaagaguaaaacauacugaggaaugcacaugcggauuugccagcaacaaaaccauagaaugugcuuguagagauaacaguuacacagcaaaaagacccuuugucaaauuaaauguggagacugauacagcggaaauaagauugaugugcacagagacuuauuuggacacccccagaccaaaugauggaagcauaacagggccuugcgaaucugauggggacaaagggaguggaggcaucaagggaggauuuguucaucaaagaauggcauccaagauuggaaggugguacucucgaacgaugucuaaaacuaaaagaauggggaugggacuguauguaaaguaugauggagacccauggacugacagugaagcccuugcucuuaguggaguaaugguuucaauggaagaaccugguugguauuccuuuggcuucgaaauaaaagauaagaaaugugauguccccuguauugggauagaaaugguacaugauggugggaaaacgacuuggcacucagcagcaacagccauuuacuguuuaaugggcucaggacaacugcugugggacacugucacagguguugauauggcucuguaa

SEQ ID NO: 61757 - RNA, 1401 nt, Artificial Sequence
  derived and/or modified CDS sequence (wt) from neuraminidase__InfluenzaB__AGX23197
augcuaccuucaacuauacaaacguuaacccuauuucucacaucagggggaguguuauuaucacuauaugugucagcuucauugucauacuuacuauauucggauauauugcuaaaauuuucacaaacagaaauaacugcaccaauaaugccauuggauugugcaaacgcaucaaauguucaggcugugaaccguucugcagcaaaaggggugacacuucuucucccagaaccggaguggacauacccucguuuaucuugcccgggcucaaccuuucagaaagcacuccuaauuagcccccauagauucggggaaaccaaaggaaacucagcucccuugauaauaagggaaccuuuuauugcuuguggaccaacggaaugcaaacacuuugcucuaacccauuaugcagcucaaccagggggauacuacaauggaacaagagaagacagaaacaagcugaggcaucuaauuucagucaaauugggcaaaaucccaacaguagaaaacuccauuuuccacauggcagcuuggagcggguccgcaugccaugaugguaaagaauggacauauaucggaguugauggccccgacaguaaugcauugcucaaaauaaaauauggagaagcauauacugacacauaccauuccuaugcaaaaaacauccuaaggacacaagaaagugccugcaauugcaucgggggagauuguuaucuuaugauaacugauggcccagcuucagggauuagugaaugcagauuccuuaagauucgagagggccgaauaauaaaagaaauauuuccaacaggaagaguaaaacauacugaggaaugcacaugcggauuugccagcaacaaaaccauagaaugugcuuguagagauaacaguuacacagcaaaaagacccuuugucaaauuaaauguggagacugauacagcggaaauaagauugaugugcacagagacuuauuuggacacccccagaccaaaugauggaagcauaacagggccuugcgaaucugauggggacaaagggaguggaggcaucaagggaggauuuguucaucaaagaauggcauccaagauuggaaggugguacucucgaacgaugucuaaaacuaaaagaauggggaugggacuguauguaaaguaugauggagacccauggacugacagugaagcccuugcucuuaguggaguaaugguuucaauggaagaaccugguugguauuccuuuggcuucgaaauaaaagauaagaaaugugauguccccuguauugggauagaaaugguacaugauggugggaaaacgacuuggcacucagcagcaacagccauuuacuguuuaaugggcucaggacaacugcugugggacacugucacagguguugauauggcucuguaa

SEQ ID NO: 61758 - RNA, 1401 nt, Artificial Sequence; identical to SEQ ID NO: 61149
  derived and/or modified CDS sequence (wt) from neuraminidase__InfluenzaB__AGX23208

SEQ ID NO: 61759 - RNA, 1401 nt, Artificial Sequence; identical to SEQ ID NO: 60865
  derived and/or modified CDS sequence (wt) from neuraminidase__InfluenzaB__AGX23219

SEQ ID NO: 61760 - RNA, 1401 nt, Artificial Sequence
  derived and/or modified CDS sequence (wt) from neuraminidase__InfluenzaB__AGX23230
augcuaccuucaacuauacaaacguuaacccuauuucucacaucagggggaguguuauuaucacuauaugugucagcuucauugucauacuuacuauauucggauauauugcuaaaauuuucacaaacagaaauaacugcaccaauaaugccauuggauugugcaaacgcaucaaauguucaggcugugaaccguucugcagcaaaaggggugacacuucuucucccagaaccggaguggacauacccucguuuaucuugcccgggcucaaccuuucagaaagcacuccuaauuagcccccauagauucggagaaaccaaaggaaacucagcucccuugauaauaagggaaccuuuuauugcuuguggaccaacggaaugcaaacacuuugcucuaacccauuaugcagcucaaccaggggaauacuacaauggaacaagagaagacagaaacaagcugaggcaucuaauuucagucaaauugggcaaaaucccaacaguagaaaacuccauuuuccacauggcagcuuggagcggguccgcaugccaugaugguaaagaauggacauauaucggaguugauggccccgacaguaaugcauugcucaaaauaaaauauggagaagcuuauacugacacauaccauuccuaugcaaaaaacauccuaaggacacaagaaagugccugcaauugcaucgggggagauuguuaucuuaugauaacugauggcccaucuucagggauuagugaaugcagauuccuuaagauucgagagggccgaauaauaaaagaaauauuuccaacaggaagaguaaaacauacugaggaaugcacaugcggauuugccagcaacaaaaccauagaaugugcuuguagagauaacaguuacacagcaaaaagacccuuugucaaauuaaauguggagacugauacagcggaaauaagauugaugugcacagagacuuauuuggacacccccagaccaaaugauggaagcauaacagggccuugcgaaucugauggggacaaagggaguggaggcaucaagggaggauuuguucaucaaagaauggcauccaagauuggaaggugguacucucgaacgaugucuaaaacuaaaagaauggggaugggacuguauguaaaguaugauggagacccauggacugacagugaagcccuugcucuuaguggaguaaugguuucaauggaagaaccugguugguauuccuuuggcuucgaaauaaaagauaagaaaugugauguccccuguauugggauagaaaugguacaugauggugggaaaacgacuuggcacucagcagcaacagccauuuacuguuuaaugggcucaggacaacugcugugggacacugucacagguguugauauggcucuguaa

SEQ ID NO: 61761 - RNA, 1401 nt, Artificial Sequence
  derived and/or modified CDS sequence (wt) from neuraminidase__InfluenzaB__AGX23241
augcuaccuucaacuauacaaacguuaacccuauuucucacaucagggggaguguuauuaucacuauaugugucagcuucauugucauacuuacuauauucggauauauugcuaaaauuuucacaaacagaaauaacugcaccaauaaugccauuggauugugcaaacgcaucaaauguucaggcugugaaccguucugcaacaaaaggagugacacuucuucucccagaaccggaguggacauacccucguuuaucuugcccgggcucaaccuuucagaaagcacuccuaauuagcccccauagauucggagaaaccaaaggaaacucagcucccuugauaauaagggaaccuuuuauugcuuguggaccaacggaaugcaaacacuuugcucuaacccauuaugcagcucaaccagggggauacuacaauggaacaagagaagacagaaacaagcugaggcaucuaauuucagucaaauugggcaaaaucccaacaguagaaaacuccauuuuccacauggcagcuuggagcggguccgcaugccaugaugguaaagaauggacauauaucggaguugauggccccgacaguaaugcauugcucaaaauaaaauauggagaagcauauacugacacauaccauuccuaugcaaaaaacauccuaaggacacaagaaagugccugcaauugcaucgggggagauuguuaucuuaugauaacugauggcccagcuucagggauuagugaaugcagauuccuuaagauucgagagggccgaauaauaaaagaaauauuuccaacaggaagaguaaaacauacugaggaaugcacaugcggauuugccagcaacaaaaccauagaaugugcuuguagagauaacaguuacacagcaaaaagacccuuugucaaauuaaauguggagacugauacagcggaaauaagauugaugugcacagagacuuauuuggacacccccagaccaaaugauggaagcauaacagggccuugcgaaucugauggggacaaagggaguggaggcaucaagggaggauuuguucaucaaagaauggcauccaagauuggaaggugguacucucgaacgaugucuaaaacuaaaagaauggggaugggacuguauguaaaguaugauggagacccauggacugacagugaagcccuugcucuuaguggaguaaugguuucaauggaagaaccugguugguauuccuuuggcuucgaaauaaaagauaagaaaugugauguccccuguauugggauagaaaugguacaugauggugggaaaacgacuuggcacucagcagcaacagccauuuacuguuuaaugggcucaggacaacugcugugggacacugucacagguguugauauggcucuguaa

SEQ ID NO: 61762 - RNA, 1401 nt, Artificial Sequence; identical to SEQ ID NO: 61149
  derived and/or modified CDS sequence (wt) from neuraminidase__InfluenzaB__AGX23252

SEQ ID NO: 61763 - RNA, 1401 nt, Artificial Sequence; identical to SEQ ID NO: 60865
  derived and/or modified CDS sequence (wt) from neuraminidase__InfluenzaB__AGX23263

SEQ ID NO: 61764 - RNA, 1401 nt, Artificial Sequence; identical to SEQ ID NO: 60865
  derived and/or modified CDS sequence (wt) from neuraminidase__InfluenzaB__AGX23274

SEQ ID NO: 61765 - RNA, 1401 nt, Artificial Sequence
  derived and/or modified CDS sequence (wt) from neuraminidase__InfluenzaB__AGX23285
augcuaccuucaacuauacaaacguuaacccuauuucucacaucagggggaguguuauuaucacuauaugugucagcuucauugucauacuuacuauauucggauauauugcuaaaauuuucacaaacagaaauaacugcaccaauaaugccauuggauugugcaaacgcaucaaauguucaggcugugaaccguucugcaacaaaaggagugacacuucuucucccagaaccggaguggacauacccucguuuaucuugcccgggcucaaccuuucagaaagcacuccuaauuagcccccauagauucggagaaaccaaaggaaacucagcucccuugauaauaagggaaccuuuuauugcuuguggaccaacggaaugcaaacacuuugcucuaacccauuaugcagcucaaccagggggauacuacaauggaacaagagaagacagaaacaagcugaggcaucuaauuucagucaaauugggcaaaaucccaacaguagaaaacuccauuuuccacauggcagcuuggagcggguccgcaugccaugaugguaaagaauggacauauaucggaguugauggccccgacagcaaugcauugcucaaaauaaaauauggagaagcauauacugacacauaccauuccuaugcaaaaaacauccuaaggacacaagaaagugccugcaauugcaucgggggagauuguuaucuuaugauaacugauggcccagcuucagggauuagugaaugcagauuccuuaagauucgagagggccgaauaauaaaagaaauauuuccaacaggaagaguaaaacauacugaggaaugcacaugcggauuugccagcaacaaaaccauagaaugugcuuguagagauaacaguuacacagcaaaaagacccuuugucaaauuaaauguggagacugauacagcggaaauaagauugaugugcacagagacuuauuuggacacccccagaccaaaugauggaagcauaacagggccuugcgaaucugauggggacaaagggaguggaggcaucaagggaggauuuguucaucaaagaauggcauccaagauuggaaggugguacucucgaacgaugucuaaaacuaaaagaauggggaugggacuguauguaaaguaugauggagacccauggacugacagugaagcccuugcucuuaguggaguaaugguuucaauggaagaaccugguugguauuccuuuggcuucgaaauaaaagauaagaaaugugauguccccuguauugggauagaaaugguacaugauggugggaaaacgacuuggcacucagcagcaacagccauuuacuguuuaaugggcucaggacaacugcugugggacacugucacagguguugauauggcucuguaa

SEQ ID NO: 61766 - RNA, 1401 nt, Artificial Sequence
  derived and/or modified CDS sequence (wt) from neuraminidase__InfluenzaB__AGX23296
augcuaccuucaacuauacaaacguuaacccuauuucucacaucagggggaguguuauuaucacuauaugugucagcuucauugucauacuuacuauauucggauauauugcuaaaauuuucacaaacagaaauaacugcaccaauaaugccauuggauugugcaaacgcaucaaauguucaggcugugaaccguucugcagcaaaaggggugacacuucuucucccagaaccggaguggacauacccucguuuaucuugcccgggcucaaccuuucagaaagcacuccuaauuagcccccauagauucggagaaaccaaaggaaacucagcucccuugauaauaagggaaccuuuuauugcuuguggaccaacggaaugcaaacacuuugcucuaacccauuaugcagcucaaccagggggauacuacaauggaacaagagaagacagaaacaagcugaggcaucuaauuucagucaaauugggcaaaaucccaacaguagaaaacuccauuuuccacauggcagcuuggagcggguccgcaugccaugaugguaaagaauggacauauaucggaguugauggccccgacaguaaugcauugcucaaaauaaaauauggagaagcauauacugacacauaccauuccuaugcaaaaaacauacuaaggacacaagaaagugccugcaauugcaucgggggagauuguuaucuuaugauaacugauggcccagcuucagggauuagugaaugcagauuccuuaagauucgagagggccgaauaauaaaagaaauauuuccaacaggaagaguaaaacauacugaggaaugcacaugcggauuugccagcaacaaaaccauagaaugugcuuguagagauaacaguuacacagcaaaaagacccuuugucaaauuaaauguggagacugauacagcggaaauaagauuaaugugcacagagacuuauuuggacacccccagaccaaaugauggaagcauaacagggccuugcgaaucugauggggacaaagggaguggaggcaucaagggaggauuuguucaucaaagaauggcauccaagauuggaaggugguacucucgaacgaugucuaaaacuaaaagaauggggaugggacuguauguaaaguaugauggagacccauggacugacagugaagcccuugcucuuaguggaguaaugguuucaauggaagaaccugguugguauuccuuuggcuucgaaauaaaagauaagaaaugugauguccccuguauugggauagaaaugguacaugauggugggaaaacgacuuggcacucagcagcaacagccauuuacuguuuaaugggcucaggacaacugcugugggacacugucacagguguugauauggcucuguaa

SEQ ID NO: 61767 - RNA, 1401 nt, Artificial Sequence
  derived and/or modified CDS sequence (wt) from neuraminidase__InfluenzaB__AGX23307
augcuaccuucaacuauacaaacguuaacccuauuucucacaucagggggaguguuauuaucacuauaugugucagcuucauugucauacuuacuauauucggauauauugcuaaaauuuucacaaacagaaauaacugcaccaauaaugccauuggauugugcaaacgcaucaaauguucaggcugugaaccguucugcagcaaaaggggugacacuucuucucccagaaccggaguggacauacccucguuuaucuugcccgggcucaaccuuucagaaagcacuccuaauuagcccccauagauucggagaaaccaaaggaaacucagcucccuugauaauaagggaaccuuuuauugcuuguggaccaacggaaugcaaacacuuugcucuaacccauuaugcagcucaaccagggggauacuacaauggaacaagagaagacagaaacaagcugaggcaucuaauuucagucaaauugggcaaaaucccaacaguagaaaacuccauuuuccacauggcagcuuggagcggguccgcaugccaugaugguaaagaauggacauaugucggaguugauggccccgacaguaaugcauugcucaaaauaaaauauggagaagcauauacugacacauaccauuccuaugcaaaaaacauccuaaggacacaagaaagugccugcaauugcaucgggggagauuguuaucuuaugauaacugauggcccagcuucagggauuagugaaugcagauuccuuaagauucgagagggccgaauaauaaaagaaauauuuccaacaggaagaguaaaacauacugaggaaugcacaugcggauuugccagcaacaaaaccauagaaugugcuuguagagauaacaguuacacagcaaaaagacccuuugucaaauuaaauguggagacugauacagcggaaauaagauugaugugcacagagacuuauuuggacacccccagaccaaaugauggaagcauaacagggccuugcgaaucugauggggacaaagggaguggaggcaucaagggaggauuuguucaucaaagaauggcauccaagauuggaaggugguacucucgaacgaugucuaaaacuaaaagaauggggaugggacuguauguaaaguaugauggagacccauggacugacagugaagcccuugcucuuaguggaguaauggucucaauggaagaacccgguugguauuccuuuggcuucgagauaaaagauaagaaaugugauguccccuguauugggauagaaaugguacaugauggugggaaaacgacuuggcacucagcagcaacagccauuuacuguuuaaugggcucaggacaacugcugugggacacugucacagguguugauauggcucuguaa

SEQ ID NO: 61768 - RNA, 1401 nt, Artificial Sequence
  derived and/or modified CDS sequence (wt) from neuraminidase__InfluenzaB__AGX23318
augcuaccuucaacuauacaaacguuaacccuauuucucacaucagggggaguguuauuaucacuauaugugucagcuucauugucauacuuacuauauucggauauauugcuaaaauuuucacaaacagaaauaacugcaccaauaaugccauuggauugugcaaacgcaucaaauguucaggcugugaaccguucugcagcaaaaggggugacacuucuucucccagaaccggaguggacauacccucguuuaucuugcccgggcucaaccuuucagaaagcacuccuaauuagcccccauagauucggagaaaccaaaggaaacucagcucccuugauaauaagggaaccuuuuauugcuuguggaccaacggaaugcaaacacuuugcucuaacccauuaugcagcucaaccagggggauacuacaauggaacaagagaagacagaaacaagcugaggcaucuaauuucagucaaauugggcaaaaucccaacaguagaaaacuccauuuuccacauggcagcuuggagcggguccgcaugccaugaugguaaagaauggacauaugucggaguugauggccccgacaguaaugcauugcucaaaauaaaauauggggaagcauauacugacacauaccauuccuaugcaaaaaacauccuaaggacacaagaaagugccugcaauugcaucgggggagauuguuaucuuaugauaacugauggcccagcuucagggauuagugaaugcagauuccuuaagauucgagagggccgaauaauaaaagaaauauuuccaacaggaagaguaaaacauacugaggaaugcacaugcggauuugccagcaacaaaaccauagaaugugcuuguagagauaacaguuacacagcaaaaagacccuuugucaaauuaaauguggagacugauacagcggaaauaagauugaugugcacagagacuuauuuggacacccccagaccaaaugauggaagcauaacagggccuugcgaaucugauggggacaaagggaguggaggcaucaagggaggauuuguucaucaaagaauggcauccaagauuggaaggugguacucucgaacgaugucuaaaacuaaaagaauggggaugggacuguauguaaaguaugauggagacccauggacugacagugaagcccuugcucuuaguggaguaauggucucaauggaagaacccgguugguauuccuuuggcuucgaaauaaaagauaagaaaugugauguccccuguauugggauagaaaugguacaugauggugggaaaacgacuuggcacucagcagcaacagccauuuacuguuuaaugggcucaggacaacugcugugggacacugucacagguguugauauggcucuguaa

SEQ ID NO: 61769 - RNA, 1401 nt, Artificial Sequence
  derived and/or modified CDS sequence (wt) from neuraminidase__InfluenzaB__AGX23329
augcuaccuucaacuauacaaacguuaacccuauuucucacaucagggggaguguuauuaucacuauaugugucagcuucauugucauacuuacuauauucggauauauugcuaaaauuuucacaaacagaaauaacugcaccaauaaugccauuggauugugcaaacgcaucaaauguucaggcugugaaccguucugcagcaaaaggggugacacuucuucucccagaaccggaguggacauacccucguuuaucuugcccgggcucaaccuuucagaaagcacuccuaauuagcccccauagauucggagaaaccaaaggaaacucagcucccuugauaauaagggaaccuuuuauugcuuguggaccaacggaaugcaaacacuuugcucuaacccauuaugcagcucaaccagggggauacuacaauggaacaagagaagacagaaacaagcugaggcaucuaauuucagucaaauugggcaaaaucccaacaguagaaaacuccauuuuccacauggcagcuuggagcggguccgcaugccaugaugguaaagaauggacauaugucggaguugauggccccgacaguaaugcauugcucaaaauaaaauauggagaagcauauacugacacauaccauuccuaugcaaaaaacauccuaaggacacaagaaagugccugcaauugcaucgggggagauuguuaucuuaugauaacugauggcccagcuucagggauuagugaaugcagauuccuuaagauucgagagggccgaauaauaaaagaaauauuuccaacaggaagaguaaaacauacugaggaaugcacaugcggauuugccagcaacaaaaccauagaaugugcuuguagagauaacaguuacacagcaaaaagacccuuugucaaauuaaauguggagacugauacagcggaaauaagauugaugugcacagagacuuauuuggacacccccagaccaaaugauggaagcauaacagggccuugcgaaucugauggggacaaagggaguggaggcaucaagggaggauuuguucaucaaagaauggcauccaagauuggaaggugguacucucgaacgaugucuaaaacuaaaagaauggggaugggacuguauguaaaguaugauggagacccauggacugacagugaagcccuugcucuuaguggaguaauggucucaauggaagaacccgguugguauuccuuuggcuucgaaauaaaagauaagaaaugugauguccccuguauugggauagaaaugguacaugauggugggaaaacgacuuggcacucagcagcaacagccauuuacuguuuaaugggcucaggacaacugcugugggacacugucacagguguugauauggcucuguaa

SEQ ID NO: 61770 - RNA, 1401 nt, Artificial Sequence; identical to SEQ ID NO: 61769
  derived and/or modified CDS sequence (wt) from neuraminidase__InfluenzaB__AGX23340

SEQ ID NO: 61771 - RNA, 1401 nt, Artificial Sequence; identical to SEQ ID NO: 61768
  derived and/or modified CDS sequence (wt) from neuraminidase__InfluenzaB__AGX23351

SEQ ID NO: 61772 - RNA, 1401 nt, Artificial Sequence; identical to SEQ ID NO: 61767
  derived and/or modified CDS sequence (wt) from neuraminidase__InfluenzaB__AGX23362

SEQ ID NO: 61773 - RNA, 1401 nt, Artificial Sequence; identical to SEQ ID NO: 61769
  derived and/or modified CDS sequence (wt) from neuraminidase__InfluenzaB__AGX23373

SEQ ID NO: 61774 - RNA, 1401 nt, Artificial Sequence
  derived and/or modified CDS sequence (wt) from neuraminidase__InfluenzaB__AGX23384
augcuaccuucaacuauacaaacguuaacccuauuucucacaucagggggaguguuauuaucacuauaugugucagcuucauugucauacuuacuauauucggauauauugcuaaaauuuucacaaacagaaauaacugcaccaauaaugccauuggauugugcaaacgcaucaaauguucaggcugugaaccguucugcagcaaaaggggugacacuucuucucccagaaccggaguggacauacccucguuuaucuugcccgggcucaaccuuucagaaagcacuccuaauuagcccccauagauucggagaaaccaaaggaaacucagcucccuugauaauaagggaaccuuuuauugcuuguggaccaacggaaugcaaacacuuugcucuaacccauuaugcagcucaaccagggggauacuacaauggaacaagagaagacagaaacaagcugaggcaucuaauuucagucaaauugggcaaaaucccaacaguagaaaacuccauuuuccacauggcagcuuggagcggguccgcaugccaugaugguaaagaauggacauaugucggaguugauggccccgacaguaaugcauugcucaaaauaaaauauggggaagcauauacugacacauaccauuccuaugcaaaaaacauacuaaggacacaagaaagugccugcaauugcaucgggggagauuguuaucuuaugauaacugauggcccagcuucagggauuagugaaugcagauuccuuaagauucgagagggccgaauaauaaaagaaauauuuccaacaggaagaguaaaacauacugaggaaugcacaugcggauuugccagcaacaaaaccauagaaugugcuuguagagauaacaguuacacagcaaaaagacccuuugucaaauuaaauguggagacugauacagcggaaauaagauugaugugcacagagacuuauuuggacacccccagaccaaaugauggaagcauaacagggccuugcgaaucugauggggacaaagggaguggaggcaucaagggaggauuuguucaucaaagaauggcauccaagauuggaaggugguacucucgaacgaugucuaaaacuaaaagaauggggaugggacuguauguaaaguaugauggagacccauggacugacagugaagcccuugcucuuaguggaguaauggucucaauggaagaacccgguugguauuccuuuggcuucgaaauaaaagauaagaaaugugauguccccuguauugggauagaaaugguacaugauggugggaaaacgacuuggcacucagcagcaacagccauuuacuguuuaaugggcucaggacaacugcugugggacacugucacagguguugauauggcucuguaa

SEQ ID NO: 61775 - RNA, 1401 nt, Artificial Sequence
  derived and/or modified CDS sequence (wt) from neuraminidase__InfluenzaB__AGX23395
augcuaccuucaacuauacaaacguuaacccuauuucucacaucagggggaguguuauuaucacuauaugugucagcuucauugucauacuuacuauauucggauauauugcuaaaauuuucacaaacagaaauaacugcaccaauaaugccauuggauugugcaaacgcaucaaauguucaggcugugaaccguucugcagcaaaaggggugacacuucuucucccagaaccggaguggacauacccucguuuaucuugcccgggcucaaccuuucagaaagcacuccuaauuagcccccauagauucggagaaaccaaaggaaacucagcucccuugauaauaagggaaccuuuuauugcuuguggaccaacggaaugcaaacacuuugcucuaacccauuaugcagcucaaccagggggauacuacaauggaacaagagaagacagaaacaagcugaggcaucuaauuucagucaaauugggcaaaaucccaacaguagaaaacuccauuuuccacauggcagcuuggagcggguccgcaugccaugaugguaaagaauggacauaugucggaguugauggccccgacaguaaugcauugcucaaaauaaaauauggagaagcauauacugacacauaccauuccuaugcaaaaaacauccuaaggacacaagaaagugccugcaauugcaucgggggagauuguuaucuuaugauaacugauggcccagcuucagggauuagugaaugcagauuccuuaagauucgagagggccgaauaauaaaagaaauauuuccaacaggaagaguaaagcauacugaggaaugcacaugcggauuugccagcaacaaaaccauagaaugugcuuguagagauaacaguuacacagcaaaaagacccuuugucaaauuaaauguggagacugauacagcggaaauaagauugaugugcacagagacuuauuuggacacccccagaccaaaugauggaagcauaacagggccuugcgaaucugauggggacaaagggaguggaggcaucaagggaggauuuguucaucaaagaauggcauccaagauuggaaggugguacucucgaacgaugucuaaaacuaaaagaauggggaugggacuguauguaaaguaugauggagacccauggacugacagugaagcccuugcucuuaguggaguaaugguuucaauggaagaaccugguugguauuccuuuggcuucgaaauaaaagauaagaaaugugauguccccuguauugggauagaaaugguacaugauggugggaaaacgacuuggcacucagcagcaacagccauuuacuguuuaaugggcucaggacaacugcuguggaacacugucacagguguugauauggcucuguaa

SEQ ID NO: 61776 - RNA, 1401 nt, Artificial Sequence
  derived and/or modified CDS sequence (wt) from neuraminidase__InfluenzaB__AGX23417
augcuaccuucaacuauacaaacguuaacccuauuucucacaucagggggaguguuauuaucacuauaugugucagcuucauugucauacuuacuauauucggauauauugcuaaaauuuucacaaacagaaauaacugcaccaauaaugccauuggauugugcaaacgcaucaaauguucaggcugugaaccguucugcagcaaaaggggugacauuucuucucccagaaccggaguggacauacccucguuuaucuugcccgggcucaaccuuucagaaagcacuccuaauuagcccccauagauucggagaaaccaaaggaaacucagcucccuugauaauaagggaaccuuuuauugcuuguggaccaacggaaugcaaacacuuugcucuaacccauuaugcagcucaaccagggggauacuacaauggaacaagagaagacagaaacaagcugaggcaucuaauuucagucaaauugggcaaaaucccaacaguagaaaacuccauuuuccacauggcagcuuggagcggguccgcaugccaugaugguaaagaauggacauauaucggaguugauggccccgacaguaaugcauugcucaaaauaaaauauggagaagcauauacugacacauaccauuccuaugcaaaaaacauccuaaggacacaagaaagugccugcaauugcaucgggggagauuguuaucuuaugauaacugauggcccagcuucaggaauuagugaaugcagauuccuuaagauucgagagggccgaauaauaaaagaaauauuuccaacaggaagaguaaaacauacugaggaaugcacaugcggauuugccagcaacaaaaccauagaaugugcuuguagagauaacaguuacacagcaaaaagacccuuugucaaauuaaauguggagacugauacagcggaaauaagauugaugugcacagagacuuauuuggacacccccagaccaaaugauggaagcauaacagggccuugcgaaucugauggggacaaagggaguggaggcaucaagggaggauuuguucaucaaagaauggcauccaagauuggaaggugguacucucgaacgaugucuaaaacuaaaagaauggggaugggacuguauguaaaguaugauggagacccauggacugacagugaagcccuugcucuuaguggaguaaugguuucaauggaagaaccugguugguacuccuuuggcuucgaaauaaaagauaagaaaugugauguccccuguauugggauagaaaugguacaugauggugggaaaacgacuuggcacucagcagcaacagccauuuacuguuuaaugggcucaggacaacugcugugggacacugucacagguguugauauggcucuguaa

SEQ ID NO: 61777 - RNA, 1401 nt, Artificial Sequence
  derived and/or modified CDS sequence (wt) from neuraminidase__InfluenzaB__AGX23428
augcuaccuucaacuauacaaacguuaacccuauuucucacaucagggggaguguuauuaucacuauaugugucagcuucauugucauacuuacuauauucggauauauugcuaaaauuuucacaaacagaaauaacugcaccaauaaugccauuggauugugcaaacgcaucaaauguucaggcugugaaccguucugcagcaaaaggggugacauuucuucucccagaaccggaauggacauacccucguuuaucuugcccgggcucaaccuuucagaaagcacuccuaauuagcccccauagauucggagaaaccaaaggaaacucagcucccuugauaauaagggaaccuuuuauugcuuguggaccaacggaaugcaaacacuuugcucuaacccauuaugcagcucaaccagggggauacuacaauggaacaagagaagacagaaacaagcugaggcaucuaauuucagucaaauugggcaaaaucccaacaguagaaaacuccauuuuccacauggcagcuuggagcggguccgcaugccaugaugguaaagaauggacauauaucggaguugauggccccgacaguaaugcauugcucaaaauaaaauauggagaagcauauacugacacauaccauuccuaugcaaaaaacauccuaaggacacaagaaagugccugcaauugcaucgggggagauuguuaucuuaugauaacugauggcccagcuucaggaauuagugaaugcagauuccuuaagauucgagagggccgaauaauaaaagaaauauuuccaacaggaagaguaaaacauacugaggaaugcacaugcggauuugccagcaacaaaaccauagaaugugcuuguagagauaacaguuacacagcaaaaagacccuuugucaaauuaaauguggagacugauacagcggaaauaagauugaugugcacagagacuuauuuggacacccccagaccaaaugauggaagcauaacagggccuugcgaaucugauggggacaaagggaguggaggcaucaagggaggauuuguucaucaaagaauggcauccaagauuggaaggugguacucucgaacgaugucuaaaacuaaaagaauggggaugggacuguauguaaaguaugauggagacccauggacugacagugaagcccuugcucuuaguggaguaaugguuucaauggaagaaccugguugguacuccuuuggcuucgaaauaaaagauaagaaaugugauguccccuguauugggauagaaaugguacaugauggugggaaaacgacuuggcacucagcagcaacagccauuuacuguuuaaugggcucaggacaacugcugugggacacugucacagguguugauauggcucuguaa

SEQ ID NO: 61778 - RNA, 1401 nt, Artificial Sequence
  derived and/or modified CDS sequence (wt) from neuraminidase__InfluenzaB__AGX23450
augcuaccuucaacuauacaaacguuaacccuauuucucacaucagggggaguguuauuaucacuauaugugucagcuucauugucauacuuacuauauucggauauauugcuaaaauuuucacaaacagaaauaacugcaccaauaaugccauuggauugugcaaacgcaucaaauguucaggcugugaaccguucugcagcaaaagggguaacacuucuucucccagaaccggaguggacauacccucguuuaucuugcccgggcucaaccuuucagaaagcacuccuaauuagcccccauagauucggagaaaccaaaggaaacucagcucccuugauaauaagggaaccuuuuauugccuguggaccaacggaaugcaaacacuuugcucuaacccauuaugcagcucaaccagggggauacuacaauggaacaagagaagacagaaacaagcugaggcaucuaauuucagucaaauugggcaaaaucccaacaguagaaaacuccauuuuccacauggcagcuuggagcggguccgcaugccaugaugguaaagaauggacauauaucggaguugauggccccgacaguaaugcauugcucaaaauaaaauauggagaagcauauacugacacauaccauuccuaugcaaaaaacauccuaaggacacaagaaagugccugcaauugcaucgggggagauuguuaucuuaugauaacugauggcccagcuucagggguuagugaaugcagauuccuuaagauucgagagggcagaauaauaaaagaaauauuuccaacaggaagaguaaaacauacugaggaaugcacaugcggauuugccagcaacaaaaccauagaaugugcuuguagagauaacaguuacacagcaaaaagacccuuugucaaauuaaauguggagacugauacagcggaaauaagauugaugugcacagagacuuauuuggacacccccagaccaaaugauggaagcauaacagggccuugcgaaucugauggggacaaagggaguggaggcaucaagggaggauuuguucaucaaagaauggcauccaagauuggaagaugguacucucgaacgaugucuaaaacuaaaagaauggggaugggacuguauguaaaguaugauggagacccauggacugacagugaagcccuugcucuuaguggaguaaugguuucaauggaagaaccugguugguauuccuuuggcuucgaaauaaaagauaagaaaugugauguccccuguauugggauagaaaugguacaugauggugggaaaacgacuuggcacucagcagcaacagccauuuauuguuuaaugggcucaggacaacugcugugggacacugucacagguguugauauggcucuguaa

SEQ ID NO: 61779 - RNA, 1401 nt, Artificial Sequence
  derived and/or modified CDS sequence (wt) from neuraminidase__InfluenzaB__AGX23461
augcuaccuucaacuauacaaacguuaaccuuauuucucacaucagggggaguguuauuaucacuauaugugucagcuucauugucauacuuacuauauucggauauauugcuaaaauuuucacgaacagaaauaacugcaccaauaaugccauuggauugugcaaacgcaucaaauauucaggcugugaaccguucugcaacaaaaggggugacacuucuucucccagaaccggaguggacguacccucguuuaucuugcccgggcucaaccuuucagaaagcacuccuaauuagcccccauagauucggagaaaccaaaggaaacucagcucccuugauaauaagggaaccuuuuauugcuuguggaccaaaggaaugcaaacauuuugcucuaacccauuaugcagcucaaccagggggauacuacaauggaacaagagaagacagaaacaagcugaggcaucuaauuucagucaaauugggcaaaaucccaacaguagaaaacucuauuuuccacauggcagcuuggagcggguccgcaugccaugaugguagagaauggacuuauaucggaguugauggccccgacaguaaugcauugcucaaaauaaaauauggagaagcauauacugacacauaccauuccuaugcaaaaaacauccuaaggacacaagaaagugccugcaauugcaucgggggagauuguuaucuuaugauaacugauggcccagcuucagggauuagugaaugcagauuccuuaagauucgagagggccgaauaauaaaagaaauauuuccaacaggaagaguaaaacauacugaggaaugcacaugcggauuugccagcaacaaaaccauagaaugugccuguagagauaacaguuacacagcaaaaagacccuuugucaaauuaaauguggagacugauacagcggaaauaagauugaugugcacagagacuuauuuggacacccccagaccaaaugauggaagcauaacagggccuugcgaaucuaauggggacaaagggaguggaggcaucaagggaggauuuguucaccaaagaauggcauccaagauuggaaggugguacucucgaacgaugucuaaaacuaaaagaauggggaugggacuguauguaaaguaugauggagacccauggacugacagugaagcccuugcucuuaguggaguaaugguuucaauagaagaaccugguugguauuccuuuggcuucgaaauaaaagauaagaaaugugauguccccuguauugggauagaaaugguacaugauggugggaaaacgacuuggcacucagcagcaacagccauuuacuguuuaaugggcucaggacaacugcugugggacacugucacagguguugauauggcucuguaa

SEQ ID NO: 61780 - RNA, 1401 nt, Artificial Sequence
  derived and/or modified CDS sequence (wt) from neuraminidase__InfluenzaB__AGX23472
augcuaccuucaacuauacaaacguuaacccuauuucucacaucagggggaguguuauuaucacuauaugugucagcuucauugucauacuuacuauauucggauauauugcuaaaauuuucacaaacagaaauaacugcaccaauaaugccauuggauugugcaaacgcaucaaauguucaggcugugaaccguucugcagcaaaaggggugacacuucuucucccagaaccggaguggacauacccucguuuaucuugcccgggcucaaccuuucagaaagcacuccuaauuagcccccauagauucggagaaaccaaaggaaacucagcucccuugauaauaagggaaccuuuuauugcuuguggaccaacggaaugcaaacacuuugcucuaacccauuaugcagcucaaccagggggauacuacaauggaacaagagaagacagaaacaagcugaggcaucuaauuucagucaaauugggcaaaaucccaacaguagaaaacuccauuuuccacauggcagcuuggagcggguccgcaugccaugaugguaaagaauggacauauaucggaguugauggccccgacaguaaugcauugcucaaaauaaaauauggagaagcauauacugacacauaccauuccuaugcaaaaaacauccuaaggacacaagaaagugccugcaauugcaucgggggagauuguuaucuuaugauaacugauggcccagcuucagggguuagugaaugcagauuccuuaagauucgagagggcagaauaauaaaagaaauauuuccaacaggaagaguaaaacauacugaggaaugcacaugcggauuugccagcaacaaaaccauagaaugugcuuguagagauaacaguuacacagcaaaaagacccuuugucaaauuaaauguggagacugauacagcggaaauaagauugaugugcacagagacuuauuuggacacccccagaccaaaugauggaagcauaacagggccuugcgaaucugauggggacaaagggaguggaggcaucaagggaggauuuguucaucaaagaauggcauccaagauuggaaggugguacucucgaacgaugucuaaaacuaaaagaauggggaugggacuguauguaaaguaugauggagacccauggacugacagugaagcccuugcucuuaguggaguaaugguuucaauggaagaaccugguugguauuccuuuggcuucgaaauaaaagauaagaaaugugauguccccuguauugggauagaaaugguacaugauggugggaaaacgacuuggcacucagcagcaacagccauuuauuguuuaaugggcucaggacaacugcugugggacacugucacagguguugauauggcucuguaa

SEQ ID NO: 61781 - RNA, 1401 nt, Artificial Sequence
  derived and/or modified CDS sequence (wt) from neuraminidase__InfluenzaB__AGX23483
augcuaccuucaacuauacaaacguuaacccuauuucucacaucagggggaguguuauuaucacuauaugugucagcuucauugucauacuuacuauauucggauauauugcuaaaauuuucacaaacagaaauaacugcaccaauaaugccauuggauugugcaaacgcaucaaauguucaggcugugaaccguucugcagcaaaaggggugacacuucuucucccagaaccggaguggacauacccucguuuaucuugcccgggcucaaccuuucagaaagcacuccuaauuagcccccauagauucggagaaaccaaaggaaacucagcucccuugauaauaagggaaccuuuuauugcuuguggaccaacggaaugcaaacacuuugcucuaacccauuaugcagcucaaccagggggauacuacaauggaacaagagaagacagaaacaagcugaggcaucuaauuucagucaaauugggcaaaaucccaacaguagaaaacuccauuuuccacauggcagcuuggagcggguccgcaugccaugaugguaaagaauggacauauaucggaguugauggccccgacaguaaugcauugcucaaaauaaaauauggagaagcauauacugacacauaccauuccuaugcaaaaaacauccuaaggacacaagaaagugccugcaauugcaucgggggagauuguuaucuuaugauaacugauggcccagcuucagggauuagugaaugcagauuccuuaagauucgagagggccgaauaauaaaagaaauauuuccaacaggaagaguaaaacauacugaggaaugcacaugcggauuugccagcaacaaaaccauagaaugugcuuguagagauaacaguuacacagcaaaaagacccuuugucaaauuaaauguggagaccgauacagcggaaauaagauugaugugcacagagacuuauuuggacacccccagaccaaaugauggaagcauaacagggccuugcgaaucugauggggacaaagggaguggaggcaucaagggaggauuuguucaucaaagaauggcauccaagauuggaaggugguacucucgaacgaugucuaaaacuaaaagaauggggaugggacuguauguaaaguaugauggagacccauggacugacagugaagcccuugcucuuaguggaguaaugguuucaauggaagaaccugguugguauuccuuuggcuucgaaauaaaagauaagaaaugugauguccccuguauugggauagaaaugguacaugauggugggaaaacgacuuggcacucagcagcaacagccauuuacuguuuaaugggcucaggacaacugcugugggacacugucacagguguugauauggcucuguaa

SEQ ID NO: 61782 - RNA, 1401 nt, Artificial Sequence
  derived and/or modified CDS sequence (wt) from neuraminidase__InfluenzaB__AGX23494
augcuaccuucaacuauacaaacguuaacccuauuucucacaucagggggaguguuauuaucacuauaugugucagcuucauugucauacuuacuauauucggauauauugcuaaaauuuucacaaacagaaauaacugcaccaauaaugccacuggauugugcaaacgcaucaaauguucaggcugugaaccguucugcagcaaaaggggugacacuucuucucccagaaccggaguggacauacccucguuuaucuugcccgggcucaaccuuucagaaagcacuccuaauuagcccccauagauucggagaaaccaaaggaaacucagcucccuuaauaauaagggaaccuuuuauugcuuguggaccaacggaaugcaaacacuuugcucuaacccauuaugcagcccaaccagggggauacuacaauggaacaagagaagacagaaacaagcugaggcaucuaauuucagucaaauugggcaaaaucccaacaguagaaaacuccauuuuccacauggcagcuuggagcggguccgcaugccaugaugguaaagaauggacauaugucggaguugauggccccgacaguaaugcauugcucaaaauaaaauauggagaagcauauacugacacauaccauuccuaugcaaaaaacauccuaaggacacaagaaagugccugcaauugcaucgggggagauuguuaucuuaugauaacugauggcccagcuucagggauuagugaaugcagauuccuuaagauucgagagggccgaauaauaaaagaaauauuuccaacaggaagaguaaaacauacugaggaaugcacaugcggauuugccagcaacaaaaccauagaaugugcuuguagagauaacaguuacacagcaaaaagacccuuugucaaauuaaauguggagacugauacagcggaaauaagauugaugugcacagagacuuauuuggacacccccagaccaaaugauggaagcauaacagggccuugcggaucugauggggacaaagggaguggaggcaucaagggaggauuuguucaucaaagaauggcauccaagauuggaaggugguacucccgaacgaugucuaaaacuaaaagaauggggaugggacuguauguaaaguaugauggagacccauggacugacagugaagcccuugcucuuaguggaguaaugguuucaauggacgaaccugguugguauuccuuuggcuucgaaauaaaagauaagaaaugugauguccccuguauugggauagaaaugguacaugauggugggaaaacgacuuggcacucagcagcaacagccauuuacuguuuaaugggcucaggacaacugcugugggacacugucacagguguugauauggcucuguaa

SEQ ID NO: 61783 - RNA, 1401 nt, Artificial Sequence
  derived and/or modified CDS sequence (wt) from neuraminidase__InfluenzaB__AGX23505
augcuaccuucaacuauacaaacguuaacccuauuucucacaucagggggaguguuauuaucacuauaugugucagcuucauugucauacuuacuauauucggauauauugcuaaaauuuucacaaacagaaauaacugcaccaauaaugccauuggauugugcaaacgcaucaaauguucaggcugugaaccguucugcagcaaaaggggugacacuucuucucccagaaccggaguggacauacccucguuuaucuugcccgggcucaaccuuucagaaagcacuccuaauuagcccccauagauucggagaaaccaaaggaaacucagcucccuugauaauaagggaaccuuuuauugcuuguggaccaacggaaugcaaacacuuugcucuaacccauuaugcagcucaaccagggggauacuacaauggaacaagagaagacagaaacaagcugaggcaucuaauuucagucaaauugggcaaaaucccaacaguagaaaacuccauuuuccauauggcagcuuggagcggguccgcaugccaugaugguaaagaauggacauauaucggaguugauggccccgacaauaaugcauuacucaaaauaaaauauggagaagcauauacugacacauaccauuccuaugcaaaaaacauccuaaggacacaagaaagugccugcaauugcaucgggggagauuguuaucuuaugauaacugauggcccagcuucagggauuagugaaugcagauuccuuaagauucgagagggccgaauaauaaaagaaauauuuccaacaggaagaguaaaacauacugaggaaugcacaugcggauuugccagcaacaaaaccauagaaugugcuuguagagauaacaguuacacagcaaaaagacccuuugucaaauuaaauguggagacugauacagcggaaauaagauugaugugcacagagacuuauuuggacacccccagaccaaaugauggaagcauaacagggccuugcgaaucugauggggacaaagggaguggaggcaucaagggaggauuuguucaucaaagaauggcauccaagauuggaaggugguacucucgaacgaugucuaaaacuaaaagaauggggaugggacuguauguaaaguaugauggagacccauggacugacagugaagcccuugcucuuaguggaguaaugguuucgauggaagaaccugguugguauuccuuuggcuucgaaauaaaagauaagaaaugugauguccccuguauugggauagaaaugguacaugauggugggaaaacgacuuggcacucagcagcaacagccauuuacuguuuaaugggcucaggacaacugcugugggacacugucacagguguugauauggcucuguaa

SEQ ID NO: 61784 - RNA, 1401 nt, Artificial Sequence
  derived and/or modified CDS sequence (wt) from neuraminidase__InfluenzaB__AGX23516
augcuaccuucaacuauacaaacguuaacccuauuucucacaucagggggaguguuauuaucacuauaugugucagcuucauugucauacuuacuauauucggauauauugcuaaaauuuucacaaacagaaauaacugcaccaauaaugccauuggauugugcaaacgcaucaaauguucaggcugugaaccguucugcagcaaaaggggugacacuucuucucccagaaccggaguggacauacccucguuuaucuugcccgggcucaaccuuucagaaagcacuccuaauuagcccccauagauucggagaaaccaaaggaaacucagcucccuugauaauaagggaaccuuuuauugcuuguggaccaacggaaugcaaacacuuugcucuaacccauuaugcagcucaaccagggggauacuacaauggaacaagagaagacagaaacaagcugaggcaucuaauuucagucaaauugggcaaaaucccaacaguagaaaacuccauuuuccacauggcagcuuggagcggguccgcaugccaugaugguaaagaauggacauauaucggaguugauggccccgacaguaaugcauugcucaaaauaaaauauggagaagcauauacugacacauaccauuccuaugcaaaaaacauccuaaggacacaagaaagugccugcaauugcaucgggggagauuguuaucuuaugauaacugauggcccagcuucagggguuagugaaugcagauuccuuaagauucgagagggcagaauaauaaaagaaauauuuccaacaggaagaguaaaacauacugaggaaugcacaugcggauuugccagcaacaaaaccauagaaugugcuuguagagauaacaguuacacagcaaaaagacccuuugucaaauuaaauguggagacugauacagcggaaauaagauugaugugcacagagacuuauuuggacacccccagaccaaaugauggaagcauaacagggccuugcgaaucugauggggacaaagggaguggaggcaucaagggaggauuuguucaucaaagaauggcauccaagauuggaaggugguacucucgaacgaugucuaaagcuaaaagaauggggaugggacuguauguaaaguaugauggagacccauggacugacagugaagcccuugcucuuaguggaguaaugguuucaauggaagaaccugguugguauuccuuuggcuucgaaauaaaagauaagaaaugugauguccccuguauugggauagaaaugguacaugauggugggaaaacgacuuggcacucagcagcaacagccauuuauuguuuaaugggcucaggacaacugcugugggacacugucacagguguugauauggcucuguaa

SEQ ID NO: 61785 - RNA, 1401 nt, Artificial Sequence; identical to SEQ ID NO: 61061
  derived and/or modified CDS sequence (wt) from neuraminidase__InfluenzaB__AGX23527

SEQ ID NO: 61786 - RNA, 1401 nt, Artificial Sequence
  derived and/or modified CDS sequence (wt) from neuraminidase__InfluenzaB__AGX23538
augcuaccuucaacuauacaaacguuaacccuauuucucacaucagggggaguguuauuaucacuauaugugucagcuucauugucauacuuacuauauucggauauauugcuaaaauuuucacaaacagaaauaacugcaccaauaaugccauuggauugugcaaacgcaucaaauguucaggcugugaaccguucugcagcaaaaggggugacacuucuucucccaaaaccggaguggacauacccucguuuaucuugcccgggcucaaccuuucagaaagcacuccuaauuagcccccacagauucggagaaaccaaaggaaacucagcucccuugauaauaagggaaccuuuuauugcuuguggaccaacggaaugcaaacacuuugcucuaacccauuaugcagcucaaccagggggauacuacaauggaacaagagaagacagaaacaagcugaggcaucuaauuucagucaaauugggcaaaaucccaacaguagaaaacuccauuuuccacauggcagcuuggagcggguccgcaugccaugaugguaaagaauggacauauaucggaguugauggccccgacaguaaugcauugcucaaaauaaaauauggagaagcauauacugacacauaccacuccuaugcaaaaaacauccuaaggacacaagaaagugccugcaauugcaucgggggagauuguuaucuuaugauaacugauggcccagcuucagggguuagugaaugcagauuccuuaagauucgagagggcagaauaauaaaagaaauauuuccaacaggaagaguaaaacauacugaggaaugcacaugcggauuugccagcaacaaaaccauagaaugugcuuguagagauaacaguuacacagcaaaaagacccuuugucaaauuaaauguggagacugauacagcggaaauaagauugaugugcacagagacuuauuuggacacccccagaccaaaugauggaagcauaacagggccuugcgaaucugauggggacaaagggaguggaggcaucaagggaggauuuguucaucaaagaauggcauccaagauuggaaggugguacucucgaacgaugucuacaacuaaaagaauggggaugggacuguauguaaaguaugauggagacccauggacugacagugaagcccuugcucuuaguggaguaaugguuucaauggaagaaccugguugguauuccuuuggcuucgaaauaaaagauaagaaaugugauguccccuguauugggauagaaaugguacaugauggugggaaaacgacuuggcacucagcagcaacagccauuuauuguuuaaugggcucaggacaacugcugugggacacugucacagguguugauauggcucuguaa

SEQ ID NO: 61787 - RNA, 1401 nt, Artificial Sequence
  derived and/or modified CDS sequence (wt) from neuraminidase__InfluenzaB__AGX23549
augcuaccuucaacuauacaaacguuaacccuauuucucacaucagggggaguguuauuaucacuauaugugucagcuucauugucauacuuacuauauucggauauauugcuaaaauuuucacaaacagaaauaacugcaccaauaaugccauuggauugugcaaacgcaucaaauguucaggcugugaaccguucugcagcaaaaggggugacacuucuucucccagaaccggaguggacauacccucguuuaucuugcccgggcucaaccuuucagaaagcacuccuaauuagcccccacagauucggagaaaccaaaggaaacucagcucccuugauaauaagggaaccuuuuauugcuuguggaccaacggaaugcaaacacuuugcucuaacccauuaugcagcucaaccagggggauacuacaauggaacaagagaagacagaaacaagcugaggcaucuaauuucagucaaauugggcaaaaucccaacaguagaaaacuccauuuuccacauggcagcuuggagcggguccgcaugccaugaugguaaagaauggacauauaucggaguugauggccccgacaguaaugcauugcucaaaauaaaauauggagaagcauauacugacacauaccacuccuaugcaaaaaacauccuaaggacacaagaaagugccugcaauugcaucgggggagauuguuaucuuaugauaacugauggcccagcuucagggguuagugaaugcagauuccuuaagauucgagagggcagaauaauaaaagaaauauuuccaacaggaagaguaaaacauacugaggaaugcacaugcggauuugccagcaacaaaaccauagaaugugcuuguagagauaacaguuacacagcaaaaagacccuuugucaaauuaaauguggagacugauacagcggaaauaagauugaugugcacagagacuuauuuggacacccccagaccaaaugauggaagcauaacagggccuugcgaaucugauggggacaaagggaguggaggcaucaagggaggauuuguucaucaaagaauggcauccaagauuggaaggugguacucucgaacgaugucuacaacuaaaagaauggggaugggacuguauguaaaguaugauggagacccauggacugacagugaagcccuugcucuuaguggaguaaugguuucaauggaagaaccugguugguauuccuuuggcuucgaaauaaaagauaagaaaugugauguccccuguauugggauagaaaugguacaugauggugggaaaacgacuuggcacucagcagcaacagccauuuauuguuuaaugggcucaggacaacugcugugggacacugucacagguguugauauggcucuguaa

SEQ ID NO: 61788 - RNA, 1401 nt, Artificial Sequence; identical to SEQ ID NO: 61061
  derived and/or modified CDS sequence (wt) from neuraminidase__InfluenzaB__AGX23560

SEQ ID NO: 61789 - RNA, 1401 nt, Artificial Sequence
  derived and/or modified CDS sequence (wt) from neuraminidase__InfluenzaB__AGX23571
augcuaccuucaacuauacaaacguuaacccuauuucucacaucagggggaguguuauuaucacuauaugugucagcuucauugucauacuuacuauauucggauauauuacuaaaauuuucacaaacagaaauaacugcaccaauaaugccacuggauugugcaaacgcaucaaauguucaggcugugaaccguucugcagcaaaaggggugacacuucuucucccagaaccggaguggacauacccucguuuaucuugcccgggcucaaccuuucagaaagcacuccuaauuagcccccauagauucggagaaaccaaaggaaacucagcucccuugauaauaagggaaccuuuuauugcuuguggaccaacggaaugcaaacacuuugcucuaacccauuaugcagcccaaccagggggauacuacaauggaacaagagaagacagaaacaagcugaggcaucuaauuucagucaaauugggcaaaaucccaacaguagaaaacuccauuuuccacauggcagcuuggagcggguccgcaugccaugaugguaaagaauggacauaugucggaguugauggccccgacaguaaugcauugcucaaaauaaaauauggagaagcauauacugacacauaccauuccuaugcaaaaaacauccuaaggacacaagaaagugccugcaauugcaucgggggagauuguuaucuuaugauaacugauggcccagcuucagggauuagugaaugcagauuccuuaagauucgagagggccgaauaauaaaagaaauauuuccaacaggaagaguaaaacauacugaggaaugcacaugcggauuugccagcaacaaaaccauagaaugugcuuguagagauaacaguuacacagcaaaaagacccuuugucaaauuaaauguggagacugauacagcggaaauaagauugaugugcacagagacuuauuuggacacccccagaccaaaugauggaagcauaacagggccuugcggaucugauggggacaaagggaguggaggcaucaagggaggauuuguucaucaaagaauggcauccaagauuggaaggugguacucccgaacgaugucuaaaacuaaaagaauggggaugggacuguauguaaaguaugauggagacccauggacugacagugaagcccuugcucuuaguggaguaaugguuucaauggacgaaccugguugguauuccuuuggcuucgaaauaaaagauaagaaaugugauguccccuguauugggauagaaaugguacaugauggugggaaaacgacuuggcacucagcagcaacagccauuuacuguuuaaugggcucaggacaacugcugugggacacugucacagguguugauauggcucuguaa

SEQ ID NO: 61790 - RNA, 1401 nt, Artificial Sequence
  derived and/or modified CDS sequence (wt) from neuraminidase__InfluenzaB__AGX23582
augcuaccuucaacuauacaaacguuaacccuauuucucacaucagggggaguguuauuaucacuauaugugucagcuucauugucauacuuacuauauucggauauauugcuaaaauuuucacaaacagaaauaacugcaccaauaaugccacuggauugugcaaacgcaucaaauguucaggcugugaaccguucugcagcaaaaggggugacacuucuucucccagaaccggaguggacauacccucguuuaucuugcccgggcucaaccuuucagaaagcacuccuaauuagcccccauagauucggagaaaccaaaggaaacucagcucccuugauaauaagggaaccuuuuauugcuuguggaccaacggaaugcaaacacuuugcucuaacccauuaugcagcccaaccagggggauacuacaauggaacaagagaagacagaaacaagcugaggcaucuaauuucagucaaauugggcaaaaucccaacaguagaaaacuccauuuuccacauggcagcuuggagcggguccgcaugccaugaugguaaagaauggacauaugucggaguugauggccccgacaguaaugcauugcucaaaauaaaauauggagaagcauauacugacacauaccauuccuaugcaaaaaacauccuaaggacacaagaaagugccugcaauugcaucgggggagauuguuaucuuaugauaacugauggcccagcuucagggauuagugaaugcagauuccuuaagauucgagagggccgaauaauaaaagaaauauuuccaacaggaagaguaaaacauacugaggaaugcacaugcggauuugccagcaacaaaaccauagaaugugcuuguagagauaacaguuacacagcaaaaagacccuuugucaaauuaaauguggagacugauacagcggaaauaagauugaugugcacagagacuuauuuggacacccccagaccaaaugauggaagcauaacagggccuugcggaucugauggggacaaagggaguggaggcaucaagggaggauuuguucaucaaagaauggcauccaagauuggaaggugguacucccgaacgaugucuaaaacuaaaagaauggggaugggacuguauguaaaguaugauggagacccauggacugacagugaagcccuugcucuuaguggaguaaugguuucaauggacgaaccugguugguauuccuuuggcuucgaaauaaaagauaagaaaugugauguccccuguauugggauagaaaugguacaugauggugggaaaacgacuuggcacucagcagcaacagccauuuacuguuuaaugggcucaggacaacugcugugggacacugucacagguguugauauggcucuguaa

SEQ ID NO: 61791 - RNA, 1401 nt, Artificial Sequence
  derived and/or modified CDS sequence (wt) from neuraminidase__InfluenzaB__AGX23593
augcuaccuucaacuauacaaacguuaacccuauuucucacaucagggggaguguuauuaucacuauaugugucagcuucauugucauacuuacuauauucggauauauugcuaaaauuuucacaaacagaaauaacugcaccaauaaugccauuggauugugcaaacgcaucaaauguucaggcugugaaccguucugcagcaaaaggggugacacuucuucucccagaaccggaguggacauacccucguuuaucuugcccgggcucaaccuuucagaaagcacuccuaauuagcccccauagauucggagaaaccaaaggaaacucagcucccuugauaauaagggaaccuuuuauugcuuguggaccaacggaaugcaaacacuuugcucuaacccauuaugcagcucaaccagggggauacuacaauggaacaagagaagacagaaacaagcugaggcaucuaauuucagucaaauugggcaaaaucccaacaguagaaaacuccauuuuccauauggcagcuuggagcggguccgcaugccaugaugguaaagaauggacauauaucggaguugauggccccgacaguaaugcauuacucaaaauaaaauauggagaagcauauacugacacauaccauuccuaugcaaaaaacauccuaaggacacaagaaagugccugcaauugcaucgggggagauuguuaucuuaugauaacugauggcccagcuucagggauuagugaaugcagauuccuuaagauucgagagggccgaauaauaaaagaaauauuuccaacaggaagaguaaaacauacugaggaaugcacauguggauuugccagcaacaaaaccauagaaugugcuuguagagauaacaguuacacagcaaaaagacccuuugucaaauuaaauguggagacugauacagcggaaauaagauugaugugcacagagacuuauuuggacacccccagaccaaaugauggaagcauaacagggccuugcgaaucugauggggacaaagggaguggaggcaucaagggaggauuuguucaucaaagaauggcauccaagauuggaaggugguacucucgaacgaugucuaaaacuaaaaggauggggaugggacuguauguaaaguaugauggagacccauggacugacagugaagcccuuacucuuaguggaguaaugguuucgauggaagaaccugguugguauuccuuuggcuucgaaauaaaagauaagaaaugugauguccccuguauugggauagaaaugguacaugauggugggaaaacgacuuggcacucagcagcaacagccauuuacuguuuaaugggcucaggacaacugcugugggacacugucacagguguugauauggcucuguaa

SEQ ID NO: 61792 - RNA, 1401 nt, Artificial Sequence
  derived and/or modified CDS sequence (wt) from neuraminidase__InfluenzaB__AGX23604
augcuaccuucaacuauacaaacauuaacccuauuucucacaucagggggaguguuauuaucacuauaugugucagcuucauugucauacuuacuauauucggauauauugcuaaaauuuucacaaacagaaauaacugcaccaauaaugccauuggauugugcaaacgcaucaaauguucaggcugugaaccguucugcagcaaaaggggugacacuucuucucccagaaccggaguggacauacccucguuuaucuugcccgggcucaaccuuucagaaagcacuccuaauuagcccccauagauucggagaaaccaaaggaaacucagcccccuugauaauaagggaaccuuuuauugcuuguggaccaacggaaugcaaacacuuugcucuaacccauuaugcagcucaaccagggggauacuacaauggaacaagagaagacagaaacaagcugaggcaucuaauuucagucaaauugggcaaaaucccaacaguagaaaacuccauuuuccacauggcagcuuggagcggguccgcaugccaugaugguaaagaauggacauauaucggaguugauggccccgacaguaaugcauugcucaaaauaaaauauggagaagcauauacugacacauaccauuccuaugcaaaaaacauccuaaggacacaagaaagugccugcaauugcaucgggggagauuguuaucuuaugauaacugauggcccagcuucagggauuagugaaugcagauuccuuaagauucgagagggccgaauaauaaaagaaauauuuccaacaggaagaguaaaacauacugaggaaugcacaugcggauuugccagcaacaaaaccauagaaugugcuuguagagauaacaguuacacagcaaaaagacccuuugucaaauuaaauguggagacugauacagcggaaauaagauugaugugcacagagacuuauuuggacacccccagaccaaaugauggaagcauaacagggccuugcgaaucugauggggacaaagggaguggaggcaucaagggaggauuuguucaucaaagaauggcauccaagauuggaaggugguacucucgaacgaugucuaaaacuaaaagaauggggaugggacuguauguaaaguaugauggagacccauggacugacagugaagcccuugcucuuaguggaguaaugguuucaauggaagaaccugguugguauuccuuuggcuucgaaauaaaagauaagaaaugugauguccccuguauugggauagaaaugguacaugauggugggaaaacgacuuggcacucagcagcaacagccauuuacuguuuaaugggcucaggacaacugcugugggacacugucacagguguugauauggcucuguaa

SEQ ID NO: 61793 - RNA, 1401 nt, Artificial Sequence
  derived and/or modified CDS sequence (wt) from neuraminidase__InfluenzaB__AGX23615
augcuaccuucaacuauacaaacguuaacccuauuucucacaucagggggaguguuauuaucacuauaugugucagcuucauugucauacuuacuauauucggauauauuacuaaaauuuucacaaacagaaauaacuacaccaauaaugccauuggauugugcaaacgcaucaaauguucaggcugugaaccguucugcagcaaaaggggugacacuucuucucccagaaccggaguggacauacccucguuuaucuugcccgggcucaaccuuucagaaagcacuccuaauuagcccccauagauucggagaaaccaaaggaaacucagcucccuugauaauaagggaaccuuuuauugcuuguggaccaacggaaugcaaacacuuugcucuaacccauuaugcagcucaaccagggggauacuacaauggaacaagagaagacagaaacaagcugaggcaucuaauuucagucaaauugggcaaaaucccaacaguagaaaacuccauuuuccauauggcagcuuggagcggguccgcaugccaugaugguaaagaauggacauauaucggaguugauggccccgacaguaaugcauugcucaaaauaaaauauggagaagcauauacugacacauaccauuccuaugcaaaaaacauccuaaggacacaagaaagugccugcaauugcauugggggagauuguuaucuuaugauaacugauggcccagcuucagggauuagugaaugcagauuccuuaagauucgagagggccgaauaauaaaagaaauauuuccaacaggaagaguaaaacauacugaggaaugcacaugcggauuugccagcaacaaaaccauagaaugugcuugcagagauaacaguuacacagcaaaaagacccuuugucaaauuaaauguggagacugauacagcggaaauaagauuaaugugcacagagacuuauuuggacacccccagaccaaaugauggaagcauaacagggccuugcgaaucugauggggacaaagggaguggaggcaucaagggaggauuuguucaucaaagaauggcauccaagauuggaaggugguacucucgaacgaugucuaaaacuaaaagaauggggaugggacuguauguaaaguaugauggagauccauggacugacagugaagcccuugcucuuaguggaguaaugguuucaauggaagaaccugguugguauuccuuuggcuucgaaauaaaagauaagaaaugugauguccccuguauugggauagaaaugguacaugauggugggaaaacgacuuggcacucagcagcaacagccauuuacuguuuaaugggcucaggacaacugcugugggacacugucacagguguugauauggcucuguaa

SEQ ID NO: 61794 - RNA, 1401 nt, Artificial Sequence; identical to SEQ ID NO: 61790
  derived and/or modified CDS sequence (wt) from neuraminidase__InfluenzaB__AGX23626

SEQ ID NO: 61795 - RNA, 1401 nt, Artificial Sequence; identical to SEQ ID NO: 61159
  derived and/or modified CDS sequence (wt) from neuraminidase__InfluenzaB__AGX23637

SEQ ID NO: 61796 - RNA, 1401 nt, Artificial Sequence; identical to SEQ ID NO: 61061
  derived and/or modified CDS sequence (wt) from neuraminidase__InfluenzaB__AGX23659

SEQ ID NO: 61797 - RNA, 1401 nt, Artificial Sequence; identical to SEQ ID NO: 61159
  derived and/or modified CDS sequence (wt) from neuraminidase__InfluenzaB__AGX23670

SEQ ID NO: 61798 - RNA, 1401 nt, Artificial Sequence
  derived and/or modified CDS sequence (wt) from neuraminidase__InfluenzaB__AGX23681
augcuaccuucaacuauacaaacguuaacccuauuucucacaucagggggaguguuauuaucacuauaugugucagcuucauugucauacuuacuauauucggauauauugcuaaaauuuucacaaacagaaauaacugcaccaauaaugccauuggauugugcaaacgcaucaaauguucaggcugugaaccguucugcagcaaaaggggugacacuucuucucccagaaccggaguggacauacccucguuuaucuugcccgggcucaaccuuucagaaagcacuccuaauuagcccccauagauucggagaaaccaaaggaaacucagcucccuugauaauaagggaaccuuuuauugcuuguggaccaacggaaugcaaacacuuugcucuaacccauuaugcagcucaaccagggggauacuacaauggaacaagagaagacagaaacaagcugaggcaucuaauuucagucaaauugggcaaaaucccaacaguagaaaacuccauuuuccacauggcagcuuggagcggguccgcaugccaugaugguaaagaguggacauauaucggaguugauggccccgacaguaaugcauugcucaaaauaaaauauggagaagcauauacugacacauaccauuccuaugcaaaaaacauccuaaggacacaagaaagugccugcaauugcaucgggggagauuguuaucuuaugauaacugauggcccagcuucagggguuagugaaugcagauuccuuaagauucgagagggcagaauaauaaaagaaauauuuccaacaggaagaguaaaacauacugaggaaugcacaugcggauuugccagcaacaaaaccauagaaugugcuuguagagauaacaguuacacagcaaaaagacccuuugucaaauuaaauguggagacugauacagcggaaauaagauugaugugcacagagacuuauuuggacacccccagaccaaacgauggaagcauaacagggccuugcgaaucugauggggacaaagggaguggaggcaucaagggaggauuuguucaucaaagaauggcauccaagauuggaaggugguacucucgaacgaugucuaaaacuaaaagaauggggaugggacuguauguaaaguaugauggagacccauggacugacagugaagcccuugcucuuaguggaguaaugguuucaauggaagaaccugguugguauuccuuuggcuucgaaauaaaagauaagaaaugugauguccccuguauugggauagaaaugguacaugauggugggaaaacgacuuggcacucagcagcaacagccauuuauuguuuaaugggcucaggacaacugcugugggacacugucacagguguugauauggcucuguaa

SEQ ID NO: 61799 - RNA, 1401 nt, Artificial Sequence; identical to SEQ ID NO: 61159
  derived and/or modified CDS sequence (wt) from neuraminidase__InfluenzaB__AGX23692

SEQ ID NO: 61800 - RNA, 1401 nt, Artificial Sequence; identical to SEQ ID NO: 61159
  derived and/or modified CDS sequence (wt) from neuraminidase__InfluenzaB__AGX23703

SEQ ID NO: 61801 - RNA, 1401 nt, Artificial Sequence
  derived and/or modified CDS sequence (wt) from neuraminidase__InfluenzaB__AGX23714
augcuaccuucaacuauacaaacguuaacccuauuucucacaucagggggaguguuauuaucacuauaugugucagcuucauugucauacuuacuauauucggauauauugcuaaaauuuucacaaacagaaauaacugcaccaauaaugccacuggauugugcaaacgcaucaaauguucaggcugugaaccguucugcagcaaaaggggugacacuucuucucccagaaccggaguggacauacccucguuuaucuugcccgggcucaaccuuucagaaagcacuccuaauuagcccccauagauucggagaaaccaaaggaaacucagcucccuugauaauaagggaaccuuuuauugcuuguggaccaacggaaugcaaacacuuugcucuaacccauuaugcagcccaaccagggggauacuacaauggaacaagagaagacagaaacaagcugaggcaucuaauuucagucaaauugggcaaaaucccaacaguagaaaacuccauuuuccacauggcagcuuggagcggguccgcaugccaugaugguaaagaauggacauaugucggaguugauggccccgacaguaaugcauugcucaaaauaaaauauggagaagcauauacugacacauaccauuccuaugaaaaaaacauccuaaggacacaagaaagugccugcaauugcaucgggggagauuguuaucuuaugauaacugauggcccagcuucagggauuagugaaugcagauuccuuaagauucgagagggccgaauaauaaaagaaauauuuccaacaggaagaguaaaacauacugaggaaugcacaugcggauuugccagcaacaaaaccauagaaugugcuuguagagauaacaguuacacagcaaaaagacccuuugucaaauuaaauguggagacugauacagcggaaauaagauugaugugcacagagacuuauuuggacacccccagaccaaaugauggaagcauaacagggccuugcggaucugauggggacaaagggaguggaggcaucaagggaggauuuguucaucaaagaauggcauccaagauuggaaggugguacucccgaacgaugucuaaaacuaaaagaauggggaugggacuguauguaaaguaugauggagacccauggacugacagugaagcccuugcucuuaguggaguaaugguuucaauggacgaaccugguugguauuccuuuggcuucgaaauaaaagauaagaaaugugauguccccuguauugggauagaaaugguacaugauggugggaaaacgacuuggcacucagcagcaacagccauuuacuguuuaaugggcucaggacaacugcugugggacacugucacagguguugauauggcucuguaa

SEQ ID NO: 61802 - RNA, 1401 nt, Artificial Sequence; identical to SEQ ID NO: 61159
  derived and/or modified CDS sequence (wt) from neuraminidase__InfluenzaB__AGX23725

SEQ ID NO: 61803 - RNA, 1401 nt, Artificial Sequence
  derived and/or modified CDS sequence (wt) from neuraminidase__InfluenzaB__AGX23736
augcuaccuucaacuauacaaacguuaacccuauuucucacaucagggggaguguuauuaucacuauaugugucagcuucauugucauacuuacuauauucggauauauugcuaaaauuuucacaaacagaaauaacugcaccaauaaugccacuggauugugcaaacgcaucaaauguucaggcugugaaccguucugcagcaaaaggggugacacuucuucucccagaaccggaguggacauacccucguuuaucuugcccgggcucaaccuuucagaaagcacuccuaauuagcccccauagauucggagaaaccaaaggaaacucagcucccuugauaauaagggaaccuuuuauugcuuguggaccaacggaaugcaaacacuuugcucuaacucauuaugcagcccaaccagggggauacuacaauggaacaagagaagacagaaacaagcugaggcaucuaauuucagucaaauugggcaaaaucccaacaguagaaaacuccauuuuccacauggcagcuuggagcggguccgcaugccaugaugguaaagaauggacauaugucggaguugauggccccgacaguaaugcauugcucaaaauaaaauauggagaagcauauacugacacauaccauuccuaugcaaaaaacauccuaaggacacaagaaagugccugcaauugcaucgggggagauuguuaucuuaugauaacugauggcccagcuucagggauuagugaaugcagauuccuuaagauucgagagggccgaauaauaaaagaaauauuuccaacaggaagaguaaaacauacugaggaaugcacaugcggauuugccagcaacaaaaccauagaaugugcuuguagagauaacaguuacacagcaaaaagacccuuugucaaauuaaauguggagacugauacagcggaaauaagauugaugugcacagagacuuauuuggacacccccagaccaaaugauggaagcauaacagggccuugcggaucugauggggacaaagggaguggaggcaucaagggaggguuuguucaucaaagaauggcauccaagauuggaaggugguacucccgaacgaugucuaaaacuaaaagaauggggaugggacuguauguaaaguaugauggagacccauggacugacagugaagcccuugcucuuaguggaguaaugguuucaauggacgaaccugguugguauuccuuuggcuucgaaauaaaagauaagaaaugugauguccccuguauugggauagaaaugguacaugauggugggaaaacgacuuggcacucagcagcaacagccauuuacuguuuaaugggcucaggacaacugcugugggacacugucacagguguugauauggcucuguaa

SEQ ID NO: 61804 - RNA, 1401 nt, Artificial Sequence; identical to SEQ ID NO: 61159
  derived and/or modified CDS sequence (wt) from neuraminidase__InfluenzaB__AGX23747

SEQ ID NO: 61805 - RNA, 1401 nt, Artificial Sequence
  derived and/or modified CDS sequence (wt) from neuraminidase__InfluenzaB__AGX23758
augcuaccuucaacuauacaaacguuaacccuauuucucacaucagggggaguguuauuaucacuauaugugucagcuucauugucauacuuacuauauucggauauauugcuaaaauuuucacagacagaaauaacugcaccaauaaugccauuggauugugcaaacgcaucaaauguucaggcugugaaccguucugcagcaaaaggggugacacuucuucucccagaaccggaguggacauacccucguuuaucuugcccgggcucaaccuuucagaaagcacuccuaauuagcccccauagauucggagaaaccaaaggaaacucagcucccuugauaauaagggaaccuuuuauugcuuguggaccaacggaaugcaaacacuuugcucuaacccauuaugcagcucaaccagggggauacuacaauggaacaagagaagacagaaacaagcugaggcaucuaauuucagucaaauugggcaaaaucccaacaguagaaaacuccauuuuccacauggcagcuuggagcggguccgcaugccaugaugguaaagaauggacauauaucggaguugauggccccgacaguaaugcauugcucaaaauaaaauauggagaagcauauacugacacauaccauuccuaugcaaaaaacauccuaaggacacaagaaagugccugcaauugcaucgggggagauuguuaucuuaugauaacugauggcccagcuucagggguuagugaaugcagauuccuuaagauucgagagggcagaauaauaaaagaaauauuuccaacaggaagaguaaaacauacugaggaaugcacaugcggauuugccagcaacaaaaccauagaaugugcuuguagagauaacaguuacacagcaaaaagacccuuugucaaauuaaauguggagacugauacagcggaaauaagauugaugugcacagagacuuauuuggacacccccagaccaaaugauggaagcauaacagggccuugcgaaucugauggggacaaagggaguggaggcaucaagggaggauuuguucaucaaagaauggcauccaagauuggaaggugguacucucgaacgaugucuaaaacuaaaagaauggggaugggacuguauguaaaguaugauggagacccauggacugacagugaagcccuugcucuuaguggaguaaugguuucaauggaagaaccugguugguauuccuuuggcuucgaaauaaaagauaagaaaugugauguccccuguauugggauagaaaugguacaugauggugggaaaacgacuuggcacucagcagcaacagccauuuauuguuuaaugggcucaggacaacugcugugggacacugucacagguguugauauggcucuguaa

SEQ ID NO: 61806 - RNA, 1401 nt, Artificial Sequence; identical to SEQ ID NO: 61790
  derived and/or modified CDS sequence (wt) from neuraminidase__InfluenzaB__AGX23769

SEQ ID NO: 61807 - RNA, 1401 nt, Artificial Sequence
  derived and/or modified CDS sequence (wt) from neuraminidase__InfluenzaB__AGX23780
augcuaccuucaacuauacaaacguuaacccuacuucucacaucagggggaguguuauuaucacuauaugugucagcuucauugucauacuuacuauauucggauauauugcuaaaauuuucacaaacagaaauaacugcaccaauaaugccauuggauugugcaaacgcaucaaauguucaggcugugaaccguucugcagcaaaaggggugacacuucuucucccagaaccggaguggacauacccucguuuaucuugcccgggcucaaccuuucagaaagcacuccuaauuagcccccauagauucggagaaaccaaaggaaacucagcucccuugauaauaagggaaccuuuuauugccuguggaccaacggaaugcaaacacuuugcucuaacccauuaugcagcucaaccagggggauacuacaauggaacaagagaagacagaaacaagcugaggcaucuaauuucagucaaauugggaaaaaucccaacaguagaaaacuccauuuuccacauggcagcuuggagcggguccgcaugccaugaugguaaagaauggacauauaucggaguugauggccccgacaguaaugcauugcucaaaauaaaauauggagaagcauauacugacacauaccauuccuaugcaaaaaacauccuaaggacacaagaaagugccugcaauugcaucgggggagauuguuaucuuaugauaacugauggcccagcuucagggguuagugaaugcagauuccuuaagauucgagagggcagaauaauaaaagaaauauuuccaacaggaagaguaaaacauacugaggaaugcacaugcggauuugccagcaacaaaaccauagaaugugcuuguagagauaacaguuacacagcaaaaagacccuuugucaaauuaaauguggagacugauacagcggaaauaagauugaugugcacagagacuuauuuggacacccccagaccaaaugauggaagcauaacagggccuugcgaaucugauggggacaaagggaguggaggcaucaagggaggguuuguucaucaaagaauggcauccaagauuggaagaugguacucucgaacgaugucuaaaacuaaaagaauggggaugggacuguauguaaaguaugauggagacccauggacugacagugaagcccuugcucuuaguggaguaaugguuucaauggaagaaccugguugguauuccuuuggcuucgaaauaaaagauaagaaaugugauguccccuguauugggauagaaaugguacaugauggugggaaaacgacuuggcacucagcagcaacagccauuuauuguuuaaugggcucaggacaacugcugugggacacugucacagguguugauauggcucuguaa

SEQ ID NO: 61808 - RNA, 1401 nt, Artificial Sequence
  derived and/or modified CDS sequence (wt) from neuraminidase__InfluenzaB__AGX23791
augcuaccuucaacuauacaaacguuaacccuauuucucacaucagggggaguguuauuaucacuauaugugucagcuucauugucauacuuacuauauucggauauauugcuaaaauuuucacaaacagaaauaacugcaccaauaaugccauuggauugugcaaacgcaucaaaugcucaggcugugaaccguucugcagcaaaaggggugacacuucuucucccagaaccggaguggacauacccucguuuaucuugcccgggcucaaccuuucagaaagcacuccuaauuagcccccauagauucggagaaaccaaaggaaacucagcucccuugauaauaagggaaccuuuuauugccuguggaccaacggaaugcaaacacuuugcucuaacccauuaugcagcucaaccagggggauacuacaauggaacaagagaagacagaaacaagcugaggcaucuaauuucagucaaauugggaaaaaucccaacaguagaaaacuccauuuuccacauggcagcuuggagcggguccgcaugccaugaugguaaagaauggacauauaucggaguugauggccccgacaguaaugcauugcucaaaauaaaauauggagaagcauauacugacacauaccauuccuaugcaaaaaacauccuaaggacacaagaaagugccugcaauugcaucgggggagauuguuaucuuaugauaacugauggcccagcuucagggguuagugaaugcagauuccuuaagauucgagagggcagaauaauaaaagaaauauuuccaacaggaagaguaaaacauacugaggaaugcacaugcggauuugccagcaacaaaaccauagaaugugcuuguagagauaacaguuacacagcaaaaagacccuuugucaaauuaaauguggagacugauacagcggaaauaagauugaugugcacagagacuuauuuggacacccccagaccaaaugauggaagcauaacagggccuugcgaaucugauggggacaaagggaguggaggcaucaagggaggguuuguucaucaaagaauggcauccaagauuggaagaugguacucucgaacgaugucuaaaacuaaaagaauggggaugggacuguauguaaaguaugauggagacccauggacugacagugaagcccuugcucuuaguggaguaaugguuucaauggaagaaccugguugguauuccuuuggcuucgaaauaaaagauaagaaaugugauguccccuguauugggauagaaaugguacaugauggugggaaaacgacuuggcacucagcagcaacagccauuuauuguuuaaugggcucaggacaacugcugugggacacugucacagguguugauauggcucuguaa

SEQ ID NO: 61809 - RNA, 1401 nt, Artificial Sequence; identical to SEQ ID NO: 61790
  derived and/or modified CDS sequence (wt) from neuraminidase__InfluenzaB__AGX23802

SEQ ID NO: 61810 - RNA, 1401 nt, Artificial Sequence
  derived and/or modified CDS sequence (wt) from neuraminidase__InfluenzaB__AGX23813
augcuaccuucaacuauacaaacguuaacccuauuucucacaucagggggaguguuauuaucacuauaugugucagcuucauugucauacuuacuauauucggauauauuacuaaaauuuucacaaacagaaauaacugcaccaauaaugccacuggauugugcaaacgcaucaaauguucaggcugugaaccguucugcagcaaaaggggugacacuucuucucccagaaccggaguggacauacccucguuuaucuugcccgggcucaaccuuucagaaagcacuccuaauuagcccccauagauucggagaaaccaaaggaaacucagcucccuugauaauaagggaaccuuuuauugcuuguggaccaacggaaugcaaacacuuugcucuaacccauuaugcagcccaaccagggggauacuacaauggaacaagagaagacagaaacaagcugaggcaucuaauuucagucaaauugggcaaaaucccaacaguagaaaacuccauuuuccacauggcagcuuggagcggguccgcaugccaugaugguaaagaauggacauaugucggaguugauggccccgacaguaaugcauugcucaaaauaaaauauggagaagcauauacugacacauaccauuccuaugcaaaaaacauccuaaggacacaagaaagugccugcaauugcaucgggggagauuguuaucuuaugauaacugauggcccagcuucagggauuagugaaugcagauuccuuaagauucgagagggccgaauaauaaaagaaauauuuccaacaggaagaguaaaacauacugaggaaugcacaugcggauuugccagcaacaaaaccauagaaugugcuuguagagauaacaguuacacagcaaaaagacccuuugucaaauuaaauguggagacugauacagcggaaauaagauugaugugcacagagacuuauuuggacacccccagaccaaaugauggaagcauaacagggccuugcggaucugauggggacaaagggaguggaggcaucaagggaggauuuguucaucaaagaauggcauccaagauuggaaggugguacucccgaacgaugucuaaaacuaaaagaauggggaugggacuguauguaaaguaugauggggacccauggacugacagugaagcccuugcucuuaguggaguaaugguuucaauggacgaaccugguugguauuccuuuggcuucgaaauaaaagauaagaaaugugauguccccuguauugggauagaaaugguacaugauggugggaaaacgacuuggcacucagcagcaacagccauuuacuguuuaaugggcucaggacaacugcugugggacacugucacagguguugauauggcucuguaa

SEQ ID NO: 61811 - RNA, 1401 nt, Artificial Sequence; identical to SEQ ID NO: 61790
  derived and/or modified CDS sequence (wt) from neuraminidase__InfluenzaB__AGX23824

SEQ ID NO: 61812 - RNA, 1401 nt, Artificial Sequence
  derived and/or modified CDS sequence (wt) from neuraminidase__InfluenzaB__AGX23846
augcuaccuucaacuauacaaacguuaacccuauuucucacaucagggggaguguuauuaucacuauaugugucagcuucauugucauacuuacuauauucggauauauugcuaaaauuuucacaaacagaaauaacugcaccaauaaugccacuggauugugcaaacgcaucaaauguucaggcugugaaccguucugcagcaaaaggggugacacuucuucucccagaaccggaguggacauacccucguuuaucuugcccgggcucaaccuuucagaaagcacuccuaauuagcccccauagauucggagaaaccaaaggaaacucagcucccuugauaauaagggaaccuuuuauugcuuguggaccaacggaaugcaaacacuuugcucuaacucauuaugcagcccaaccagggggauacuacaauggaacaagagaagacagaaacaagcugaggcaucuaauuucagucaaauugggcaaaaucccaacaguagaaaacuccauuuuccacauggcagcuuggagcggguccgcaugccaugaugguaaagaauggacauaugucggaguugauggccccgacaguaaugcauugcucaaaauaaaauauggagaagcauauacugacacauaccauuccuaugcaaaaaacauccuaaggacacaagaaagugccugcaauugcaucgggggagauuguuaucuuaugauaacugauggcccagcuucagggauuagugaaugcagauuccuuaagauucgagagggccgaauaauaaaagaaauauuuccaacaggaagaguaaaacauacugaggaaugcacaugcggauuugccagcaacaaaaccauagaaugugcuuguagagauaacaguuacacagcaaaaagacccuuugucaaauuaaauguggagacugauacagcggaaauaagauugaugugcacagagacuuauuuggacacccccagaccgaaugauggaagcauaacagggccuugcggaucugauggggacaaagggaguggaggcaucaagggaggguuuguucaucaaagaauggcauccaagauuggaaggugguacucccgaacgaugucuaaaacuaaaagaauggggaugggacuguauguaaaguaugauggagacccauggacugacagugaagcccuugcucuuaguggaguaaugguuucaauggacgaaccugguugguauuccuuuggcuucgaaauaaaagauaagaaaugugauguccccuguauugggauagaaaugguacaugauggugggaaaacgacuuggcacucagcagcaacagccauuuacuguuuaaugggcucaggacaacugcugugggacacugucacagguguugauauggcucuguaa

SEQ ID NO: 61813 - RNA, 1401 nt, Artificial Sequence
  derived and/or modified CDS sequence (wt) from neuraminidase__InfluenzaB__AGX23857
augcuaccuucaacuauacaaacguuaacccuauuucucacaucggggggaguguuauuaucacuauaugugucagcuucauugucauacuuacuauauucggauauauugcuaaaauuuucacaaacagaaauaacugcaccaauaaugccauuggauugugcaaacgcaucaaauguucaggcugugaaccguucugcagcaaaaggggugacacuucuucucccagaaccggaguggacauacccucguuuaucuugcccgggcucaaccuuucagaaagcacuccuaauuagcccccauagauucggagaaaccaaaggaaacucagcucccuugauaauaagggaaccuuuuauugcuuguggaccaacggaaugcaaacacuuugcucuaacccauuaugcagcucaaccagggggauacuacaauggaacaagagaagacagaaacaagcugaggcaucuaauuucagucaaauugggcaaaaucccaacaguagaaaacuccauuuuccauauggcagcuuggagcggguccgcaugccaugaugguaaagaauggacauauaucggaguugauggccccgacaguaaugcauugcucaaaauaaaauauggagaagcauauacugacacauaccauuccuaugcaaaaaacauccuaaggacacaagaaagugccugcaauugcauugggggagauuguuaucuuaugauaacugauggcccagcuucagggauuagugaauguagauuccuuaagauucgagagggccgaauaauaaaagaaauauuuccaacaggaagaguaaaacauacugaggaaugcacaugcggauuugccagcaacaaaaccauagaaugugcuugcagagauaacaguuacacagcaaaaagacccuuugucaaauuaaauguggagacugauacagcggaaauaagauugaugugcacagagacuuauuuggacacccccagaccaaaugauggaagcauaacagggccuugcgaaucugauggggacaaagggaguggaggcaucaagggaggauuuguucaucaaagaauggcauccaagauugggaggugguacucucgaacaaugucuaaaacuaaaagaauggggaugggacuguauguaaaguaugauggagauccauggacugacagugaagcccucgcucuuaguggaguaaugguuucaauggaagaaccugguugguauuccuuuggcuucgaaauaaaagauaagaaaugugauguccccuguauugggauagaaaugguacaugauggugggaaaacgacuuggcacucagcagcaacagccauuuacuguuuaaugggcucaggacaacugcugugggacacugucacagguguugauauggcucuguaa

SEQ ID NO: 61814 - RNA, 1401 nt, Artificial Sequence; identical to SEQ ID NO: 61790
  derived and/or modified CDS sequence (wt) from neuraminidase__InfluenzaB__AGX23868

SEQ ID NO: 61815 - RNA, 1401 nt, Artificial Sequence
  derived and/or modified CDS sequence (wt) from neuraminidase__InfluenzaB__AGX23879
augcuaccuucaacuauacaaacguuaacccuauuucucacaucagggggaguguuauuaucacuauaugugucagcuucauugucauacuuacuauauucggauauauugcuaaaauuuucacaaacagaaauaacugcaccaauaaugccauuggauugugcaaacgcaucaaauguucaggcugugaaccguucugcagcaaaaggggugacacuucuucucccagaaccggaguggacauacccucguuuaucuugcccgggcucaaccuuucagaaagcacuccuaauuagcccccauagauucggagaaaccaaaggaaacucagcucccuugauaauaagggaaccuuuuauugccuguggaccaacggaaugcaaacacuuugcucuaacccauuaugcagcucaaccagggggauacuacaauggaacaagagaagacagaaacaagcugaggcaucuaauuucagucaaauugggaaaaaucccaacaguagaaaccuccauuuuccacauggcagcuuggagcggguccgcaugccaugaugguaaagaauggacauauaucggaguugauggccccgacaguaaugcauugcucaaaauaaaauauggagaagcauauacugacacauaccauuccuaugcaaaaaacauccuaaggacacaagaaagugccugcaauugcaucgggggagauuguuaucuuaugauaacugauggcccagcuucagggguuagugaaugcagauuccuuaagauucgagagggcagaauaauaaaagaaauauuuccaacaggaagaguaaaacauacugaggaaugcacaugcggauuugccagcaacaaaaccauagaaugugcuuguagagauaacaguuacacagcaaaaagacccuuugucaaauuaaauguggagacugauacagcggaaauaagauugaugugcacagagacuuauuuggacacccccagaccaaaugauggaagcauaacagggccuugcgaaucugauggggacaaagggaguggaggcaucaagggaggguuuguucaucaaagaauggcauccaagauuggaagaugguacucucgaacgaugucuaaaacuaaaagaauggggaugggacuguauguaaaguaugauggagacccauggacugacagugaagcccuugcucuuaguggaguaaugguuucaauggaagaaccugguugguauuccuuuggcuucgaaauaaaagauaagaaaugugauguccccuguauugggauagaaaugguacaugauggugggaaaacgacuuggcacucagcagcaacagccauuuauuguuuaaugggcucaggacaacugcugugggacacugucacagguguugauauggcucuguaa

SEQ ID NO: 61816 - RNA, 1401 nt, Artificial Sequence; identical to SEQ ID NO: 61789
  derived and/or modified CDS sequence (wt) from neuraminidase__InfluenzaB__AGX23890

SEQ ID NO: 61817 - RNA, 1401 nt, Artificial Sequence; identical to SEQ ID NO: 61813
  derived and/or modified CDS sequence (wt) from neuraminidase__InfluenzaB__AGX23901

SEQ ID NO: 61818 - RNA, 1401 nt, Artificial Sequence
  derived and/or modified CDS sequence (wt) from neuraminidase__InfluenzaB__AGX23912
augcuaccuucaacuauacaaacguuaacccuauuucucacaucagggggaguguuauuaucacuauaugugucagcuucauugucauacuuacuauauucggauauauugcuaaaauuuucacaaacagaaauaacugcaccaauaaugccacuggauugugcaaacgcaucaaauguucaggcugugaaccguucugcagcaaaaggggugacacuucuucucccagaaccggaguggacauacccucguuuaucuugcccgggcucaaccuuucagaaagcacuccuaauuagcccccauagauucggagaaaccaaaggaaacucagcucccuugauaauaagggaaccuuuuauugcuuguggaccaacggaaugcaaacacuuugcucuaacccauuaugcagcccaaccagggggauacuacaauggaacaagagaagacagaaacaggcugaggcaucuaauuucagucaaauugggcaaaaucccaacaguagaaaacuccauuuuccacauggcagcuuggagcggguccgcaugccaugaugguaaagaauggacauaugucggaguugauggccccgacaguaaugcauugcucaaaauaaaauauggagaagcauauacugacacauaucauuccuaugcaaaaaacauccuaaggacacaagaaagugccugcaauugcaucgggggagauuguuaucuuaugauaacugauggcccagcuucagggauuagugaaugcagauuccuuaagauucgagagggccgaauaauaaaagaaauauuuccaacaggaagaguaaaacauacugaggaaugcacaugcggauuugccagcaacaaaaccauagaaugugcuuguagagauaacaguuacacagcaaaaagacccuuugucaaauuaaauguggagacugauacagcggaaauaagauugaugugcacagagacuuauuuggacacccccagaccaaaugauggaagcauaacagggccuugcggaucugauggggacaaagggaguggaggcaucaagggaggauuuguucaucaaagaauggcauccaaaauuggaaggugguacucccgaacgaugucuaaaacuaaaagaauggggaugggacuguauguaaaguaugauggagacccauggacugacagugaagcccuugcucuuaguggaguaaugguuucaauggacgaaccugguugguauuccuuuggcuucgaaauaaaagauaagaaaugugauguccccuguauugggauagaaaugguacaugauggugggaaaacgacuuggcacucagcagcaacagccauuuacuguuuaaugggcucaggacaacugcugugggacacugucacagguguugauauggcucuguaa

SEQ ID NO: 61819 - RNA, 1401 nt, Artificial Sequence
  derived and/or modified CDS sequence (wt) from neuraminidase__InfluenzaB__AGX23934
augcuaccuucaacuauacaaacguuaacccuauuucucacaucagggggaguguuauuaucacuauaugugucagcuucauugucauacuuacuauauucggauauauugcuaaaauuuucacaaacagaaauaacugcaccaauaaugccauuggauuaugcaaacgcaucaaauguucaggcugugaaccauucugcagcaaaaggggugacacuucuucucccagaaccggaguggacauacccucguuuaucuugcccgggcucaaccuuucagaaagcacuccuaauuagcccccauagauucggagaaaccaaaggaaacucagcucccuugauaauaagggaaccuuuuauugcuuguggaccaacggaaugcaaacacuuugcucuaacccauuaugcagcucaaccagggggauacuacaauggaacaagagaagacagaaacaagcugaggcaucuaauuucagucaaauugggcaaaaucccaacaguagaaaacuccauuuuccauauggcagcuuggagcggguccgcaugccaugaugguaaagaauggacauauaucggaguugauggccccgacaguaaugcauuacucaaaauaaaauauggagaagcauauacugacacauaccauuccuaugcaaaaaacauccuaaggacacaagaaagugccugcaauugcaucgggggagauuguuaucuuaugauaacugauggcccagcuucagggauuagugaaugcagauuccuuaagauucgagagggccgaauaauaaaagaaauauuuccaacaggaagaguaaaacauacugaggaaugcacaugcggauuugccagcaacaaaaccauagaaugugcuuguagggauaacaguuacacagcaaaaagacccuuugucaaauuaaauguggagacugauacagcggaaauaagauugaugugcacagagacuuauuuggacacccccagaccaaaugauggaagcauaacagggccuugcgaaucugauggggacaaagggaguggaggcaucaagggaggauuuguucaucaaagaauggcauccaagauuggaaggugguacucucgaacgaugucuaaaacuaaaagaauggggaugggacuguauguaaaguaugauggagacccauggacugacagugaagcccuugcucuuaguggaguaaugguuucgauggaagaaccugguugguauuccuuuggcuucgaaauaaaagauaagaaaugugauguccccuguauugggauagaaaugguacaugauggugggaaaacgacuuggcacucagcagcaacagccauuuacuguuuaaugggcucaggacaacugcugugggacacugucacagguguugauauggcucuguaa

SEQ ID NO: 61820 - RNA, 1401 nt, Artificial Sequence
  derived and/or modified CDS sequence (wt) from neuraminidase__InfluenzaB__AGX23945
augcuaccuucaacuauacaaacguuaacccuauuucucacaucagggggaguguuauuaucacuauaugugucagcuucauugucauacuuacuauauucggauauauugcuaaaauuuucacaaacagagauaacugcaccaauaaugccacuggauugugcaaacgcaucaaauguucaggcugugaaccguucugcagcaaaaggggugacacuucuucucccagaaccggaguggacauacccucguuuaucuugcccggguucaaccuuucagaaagcacuccuaauuagcccccauagauucggagaaaccaaaggaaacucagcucccuugauaauaagggaaccuuuuauugcuuguggaccaacggaaugcaaacacuuugcucuaacccauuaugcagcccaaccagggggauacuacaauggaacaagagaagacagaaacaagcugagacaucuaauuucagucaaauugggcaaaaucccaacaguagaaaacuccauuuuccacauggcagcuuggagcggguccgcaugccaugaugguaaagaauggacauaugucggaguugauggccccgacaguaaugcauugcucaaaauaaaauauggagaagcauauacugacacauaccauuccuaugcaaaaaacauccuaaggacacaagaaagugccugcaauugcaucgggggagauuguuaucuuaugauaacugauggcccagcuucagggauuagugaaugcagauuccuuaagauucgagagggccgaauaauaaaagaaauauuuccaacaggaagaauaaaacauacugaggaaugcacaugcggauuugccagcaacaaaaccauagaaugugcuuguagagauaacaguuacacagcaaaaagacccuuugucaaauuaaauguggagacugauacagcggaaauaagauugaugugcacagagacuuauuuggacacccccagaccaaaugauggaagcauaacagggccuugcggaucugauggggacaaagggaguggaggcaucaagggaggauuuguucaucaaagaauggcauccaagauuggaaggugguacucccgaacgaugucuaaaacuaaaagaauggggaugggacuguauguaaaguaugauggagacccauggacugacagugaagcccuugcucuuaguggaguaaugguuucaauggacgaaccugguugguauuccuuuggcuucgaaauaaaagauaagaaaugugauguccccuguauugggauagaaaugguacaugauggugggaaaacgacuuggcacucagcagcaacagccauuuacuguuuaaugggcucaggacaacugcugugggacacugucacagguguugauauggcucuguaa

SEQ ID NO: 61821 - RNA, 1401 nt, Artificial Sequence
  derived and/or modified CDS sequence (wt) from neuraminidase__InfluenzaB__AGX23956
augcuaccuucaacuauacaaacguuaacccuauuucucacaucagggggaguguuauuaucacuauaugugucagcuucauugucauacuuacuauauucggauauauugcuaaaguuuucacaaacagaaauaacugcaccaauaaugccauuggauugugcaaacgcaucaaauguucaggcugugaaccguucugcagcaaaaggggugacacuucuucucccagaaccggaguggacauacccucguuuaucuugcccgggcucaaccuuucagaaagcacuccuaauuagcccccauagauucggagaaaccaaaggaaacucagcucccuugauaauaagggaaccuuuuauugccuguggaccaacggaaugcaaacacuuugcucuaacccauuaugcagcucaaccagggggauacuacaauggaacaagagaagacagaaacaagcugaggcaucuaauuucagucaaauugggcaaaaucccaacaguagaaaacuccauuuuccacauggcagcuuggagcggguccgcaugccaugaugguaaagaauggacauauaucggaauugauggccccgacaguaaugcauugcucaaaauaaaauauggagaagcauauacugacacauaccauuccuaugcaaaaaacauccuaaggacacaagaaagugccugcaauugcaucgggggagauuguuaucuuaugauaacugauggcccagcuucagggguuagugaaugcagauuccuuaagauucgagagggcagaauaauaaaagaaauauuuccaacaggaagaguaaaacauacugaggaaugcacaugcggauuugccagcaacaaaaccauagaaugugcuuguagagauaacaguuacacagcaaaaagacccuuugucaaauuaaauguggagacugauacagcggaaauaagauugaugugcacagagacuuauuuggacacccccagaccaaaugauggaagcauaacagggccuugcgaaucugauggggacaaagggaguggaggcaucaagggaggauuuguucaucaaagaauggcauccaagauuggaagaugguacucucgaacgaugucuaaaacuaaaagaauggggaugggacuguauguaaaguaugauggagacccauggacugacagugaagcccuugcucuuaguggaguaaugguuucaauggaagaaccugguugguauuccuuuggcuucgaaauaaaagauaagaaaugugauguccccuguauugggauagaaaugguacaugauggugggaaaacgacuuggcacucagcagcaacagccauuuauuguuuaaugggcucaggacaacugcugugggacacugucacagguguugauauggcucuguaa

SEQ ID NO: 61822 - RNA, 1401 nt, Artificial Sequence; identical to SEQ ID NO: 61159
  derived and/or modified CDS sequence (wt) from neuraminidase__InfluenzaB__AGX23967

SEQ ID NO: 61823 - RNA, 1401 nt, Artificial Sequence; identical to SEQ ID NO: 60972
  derived and/or modified CDS sequence (wt) from neuraminidase__InfluenzaB__AGX23978

SEQ ID NO: 61824 - RNA, 1401 nt, Artificial Sequence
  derived and/or modified CDS sequence (wt) from neuraminidase__InfluenzaB__AGX23989
augcuaccuucaacuauacaaacguuaacccuauuucucacaucagggggaguguuauuaucacuauaugugucagcuucauugucauacuuacuauauucggauauauugcuaaaauuuucacaaacagaaauaacugcaccaauaaugccauuggauugugcaaacgcaucaaauguucaggcugugaaccguucugcagcaaaaggggugacacuucuucucccagaaccggaguggacauacccucguuuaucuugcccgggcucaaccuuucagaaagcacuccuaauuagcccccauagauucggagaaaccaaaggaaacucagcucccuugauaauaagggaaccuuuuauugcuuguggaccaacggaaugcaaacacuuugcucuaacccauuaugcagcucaaccagggggauacuacaauggaacaagagaagacagaaacaagcugaggcaucuaauuucagucaaauugggcaaaaucccaacaguagaaaacuccauuuuccauauggcagcuuggagcggguccgcaugccaugaugguaaagaauggacauauaucggaguugauggccccgacaguaaugcauuacucaaaauaaaauauggagaagcauauacugacacauaccauuccuaugcaaaaaacauccuaaggacacaagaaagugccugcaauugcaucgggggagauuguuaucuuaugauaacugauggcccagcuucagggauuagugaaugcagauuccuuaagauucgagagggccgaauaauaaaagaaauauuuccaacaggaagaguaaaacauacugaggaaugcacaugcggauuugccagcaacaaaaccauagaaugugcuuguagagauaacagguacacagcaaaaagacccuuugucaaauuaaauguggagacugauaaagcggaaauaagauugaugugcacagagacuuauuuggacacccccagaccaaaugauggaagcauaacagggccuugcgaaucugauggggacaaagggaguggaggcaucaagggaggauuuguucaucaaagaauggcauccaagauuggaaggugguacucucgaacgaugucuaaaacuaaaagaauggggaugggacuguauguaaaguaugauggagacccauggacugacaguggagcccuugcucuuaguggaguaaugguuucgauagaagaaccugguugguauuccuuuggcuucgaaauaaaagauaagaaaugugauguccccuguauugggauagaaaugguacaugauggugggaaaacgacuuggcacucagcagcaacagccauuuacuguuuaaugggcucaggacaacugcugugggacacugucacagguguugauauggcucuguaa

SEQ ID NO: 61825 - RNA, 1401 nt, Artificial Sequence; identical to SEQ ID NO: 61790
  derived and/or modified CDS sequence (wt) from neuraminidase__InfluenzaB__AGX24000

SEQ ID NO: 61826 - RNA, 1401 nt, Artificial Sequence
  derived and/or modified CDS sequence (wt) from neuraminidase__InfluenzaB__AGX24011
augcuaccuucaacuauacaaacguuaacccuauuucucacaucagggggaguguuauuaucacuauaugugucagcuucauugucauacuuacuauauucggauauauugcuaaaauuuucacaaacagaaauaacugcaccaauaaugccauuggauuaugcaaacgcaucaaauguucaggcugugaaccauucugcagcaaaaggggugacacuucuucucccagaaccggaguggacauacccucguuuaucuugcccgggcucaaccuuucagaaagcacuccuaauuagcccccauagauucggagaaaccaaaggaaacucagcucccuugauaauaagggaaccuuuuauugcuuguggaccaacggaaugcaaacacuuugcucuaacccauuaugcagcucaaccagggggauacuacaauggaacaagagaagacagaaacaagcugaggcaucuaauuucagucaaauugggcaaaaucccaacaguagaaaacuccauuuuccauauggcagcuuggagcggguccgcaugccaugaugguaaagaauggacauauaucggaguugauggccccgacaguaaugcauuacucaaaauaaaauauggagaagcauauauugacacauaccauuccuaugcaaaaaacauccuaaggacacaagaaagugccugcaauugcaucgggggagauuguuaucuuaugauaacugauggcccagcuucagggauuagugaaugcagauuccuuaagauucgagagggccgaauaauaaaagaaauauuuccaacaggaagaguaaaacauacugaggaaugcacaugcggauuugccagcaacaaaaccauagaaugugcuuguagagauaacaguuacacagcaaaaagacccuuugucaaauuaaauguggagacugauacagcggaaauaagauugaugugcacagagacuuauuuggacacccccagaccaaaugauggaagcauaacagggccuugcgaaucugauggggacaaagggaguggaggcaucaagggaggauuuguucaucaaagaauggcauccaagauuggaaggugguacucucgaacgaugucuaaaacuaaaagaauggggaugggacuguauguaaaguaugauggagacccauggacugacagugaagcccuugcucuuaguggaguaaugguuucgauggaagaaccugguugguauuccuuuggcuucgaaauaaaagauaagaaaugugauguccccuguauugggauagaaaugguacaugauggugggaaaacgacuuggcacucagcagcaacagccauuuacuguuuaaugggcucaggacaacugcugugggacacugucacagguguugauauggcucuguaa

SEQ ID NO: 61827 - RNA, 1401 nt, Artificial Sequence; identical to SEQ ID NO: 60972
  derived and/or modified CDS sequence (wt) from neuraminidase__InfluenzaB__AGX24022

SEQ ID NO: 61828 - RNA, 1401 nt, Artificial Sequence
  derived and/or modified CDS sequence (wt) from neuraminidase__InfluenzaB__AGX24033
augcuaccuucaacuauacaaacguuaacccuauuucucacaucagggggaguguuauuaucacuauaugugucagcuucauugucauacuuacuauauucggauauauugcuaaaauuuucacaaacagaaauaacugcacaaauaaugccauuggauugugcaaacgcaucaaauguucaggcugugaaccguucugcagcaaaaggggugacacuucuucucccagaaccggaguggacauacccucguuuaucuugcccgggaucaaccuuucagaaagcacuccuaauuagcccccauagauucggagaaaccaaaggaaacucagcucccuugauaauaagggaaccuuuuauugcuuguggaccaacggaaugcaaacacuuugcucuaacccauuaugcagcucaaccagggggauacuacaauggaacaagagaagacagaaacaagcugaggcaucuaauuucagucaaauugggcaaaaucccaacaguagaaaacuccauuuuccauauggcagcuuggagcggguccgcaugccaugaugguaaagaauggacauauaucggaguugauggccccgacaguaaugcauuacucaaaauaaaauauggagaagcauauacugacacauaccauuccuaugcaaaaaacauccuaaggacacaagaaagugccugcaauugcaucgggggagauuguuaucuuaugauaacugauggcccagcuucagggauuagugaaugcagauuccuuaagauucgagagggccgaauaauaaaagaaauauuuccaacaggaagaguaaaacauacugaggaaugcacaugcggauuugccagcaacaaaaccauagaaugugcuuguagagauaacagguacacagcaaaaagacccuuugucaaauuaaauguggagacugauaaagcggaaauaagauugaugugcacagagacuuauuuggacacccccagaccaaaugauggaagcauaacagggccuugcgaaucugauggggacaaagggaguggaggcaucaagggaggauuuguucaucaaagaauggcauccaagauuggaaggugguacucucgaacgaugucuaaaacuaaaagaauggggaugggacuguauguaaaguaugauggagacccauggacugacaguggagcccuugcucuuaguggaguaaugguuucgauagaagaaccugguugguauuccuuuggcuucgaaauaaaagauaagaaaugugauguccccuguauugggauagaaaugguacaugauggugggaaaacgacuuggcacucagcagcaacagccauuuacuguuuaaugggcucaggacaacugcugugggacacugucacagguguugauauggcucuguaa

SEQ ID NO: 61829 - RNA, 1401 nt, Artificial Sequence; identical to SEQ ID NO: 60972
  derived and/or modified CDS sequence (wt) from neuraminidase__InfluenzaB__AGX24044

SEQ ID NO: 61830 - RNA, 1401 nt, Artificial Sequence
  derived and/or modified CDS sequence (wt) from neuraminidase__InfluenzaB__AGX24055
augcuaccuucaacuauacaaacguuaacccuauuucucacaucagggggaguguuauuaucacuauaugugucagcuucauugucauacuuacuauauucggauauauugcuaaaauuuucacaaacagaaauaacugcaccaauaaugccauuggauugugcaaacgcaucaaauguucaggcugugaaccguucugcaacaaaaggggugacacuucuucucccagaacuggaguggacauacccucguuuaucuugcccgggcucaaccuuucagaaagcacuccuaauuagcccccauagauucggagaaaccaaaggaaacucagcucccuugauaauaagggaaccuuuuguugccuguggaccaacggaaugcaaacacuuugcucuaacccauuaugcagcucaaccagggggauacuacaauggaacaagagaagacagaaacaagcugaggcaucuaauuucagucaaauugggaaaaaucccaacaguagaaaacuccauuuuccacauggcagcuuggagcggguccgcaugccaugaugguaaagaauggacauauaucggaguugauggccccaacaguaaugcauugcucaaaauaaaauauggagaagcauauacugacacauaccauuccuaugcaaaaaacauccuaaggacacaagaaagugccugcaauugcaucgggggagauuguuaucuuaugauaacugauggcccagcuucagggguuagugaaugcagauuccuuaagauucgagagggcagaauaauaaaagaaauauuuccaacaggaagaguaaaacauacugaggaaugcacaugcggauuugccagcaacaaaaccauagaaugugcuuguagagauaacaguuacacagcaaaaagacccuuugucaaauuaaauguggagacugauacagcggaaauaagauugaugugcacagagacuuauuuggacacccccagaccaaaugauggaagcauaacagggccuugcgaaucugauggggacaaagggaguggaggcaucaagggaggguuuguucaucaaagaauggcauccaagauuggaagaugguacucucgaacgaugucuaaaacuaaaagaauggggaugggacuguauguaaaguaugauggagacccauggacugacagugaagcccuugcucuuaguggaguaaugguuucaauggaagaaccugguugguauuccuuuggcuucgaaauaaaagauaagaaaugugauguccccuguauugggauagaaaugguacaugauggugggaaaacgacuuggcacucagcagcaacagccauuuauuguuuaaugggcucaggacaacugcugugggacacugucacagguguugauauggcucuguaa

SEQ ID NO: 61831 - RNA, 1401 nt, Artificial Sequence
  derived and/or modified CDS sequence (wt) from neuraminidase__InfluenzaB__AGX24066
augcuaccuucaacuauacaaacguuaaccuuauuucucacaucagggggaguguuauuaucacuauaugugucagcuucauugucauacuuacuauauucggauauauugcuaaaauuuucacgaacagaaauaacugcaccaauaaugccauuggauugugcaaacgcaucaaauguucaggcugugaaccguucugcaacaaaaggggugacacuucuucucccagaaccggaguggacguacccucguuuaucuugcccgggcucaaccuuucagaaagcacuccuaauuagcccccauagauucggagaaaccaaaggaaacucagcucccuugauaauaagggaaccuuuuauugcuuguggaccaaaggaaugcaaacauuuugcucuaacccauuaugcagcucaaccagggggauacuacaauggaacaagagaagacagaaacaagcugaggcaucuaauuucagucaaauugggcaaaaucccaacaguagaaaacucuauuuuccacauggcagcuuggagcggguccgcaugccaugaugguagagaauggacuuauaucggaguugauggccccgacaguaaugcauugcucaaaauaaaauauggagaagcauauacugacacauaccauuccuaugcaaaaaacauccuaaggacacaagaaagugccugcaauugcaucgggggugauuguuaucuuaugauaacugauggcccagcuucagggauuagugaaugcagauuccuuaagauucgggagggccgaauaauaaaagaaauauuuccaacaggaagaguaaaacauacugaggaaugcacaugcggauuugcuagcaacaaaaccauagaaugugccuguagagauaacaguuacacagcaaaaagacccuuugucaaauuaaauguggagacugauacagcggaaauaagauugaugugcacagagacuuauuuggacacccccagaccaaaugauggaagcauaacagggccuugcgaaucuaauggggacaaagggaguggaggcaucaagggaggauuuguucaccaaagaauggcauccaagauuggaaggugguacucucgaacgaugucuaaaacuaaaagaauggggaugggacuguauguaaaguaugauggagacccauggacugacagugaagcccuugcucuuaguggaguaaugguuucaauggaagaaccugguugguauuccuuuggcuucgaaauaaaagauaagaaaugugauguccccuguauugggauagaaaugguacaugauggugggaaaacgacuuggcacucagcagcaacagccauuuacuguuuaaugggcucaggacaacugcugugggacacugucacagguguuaauaugacucuguaa

SEQ ID NO: 61832 - RNA, 1401 nt, Artificial Sequence
  derived and/or modified CDS sequence (wt) from neuraminidase__InfluenzaB__AGX24077
augcuaccuucaacuauacaaacguuaacccuauuucucacaucagggggaguguuauuaucacuauaugugucagcuucauugucauacuuacuauauucggauauauugcuaaaauuuucacaaacagaaauaacugcaccaauaaugccauuggauugugcaaacgcaucaaauguucaggcugugaaccguucugcagcaaaaggggugacacuucuucucccagaaccggaguggacauacccucguuuaucuugcccgggcucaaccuuucagaaagcacuccuaauuagcccccauagauucggagaaaccaaaggaaacucagcucccuugauaauaagggaaccuuuuauugcuuguggaccaacggaaugcaaacacuuugcucuaacccauuaugcagcucaaccagggggauacuacaauggaacaagagaagacagaaacaagcugaggcaucuaauuucagucaaauugggcaaaaucccaacaguagaaaacuccauuuuccauauggcagcuuggagcggguccgcaugccaugaugguaaagaauggacauauaucggaguugauggccccgacaguaaugcauuacucaaaauaaaauauggagaagcauauacugacacauaccauuccuaugcaaaaaacauccuaaggacacaagaaagugccugcaauugcaucgggggaaauuguuaucuuaugauaacugauggcccagcuucagggauuagugaaugcagauuccuuaagauucgagagggccgaauaauaaaagaaauauuuccaacaggaagaguaaaacauacugaggaaugcacaugcggauuugccagcaacaaaaccauagaaugugcuuguagagauaacagguacacagcaaaaagacccuuugucaaauuaaauguggagacugauaaagcggaaauaagauugaugugcacagagacuuauuuggacacccccagaccaaaugauggaagcauaacagggccuugcgaaucugauggggacaaagggaguggaggcaucaagggaggauuuguucaucaaagaauggcauccaagauuggaaggugguacucucgaacgaugucuaaaacuaaaagaauggggaugggacuguauguaaaguaugauggagacccaugggcugacaguggagcccuugcucuuaguggaguaaugguuucgauagaagaaccugguugguauuccuuuggcuucgaaauaaaagauaagaaaugugauguccccuguauugggauagaaaugguacaugauggugggaaaacgacuuggcacucagcagcaacagccauuuacuguuuaaugggcucaggacaacugcugugggacacugucacagguguugauauggcucuguaa

SEQ ID NO: 61833 - RNA, 1401 nt, Artificial Sequence
  derived and/or modified CDS sequence (wt) from neuraminidase__InfluenzaB__AGX24088
augcuaccuucaacuauacaaacguuaacccuauuuaucacaucagggggaguguuauuaucacuauaugugucagcuucauugucauacuuacuauauucggauauauugcuaaaauuuucacaaacagaaauaacugcaccaauaaugccacuggauugugcaaacgcaucaaauguucaggcugugaaccguucugcagcaaaaggggugacacuucuucucccagaaccggaguggacauacccucguuuaucuugcccgggcucaaccuuucagaaagcacuccuaauuagcccccauagauucggagaaaccaaaggaaacucagcucccuugauaauaagggaaccuuuuauugcuuguggaccaacggaaugcaaacacuuugcucuaacccauuaugcagcccaaccagggggauacuacaauggaacaagagaagacagaaacaagcugaggcaucuaauuucagucaaauugggcaaaaucccaacaguagaaaacuccauuuuccacauggcagcuuggagcggguccgcaugccaugaugguaaagaauggacauaugucggaguugauggccccgacagugaugcauugcucaaaauaaaauauggagaagcauauacugacacauaccauuccuaugcaaaaaacauccuaaggacacaagaaagugccugcaauugcaucgggggagauuguuaucuuaugauaacugauggcccagcuucagggauuagugaaugcagauuccuuaagauucgagagggccgaauaauaaaagaaauauuuccaacaggaagaguaaaacauacugaggaaugcacaugcggauuugccagcaacaaaaccauagaaugugcuuguagagauaacaguuacacagcaaaaagacccuuugucaaauuaaauguggagacugauacagcggaaauaagauugaugugcacagagacuuauuuggacacccccagaccaaaugauggaagcauaacagggccuugcggaucugauggggacaaagggaguggaggcaucaagggaggauuuguucaucaaagaauggcauccaagauuggaaggugguacucccgaacgaugucuaaaacuaaaagaauggggaugggacuguauguaaaguaugauggagacccauggacugacagugaagcccuugcucuuaguggaguaaugguuucaauggacgaaccugguugguauuccuuuggcuucgaaauaaaagauaagaaaugugauguccccuguauugggauagaaaugguacaugauggugggaaaacgacuuggcacucagcagcaacagccauuuacuguuuaaugggcucaggacaacugcugugggacacugucacagguguugauauggcucuguaa

SEQ ID NO: 61834 - RNA, 1401 nt, Artificial Sequence
  derived and/or modified CDS sequence (wt) from neuraminidase__InfluenzaB__AGX24099
augcuaccuucaacuauacaaacguuaacccuauuucucacaucagggggaguguuauuaucacuauaugugucagcuucauugucauacuuacuauauucggauauauugcuaaaauuuucacaaacagaaauaacugcaccaauaaugccauuggauuaugcaaacgcaucaaauguucaggcugugaaccauucugcagcaaaaggggugacacuucuucucccagaaccggaguggacauacccucguuuaucuugcccgggcucaaccuuucagaaagcacuccuaauuagcccccauagauucggagaaaccaaaggaaacucagcucccuugauaauaagggaaccuuuuauugcuuguggaccaacggaaugcaaacacuuugcucuaacccauuaugcagcucaaccagggggauacuacaauggaacaagagaagacagaaacaagcugaggcaucuaauuucagucaaauugggcaaaaucccaacaguagaaaacuccauuuuccauauggcagcuuggagcggguccgcaugccaugaugguaaagaauggacauauaucggaguugauggccccgacaguaaugcauuacucaaaauaaaauauggagaagcauauacugacacauaccauuccuaugcaaaaaacauccuaaggacacaagaaagugccugcaauugcaucgggggagauuguuaucuuaugauaacugauggcccagcuucaggaauuagugaaugcagauuccuuaagauucgagagggccgaauaauaaaagaaauauuuccaacaggaagaguaaaacauacugaggaaugcacaugcggauuugccagcaacaaaaccauagaaugugcuuguagagauaacaguuacacagcaaaaagacccuuugucaaauuaaauguggagacugauacagcggaaauaagauugaugugcacagagacuuauuuggacacccccagaccaaaugauggaagcauaacagggccuugcgaaucugauggggacaaagggaguggaggcaucaagggaggauuuguucaucaaagaauggcauccaagauuggaaggugguacucucgaacgaugucuaaaacuaaaagaauggggaugggacuguauguaaaguaugauggagacccauggacugacagugaagcccuugcucuuaguggaguaaugguuucgauggaagaaccugguugguauuccuuuggcuucgaaauaaaagauaagaaaugugauguccccuguauugggauagaaaugguacaugauggugggaaaacgacuuggcacucagcagcaacagccauuuacuguuuaaugggcucaggacaacugcugugggacacugucacagguguugauauggcucuguaa

SEQ ID NO: 61835 - RNA, 1401 nt, Artificial Sequence
  derived and/or modified CDS sequence (wt) from neuraminidase__InfluenzaB__AGX24110
augcuaccuucaacuauacaaacguuaacccuauuucucacaucagggggaguguuauuaucgcuauaugugucagcuucauugucauacuuacuauauucggauauauugcuaaaauuuucacaaacagaaauaacugcaccaauaaugccacuggauugugcaaacgcaucaaauguucaggcugugaaccguucugcagcaaaaggggugacacuucuucucccagaaccggaguggacauacccucguuuaucuugcccgggcucaaccuuucagaaagcacuccuaauuagcccccauagauucggagaaaccaaaggaaacucagcucccuugauaauaagggaaccuuuuauugcuuguggaccaacggaaugcaaacacuuugcucuaacucauuaugcagcccaaccagggggauacuacaauggaacaagagaagacagaaacaagcugaggcaucugauuucagucaaauugggcaaaaucccaacaguagaaaacuccauuuuccacauggcagcuuggagcggguccgcaugccaugaugguaaagaauggacauaugucggaguugauggccccgacaguaaugcauugcucaaaauaaaauauggagaagcauauacugacacauaccauuccuaugcaaaaaacauccuaaggacacaagaaagugccugcaauugcaucgggggagauuguuaucuuaugauaacugauggcccagcuucagggauuagugaaugcagauuccuuaagauucgagagggccgaauaauaaaagaaauauuuccaacaggaagaguaaaacauacugaggaaugcacaugcggauuugccagcaacaaaaccauagaauguacuuguagagauaacaguuacacagcaaaaagacccuuugucaaauuaaauguggagacugauacagcggaaauaagauugaugugcacagagacuuauuuggacacccccagaccaaaugauggaagcauaacagggccuugcggaucugauggggacaaagggaguggaggcaucaagggaggauuuguucaucaaagaauggcauccaagauuggaaggugguacucccgaacgaugucuaaaacuaaaagaauggggaugggacuguauguaaaguaugauggagacccauggacugacagugaagcccuugcucuuaguggaguaaugguuucaauggacgaaccugguugguauuccuuuggcuucgaaauaaaagauaagaaaugugauguccccuguauugggauagaaaugguacaugauggugggaaaacgacuuggcacucagcagcaacagccauuuacuguuuaaugggcucaggacaacugcugugggacacugucacagguguugauauggcucuguaa

SEQ ID NO: 61836 - RNA, 1401 nt, Artificial Sequence
  derived and/or modified CDS sequence (wt) from neuraminidase__InfluenzaB__AGX24121
augcuaccuucaacuauacaaacguuaacccuauuucucacaucagggggaguguuauuaucacuauaugugucagcuucauugucauacuuacuauauucggauauauugcuaaaauuuucacaaacagaaauaacugcaccaauaaugccauuggauuaugcaaacgcaucaaauguucaggcugugaaccauucugcagcaaaaggggugacacuucuucucccagaaccggaguggacauacccucguuuaucuugcccgggcucaaccuuucagaaagcacuccuaauuagcccccauagauucggagaaaccaaaggaaacucagcucccuugauaauaagggaaccuuuuauugcuuguggaccaacggaaugcaaacacuuugcucuaacccauuaugcagcuaaaccagggggauacuacaauggaacaagagaagacagaaacaagcugaggcaucuaauuucagucaaauugggcaaaaucccaacaguagaaaacuccauuuuccauauggcagcuuggagcggguccgcaugccaugaugguaaagaauggacauauaucggaguugauggccccgacaguaaugcguuacucaaaauaaaauauggagaagcauauacugacacauaccauuccuaugcaaaaaacauccuaaggacacaagaaagugccugcaauugcaucgggggagauuguuaucuuaugauaacugauggcccagcuucagggauuagugaaugcagauuccuuaagauucgagagggccgaauaauaaaagaaauauuuccaacaggaagaguaaaacauacugaggaaugcacaugcggauuugccagcaacaaaaccauagaaugugcuuguagagauaacaguuacacagcaaaaagacccuuugucaaauuaaauguggagacugauacagcggaaauaagauugaugugcacagagacuuauuuggacacccccagaccaaaugauggaagcauaacagggccuugcgaaucugauggggacaaagggaguggaggcaucaagggaggauuuguucaucaaagaauggcauccaagauuggaaggugguacucucgaacgaugucuaaaacuaaaagaauggggaugggacuguauguaaaguaugauggagacccauggacugacagugaagcccuugcucuuaguggaguaaugguuucgauggaagaaccugguugguauuccuuuggcuucgaaauaaaagauaagaaaugugauguccccuguauugggauagaaaugguacaugauggugggaaaacgacuuggcacucagcagcaacagccauuuacuguuuaaugggcucaggacaacugcugugggacacugucacagguguugauauggcucuguaa

SEQ ID NO: 61837 - RNA, 1401 nt, Artificial Sequence
  derived and/or modified CDS sequence (wt) from neuraminidase__InfluenzaB__AGX24132
augcuaccuucaacuauacaaacguuaaccuuauuucucacaucagggggaguguuauuaucacuauaugugucagcuucauugucauacuuacuauauucggauauauugcuaaaauuuucacgaacagaaauaacugcaccaauaaugccauuggauugugcaaacgcaucaaauguucaggcugugaaccguucugcaacaaaaggggugacacuuccucucccagaaccggaguggacguacccucguuuaucuugcccgggcucaaccuuucagaaagcacuccuaauuagcccccauagauucggagaaaccaaaggaaacucagcucccuugauaauaagggaaccuuucauugcuuguggaccaaaggaaugcaaacauuuugcucuaacccauuaugcagcucaaccagggggauacuacaauggaacaagagaagacagaaacaagcugaggcaucuaauuucagucaaauugggcaaaaucccaacaguagaaaacucuauuuuccacauggcagcuuggagcggguccgcaugccaugaugguagagaauggacuuauaucggaguugauggccccgacaguaaugcauugcucaaaauaaaauauggagaagcauauacugacacauaccauuccuaugcaaaaaacauccuaaggacacaagaaagugccugcaauugcaucgggggugauuguuaucuuaugauaacugauggcccagcuuuagggauuagugaaugcagauuccuuaagauucgagagggccgaauaauaaaagaaauauuuccaacaggaagaguaaaacauacugaggaaugcacaugcggauuugccagcaacaaaaccauagaaugugccuguagagauaacaguuacacagcaaaaagacccuuugucaaauuaaauguggagacugauacagcggaaauaagauugaugugcacagagacuuauuuggacacccccagaccaaaugauggaagcauaacagggccuugcgaaucuaauggggacaaagggaguggaggcaucaagggaggauuuguucaccaaagaauggcauccaagauuggaaggugguacucucgaacgauguccaaaacuaaaagaauggggaugggacuguauguaaaguaugauggagacccauggacugacagugaagcccuugcucuuaguggaguaaugguuucaauggaagaaccugguugguauuccuuuggcuucgaaauaaaagauaagaaaugugauguccccuguauugggauagaaaugguacaugauggugggaaaacgacuuggcacucagcagcaacagccauuuacuguuuaaugggcucaggacaacugcugugggacacugucacagguguuaauaugacucuguaa

SEQ ID NO: 61838 - RNA, 1401 nt, Artificial Sequence
  derived and/or modified CDS sequence (wt) from neuraminidase__InfluenzaB__AGX24143
augcuaccuucaacuauacaaacguuaacccuauuucucacaucagggggaguguuauuaucacuauaugugucagcuucauugucauacuuacuauauucggauauauugcuaaaauuuucacaaacagaaauaacugcaccaauaaugccauuggauugugcaaacgcaucaaauguucaggcugugaaccguucugcagcaaaaggggugacacuucuucucccagaaccggaguggacauacccucguuuaucuugcccgggcucaaccuuucagaaagcacuccuaauuagcccccauagauucggagaaaccaaaggaaacucagcucccuugauaauaagggaaccuuuuauugcuuguggaccaacggaaugcaaacacuuugcucuaacccauuaugcagcucaaccagggggauacuacaauggaacaagagaagacagaaacaagcugaggcaucuaauuucagucaaauugggcaaaaucccaacaguagaaaacuccauuuuccauauggcagcuuggagcggguccgcaugccaugaugguaaagaauggacauauaucggaguugauggccccgacgguaaugcauugcucaaaauaaaauauggagaagcauauacugacacauaccauuccuaugcaaaaaacauccuaaggacacaagaaagugccugcaauugcauugggggagauuguuaucuuaugauaacugauggcccagcuucagggauuagugaaugcagauuccuuaagauucgagagggccgaauaauaaaagaaauauuuccaacaggaagagugaaacauacugaggaaugcacaugcggauuugccagcaacaaaaccauagaaugugcuugcagagauaacaguuacacagcaaaaagacccuuugucaaauuaaauguggagacugauacagcggaaauaagauugaugugcacagagacuuauuuggacacccccagaccaaaugauggaagcauaacagggccuugcgaaucugauggggacaaagggaguggaggcaucaagggaggauuuguucaucaaagaauggcauccaagauuggaaggugguacucucgaacgaugucuaaaacuaaaagaauggggaugggacuguauguaaaguaugauggagauccauggacugacagugaagcccuugcucuuaguggaguaaugguuucaauggaagaaccugguugguauuccuuuggcuucgaaauaaaagauaagaaaugugauguccccuguauugggauagaaaugguacaugauggugggaaaacgacuuggcacucagcagcaacagccauuuacuguuuaaugggcucaggacaacugcugugggacacugucacagguguugauauggcucuguaa

SEQ ID NO: 61839 - RNA, 1401 nt, Artificial Sequence; identical to SEQ ID NO: 60972
  derived and/or modified CDS sequence (wt) from neuraminidase__InfluenzaB__AGX24154

SEQ ID NO: 61840 - RNA, 1401 nt, Artificial Sequence
  derived and/or modified CDS sequence (wt) from neuraminidase__InfluenzaB__AGX24165
augcuaccuucaacuauacaaacguuaacccuauuucucacaucagggggaguguuauuaucacuauaugugucagcuucauugucauacuuacuauauucggauauauugcuaaaauuuucacaaacagaaauaacugcaccaauaaugccauuggauuaugcaaacgcaucaaauguucaggcugugaaccauucugcagcaaaaggggugacacuucuucucccagaaccggaguggacauacccucguuuaucuugcccgggcucaaccuuucagaaagcacuccuaauuagcccccauagauucggagaaaccaaaggaaacucagcucccuugauaauaagggaaccuuuuauugcuuguggaccaacggaaugcaaacacuuugcucuaacccauuaugcagcucaaccaggaggauacuacaauggaacaagagaagacagaaacaagcugaggcaucuaauuucagucaaauugggcaaaaucccaacaguagaaaacuccauuuuccauauggcagcuuggagcggguccgcaugccaugaugguaaagaauggacauauaucggaguugauggccccgacaguaaugcauuacucaaaauaaaauauggagaagcauauacugacacauaccauuccuaugcaaaaaacauccuaaggacacaagaaagugccugcaauugcaucgggggagauuguuaucuuaugauaacugauggcccagcuucagggauuagugaaugcagauuccuuaagauucgagagggccgaauaauaaaagaaauauuuccaacaggaagaguaaaacauacugaggaaugcacaugcggauuugccagcaacaaaaccauagaaugugcuuguagagauaacaguuacacagcaaaaagacccuuugucaaauuaaauguggagacugauacagcggaaauaagauugaugugcacagagacuuauuuggacacccccagaccaaaugauggaagcauaacagggccuugcgaaucugauggggacaaagggaguggaggcaucaagggaggauuuguucaucaaagaauggcauccaagauuggaaggugguacucucgaacgaugucuaaaacuaaaagaauggggaugggacuguauguaaaguaugauggagacccauggacugacagugaagcccuugcucuuaauggaguaaugguuucgauggaagaaccugguugguauuccuuuggcuucgaaauaaaagauaagaaaugugauguccccuguauugggauagaaaugguacaugauggugggaaaacgacuuggcacucagcagcaacagccauuuacuguuuaaugggcucaggacaacugcugugggacacugucacagguguugauauggcucuguaa

SEQ ID NO: 61841 - RNA, 1401 nt, Artificial Sequence
  derived and/or modified CDS sequence (wt) from neuraminidase__InfluenzaB__AGX24176
augcuaccuucaacuauacaaacguuaaccuuauuucucacaucagggggaguguuauuaucacuauaugugucagcuucauugucauacuuacuauauucggauauauugcuaaaauuuucacgaacagaaauaacugcaccaauaaugccauuggauugugcaaacgcaucaaauguucaggcugugaaccguucugcaacaaaaggggugacacuucuucucccagaaccagaguggacguacccucguuuaucuugcccgggcucaaccuuucagaaagcacuccuaauuagcccccauagauucggagaaaccaaaggaaacucagcucccuugauaauaagggaaccuuuuauugcuuguggaccaaaggaaugcaaacauuuugcucuaacccauuaugcagcucaaccagggggauacuacaauggaacaagagaagacagaaacaagcugaggcaucuaauuucagucaaauugggcaaaaucccaacaguagaaaacucuauuuuccacauggcagcuuggagcggguccgcaugccaugaugguagagaauggacuuauauaggaguugauggccccgacaguaaugcauugcucaaaauaaaauauggagaagcauauacugacacauaccauuccuaugcaaaaaacauccuaaggacacaagaaagugccugcaauugcaucgggggagauuguuaucuuaugauaacugauggcccagcuucagggauuagugaaugcagauuccuuaagauucgagagggccgaauaauaaaagaaauauuuccaacaggaagaguaaaacauacugaggaaugcacauguggauuugccagcaacaaaaccauagaaugugccuguagagauaacaguuacacagcaaaaagacccuuugucaaauuaaauguggagacugauacagcggaaauaagauugaugugcacagagacuuauuuggacacccccagaccaaaugauggaagcauaacagggccuugcgaaucuaauggggacaaagggaguggaggcaucaagggaggauuuguucaccaaagaauggcauccaagauuggaaggugguacucucgaacgaugucuaaaacuaaaagaauggggaugggacuguauguaaaguaugauggagacccauggacugacagugaagcccuugcucuuaguggaguaaugguuucaauggaagaaccugguugguauuccuuuggcuucgaaauaaaagauaagaaaugugauguccccuguauugggauagaaaugguacaugauggugggaaaacgacuuggcacucagcagcaacagccauuuacuguuuaaugggcucaggacaacugcugugggacacugucacagguguuaauaugacucuguaa

SEQ ID NO: 61842 - RNA, 1401 nt, Artificial Sequence; identical to SEQ ID NO: 60829
  derived and/or modified CDS sequence (wt) from neuraminidase__InfluenzaB__AGX24187

SEQ ID NO: 61843 - RNA, 1401 nt, Artificial Sequence
  derived and/or modified CDS sequence (wt) from neuraminidase__InfluenzaB__AGX24198
augcuaccuucaacuauacaaacguuaaccuuauuucucacaucagggggaguguuauuaucacuauaugugucagcuucauugucauacuuacuauauucggauauauugcuaaaauuuucacgaacagaaauaacugcaccaauaaugccauuggauugugcaaacgcaucaaauguucaggcugugaaccguucugcaacaaaaggggugacacuucuucucccagaaccggaguggacguacccucguuuaucuugcccgggcucaaccuuucagaaagcacuccuaauuagcccccauagauucggagaaaccaaaggaaacucagcucccuugauaauaagggaaccuuuuauugcuuguggaccaaaggaaugcaaacauuuugcucuaacccauuaugcagcucaaccagggggauacuacaauggaacaagagaagacagaaacaagcugaggcaucuaauuucagucaaauugggcaaaaucccaacaguagaaaacucuauuuuccacauggcagcuuggagcggguccgcaugccaugaugguagagaauggacuuauaucggaguugauggccccgacaguaaugcauugcucaaaauaaaauauggagaagcauauacugacacauaccauuccuaugcaaaaaacauccuaaggacacaagaaagugccugcaauugcaucgggggagauuguuaucuuaugauaacugauggcccagcuucagggauuagugaaugcagauuccuuaagauucgagagggccgaauaauaaaagaaauauuuccaacaggaagaguaaaacauacugaggaaugcacaugcggauuugccagcaacaaaaccauagaaugugccuguagagauaacaguuacacagcaaaaagacccuuugucaaauuaaauguggagacugauacagcagaaauaagauugaugugcacagagacuuauuuggacacccccagaccaaaugauggaagcauaacagggccuugcgaaucuaauggggacaaagggaguggaggcaucaagggaggauuuguucaccaaagaauggcauccaagauuggaaggugguacucucgaacgaugucuaaaacuaaaagaauggggaugggacuguauguaaaguaugauggagacccauggacugacagugaagcccuugcucuuaguggaguaaugguuucaauggaagaaccugguugguauuccuuuggcuucgaaauaaaagauaagaaaugugauguccccuguauugggauagaaaugguacaugauggugggaaaacgacuuggcacucagcagcaacagccauuuacuguuuaaugggcucaggacaacugcugugggacacugucacagguguuaauaugacucuguaa

SEQ ID NO: 61844 - RNA, 1401 nt, Artificial Sequence
  derived and/or modified CDS sequence (wt) from neuraminidase__InfluenzaB__AGX24231
augcuaccuucaacuauacaaacguuaacccuauuucucacaucagggggaguguuauuaucacuauaugugucagcuucauugucauacuuauuauauucggauauauugcuaaaauuuucacaaacagaaauaacugcaccaauaaugccauuggauugugcaaacgcaucaaauguucaggcugugaaccguucugcagcaaaaggggugacacuucuucucccagaaccggaguggacauacccucguuuaucuugcccgggcucaaccuuucagaaagcacuccuaauuagcccccauagauucggagaaaccaaaggaaacucagcucccuugauaauaagggaaccuuuuauugcuuguggaccaacggaaugcaaacacuuugcucuaacccauuaugcagcucaaccagggggauacuacaauggaacaagagaagacagaaacaagcugaggcaucuaauuucagucaaauugggcaaaaucccaacaguagaaaacuccauuuuccacauggcagcuuggagcggguccgcaugccaugaugguaaagaauggacauauaucggaguugauggccccgacaguaaugcauugcucaaaauaaaauauggagaagcauauacugacacauaccauuccuaugcaaaaaacauccuaaggacacaagaaagugccugcaauugcaucgggggagauuguuaucuuaugauaacugauggcccagcuucagggguuagugaaugcagauuccuuaagauucgagagggcagaauaauaaaagaaauauuuccaacaggaagaguaaaacauacugaggaaugcacaugcggauuugccagcaacaaaaccauagaaugugcuuguagagauaacaguuacacagcaaaaagacccuuugucaaauuaaauguggaaacugauacagcggaaauaagauugaugugcacagagacuuauuuggacacccccagaccaaaugauggaagcauaacagggccuugcgaaucugauggggacaaagggaguggaggcaucaagggaggauuuguucaucaaagaauggcauccaagauuggaaggugguacucucgaacgaugucuaaaacuaaaagaauggggaugggacuguauguaaaguaugauggagacccauggacugacagugaagcccuugcucuuaguggaguaaugguuucaauggaagaaccugguugguauuccuuuggcuucgaaauaaaagauaagaaaugugauguccccuguauugggauagaaaugguacaugauggugggaaaacgacuuggcacucagcagcaacagccauuuauuguuuaaugggcucaggacaacugcugugggacacugucacagguguugauauggcucuguaa

SEQ ID NO: 61845 - RNA, 1401 nt, Artificial Sequence; identical to SEQ ID NO: 60829
  derived and/or modified CDS sequence (wt) from neuraminidase__InfluenzaB__AGX24242

SEQ ID NO: 61846 - RNA, 1401 nt, Artificial Sequence
  derived and/or modified CDS sequence (wt) from neuraminidase__InfluenzaB__AGX24275
augcuaccuucaacuauacaaacguuaacccuauuucucacaucagggggaguguuauuaucacuauaugugucagcuucauugucauacuuacuauauucggauauauugcuaaaauuuucacaaacagaaauaacugcaccaauaaugccauuggauugugcaaacgcaucaaauguucaggcugugaaccguucugcagcaaaaggggugacacuucuucucccagaaccggaguggacauacccucguuuaucuugcccgggcucaaccuuucagaaagcacuccuaauuagcccccauagauucggagaaaccaaaggaaacucagcucccuugauaauaagggaaccuuuuauugcuuguggaccaacggaaugcaaacacuuugcucuaacccauuaugcagcucaaccagggggauacuacaauggaacaagagaagacagaaacaagcugaggcaucuaauuucagucaaauugggcaaaaucccaacaguagaaaacuccauuuuccauauggcagcuuggagcggguccgcaugccaugaugguaaagaauggacauauaucggaguugauggccccgacaguaaugcauugcucaaaauaaaauauggagaagcauauacugacacauaccauuccuaugcaaaaaacauccuaaggacacaagaaagugccugcaauugcaucgggggagauuguuaucuuaugauaacugauggcccagcuucagggauuagugaaugcagauuccuuaagauucgagagggcagaauaauaaaagaaauauuuccaacaggaagaguaaaacauacugaggaaugcacaugcggauuugccagcaacagaaccauagaaugugcuuguagagauaacaguuacacagcaaaaagacccuuugucaaauuaaauguggagacugauacagcggaaauaagauugaugugcacagagacuuauuuggacacccccagaccaaaugauggaagcauaacagggccuugcgaaucugauggggacaaagggaguggaggcaucaagggaggauuuguucaucaaagaauggcauccaagauuggaaggugguacucucgaacgaugucuaaaacuagaagaauggggaugggacuguauguaaaguaugauggagacccauggacugacagugaagcccuugcucuuaguggaguaaugguuucaauggaagaaccugguugguauuccuuuggcuucgaaauaaaagauaagaaaugugauguccccuguauugggauagaaaugguacaugauggugggaaaacgacuuggcacucagcagcaacagccauuuacuguuuaaugggcucaggacaacugcugugggacacugucacagguguugauauggcucuguaa

SEQ ID NO: 61847 - RNA, 1401 nt, Artificial Sequence; identical to SEQ ID NO: 61426
  derived and/or modified CDS sequence (wt) from neuraminidase__InfluenzaB__AGX24286

SEQ ID NO: 61848 - RNA, 1401 nt, Artificial Sequence
  derived and/or modified CDS sequence (wt) from neuraminidase__InfluenzaB__AGX24297
augcuaccuucaacuauacaaacguuaacccuauuucucacaucagggggaguguuauuaucacuauaugugucagcuucauugucauacuuacuauauucggauauauugcuaaaauuuucacaaacagaaauaacugcaccaauaaugccauuggauugugcaaacgcaucaaauguucaggcugugaaccguucugcagcaaaaggggugacacuucuucucccagaaccggaguggacauacccucguuuaucuugcccgggcucaaccuuucagaaagcacuccuaauuagcccccauagauucggagaaaccagaggaaacucagcucccuugauaauaagggaaccuuuuauugcuuguggaccaacggaaugcaaacacuuugcucuaacccauuaugcagcucaaccagggggauacuacaauggaacaagagaagacagaaacaagcugaggcaucuaauuucagucaaauugggcaaaaucccaacaguagaaaacuccauuuuccauauggcagcuuggagcggguccgcaugccaugaugguaaagaauggacauauaucggaguugauggccccgacaguaaugcauuacucaaaauaaaauauggagaagcauauacugacacauaccauuccuaugcaaaaaacauccuaaggacacaagaaagugccugcaauugcaucgggggagauuguuaucuuaugauaacugauggcccagcuucagggauuagugaaugcagauuccuuaagauucgagagggccgaauaauaaaagaaauauuuccaacaggaagaguaaaacauacugaggaaugcacaugcggauuugccagcaacaaaaccauagaaugugcuuguagagauaacaguuacacagcaaaaagacccuuugucaaauuaaauguggagacugauacagcggaaauaagauugaugugcacagagacuuauuuggacacccccagaccaaaugauggaagcauaacagggccuugcgaaucugauggggacaaagggaguggaggcaucaagggaggauuuguucaucaaagaauggcauccaagauuggaaggugguacucucgaacgaugucuaaaacuaaaagaauggggaugggacuguauguaaaguaugauggagacccauggacugacagugaagcccuugcucuuaguggaguaaugguuucgauggaagaaccugguugguauuccuuuggcuucgaaauaaaagauaagaaaugugauguccccuguauugggauagaaaugguacaugauggugggaaaacgacuuggcauucagcagcaacagccauuuacuguuuaaugggcucaggacaacugcugugggacacugucacagguguugauauggcucuguaa

SEQ ID NO: 61849 - RNA, 1401 nt, Artificial Sequence; identical to SEQ ID NO: 61426
  derived and/or modified CDS sequence (wt) from neuraminidase__InfluenzaB__AGX24319

SEQ ID NO: 61850 - RNA, 1401 nt, Artificial Sequence
  derived and/or modified CDS sequence (wt) from neuraminidase__InfluenzaB__AGX24330
augcuaccuucaacuauacaaacguuaacccuauuucucacaucagggggaguguuauuaucacuauaugugucagcuucauugucauacuuacuauauucggauauauugcuaaaauuuucacaaacagaaauaacugcaccaauaaugccauuggauuaugcaaacgcaucaaauguucaggcugugaaccauucugcagcaaagggggugacacuucuucucccagaaccggaguggacauacccucguuuaucuugcccgggcucaaccuuucagaaagcacuccuaauuagcccccauagauucggagaaaccaaaggaaacucagcucccuugauaauaagggaaccuuuuauugcuuguggaccaacggaaugcaaacacuuugcuuuaacccauuaugcagcucaaccagggggauacuacaauggaacaagagaagacagaaacaagcugaggcaucuaauuucagucaaauugggcaaaaucccaacaguagaaaacuccauuuuccauauggcagcuuggagcggguccgcaugccaugaugguaaagaauggacauauaucggaguugauggccccgacaguaaugcauuacucaaaauaaaauauggagaagcauauacugacacauaccauuccuaugcaaaaaacauccuaaggacacaagaaagugccugcaauugcaucgggggagauuguuaucuuaugauaacugauggcccagcuucagggauuagugaaugcagauuccuuaagauucgagagggccgaauaauaaaagaaauauuuccaacaggaagaguaaaacauacugaggaaugcacaugcggauuugccagcaacaaaaccauagaauguacuuguagagauaacaguuacacagcaaaaagacccuuugucaaauuaaauguggagacugauacagcggaaauaagauugaugugcacagagacuuauuuggacacccccagaccaaaugauggaagcauaacagggccuugcgaaucugauggggacaaagggaguggaggcaucaagggaggauuuguucaucaaagaauggcauccaagauuggaaggugguacucucgaacgaugucuaaaacuaaaagaauggggaugggacuguauguaaaguaugauggagacccauggacugacagugaagcccuugcucuuaguggaguaaugauuucgauggaagaaccugguugguauuccuuuggcuucgaaauaaaagauaagaaaugugauguccccuguauugggauagaaaugguacaugauggugggaaaacgacuugguacucagcagcaacagccauuuacuguuugaugggcucaggacaacugcugugggacacugucacagguguugauauggcucuguaa

SEQ ID NO: 61851 - RNA, 1401 nt, Artificial Sequence
  derived and/or modified CDS sequence (wt) from neuraminidase__InfluenzaB__AGX24341
augcuaccuucaacuauacaaacguuaaccuuauuucucacaucagggggaguguuauuaucacuauaugugucagcuucauugucauacuuacuauauucggauauauugcuaaaauuuucacgaacagaaauaacugcaccaauaaugccauuggauugugcaaacgcaucaaauguucaggcugugaaccguucugcaacaaaaggggugacacuucuucucccagaaccggaguggacguacccucguuuaucuugcccgggcucaaccuuucagaaagcacuccuaauuagcccccauagauucggagaaaccaaaggaaacucagcucccuugauaauaagggaaccuuuuauugcuuguggaccaaaggaaugcaaacauuuugcucuaacccauuaugcagcucaaccagggggauacuacaauggaacaagagaagacagaaacaagcugaggcaucuaauuucagucaaauugggcaaaaucccaacaguagaaaacucuauuuuccacauggcagcuuggagcggguccgcaugccaugaugguagagaauggacuuauaucggaguugauggccccgacaguaaugcauugcucaaaauaaaauauggagaagcauauacugacacauaccauuccuaugcaaaaaacauccuaaggacacaagaaagugccugcaauugcaucgggggagauuguuaucuuaugauaacugauggcccagcuucagggauuagugaaugcagauuccuuaagauucgagagggccgaauaauaaaagaaauauuuccaacaggaagaguaaaacauacugaggaaugcacaugcggauuugccagcaacaaaaccauagaaugugccuguagagauaacaguuauacagcaaaaagacccuuugucaaauuaaauguggagacugauacagcggaaauaagauugaugugcacagagacuuauuuggacacccccagaccaaaugauggaagcauaacagggccuugcgaaucuaauggggacaaagggaguggaggcaucaagggaggauuuguucaccaaagaauggcauccaagauuggaaggugguacucucgaacgaugucuaaaacuaaaagaauggggaugggacuguauguaaaguaugauggagacccauggacugacagugaagcccuuacucuuaguggaguaaugguuucaauggaagaaccugguugguauuccuuuggcuucgaaauaaaagauaagaaaugugauguucccuguauugggauagaaaugguacaugauggugggaaaacgacuuggcacucagcagcaacagccauuuacuguuuaaugggcucaggacaacugcugugggacacugucacagguguuaauaugacucuguaa

SEQ ID NO: 61852 - RNA, 1401 nt, Artificial Sequence
  derived and/or modified CDS sequence (wt) from neuraminidase__InfluenzaB__AGX24352
augcuaccuucaacuauacaaacguuaaccuuauuucucacaucagggggaguguuauuaucacuauaugugucagcuucauugucauacuuacuauauucggauauauugcuaaaauuuucacgaacagaaauaacugcaccaauaaugccauuggauugugcaaacgcaucaaauguucaggcugugaaccguucugcaacaaaaggggugacacuucuucucccagaaccggaguggacguacccucguuuaucuugcccgggcucaaccuuucagaaagcacuccuaauuagcccccauagauucggagaaaccaaaggaaacucagcucccuugauaauaagggaaccuuuuauugcuuguggaccaaaggaaugcaaacauuuugcucuaacccauuaugcagcucaaccagggggauacuacaauggaacaagagaagacagaaacaagcugaggcaucuaauuucagucaaauugggcaaaaucccgacaguagaaaacucuauuuuccacauggcagcuuggagcggguccgcaugccaugaugguagagaauggacuuauaucggaguugauggccccgacaauaaugcauugcucaaaauaaaauauggagaagcauauacugacacauaccauuccuaugcaaaaaacauccuaaggacacaagaaagugccugcaauugcaucgggggagauuguuaucuuaugauaacugauggcccagcuucagggauuagugaaugcagauuccuuaagauucgagagggccgaauaauaaaagaaauauuuccaacaggaagaguaaaacauacugaggaaugcacaugcggauuugccagcaacaaaaccauagaaugugccuguagagauaacaguuacacagcaaaaagacccuuugucaaauuaaauguggagacugauacagcggaaauaagauugaugugcacagagacuuauuuggacacccccagaccaaaugauggaagcauaacagggccuugcgaaucuaauggggacaaagggaguggaggcaucaagggaggauuuguucaccaaagaauggcauccaagauuggaaggugguacucucgaacgaugucuaaaacuaaaagaauggggaugggacuguauguaaaguaugauggagacccauggacugacagugaagcccuugcucuuaguggaguaaugguuucaauggaagaaccugguugguauuccuuuggcuucgaaauaaaagauaagaaaugugauguccccuguauugggauagaaaugguacaugauggugggaaaacgacuuggcacucagcagcaacagccauuuacuguuuaaugggcucaggacaacugcugugggacacugucacagguguuaauaugacucuguaa

SEQ ID NO: 61853 - RNA, 1401 nt, Artificial Sequence
  derived and/or modified CDS sequence (wt) from neuraminidase__InfluenzaB__AGX24363
augcuaccuucaacuauacaaacguuaacccuauuucucacaucagggggaguguuauuaucacuauaugugucagcuucauugucauacuuacuauauucggauauauugcuaaaauuuucacaaacagaaauaacugcaccaauaaugccauuggauugugcaaacgcaucaaauguucaggcugugaaccguucugcagcaaaaggggugacacuucuucucccagaaccggaguggacauacccucguuuaucuugcccgggcucaaccuuucagaaagcacuccuaauuagcccccauagauucggagaaaccagaggaaacucagcucccuugauaauaagggaaccuuuuauugcuuguggaccaacggaaugcaaacacuuugcucuaacccauuaugcagcucaaccagggggauacuacaauggaacaagagaagacagaaacaagcugaggcaucuaauuucagucaaauugggcaaaaucccaacaguagaaaacuccauuuuccauauggcagcuuggagcggguccgcaugccaugaugguaaagaauggacauauaucggaguugauggccccgacaguaaugcauuacucaaaauaaaauauggagaagcauauacugacacauaccauuccuaugcaaaaaacauccuaaggacacaagaaagugccugcaauugcaucgggggagauuguuaucuuaugauaacugauggcccagcuucagggauuagugaaugcagauuccuuaagauucgagagggccgaauaauaaaagaaauauuuccaacaggaagaguaaaacauacugaggaaugcacaugcggauuugccagcaacaaaaccauagaaugugcuuguagagauaacaguuacacagcaaaaagacccuuugucaaauuaaauguggagacugauacagcggaaauaagauugaugugcacagagacuuauuuggacacccccagaccaaaugauggaagcauaacagggccuugcgaaucugauggggacaaagggaguggaggcaucaagggaggauuuguucaucaaagaauggcauccaagauuggaaggugguacucucgaacgaugucuaaaacuaaaagaauggggaugggacuguauguaaaguaugauggagacccauggacugacagugaagcccuugcucuuaguggaguaaugguuucgauggaagaaccugguugguauuccuuuggcuucgaaauaaaagauaagaaaugugaugucccauguauugggauagaaaugguacaugauggugggaaaacgacuuggcauucagcagcaacagccauuuacuguuuaaugggcucaggacaacugcugugggacacugucacagguguugauauggcucuguaa

SEQ ID NO: 61854 - RNA, 1401 nt, Artificial Sequence
  derived and/or modified CDS sequence (wt) from neuraminidase__InfluenzaB__AGX24374
augcuaccuucaacuauacaaacguuaaccuuauuucucacaucagggggaguguuauuaucacuauaugugucagcuucauugucauacuuacuauauucggauauauugcuaaaauuuucacgaacagaaauaacugcaccaauaaugccauuggauugugcaaacgcaucaaauguucaggcugugaaccguucugcaacaaaaggggugacacuucuucucccagaaccggaguggacguacccucguuuaucuugcccgggcucaaccuuucagaaagcacuccuaauuagcccccauagauucggagaaaccaaaggaaacucagcucccuugauaauaagggaaccuuuuauugcuuguggaccaaaggaaugcaaacauuuugcucuaacccauuaugcagcucaaccagggggauacuacaauggaacaagagaagacagaaacaagcugaggcaucuaauuucagucaaauugggcaaaaucccaacaguagaaaacucuauuuuccacauggcagcuuggagcggguccgcaugccaugaugguagagaauggacuuauaucggaguugauggccccgacaauaaugcauuacucaaaauaaaauauggagaagcauauacugacacauaccauuccuaugcaaaaaacauccuaagaacacaagaaagugccugcaauugcaucgggggagauuguuaucuuaugauaacugauggcccagcuucagggauuagugaaugcagauuccuuaagauucgagagggccgaauaauaaaagaaauauuuccaacaggaagaguaaaacauacugaggaaugcacaugcggauuugccagcaacaaaaccauagaaugugccuguagagauaacaguuacacagcaaaaagacccuuugucaaauuaaauguggagacugauacagcggaaauaagauugaugugcacagagacuuauuuggacacccccagaccaaaugauggaagcauaacagggccuugcgaaucuaauggggacaaagggaguggaggcaucaagggaggauuuguucaccaaagaauggcauccaagauuggaaggugguacucucgaacgaugucuaaaacuaaaagaauggggaugggacuguauguaaaguaugauggagacccauggacugacagugaagcccuugcucuuaguggaguaaugguuucaauggaagaaccugguugguauuccuuuggcuucgaaauaaaagauaagaaaugugauguccccuguauugggauagaaaugguacaugauggugggaaaacgacuuggcacucagcagcaacagccauuuacuguuuaaugggcucaggacaacugcugugggacacugucacagguguuaauaugacucuguaa

SEQ ID NO: 61855 - RNA, 1401 nt, Artificial Sequence
  derived and/or modified CDS sequence (wt) from neuraminidase__InfluenzaB__AGX24385
augcuaccuucaacuauacaaacguuaaccuuauuucucacaucagggggaguguuauuaucacuauaugugucagcuucauugucauacuuacuauauucggauauauugcuaaaauuuucacgaacagaaauaacugcaccaacaaugccauuggauugugcaaacgcaucaaauguucaggcugugaaccguucugcaacaaaaggggugacacuucuucucccagaaccggaguggacguacccucguuuaucuugcccgggcucaaccuuucagaaagcacuccuaauuagcccccauagauucggagaaaccaaaggaaacucagcucccuugauaauaagggaaccuuuuauugcuuguggaccaaaggaaugcaaacauuuugcucuaacccauuaugcagcucaaccagggggauacuacaauggaacaagagaagacagaaacaagcugaggcaucuaauuucagucaaauugggcaaaaucccaacaguagaaaacucuauuuuccacauggcagcuuggagcggguccgcaugccaugaugguagagaauggacuuauaucggaguugauggccccgacaguaaugcauugcucaaaauaaaauauggagaagcauauacugacacauaccauuccuaugcaaaaaacauccuaaggacacaagaaagugcuugcaauugcaucgggggagauuguuaucuuaugauaacugauggcccagcuucagggauuagugaaugcagauuccuuaagauucgagagggccgaauaauaaaagaaauauuuccaacaggaagaguaaaacauacugaggaaugcacaugcggauuugccagcaacaaaaccauagaaugugccuguagagauaacaguuacacagcaaaaagacccuuugucaaauuaaauguggagacugauacagcggaaauaagauugaugugcacagagacuuauuuggacacccccagaccaaaugauggaagcauaacagggccuugcgaaucuaauggggacaaagggaguggaggcaucaagggaggauuuguucaccaaagaauggcauccaagauuggaaggugguacucucgaacgaugucuaaaacuaaaagaauggggaugggacuguauguaaaguaugauggagacccauggacugacagugaagcccuugcucuuaguggaguaaugguuucaauggaagaaccugguugguauuccuuuggcuucgaaauaaaagauaagaaaugugauguccccuguauugggauagaaaugguacaugauggugggaaaacgacuuggcacucagcagcaacagccauuuacuguuuaaugggcucaggacaacugcugugggacacuguuacagguguuaauaugacucuguaa

SEQ ID NO: 61856 - RNA, 1401 nt, Artificial Sequence
  derived and/or modified CDS sequence (wt) from neuraminidase__InfluenzaB__AGX24396
augcuaccuucaacuauacaaacguuaacccuauuucucacaucagggggaguguuauuaucacuauaugugucagcuucauugucauacuuacuauauucggauauauugcuaaaauuuucacaaacagaaauaacugcaccaauaaugccauuggauugugcaaacgcaucaaauguucaggcugugaaccguucugcagcaaaaggggugacacuucuucucccagaaccggaguggacauacccucguuuaucuugcccgggcucaaccuuucagaaagcacuccuaauuagcccccauagauucggagaaaccaaaggaaacucagcucccuugauaauaagggaaccuuuuauugcuuguggaccaacggaaugcaaacacuuugcucuaacccauuaugcagcucaaccagggggauacuacaauggaacaagagaagacagaaacaagcugaggcaucuaauuucagucaaauugggcaaaaucccaacaguagaaaacuccauuuuccauauggcagcuuggagcggguccgcaugccaugaugguaaagaauggacauauaucggaguugauggccccgacaguaaugcauuacucaaaauaaaauauggagaagcauauacugacacauaccauuccuaugcaaaaaacauccuaaggacacaagaaagugccugcaauugcaucgggggagauuguuaucuuaugauaacugauggcccagcuucagggauuagugaaugcagauuccuuaagauucgagagggccgaauaauaaaagaaauauuuccaacaggaagaguaaaacauacugaggaaugcacauguggauuugccagcaacaaaaccauagaaugugcuuguagagauaacagguacacagcaaaaagacccuuugucaaauuaaauguggagacugauacagcggaaauaagauugaugugcacagagacuuauuuggacacccccagaccaaaugauggaagcauaacagggccuugcgaaucugauggggacaaagggaguggaggcaucaagggaggauuuguucaucaaagaauggcauccaagauuggaaggugguacucucgaacgaugucuaaaacuaaaagaauggggaugggacuguauguaaaguaugauggagacccauggacugacaguggagcccuugcucuuaguggaguaaugguuucgauagaagaaccugguugguauuccuuuggcuucgaaauaaaagauaagaaaugugaugucccuuguauugggauagaaaugguacaugauggugggaaaacgacuuggcacucagcagcaacagccauuuacuguuuaaugggcucaggacaacugcugugggacacugucacagguguugauauggcucuguaa

SEQ ID NO: 61857 - RNA, 1401 nt, Artificial Sequence
  derived and/or modified CDS sequence (wt) from neuraminidase__InfluenzaB__AGX24407
augcuaccuucaacuauacaaacguuaacccuauuucucacaucagggggaguguuauuaucacuauaugugucagcuucauugucauacuuacuauauucggauauauugcuaaaauuuucacaaacagaaauaacugcaccaauaaugccauuggauugugcaaacgcaucaaauguucaggcugugaaccguucugcagcaaaaggggugacacuucuucucccagaaccggaguggacauacccucguuuaucuugcccgggcucaaccuuucagaaagcacuccuaauuagcccccauagauucggagaaaccaaaggaaacucagcucccuugauaauaagggaaccuuuuauugcuuguggaccaacggaaugcaaacacuuugcucuaacccauuaugcagcucaaccagggggauacuacaauggaacaagagaagacagaaacaagcugaggcaucuaauuucagucaaauugggcaaaaucccaacaguagaaaacuccauuuuccauauggcagcuuggagcggguccgcaugccaugaugguaaagaauggacauauaucggaguugauggccccgacaguaaugcauuacucaaaauaaaauauggggaagcauauacugacacauaccauuccuaugcaaaaaacauccuaaggacacaagaaagugccugcaauugcaucgggggagauuguuaucuuaugauaacugauggcccagcuucagggauuagugaaugcagauuccuuaagauucgagagggucgaauaauaaaagaaauauuuccaacaggaagaguaaaacauacugaggaaugcacaugcggauuugccagcaacaaaaccauagaaugugcuuguagagauaacagguacacagcaaaaagacccuuugucaaauuaaauguggagacugauacagcggaaauaagauugaugugcacagagacuuauuuggacacccccagaccaaaugauggaagcauaacagggccuugcgaaucugauggggacaaagggaguggaggcaucaagggaggauuuguucaucaaagaauggcauccaagauuggaaggugguacucucgaacgaugucuaaaacuaaaagaauggggaugggacuguauguaaaguaugauggagacccauggacugacaguggagcccuugcucuuaguggaguaaugguuucgauagaagaaccugguugguauuccuuuggcuucgaaauaaaagauaagaaaugugauguccccuguauugggauagaaaugguacaugauggugggaaaacgacuuggcacucagcagcaacagccauuuacuguuuaaugggcucaggacaacugcugugggacacugucacagguguugauauggcucuguaa

SEQ ID NO: 61858 - RNA, 1401 nt, Artificial Sequence; identical to SEQ ID NO: 60829
  derived and/or modified CDS sequence (wt) from neuraminidase__InfluenzaB__AGX24418

SEQ ID NO: 61859 - RNA, 1401 nt, Artificial Sequence
  derived and/or modified CDS sequence (wt) from neuraminidase__InfluenzaB__AGX24429
augcuaccuucaacuauacaaacguuaacccuauuucucacaucagggggaguguuauuaucacuauaugugucagcuucauugucauacuuacuauauucggauauauugcuaaaauuuucacaaacagaaauaacugcaccaauaaugccauuggauugugcaaacgcaucaaauguucaggcugugaaccguucugcagcaaaaggggugacacuucuucucccagaaccggaguggacauacccucguuuaucuugcccgggcucaaccuuucagaaagcacuccuaauuagcccccauagauucggagaaaccaaaggaaacucagcucccuugauaauaagggaaccuuuuauugcuuguggaccaacggaauguaaacacuuugcucuaacccauuaugcagcucaaccagggggauacuacaauggaacaagagaagacagaaacaagcugaggcaucuaauuucagucaaauuggggaaaaucccaacaguagaaaacuccauuuuccauauggcagcuuggagcggguccgcaugccaugaugguaaagaauggacguauaucggaguugauggccccgacaguaaugcauuacucaaaauaaaauauggagaagcauauacugacacauaccauuccuaugcaaaaaacauccuaaggacacaagaaagugccugcaauugcaucgggggagauuguuaucuuaugauaacugaugguccagcuucagggauuagugaaugcagauuccuuaagauucgagagggccgaauaauaaaagaaauauuuccaacaggaagaguaaaacauacugaggaaugcacaugcggauuugccagcaacaaaaccauagaaugugcuuguagagauaacaguuacacagcaaaaagacccuuugucaaauuaaauguggagacugauacagcggaaauaagauugaugugcacagagacuuauuuggacacccccagaccaaaugauggaagcauaacagggccuugcgaaucugauggggacaaagggaguggaggcaucaagggaggauuuguucaucaaagaauggcauccaagauuggaaggugguacucucgaacgaugucuaaaacuaaaagaauggggaugggacuguauguaaaguaugauggagacccauggacugacagugaagcccuugcucuuaguggaguaaugguuucgauggaagaaccugguugguauuccuuugguuucgaaauaaaagauaagaaaugugauguccccuguauugggauagaaaugguacaugauggugggaaaacgacuuggcacucagcagcaacagccauuuacuguuuaaugggcucaggacaacugcugugggacacugucacagguguugauauggcucuguaa

SEQ ID NO: 61860 - RNA, 1401 nt, Artificial Sequence
  derived and/or modified CDS sequence (wt) from neuraminidase__InfluenzaB__AGX24440
augcuaccuucaacuauacaaacguuaacccuauuucucacaucagggggaguguuauuaucacuauaugugucagcuucauugucauacuuacuauauucggauauauugcuaaaauuuucacaaacagaaauaacugcaccaauaaugccauuggauugugcaaacgcaucaaauguucaggcugugaaccguucugcagcaaaaggggugacacuucuucucccagaaccggaguggacauacccucguuuaucuugcccgggcucaaccuuucagaaagcacuccuaauuagcccccauagauucggagaaaccaaaggaaacucagcucccuugauaauaagggaaccuuuuauugcuuguggaacaacggaaugcaaacacuuugcucuaacccauuaugcagcucaaccagggggauacuacaauggaacaagagaagacagaaacaagcugaggcaucuaauuucagucaaauugggcaaaaucccaacaguagaaaacuccauuuuccauauggcagcuuggagcggguccgcaugccaugaugguaaagaauggacauauaucggaguugauggccccgacaguaaugcauuacucaaaauaaaauauggggaagcauauacugacacauaccauuccuaugcaaaaaacauccuaaggacacaagaaagugccugcaauugcaucgggggagauuguuaucuuaugauaacugauggcccagcuucagggauuagugaaugcagauuccuuaagauucgagagggucgaauaauaaaagaaauauuuccaacaggaagaguaaaacauacugaggaaugcacaugcggauuugccagcaacaaaaccauagaaugugcuuguagagauaacagguacacagcaaaaagacccuuugucaaauuaaauguggagacugauacagcggaaauaagauugaugugcacagagacuuauuuggacacccccagaccaaaugauggaagcauaacagggccuugcgaaucugauggggacaaagggaguggaggcaucaagggaggauuuguucaucaaagaauggcauccaagauuggaaggugguacucucgaacgaugucuaaaacuaaaagaauggggaugggacuguauguaaaguaugauggagacccauggacugacaguggagcccuugcucuuaguggaguaaugguuucgauagaagaaccugguugguauuccuuuggcuucgaaauaaaagauaagaaaugugauguccccuguauugggauagaaaugguacaugauggugggaaaacgacuuggcacucagcagcaacaaccauuuacuguuuaaugggcucaggacaacugcugugggacacugucacagguguugauauggcucuguaa

SEQ ID NO: 61861 - RNA, 1401 nt, Artificial Sequence; identical to SEQ ID NO: 61426
  derived and/or modified CDS sequence (wt) from neuraminidase__InfluenzaB__AGX24451

SEQ ID NO: 61862 - RNA, 1401 nt, Artificial Sequence
  derived and/or modified CDS sequence (wt) from neuraminidase__InfluenzaB__AGX24462
augcuaccuucaacuauacaaacguuaacccuauuucucacaucagggggaguguuauuaucacuauaugugucagcuucauugucauacuuacuauauucggauauauugcuaaaauuuucacaaacagaaauaacugcaccaauaaugccauuggauuaugcaaacgcaucaaauguucaggcugugaaccauucugcagcaaagggggugacacuucuucucccagaaccggaguggacauacccucguuuaucuugcccgggcucaaccuuucagaaagcacuccuaauuagcccccauagauucggagaaaccaaaggaaacucagcucccuugauaauaagggaaccuuuuauugcuuguggaccaacggaaugcaaacacuuugcuuuaacccauuaugcagcucaaccagggggauacuacaauggaacaagagaagacagaaacaagcugaggcaucuaauuucagucaaauugggcaaaaucccaacaguagaaaacuccauuuuccauauggcagcuuggagcggguccgcaugccaugaugguaaagaauggacauauaucggaguugauggccccgacaguaaugcauuacucaaaauaaaauauggagaagcauauacugacacauaccauuccuaugcaaaaaacauccuaaggacacaagaaagugccugcaauugcaucgggggagauuguuaucuuaugauaacugauggcccagcuucagggauuagugaaugcagauuccuuaagauucgagagggccgaauaauaaaagaaauauuuccaacaggaagaguaaaacauacugaggaaugcacaugcggauuugccagcaacaaaaccauagaaugugcuuguagagauaacaguuacacagcaaaaagacccuuugucaaauuaaauguggagacugauacagcggaaauaagauugaugugcacagagacuuauuuggacacccccagaccaaaugauggaagcauaacagggccuugcgaaucugauggggacaaagggaguggaggcaucaagggaggauuuguucaucaaagaauggcauccaagauuggaaggugguauucucgaacgaugucuaaaacuaaaagaauggggaugggacuguauguaaaguaugauggagacccauggacugacagugaagcccuugcucuuaguggaguaaugauuucgauggaagaaccugguugguauuccuuuggcuucgaaauaaaagauaagaaaugugauguccccuguauugggauagaaaugguacaugauggugggaaaacgacuuggcacucagcagcaacagccauuuacuguuugaugggcucaggacaacugcugugggacacugucacagguguugauauggcucuguaa

SEQ ID NO: 61863 - RNA, 1401 nt, Artificial Sequence
  derived and/or modified CDS sequence (wt) from neuraminidase__InfluenzaB__AGX24473
augcuaccuucaacuauacaaacguuaacccuauuucucacaucagggggaguguuauuaucacuauaugugucagcuucauugucauacuuacuauauucggauauauugcuaaaauuuucacaaacagaaauaacugcaccaauaaugccauuggauuaugcaaacgcaucaaauguucaggcugugaaccauucugcagcaaagggggugacacuucuucucccagaaccggaguggacauacccucguuuaucuugcccgggcucaaccuuucagaaagcacuccuaauuagcccccauagauucggagaaaccaaaggaaacucagcucccuugauaauaagggaaccuuuuauugcuuguggaccaacggaaugcaaacacuuugcuuuaacccauuaugcagcucaaccagggggauacuacaauggaacaagagaagacagaaacaagcugaggcaucuaauuucagucaaauugggcaaaaucccaacaguagaaaacuccauuuuccauauggcagcuuggagcggguccgcaugccaugaugguaaagaauggacauauaucggaguugauggccccgacaguaaugcauuacucaaaauaaaauauggagaagcauauacugacacauaccauuccuaugcaaaaaacauccuaaggacacaagaaagugccugcaauugcaucgggggagauuguuaucuuaugauaacugauggcccagcuucagggauuagugaaugcagauuccuuaagauucgagagggccgaauaauaaaagaaauauuuccaacaggaagaguaaaacauacugaggaaugcacaugcggauuugccagcaacaaaaccauagaaugugcuuguagagauaacaguuacacagcaaaaagacccuuugucaaauuaaauguggagacugauacagcggaaauaagauugaugugcacagagacuuauuuggacacccccagaccaaaugauggaagcauaacagggccuugcgaaucugauggggacaaagggaguggaggcaucaagggaggauuuguucaucaaagaauggcauccaagauuggaaggugguacucucgaacgaugucuaaaacuaaaagaauggggaugggacuguauguaaaguaugauggagacccauggacugacagugaagcccuugcucuuaguggaguaaugauuucgauggaagaaccugguugguauuccuuuggcuucgaaauaaaagauaagaaaugugauguccccuguauugggauagaaaugguacaugauggugggaaaacgacuuggcacucagcagcaacagccauuuacuguuugaugggcucaggacaacugcugugggacacugucacagguguugauauggcucuguaa

SEQ ID NO: 61864 - RNA, 1401 nt, Artificial Sequence
  derived and/or modified CDS sequence (wt) from neuraminidase__InfluenzaB__AGX24484
augcuaccuucaacuauacaaacguuaacccuauuucucacaucagggggaguguuauuaucacuauaugugucagcuucauugucauacuuacuauauucggauauauugcuaaaauuuucacaaacagaaauaacugcaccaauaaugccauuggauugugcaaacgcaucaaauguucaggcugugaaccguucugcagcaaaaggggugacacuucuucucccagaaccggaguggacauacccucguuuaucuugcccgggcucaaccuuucagaaagcacuccuaauuagcccccauagauucggagaaaccaaaggaaacucagcucccuugauaauaagggaaccuuuuauugcuuguggaccaacggaaugcaaacacuuugcucuaacccauuaugcagcucaaccagggggauacuacaauggaacaagagaagacagaaacaagcugaggcaucuaauuucagucaaauugggcaaaaucccaacaguagaaaacuccauuuuccauauggcagcuuggagcggguccgcaugccaugaugguaaagaauggacauauaucggaguugauggccccgacaguaaugcauugcucaaaauaaaauauggagaagcauauacugacacauaccauuccuaugcaaaaaacauccuaaggacacaagaaagugccugcaauugcaucgggggagauuguuaucuuaugauaacugauggcccagcuucagggauuagugaaugcagauuccuuaagauucgagagggcagaauaauaaaagaaauauuuccaacaggaagaguaaaacauacugaggaaugcacaugcggauuugccagcaacaaaaccauagaaugugcuuguagagauaacgguuacacagcaaaaagacccuuugucaaauuaaauguggagacugauacagcggaaauaagauugaugugcacagagacuuauuuggacacccccagaccaaaugauggaagcauaacagggccuugcgaaucugauggggacaaagggaguggaggcaucaagggaggauuuguucaucaaagaauggcauccaagauuggaaggugguacucucgaacgaugucuaaaacuagaagaauggggaugggacuguauguaaaguaugauggagacccauggacugacagugaagcccuugcucuuaguggaguaaugguuucaauggaagaaccugguugguauuccuuuggcuucgaaauaaaagauaagaaaugugauguccccuguauugggauagaaaugguacaugauggugggaaaacgacuuggcacucagcagcaacagccauuuacuguuuaaugggcucaggacaacugcugugggacacugucacagguguugauauggcucuguaa

SEQ ID NO: 61865 - RNA, 1401 nt, Artificial Sequence
  derived and/or modified CDS sequence (wt) from neuraminidase__InfluenzaB__AGX24495
augcuaccuucaacuauacaaacguuaacccuauuucucacaucagggggaguguuauuaucacuauaugugucagcuucauugucauacuuacuauauucggauauauugcuaaaauuuucacaaacagaaauaacugcaccaauaaugccauuggauugugcaaacgcaucaaauguucagguugugaaccguucugcagcaaaaggggugacacuucuucucccagaaccggaguggacauacccucguuuaucuugcccgggcucaaccuuucagaaagcacuccuaauuagcccccauagauucggagaaaccaaaggaaacucagcucccuugauaauaagggaaccuuuuauugcuuguggaccaacggaaugcaaacacuuugcucuaacccauuaugcagcucaaccagggggauacuacaauggaacaagagaagacagaaacaagcugaggcaucuaauuucagucaaauugggcaaaaucccaacaguagaaaacuccauuuuccauauggcagcuuggagcggguccgcaugccaugaugguaaagaauggacauauaucggaguugauggccccgacaguaaugcauugcucaaaauaaaauauggagaagcauauacugacacauaccauuccuaugcaaaaaacauccuaaggacacaagaaagugccugcaauugcaucgggggagauuguuaucuuaugauaacugauggcccagcuucagggauuagugaaugcagauuccuuaagauucgagagggcagaauaauaaaagaaauauuuccaacaggaagaguaaaacauacugaggaaugcacaugcggauuugccagcaacaaaaccauagaaugugcuuguagagauaacaguuacacagcaaaaagacccuuugucaaauuaaauguggagacugauacagcggaaauaagauugaugugcacagagacuuauuuggacacccccagaccaaaugauggaagcauaacagggccuugcgaaucugauggggacaaagggaguggaggcaucaagggaggauuuguucaucaaagaauggcauccaagauuggaaggugguacucucgaacgaugucuaaaacuagaagaauggggaugggacuguauguaaaguaugauggagacccauggacugacagugaagcccuugcucuuaguggaguaaugguuucaauggaagaaccugguugguauuccuuuggcuucgaaauaaaagauaagaaaugugauguccccuguauugggauagaaaugguacaugauggugggaaaacgacuuggcacucagcagcaacagccauuuacuguuuaaugggcucaggacaacugcugugggacacugucacagguguugauauggcucuguaa

SEQ ID NO: 61866 - RNA, 1401 nt, Artificial Sequence; identical to SEQ ID NO: 61426
  derived and/or modified CDS sequence (wt) from neuraminidase__InfluenzaB__AGX24506

SEQ ID NO: 61867 - RNA, 1401 nt, Artificial Sequence
  derived and/or modified CDS sequence (wt) from neuraminidase__InfluenzaB__AGX24517
augcuaccuucaacuauacaaacguuaacccuauuucucacaucagggggaguguuauuaucacuauaugugucagcuucauugucauacuuacuauauucggauauauugcuaaaauuuucacaaacagaaauaacugcaccaauaaugccauuggauugugcaaacgcaucaaauguucaggcugugaaccauucugcagcaaaaggggugacacuucuucucccagaaccggaguggacauacccucguuuaucuugcccgggcucaaccuuucagaaagcacuccuaauuagcccccauagauucggagaaaccaaaggaaacucagcucccuugauaauaagggaaccuuuuauugcuuguggaccaacggaaugcaaacacuuugcucuaacccauuaugcagcucaaccagggggauacuacaauggaacaagagaagacagaaacaagcugaggcaucuaauuucagucaaauugggcaaaaucccaacaguagaaaacuccauuuuccacauggcagcuuggagcggguccgcaugccaugaugguaaagaauggacauauaucggaguugauggccccgacaguaaugcauugcucaaaauaaaauauggagaagcauauacugacacauaccauuccuaugcaaaaaacauccuaaggacacaagaaagugccugcaauugcaucgggggagauuguuaucuuaugauaacugauggcccagcuucagggguuagugaaugcagauuccuuaagauucgagagggcagaauaauaaaagaaauauuuccaacaggaagaguaaaacauacugaggaaugcacaugcggauuugccagcaacaaaaccauagaaugugcuuguagagauaacaguuacacagcaaaaagacccuuugucaaauuaaauguggagacugauacagcggaaauaagauugaugugcacagagacuuauuuggacacccccagaccaaaugauggaagcauaacagggccuugcgaaucugauggggacaaagggaguggaggcaucaagggaggauuuguucaucaaagaauggcauccaagauuggaaggugguacucucgaacgaugucuaaaacuaaaagaauggggaugggacuguauguaaaauaugauggagacccauggacugacagugaagcccuugcucuuaguggaguaaugguuucaauggaagaaccugguugguauuccuuuggcuucgaaauaaaagauaagaaaugugauguccccuguauugggauagaaaugguacaugauggugggaaaacgacuuggcacucagcagcaacagccauuuauuguuuaaugggcucaggacaacugcugugggacacugucacagguguugauauggcucuguaa

SEQ ID NO: 61868 - RNA, 1401 nt, Artificial Sequence
  derived and/or modified CDS sequence (wt) from neuraminidase__InfluenzaB__AGX24528
augcuaccuucaacuauacaaacguuaacccuauuucucacaucagggggaguguuauuaucacuauaugugucagcuucauugucauacuuacuauauucggauauauugcuaaaauuuucacaaacagaaauaacugcaccaauaaugccauuggauugugcaaacgcaucaaauguucaggcugugaaccguucugcagcaaaaggggugacacuucuucucccagaaccggaguggacauacccucguuuaucuugcccgggcucaaccuuucagaaagcacuccuaauuagcccccauagauucggagaaaccaaaggaaacucagcucccuugauaauaagggaaccuuuuauugcuuguggaccaacggaaugcaaacacuuugcucuaacccauuaugcagcucaaccagggggauacuacaauggaacaagagaagacagaaacaagcugaggcaucuaauuucagucaaauugggcaaaaucccaacaguagaaaacuccauuuuccauauggcagcuuggagcggguccgcaugccaugaugguaaagaauggacauauaucggaguugauggccccgacaguaaugcauugcucaaaauaaaauauggagaagcauauacugacacauaccauuccuaugcaaaaaacauccuaaggacacaagaaagugccugcaauugcaucgggggagauuguuaucuuaugauaacugauggcccagcuucagggauuagugaaugcagauuccuuaagauucgagagggcagaauaauaaaagaaauauuuccaacaggaagaguaaaacauacugaggaaugcacaugcggauuugccagcaacaaaaccauagaaugugcuuguagagauaacaguuacacagcaaaaagacccuuugucaaauuaaauguggagacugauacagcggaaauaagauugaugugcacagagacuuauuuggacacccccagaccaaaugauggaagcauaacagggccuugcgaaucugauggggacaaagggaguggaggcaucaagggaggauuuguucaucaaagaauggcauccaagauuggaaggugguacucucgaacgaugucuaaaacuagaagaauggggaugggacuguauguaaaguaugauggagacccauggacugacagugaagcccuugcucuuaguggaguaaugguuucaauggaagaaccugguugguauuccuuuggcuucgaaauaaaagauaagaaaugugauguccccuguauugggauagaaaugguacaugauggugggaaaacgacuuggcacucagcagccacagccauuuacuguuuaaugggcucaggacaacugcugugggacacugucacagguguugauauggcucuguaa

SEQ ID NO: 61869 - RNA, 1401 nt, Artificial Sequence
  derived and/or modified CDS sequence (wt) from neuraminidase__InfluenzaB__AGX24539
augcuaccuucaacuauacaaacguuaaccuuauuucucacaucagggggaguguuauuaucacuauaugugucagcuucauugucauacuuacuauauucggauauauugcuaaaauuuucacgaacagaaauaacugcaccaauaaugccauuggauugugcaaacgcaucaaauguucaggcugugaaccguucugcaacaaaaggggugacacuucuucucccggaaccggaguggacguacccucguuuaucuugcccgggcucaaccuuucagaaagcacuccuaauuagcccccauagauucggagaaaccaaaggaaacucagcucccuugauaauaagggaaccuuuuauugcuuguggaccaaaggaaugcaaacauuuugcucuaacccauuaugcagcucaaccagggggauacuacaauggaacaagagaagacagaaacaagcugaggcaucuaauuucagucaaauugggcaaaaucccaacaguagaaaacucuauuuuccacauggcagcuuggagcggguccgcaugccaugaugguagagaauggacuuauaucggaguugauggccccgacaauaaugcauuacucaaaauaaaauauggagaagcauauacugacacauaccauuccuaugcaaaaaacauccuaagaacacaagaaagugccugcaauugcaucgggggagauuguuaucuuaugauaacugauggcccagcuucagggauuagugaaugcagauuccuuaagauucgagagggccgaauaauaaaagaaauauuuccaacaggaagaguaaaacauacugaggaaugcacaugcggauuugccagcaacaaaaccauagaaugugccuguagagauaacaguuacacagcaaaaagacccuuugucaaauuaaauguggagacugauacagcggaaauaagauugaugugcacagagacuuauuuggacacccccagaccaaaugauggaagcauaacagggccuugcgaaucuaauggggacaaagggaguggaggcaucaagggaggauuuguucaccaaagaauggcauccaagauuggaaggugguacucucgaacgaugucuaaaacuaaaagaauggggaugggacuguauguaaaguaugauggagacccauggacugacagugaagcccuugcucuuaguggaguaaugguuucaauggaagaaccugguugguauuccuuuggcuucgaaauaaaagauaagaaaugugauguccccuguauugggauagaaaugguacaugauggugggaaaacgacuuggcacucagcagcaacagccauuuacuguuuaaugggcucaggacaacugcugugggacacugucacagguguuaauaugacucuguaa

SEQ ID NO: 61870 - RNA, 1401 nt, Artificial Sequence
  derived and/or modified CDS sequence (wt) from neuraminidase__InfluenzaB__AGX24550
augcuaccuucaacuauacaaacguuaacccuauuucucacaucagggggaguguuauuaucacuauaugugucagcuucauugucauacuuacuauauucggauauauugcuaaaauuuucacaaacagaaauaacugcaccaauaaugccauuggauugugcaaacgcaucaaauguucaggcugugaaccguucugcagcaaaaggggugacacuucuuaucccagaaccggaguggacauacccucguuuaucuugcccgggcucaaccuuucagaaagcacuccuaauuagcccccauagauucggagaaaccaaaggaaacucagcucccuugauaauaagggaaccuuuuauugcuuguggaccaacggaaugcaaacacuuugcucuaacccauuaugcagcucaaccagggggauacuacaauggaacaagagaagacagaaacaagcugaggcaucuaauuucagucaaauuaggcaaaaucccaacaguagaaaacuccauuuuccauauggcagcuuggagcggguccgcaugccaugaugguaaagaauggacauauaucggaguugauggccccgacaguaaugcauuacucaaaauaaaauauggagaagcauauacugacacauaccauuccuaugcaaaaaacauccuaaggacacaagaaagugccugcaauugcaucgggggagauuguuaucuuaugauaacugauggcccagcuucagggauuagugaaugcagauuccuuaagauucgagagggccgaauaauaaaagaaauauuuccaacaggaagaguaaaacauacugaggaaugcacaugcggauuugccagcaacaaaaccauagaaugugcuuguagagauaacaguuacacagcaaaaagacccuuugucaaauuaaauguggagacugauacagcggaaauaagauugaugugcacagagacuuauuuggacacccccagaccaaaugauggaagcauaacagggccuugcgaaucugauggggacaaagggaguggaggcaucaagggaggauuuguucaucaaagaauggcauccaagauuggaaggugguacucucgaacgaugucuaaaacuaaaagaauggggaugggacuguauguaaaguaugauggagacccauggacugacagugaagcccuugcucuuaguggaguaaugguuucgauggaagaaccugguugguauuccuuuggcuucgaaauaaaagauaagaaaugugauguccccuguauugggauagaaaugguacaugauggugggaaaacgacuuggcacucagcagcaacagccauuuacuguuuaaugggcucaggacaacugcugugggacacugucacagguguugauauggcucuguaa

SEQ ID NO: 61871 - RNA, 1401 nt, Artificial Sequence; identical to SEQ ID NO: 61863
  derived and/or modified CDS sequence (wt) from neuraminidase__InfluenzaB__AGX24561

SEQ ID NO: 61872 - RNA, 1401 nt, Artificial Sequence; identical to SEQ ID NO: 60829
  derived and/or modified CDS sequence (wt) from neuraminidase__InfluenzaB__AGX24572

SEQ ID NO: 61873 - RNA, 1401 nt, Artificial Sequence
  derived and/or modified CDS sequence (wt) from neuraminidase__InfluenzaB__AGX24583
augcuaccuucaacuauacaaacguuaacccuauuucucacaucagggggaguguuauuaucacuauaugugucagcuucauugucauacuuacuauauucggauauauugcuaaaauuuucacaaacagaaauaacugcaccaauaaugccauuggauugugcaaacgcaucaaauguucaggcugugaaccguucugcagcaaaaggggugacacuucuucucccagaaccggaguggacauacccucguuuaucuugcccgggcucaaccuuucagaaagcacuccuaauuagcccccauagauucggagaaaccaaaggaaacucagcucccuugauaauaagggaaccuuuuauugcuuguggaccaacggaaugcaaacacuuugcucuaacccauuaugcagcucaaccagggggauacuacaauggaacaagagaagacagaaacaagcugaggcaucuaauuucagucaaauugggcaaaaucccaacaguagaaaacuccauuuuccauauggcagcuuggagcggguccgcaugccaugaugguaaagaauggacauauaucggaguugauggccccgacaguaaugcauugcucaaaauaaaauauggagaagcauauacugacacauaccauuccuaugcaaaaaacauccuaaggacacaagaaagugccugcaauugcaucgggggagauuguuaucuuaugauaacugauggcccagcuucagggauuagugaaugcagauuccuuaagauucgagagggcagaauaauaaaagaaauauuuccaacaggaagaguaaaacauacugaggaaugcacaugcggauuugccagcaacaaaaccauagaaugugcuuguagagauaacaguuacacagcaaaaaggcccuuugucaaauuaaauguggagacugauacggcggaaauaagauugaugugcacagagacuuauuuggacacccccagaccaaaugauggaagcauaacagggccuugcgaaucugauggggacaaagggaguggaggcaucaagggaggauuuguucaucaaagaauggcauccaagauuggaaggugguacucucgaacgaugucuaaaacuagaagaauggggaugggacuguauguaaaguaugauggagacccauggacugacaguggagcccuugcucuuaguggaguaaugguuucaauagaagaaccugguugguauuccuuuggcuucgaaauaaaagauaagaaaugugauguccccuguauugggauagaaaugguacaugauggugggaaaacgacuuggcacucagcagcaacagccauuuacuguuuaaugggcucaggacaacugcugugggacacugucacagguguugauauggcucuguaa

SEQ ID NO: 61874 - RNA, 1401 nt, Artificial Sequence; identical to SEQ ID NO: 61426
  derived and/or modified CDS sequence (wt) from neuraminidase__InfluenzaB__AGX24594

SEQ ID NO: 61875 - RNA, 1401 nt, Artificial Sequence
  derived and/or modified CDS sequence (wt) from neuraminidase__InfluenzaB__AGX24605
augcuaccuucaacuauacaaacguuaacccuauuucucacaucagggggaguguuauuaucacuauaugugucagcuucauugucauacuuacuauauucggauauauugcuaaaauuuucacaaacagaaauaacugcaccaauaaugccauuggauugugcaaacgcaucaaauguucaggcugugaaccguucugcagcaaaaggggugacacuucuucucccagaaccggaguggacauacccucguuuaucuugcccgggcucaaccuuucagaaagcacuccuaauuagcccccauagauucggagaaaccaaaggaaacucagcucccuugauaauaagggaaccuuuuauugcuuguggaccaacggaaugcaaacacuuugcucuaacccauuaugcagcucaaccagggggauacuacaauggaacaagagaagacagaaacaagcugaggcaucuaauuucagucaaauugggcaaaaucccaacaguagaaaacuccauuuuccauauggcagcuuggagcggguccgcaugccaugaugguaaagaauggacauauaucggaguugauggccccgacaguaaugcauugcucaaaauaaaauauggagaagcauauacugacacauaccauuccuaugcaaaaaacauccuaaggacacaagaaagugccugcaauugcaucgggggagauuguuaucuuaugauaacugauggcccagcuucagggauuagugaaugcagauuccuuaagauucgagagggcagaauaauaaaagaaauauuuccaacaggaagaguaaaacauacugaggaaugcacaugcggauuugccagcaacaaaaccauagaaugugcuuguagagauaacaguuacacagcaaaaagacccuuugucaaauuaaauguggagacugauacagcggaaauaagauugaugugcacagagacuuauuuggacacccccagaccaaaugauggaagcauaacagggccuugcgaaucugauggggacaaagggaguggaggcaucaagggaggauuuguucaucaaagaauggcauccaagauuggaaggugguacucucgaacgaugucuaaaacuagaagaauggggaugggacuguauguaaaguaugauggagacccauggacugacagugaagcccuugcucuuaguggaguaaugguuucaauggaagaaccugguugguauuccuuuggcuucgaaauaaaagauaagaaaugugauguccccuguauugggauagaaaugguacaugaugguggaaaaacgacuuggcacucagcagcaacagccauuuacuguuuaaugggcucaggacaacugcugugggacacugucacagguguugauauggcucuguaa

SEQ ID NO: 61876 - RNA, 1401 nt, Artificial Sequence; identical to SEQ ID NO: 61426
  derived and/or modified CDS sequence (wt) from neuraminidase__InfluenzaB__AGX24616

SEQ ID NO: 61877 - RNA, 1401 nt, Artificial Sequence; identical to SEQ ID NO: 61848
  derived and/or modified CDS sequence (wt) from neuraminidase__InfluenzaB__AGX24627

SEQ ID NO: 61878 - RNA, 1401 nt, Artificial Sequence; identical to SEQ ID NO: 61426
  derived and/or modified CDS sequence (wt) from neuraminidase__InfluenzaB__AGX24638

SEQ ID NO: 61879 - RNA, 1401 nt, Artificial Sequence
  derived and/or modified CDS sequence (wt) from neuraminidase__InfluenzaB__AGX24660
augcuaccuucaacuauacaaacguuaaccuuauuucucacaucagggggaguguuauuaucacuauaugugucagcuucauugucauacuuacuauauucggauauauugcuaaaauuuucacgaacagaaauaacugcaccaauaaugccauuggauugugcaaacgcaucaaauguucaggcugugaaccguucugcaacaaaaggggugacacuucuucucccagaaccggaguggacguacccucguuuaucuugcccgggcucaaccuuucagaaagcacuccuaauuagcccccauagauucggagaaaccaaaggaaacucagcucccuugauaauaagggaaccuuuuauugcuuguggaccaaaggaaugcaaacauuuugcucuaaccuauuaugcagcucaaccagggggauacuacaauggaacaagagaagacagaaacaagcugaggcaucuaauuucagucaaauugggcaaaaucccaacaguagaaaacucuauuuuccacauggcagcuuggagcggguccgcaugccaugaugguagagaauggacuuauaucggaguugauggccccgacaguaaugcauugcucaaaauaaaauauggagaagcauauacugacacauaccauuccuaugcaaaaaacauccuaaggacacaagaaagugccugcaauugcaucgggggagauuguuaucuuaugauaacugauggcccagcuucagggauuagugaaugcagauuccuuaagauucgagagggccgaauaauaaaagaaauauuuccaacaggaagaguaaaacauacugaggaaugcacaugcggauuugccagcaacaaaaccauagaaugugccuguagagauaacaguuacacagcaaaaagacccuuugucaaauuaaauguggagacugauacagcggaaauaagauugaugugcacagagacuuauuuggacacccccagaccaaaugauggaagcauaacagggccuugcgaaucuaauggggacaaagggaguggaggcaucaagggaggauuuguucaccaaagaauggcauccaagauuggaaggugguacucucgaacgaugucuaaaacuaaaagaauggggaugggacuguauguaaaguaugauggagacccauggacugacagugaagcccuugcucuuaguggaguaaugguuucaauggaagaaccugguugguauuccuuuggcuucgaaauaaaagauaagaaaugugauguccccuguauugggauagaaaugguacaugauggugggaaaacgacuuggcacucagcagcaacagccauuuacuguuuaaugggcucaggacaacugcugugggacacugucacagguguuaauaugacucuguaa

SEQ ID NO: 61880 - RNA, 1401 nt, Artificial Sequence
  derived and/or modified CDS sequence (wt) from neuraminidase__InfluenzaB__AGX24671
augcuaccuucaacuauacaaacguuaacccuauuucucacaucagggggaguguuauuguuacuauaugugucagcuucauugucauacuuacuauauucggauauauugcuaaaauuuucacaaacagaaauaacugcaccaauaaugccauuggauugugcaaacgcaucaaauguucaggcugugaaccguucugcagcaaaaggggugacacuucuucucccagaaccggaguggacauacccucguuuaucuugcccgggcucaaccuuucagaaagcacuccuaauuagcccccauagauucggagaaaccaaaggaaacucagcucccuugauaauaagggaaccuuuuauugcuuguggaccaacggaaugcaaacacuuugcucuaacccauuaugcagcucaaccagguggauacuacaauggaacaagagaagacagaaacaagcugaggcaucuaauuucagucaaauugggcaaaaucccaacaguagaaaacuccauuuuccauauggcagcuuggagcggguccgcaugccaugaugguaaagaauggacauauaucggaguugauggccccgacaguaaugcauuacucaaaauaaaauauggagaagcauauacugacacauaccauuccuaugcaaaaaacauccuaaggacacaagaaagugcaugcaauugcaucgggggagauuguuaucuuaugauaacugauggcccagcuucagggauuagugaaugcagauuccuuaagauucgagagggccgaauaauaaaagaaauauuuccaacaggaagaguaaaacauacugaggaaugcacaugcggauuugccagcaacaaaaccauagagugugcuuguagagauaacaguuacacagcaaaaagacccuuugucaaauuaaauguggagacugauacagcggaaauaagauugaugugcacagagacuuauuuggacacccccagaccaaaugauggaagcauaacagggccuugcgaaucugauggggacaaagggaguggaggcaucaagggaggauuuguucaucaaagaauggcauccaagauuggaaggugguacucucgaacgaugucuaaaacuaaaagaauggggaugggacuguauguaaaguaugauggagacccauggacugacagugaagcccuugcucuuaguggaguaaugguuucgauggaagaaccugguugguauuccuuuggcuucgaaauaaaagauaagaaaugugauauccccuguauugggauagaaaugguacaugauggugggaaaacgacuuggcacucagcagcaacagccauuuacuguuuaaugggcucaggacaacugcugugggacacugucacagguguugauauggcucuguaa

SEQ ID NO: 61881 - RNA, 1401 nt, Artificial Sequence
  derived and/or modified CDS sequence (wt) from neuraminidase__InfluenzaB__AGX24682
augcuaccuucaacuauacaaacguuaaccuuauuucucacaucagggggaguguuauuaucacuauaugugucagcuucauugucauacuuacuauauucggauauauugcuaaaauuuucacgaacagaaauaacugcaccaauaaugccauuggauugugcaaacgcaucaaauguucaggcugugaaccguucugcaacaaaaggggugacacuucuucucccagaaccggaguggacguacccucguuuaucuugcccgggcucaaccuuucagaaagcacuccuaauuagcccccauagauucggagaaaccaaaggaaacucagcucccuugauaauaagggaaccuuuuauugcuuguggaccaaaggaaugcaaacauuuugcucuaacccauuaugcagcucaaccagggggauacuacaauggaacaagagaagacagaaacaagcugaggcaucuaauuucagucaaauugggcaaaaucccaacaguagaaaacucuauuuuccacauggcagcuuggagcggguccgcaugccaugaugguagagaauggacuuauaucggaguugauggccccgacaguaaugcauugcucaaaauaaaauauggagaagcauauacugacacauaccauuccuaugcaaaaaacauccuaaggacacaagaaagugccugcaauugcaucgggggagauuguuaucuuaugauaacugauggcccagcuucagggauuagugaaugcagauuccuuaagauucgagagggccgaauaauaaaagaaauauuuccaacaggaagaguaaaacauacugaggaaugcacaugcggauuugccagcaacaaaaccauagaaugugccuguagagauaacaguuacacagcaaaaagacccuuugucaaauuaaauguggagacugauacagcggaaauaagauugaugugcacagagacuuauuuggacacccccagaccaaaugauggaagcauaacagggccuugcgaaucuaauggggacaaagggaguggaggcaucaagggaggauuuguucaccaaagaauggcauccaagauuggaaggugguacucucgaacgaugucuaaaacuaaaagaauggggaugggacuguauguaaaguaugauggagacccauggacugacagugaagcccuuguucuuaguggaguaaugguuucaauggaagaaccugguugguauuccuuuggcuucgaaauaaaagauaagaaaugugauguccccuguauugggauagaaaugguacaugauggugggaaaacgacuuggcacucagcagcaacagccauuuacuguuuaaugggcucaggacaacuacugugggacacugucacagguguuaauaugacucuguaa

SEQ ID NO: 61882 - RNA, 1401 nt, Artificial Sequence; identical to SEQ ID NO: 61426
  derived and/or modified CDS sequence (wt) from neuraminidase__InfluenzaB__AGX24693

SEQ ID NO: 61883 - RNA, 1401 nt, Artificial Sequence
  derived and/or modified CDS sequence (wt) from neuraminidase__InfluenzaB__AGX24704
augcuaccuucaacuauacaaacguuaacccuauuucucacaucagggggaguguuauuaucacuauaugugucagcuucauugucauacuuacuauauucggauauauugcuaaaauuuucacaaacagaaauaacugcaccaauaaugccauuggauugugcaaacgcaucaaauguucaggcugugaaccguucugcagcaaaaggggugacacuucuucucccagaaccggaguggacauacccucguuuaucuugcccgggcucaaccuuucagaaagcacuccuaauuagcccccauagauucggagaaaccaaaggaaacucagcuccuuugauaauaagggaaccuuuuauugcuuguggaccaacggaaugcaaacacuuugcucuaacccauuaugcagcucaaccagggggauacuacaauggaacaagagaagacagaaacaagcugaggcaucuaauuucagucaaauugggcaaaaucccaacaguagaaaacuccauuuuccauauggcagcuuggagcggguccgcaugccaugaugguaaagaauggacauauaucggaguugauggccccgacaguaaugcauugcucaaaauaaaauauggagaagcauauacugacacauaccauuccuaugcaaaaaacauccuaaggacacaagaaagugccugcaauugcaucgggggagauuguuaucuuaugauaacugauggcccagcuucagggauuagugaaugcagauuccuuaagauucgagagggcagaauaauaaaagaaauauuuccaacaggaagaguaaaacauacugaggaaugcacaugcggauuugccagcaacaaaaccauagaaugugcuuguagggauaacaguuacacagcaaaaagacccuuugucaaauuaaauguggagacugauacagcggaaauaagauugaugugcacagagacuuauuuggacacccccagaccaaaugauggaagcauaacagggccuugcgaaucugauggggacaaagggaguggaggcaucaagggaggauuuguucaucaaagaauggcauccaagauuggaaggugguacucucgaacgaugucuaaaacuagaagaauggggaugggacuguauguaaaguaugauggagacccauggacugacagugaagcccuugcucuuaguggaguaaugguuucaauggaagaaccugguugguauuccuuuggcuucgaaauaaaagauaagaaaugugauguccccuguauugggauagaaaugguacaugauggugggaaaacgacuuggcacucagcagcaacagccauuuacuguuuaaugggcucaggacaacugcugugggacacugucacagguguugauauggcucuguaa

SEQ ID NO: 61884 - RNA, 1401 nt, Artificial Sequence
  derived and/or modified CDS sequence (wt) from neuraminidase__InfluenzaB__AGX24715
augcuaccuucaacuauacaaacguuaacccuauuucucacaucagggggaguguuauuaucacuauaugugucagcuucauugucauacuuacuauauucggauauauugcuaaaauuuucacaaacagaaauaacugcaccaauaaugccauuggauugugcaaacgcaucaaauguucaggcugugaaccguucugcagcaaaaggggugacacuucuucucccagaaccggaguggacauacccucguuuaucuugcccgggcucaaccuuucagaaagcacuccuaauuagcccccauagauucggagaaaccaaaggaaacucagcuccuuugauaauaagggaaccuuuuauugcuuguggaccaacggaaugcaaacacuuugcucuaacccauuaugcagcucaaccagggggauacuacaauggaacaagagaagacagaaacaagcugaggcaucuaauuucagucaaauugggcaaaaucccaacaguagaaaacuccauuuuccauauggcagcuuggagcggguccgcaugccaugaugguaaagaauggacauauaucggaguugauggccccgacaguaaugcauugcucaaaauaaaauauggagaagcauauacugacacauaccauuccuaugcaaaaaacauccuaaggacacaagaaagugccugcaauugcaucgggggagauuguuaucuuaugauaacugauggcccagcuucagggauuagugaaugcagauuccuuaagauucgagagggcagaauaauaaaagaaauauuuccaacaggaagaguaaaacauacugaggaaugcacaugcggauuugccagcaacaaaaccauagaaugugcuuguagagauaacaguuacacagcaaaaagacccuuugucaaauuaaauguggagacugauacagcggaaauaagauugaugugcacagagacuuauuuggacacccccagaccaaaugauggaagcauaacagggccuugcgaaucugauggggacaaagggaguggaggcaucaagggaggauuuguucaucaaagaauggcauccaagauuggaaggugguacucucgaacgaugucuaaaacuagaagaauggggaugggacuguauguaaaguaugauggagacccauggacugacagugaagcccuugcucuuaguggaguaaugguuucaauggaagaaccugguugguauuccuuuggcuucgaaauaaaagauaagaaaugugauguccccuguauugggauagaaaugguacaugauggugggaaaacgacuuggcacucagcagcaacagccauuuacuguuuaaugggcucaggacaacugcugugggacacugucacagguguugauauggcucuguaa

SEQ ID NO: 61885 - RNA, 1401 nt, Artificial Sequence
  derived and/or modified CDS sequence (wt) from neuraminidase__InfluenzaB__AGX24737
augcuaccuucaacuauacaaacguuaacccuauuucucacaucagggggaguguuauuaucacuauaugugucagcuucauugucauacuuacuauauucggauauauugcuaaaauuuucacaaacagaaauaacugcaccaauaaugccauuggauugugcaaacgcaucaaauguucaggcugugaaccguucugcagcaaaaggggugacacuucuucucccagaaccggaguggacauacccucguuuaucuugcccgggcucaaccuuucagaaagcacuccuaauuagcccccauagauucggagaaaccaaaggaaacucagcucccuugauaauaagggaaccuuuuauugcuuguggaacaacggaaugcaaacacuuugcucuaacccauuaugcagcucaaccagggggauacuacaauggaacaagagaagacagaaacaagcugaggcaucuaauuucagucaaauugggcaaaaucccaacaguagaaaacuccauuuuccauauggcagcuuggagcggguccgcaugccaugaugguaaagaauggacauauaucggaguugauggccccgacaguaaugcauuacucaaaauaaaauauggggaagcauauacugacacauaccauuccuaugcaaaaaacauccuaaggacacaagaaagugccugcaauugcaucgggggagauuguuaucuuaugauaacugauggcccagcuucagggauuagugaaugcagauuccuuaagauucgagagggucgaauaauaaaagaaauauuuccaacaggaagaguaaaacauacugaggaaugcacaugcggauuugccagcaacaaaaccauagaaugugcuuguagagauaacagguacacagcaaaaagacccuuugucaaauuaaauguggagacugauacagcggaaauaagauugaugugcacagagacuuauuuggacacccccagaccaaaugauggaagcauaacagggccuugcgaaucugauggggacaaagggaguggaggcaucaagggaggauuuguucaucaaagaauggcauccaagauuggaaggugguacucucgaacaaugucuaaaacuaaaagaauggggaugggacuguauguaaaguaugauggagacccauggacugacaguggagcccuugcucuuaguggaguaaugguuucgauagaagaaccugguugguauuccuuuggcuucgaaauaaaagauaagaaaugugauguccccuguauugggauagaaaugguacaugauggugggaaaacgacuuggcacucagcagcaacagccauuuacuguuuaaugggcucaggacaacugcugugggacacugucacagguguugauauggcucuguaa

SEQ ID NO: 61886 - RNA, 1401 nt, Artificial Sequence
  derived and/or modified CDS sequence (wt) from neuraminidase__InfluenzaB__AGX24748
augcuaccuucaacuauacaaacguuaacccuauuucucacaucagggggaguguuauuaucacuauaugugucagcuucauugucauacuuacuauauucggauauauugcuaaaauuuucacaaacagaaauaacugcaccaauaaugccauuggauugugcaaacgcaucaaauguucaggcugugaaccguucugcagcaaaaggggugacacuucuucucccagaaccggaguggacauacccucguuuaucuugcccgggcucaaccuuucagaaagcacuccuaauuagcccccauagauucggagaaaccaaaggaaacucagcucccuugauaauaagggaaccuuuuauugcuuguggaccaacggaaugcaaacacuuugcucuaacccauuaugcagcucaaccagggagauauuacaauggaacaagagaagacagaaacaagcugaggcaucuaauuucagucaaauugggcaaaaucccaacaguagaaaacuccauuuuccauauggcagcuuggagcggauccgcaugccaugaugguaaagaauggacauauaucggaguugauggccccgacaguaaugcauugcucaaaauaaaauauggagaagcauauacugacacauaccauuccuaugcaaaaaacauccuaaggacacaagaaagugccugcaauugcaucgggggagauuguuaucuuaugauaacugauggcccagcuucagggauuagugaaugcagauuccuuaagauucgagagggccgaauaauaaaagaaauauuuccaacaggaagaguaaaacauacugaggaaugcacaugcggauuugccagcaacaaaaccauagaaugugcuuguagagauaacaguuacacagcaaaaagacccuuugucaaauuaaauguggagacugauacagcggaaauaagauugauguguacagagacuuauuuggacacccccagaccaaaugauggaagcauaacagggccuugcgaaucugauggggacaaagggaguggaggcaucaagggaggauuuguucaucaaagaauggcauccaagauuggaaggugguacucucgaacgaugucuaaaacuaaaagaauggggauggggcuguauguaaaguaugauggagacccauggacugacagugaagcccuugcucuuaguggaguaaugguuucgauggaagaaccugguugguauuccuuuggcuucgaaauaaaagauaagaaaugugauguccccuguauugggauagaaaugguacaugauggugggaaaacgacuuggcacucagcagcaacagccguuuacuguuuaaugggcucaggacaacugcugugggacacugucacagguguugauauggcucuguaa

SEQ ID NO: 61887 - RNA, 1401 nt, Artificial Sequence
  derived and/or modified CDS sequence (wt) from neuraminidase__InfluenzaB__AGX24759
augcuaccuucaacuauacaaacguuaacccuauuucucacaucagggggaguguuauugucacuauaugugucagcuucauugucauacuuacuauauucggauauauugcuaaaauuuucacaaacagaaauaacugcaccaauaaugccauuggauugugcaaacgcaucaaauguucaggcugugaaccguucugcagcaaaaggggugacacuucuucucccagaaccggaguggacauacccucguuuaucuugcccgggcucaaccuuucagaaagcacuccuaauuagcccccauagauucggagaaaccaaaggaaacucagcucccuugauaauaagggaaccuuuuauugcuuguggaccaacggaaugcaaacacuuugcucuaacccauuaugcagcucaaccagggggauacuacaauggaacaagagaagacagaaacaagcugaggcaucuaauuucagucaaauugggcaaaaucccaacaguagaaaacuccauuuuccauauggcagcuuggagcggguccgcaugccaugaugguaaagaauggacauauaucggaguugauggccccgacaguaaugcauuacucaaaauaaaauauggagaagcauauacugacacauaccauuccuaugcaaaaaacauccuaaggacacaagaaagugcaugcaauugcaucgggggagauuguuaucuuaugauaacugauggcccagcuucagggauuagugaaugcagauuccuuaagauucgagagggccgaauaauaaaagaaauauuuccaacaggaagaguaaaacauacugaggaaugcacaugcggauuugccagcaacaaaaccauagaaugugcuuguagagauaacaguuacacagcaaaaagacccuuugucaaauuaaauguggagacugauacagcggaaauaagauugaugugcacagagacuuauuuggacacccccagaccaaaugauggaagcauaacagggccuugcgaaucugauggggacaaagggaguggaggcaucaagggaggauuuguucaucaaagaauggcauccaagauuggaaggugguacucucgaacgaugucuaaaacuaaaagaauggggaugggacuguauguaaaguaugauggagacccauggacugacagugaagcccuugcucuuaguggaguaaugguuucgauggaagaaccugguugguauuccuuuggcuucgaaauaaaagauaagaaaugugauauccccuguauugggauagaaaugguacaugauggugggaaaacgacuuggcacucagcagcaacagccauuuacuguuuaaugggcucaggacaacugcugugggacacugucacagguguugauauggcucuguaa

SEQ ID NO: 61888 - RNA, 1401 nt, Artificial Sequence
  derived and/or modified CDS sequence (wt) from neuraminidase__InfluenzaB__AGX24770
augcuaccuucaacuauacaaacguuaacccuauuucucacaucagggggaguguuauuaucacuauaugugucagcuucauugucauacuuacuauauucggauauauugcuaaaauuuucacaaacagaaauaacugcaccaauaaugccauuggauugugcaaacgcaucaaauguucaggcugugaaccguucugcagcaaaaggggugacacuucuucucccagaaccggaguggacauacccucguuuaucuugcccgggcucaaccuuucagaaagcacuccuaauuagcccccauagauucggagaaaccaaaggaaacucagcucccuugauaauaagggaaccuuuuauugcuuguggaccaacggaaugcaaacacuuugcucuaacccauuaugcagcucaaccagggggauacuacaauggaacaagagaagacagaaacaagcugaggcaucuaauuucagucaaauugggcaaaaucccaacaguagaaaacuccauuuuccauauggcagcuuggagcggguccgcaugccaugaugguaaagaauggacauauaucggaguugauggccccgacaguaaugcauugcucaaaauaaaauauggagaagcauauacugacacauaccauuccuaugcaaaaaacauccuaaggacacaagaaagugccugcaauugcaucgggggagauuguuaucuuaugauaacugauggcccagcuucagggauuagugaaugcagauuccuuaagauucgagagggcagaauaauaaaagaaauauuuccaacaggaagaguaaaacauacugaggaaugcacaugcggauuugccagcaacaaaaccauagaaugugcuuguagagauaacaguuacacagcaaaaagacccuuugucaaauuaaauguggagacugauacagcggaaauaagauugaugugcacagagacuuauuuggacacccccagaccgaaugauggaagcauaacagggccuugcgaaucugauggggacaaagggaguggaggcaucaagggaggauuuguucaucaaagaauggcauccaagauuggaaggugguacucucgaacgaugucuaaaacuagaagaauggggaugggacuguauguaaaguaugauggagacccauggacugacagugaagcccuugcucuuaguggaguaaugguuucaauggaagaaccugguugguauuccuuuggcuucgaaauaaaagauaagaaaugugauguccccuguauugggauagaaaugguacaugauggugggaaaacgacuuggcacucagcagcaacagccauuuacuguuuaaugggcucaggacaacugcugugggacacugucacagguguugauauggcucuguaa

SEQ ID NO: 61889 - RNA, 1401 nt, Artificial Sequence
  derived and/or modified CDS sequence (wt) from neuraminidase__InfluenzaB__AGX24781
augcuaccuucaacuauacaaacguuaacccuauuucucacaucagggggaguguuauuaucacuauaugugucagcuucauugucauacuuacuauauucggauauauugcuaaaauuuucacaaacagaaauaacugcaccaauaaugccauuggauugugcaaacgcaucaaauguucaggcugugaaccguucugcagcaaaaggggugacacuucuucucccagaaccggaguggacauacccucguuuaucuugcccgggcucaaccuuucagaaagcacuccuaauuagcccccauagauucggagaaaccaaaggaaacucagcucccuugauaauaagggaaccuuuuauugcuuguggaccaacggaaugcaaacacuuugcucuaacccauuaugcagcucaaccagggagauauuacaauggaacaagagaagacagaaacaagcugaggcaucuaauuucagucaaauugggcaaaaucccaacaguagaaaacuccauuuuccauauggcagcuuggagcggauccgcaugccaugaugguaaagaauggacauauaucggaguugauggccccgacaguaaugcauugcucaaaauaaaauauggagaagcauauacugacacauaccauuccuaugcaaaaaacauccuaaggacacaagaaagugccugcaauugcaucgggggagauuguuaucuuaugauaacugauggcccagcuucagggauuagugaaugcagauuccuuaagauucgagagggccgaauaauaaaagaaauauuuccaacaggaagaguaaaacauacugaggaaugcacaugcggauuugccagcaacaaaaccauagaaugugcuuguagagauaacaguuacacagcaaaaagacccuuugucaaauuaaauguggagacugauacagcggaaauaagauugauguguacagagacuuauuuggacacccccagaccaaaugauggaagcauaacagggccuugcgaaucugauggggacaaagggaguggaggcaucaagggaggauuuguucaucaaagaauggcauccaagauuggaaggugguacucucgaacgaugucuaaaacuaaaagaauggggaugggacuauauguaaaguaugauggagacccauggacugacagugaagcccuugcucuuaguggaguaaugguuucgauggaagaaccugguugguauuccuuuggcuucgaaauaaaagauaagaaaugugauguccccuguauugggauagaaaugguacaugauggugggaaaacgacuuggcacucagcagcaacagccguuuacuguuuaaugggcucaggacaacugcugugggacacugucacagguguugauauggcucuguaa

SEQ ID NO: 61890 - RNA, 1401 nt, Artificial Sequence
  derived and/or modified CDS sequence (wt) from neuraminidase__InfluenzaB__AGX24792
augcuaccuucaacuauacaaacguuaacccuauuucucacaucagggggaguguuauuaucacuauaugugucagcuucauugucauacuuacuauauucggauauauugcuaaaauuuucacaaacagaaauaacugcaccaauaaugccauuggauugugcaaacgcaucaaauguucaggcugugaaccguucugcagcaaaaggggugacacuucuucucccagaaccggaguggacauacccucguuuaucuugcccgggcucaaccuuucagaaagcacuccuaauuagcccccauagauucggagaaaccaaaggaaacucagcucccuugauaauaagggaaccuuuuauugcuuguggaccaacggaaugcaaacacuuugcucuaacccauuaugcagcucaaccagggggauacuacaauggaacaagagaagacagaaacaagcugaggcaucuaauuucagucaaauugggcaaaaucccaacaguagaaaacuccauuuuccauauggcagcuuggagcggguccgcaugccaugaugguaaagaauggacguauaucggaguugauggccccgacaguaaugcauuacucaaaauaaaauauggagaagcauauacugacacauaccauuccuaugcaaaaaacauccuaaggacacaagaaagugccugcaauugcaucgggggagauuguuaucuuaugauaacugauggcccagcuucagggauuagugaaugcagauuccuuaagauucgagagggccggauaauaaaagaaauauuuccaacaggaagaguaaaacauacugaggaaugcacaugcggauuugccagcaacaaaaccauagaaugugcuuguagagauaacaguuacacagcaaaaagacccuuugucaaauuaaauguggagacugauacagcggaaauaagauugaugugcacagaaacuuauuuggacacccccagaccaaaugauggaagcauaacagggccuugcgaaucugauggggacaaagggaguggaggcaucaagggaggauuuguucaucaaagaauggcauccaagauuggaaggugguacucucgaacgaugucuaaaacuaaaagaauggggaugggacuguauguaaaguaugauggagacccauggacugacagugaagcccuugcucuuaguggaguaaugguuucgauggaagaaccugguugguauuccuuugguuucgaaauaaaagauaagaaaugugauguccccuguauugggauagaaaugguacaugauggugggaaaacgacuuggcacucagcagcaacagccauuuacuguuuaaugggcucaggacaacugcugugggacacugucacagguguugauauggcucuguaa

SEQ ID NO: 61891 - RNA, 1401 nt, Artificial Sequence; identical to SEQ ID NO: 61848
  derived and/or modified CDS sequence (wt) from neuraminidase__InfluenzaB__AGX24803

SEQ ID NO: 61892 - RNA, 1401 nt, Artificial Sequence
  derived and/or modified CDS sequence (wt) from neuraminidase__InfluenzaB__AGX24814
augcuaccuucaacuauacaaacguuaacccuauuucucacaucagggggaguguuauuaucacuauaugugucagcuucauugucauacuuacuauauucggauauauugcuaaaauuuucacaaacagaaauaacugcaccaauaaugccauuggauugugcaaacgcaucaaacguucaggcugugaaccguucugcagcaaaaggggugacacuucuucucccagaaccggaguggacauacccucguuuaucuugcccgggcucaaccuuucagaaagcacuccuaauuagcccccauagauucggagaaaccaaaggaaacucagcucccuugauaauaagggaaccuuuuauugcuuguggaccaacggaaugcaaacacuuugcucuaacccauuaugcagcucaaccagggggauacuacaauggaacaagagaagacagaaacaagcugaggcaucuaauuucagucaaauugggcaaaaucccaacaguagaaaacuccauuuuccauauggcagcuuggagcggguccgcaugccaugaugguaaagaauggacauauaucggaguugauggccccgacaguaaugcauugcucaaaauaaaauauggagaagcauauacugacacauaccauuccuaugcaaaaaacauccuaaggacacaagaaagugccugcaauugcaucgggggagauuguuaucuuaugauaacugauggcccagcuucagggauuagugaaugcagauuccuuaagauucgagagggcagaauaauaaaagaaauauuuccaacaggaagaguaaaacauacugaggaaugcacaugcggauuugccagcaacaaaaccauagaaugugcuuguagagauaacaguuacacagcaaaaagacccuuugucaaauuaaauguggagacugauacagcggaaauaagauugaugugcacagagacuuauuuggacacccccagaccaaaugauggaagcauaacagggccuugcgaaucugauggggacaaagggaguggaggcaucaagggaggauuuguucaucaaagaauggcauccaagauuggaaggugguacucucgaacgaugucuaaaacuagaagaauggggaugggacuguauguaaaguaugauggagacccauggacugacagugaagcccuugcucuuaguggaguaaugguuucaauggaagaaccugguugguauuccuuuggcuucgaaauaaaagauaagaaaugugauguccccuguauugggauagaaaugguacaugauggugggaaaacgacuuggcacucagcagcaacagccauuuacuguuuaaugggcucaggacaacugcugugggacacugucacagguguugauauggcucuguaa

SEQ ID NO: 61893 - RNA, 1401 nt, Artificial Sequence
  derived and/or modified CDS sequence (wt) from neuraminidase__InfluenzaB__AGX24825
augcuaccuucaacuauacaaacguuaacccuauuucucacaucagggggaguguuauuaucacuauaugugucagcuucauugucauacuuacuauauucggauauauugcuaaaauuuucacaaacagaaauaacugcaccaauaaugccauuggauugugcaaacgcaucaaauguucaggcugugaaccguucugcagcaaaaggggugacacuucuucucccagaaccggaguggacauacccucguuuaucuugcccgggcucaaccuuucagaaagcacuccuaauuagcccccauagauucggagaaaccaaaggaaacucagcucccuugauaauaagggaaccuuuuauugcuuguggaccaacggaaugcaaacacuuugcucuaacccauuaugcagcucaaccaggggaauacuacaauggaacaagagaagacagaaacaagcugaggcaucuaaucucagucaaauugggcaaaaucccaacaguagaaaacuccauuuuccauauggcagcuuggagcggguccgcaugccaugaugguaaagaauggacauauaucggaguugauggccccgacaguaaugcauugcucaaaauaaaauauggagaagcauauacugacacauaccauuccuaugcaaaaaacauccuaaggacacaagaaagugccugcaauugcaucgggggagauuguuaucuuaugauaacugauggcccagcuucagggauuagugaaugcagauuccuuaagauucgagagggcagaauaauaaaagaaauauuuccaacaggaagaguaaaacauacugaggaaugcacaugcggauuugccagcaacaaaaccauagaaugugcuuguagagauaacaguuacacagcaaaaagacccuuugucaaauuaaauguggagacugauaccgcggaaauaagauugaugugcacagagacuuauuuggacacccccagaccaaaugauggaagcauaacagggccuugcgaaucugauggggacaaagggaguggaggcaucaagggaggauuuguucaucaaagaauggcauccaagauuggaaggugguacucucgaacgaugucuaaaacuagaagaauggggaugggacuguauguaaaguaugauggagacccauggacugacagugaagcccuugcucuuaguggaguaaugguuucaauggaagaaccugguugguauuccuuuggcuucgaaauaaaagauaagaaaugugauguccccuguauugggauagaaaugguacaugauggugggaaaacgacuuggcacucagcagcaacagccauuuacuguuuaaugggcucaggacaacugcugugggacacugucacagguguugauauggcucuguaa

SEQ ID NO: 61894 - RNA, 1401 nt, Artificial Sequence; identical to SEQ ID NO: 61426
  derived and/or modified CDS sequence (wt) from neuraminidase__InfluenzaB__AGX24836

SEQ ID NO: 61895 - RNA, 1401 nt, Artificial Sequence
  derived and/or modified CDS sequence (wt) from neuraminidase__InfluenzaB__AGX24847
augcuaccuucaacuauacaaacguuaaccuuauuucucacaucagggggaguguuauuaucacuauaugugucagcuucauugucauacuuacuauauucggauauauugcuaaaauuuucacgaacagaaauaacugcaccaauaaugccauuggauugugcaaacgcaucaaauguucaggcugugaaccguucugcaacaaaaggggugacacuucuucucccagaaccggaguggacguacccucguuuaucuugcccgggcucaaccuuucagaaagcacuccuaauuagcccccauagauucggagaaaccaaaggaaacucagcucccuugauaauaagggaaccuuuuauugcuuguggaccaaaggaaugcaaacauuuugcucuaacccauuaugcagcucaaccagggggauacuacaauggaacaagagaagacagaaacaagcugaggcaucuaauuucagucaaguugggcaaaaucccaacaguagaaaacucuauuuuccacauggcagcuuggagcggguccgcaugccaugaugguagagaauggacuuauaucggaguugauggcccagacaguaaugcauugcucaaaauaaaauauggagaagcauauacugacacauaccauuccuaugcaaaaaacauccuaaggacacaagaaagugccugcaauugcaucgggggagauuguuaucuuaugauaacugauggcccagcuucagggauuagugaaugcagauuccuuaagauucgagaaggccgaauaauaaaagaaauauuuccaacaggaagaguaaaacauacugaggaaugcacauguggauuugccagcaacaaaaccauagaaugugccuguagagauaacaguuacacagcaaaaagacccuuugucaaauuaaauguggagacugauacagcggaaauaagauugaugugcacagagacuuauuuggacacccccagaccaaaugauggaagcauaacagggccuugcgaaucuaauggggacaaagggaguggaggcaucaagggaggauuuguucaccaaagaauggcauccaagauuggaaggugguacucucgaacgaugucuaaaaccaaaagaauggggaugggacuguauguaaaguaugauggagacccauggacugacagugaagcccuugcucuuaguggaguaaugguuucaauggaagaaccugguugguauuccuuuggcuucgaaauaaaagauaagaaaugugauguccccuguauugggauagaaaugguacaugauggugggaaaacgacuuggcacucagcagcaacagccguuuacuguuuaaugggcucaggacaacugcugugggacacugucacagguguuaauaugacucuguaa

SEQ ID NO: 61896 - RNA, 1401 nt, Artificial Sequence; identical to SEQ ID NO: 60908
  derived and/or modified CDS sequence (wt) from neuraminidase__InfluenzaB__AGX24858

SEQ ID NO: 61897 - RNA, 1401 nt, Artificial Sequence
  derived and/or modified CDS sequence (wt) from neuraminidase__InfluenzaB__AGX24869
augcuaccuucaacuauacaaacguuaaccuuauuucucacaucagggggaguguuauuaucacuauaugugucagcuucauugucauacuuacuauauucggauauauugcuaaaauuuucacgaacagaaaugacugcaccaauaaugccauuggguugugcaaacgcaucaaauguucaggcugugaaccguucugcaacaaaaggggugacacuucuucucccagaaccggaguggacguacccucguuuaucuugcccgggcucaaccuuucagaaagcacuccuaauuagcccccauagauucggagaaaccaaaggaaacucagcucccuugauaauaagggaaccuuuuauugcuuguggaccaaaggaaugcaaacauuuugcucuaacccauuaugcagcucaaccagggggauacuacaauggaacaagagaagacagaaacaagcugaggcaucuaauuucagucaaauugggcaaaaucccaacaguagaaaacucuauuuuccacauggcagcuuggagcggguccgcaugccaugaugguagagaauggacuuauaucggaguugauggcccagacaguaaugcauugcucaaaauaaaauauggagaagcauauacugacacauaccauuccuaugcaaaaaacauccuaaggacacaagaaagugccugcaauugcaucgggggagauuguuaucuuaugauaacugauggcccagcuucagggauuagugaaugcagauuccuuaagauucgagaaggccgaauaauaaaagaaauauuuccaacaggaagaguaaaacauacugaggaaugcacaugcggauuugccagcaacaaaaccauagaaugugccuguagagauaacaguuacacagcaaaaagacccuuugucaaauuaaauguggagacugauacagcggaaauaagauugaugugcacagagacuuauuuggacacccccagaccaaaugauggaagcauaacagggccuugcgaaucuaauggggacaaagggaguggaggcaucaagggaggauuuguucaccaaagaauggcauccaagauuggaaggugguacucucgaacgaugucuaaaacuaaaagaauggggaugggacuguauguaaaguaugauggagacccauggacugacagugaagcccuugcucuuaguggaguaaugguuucaauggaagaaccugguugguauuccuuuggcuucgaaauaaaagauaagaaaugugauguccccuguauugggauagaaaugguacaugauggugggaaaacgacuuggcacucagcagcaacagccauuuacuguuuaaugggcucaggacaauugcugugggacacugucacagguguuaauaugacucuguaa

SEQ ID NO: 61898 - RNA, 1401 nt, Artificial Sequence
  derived and/or modified CDS sequence (wt) from neuraminidase__InfluenzaB__AGX24880
augcuaccuucaacuauacaaauguuaaccuuauuucucacaucagggggaguguuauuaucacuauaugugucagcuucauugucauacuuacuauauucggauauauuacuaaaauuuucacgaacagaaauaacugcaccaauaaugccauuggauugugcaaaugcaucaaauguucaggcugugaaccguucugcaacaaaaggggugacacuucuucucccagaaccggaguggacguacccucguuuaucuugcccgggcucaaccuuucagaaagcacuccuaauuagcccccauagauucggagaaaccaaaggaaacucagcucccuugauaauaagggaaccuuuuauugcuuguggaccaaaggaaugcaaacauuuugcucuaacccacuaugcagcucaaccagggggauacuacaauggaacaagagaagacagaaacaagcugaggcaucuaauuucagucaaauugggcaaaaucccaacaguagaaaacucuauuuuccacauggcagcuuggagcggguccgcaugccaugaugguagagaauggacuuauaucggaguugauggccccgacaguaaugcauugcucaaaauaaaauauggagaagcauauacugacacauaccauuccuaugcaaaaaacauccuaaggacacaagaaagugccugcaauugcaucgggggagauuguuaucuuaugauaacugauggcccagcuucagggauuagugaaugcagauuccuuaagauucgagaaggccgaauaauaaaagaaauauuuccaacaggaagaguaaaacauacugaggaaugcacaugcggauuugccagcaacaaaaccauagaaugugccuguagagauaacaguuacacagcaaaaagacccuuugucaaauuaaauguggagacugauacagcggaaauaagauugaugugcacagagacuuauuuggacacccccagaccaaaugauggaagcauaacagggccuugcgaaucuaauggggacaaagggaguggaggcaucaagggaggauuuguucaccaaagaauggcauccaagauuggaaggugguacucucgaacgaugucuaaaacuaaaagaauggggaugggacuguauguaaaguaugauggagacccauggacugacagugaagcccuugcucuuaguggaguaaugguuucaauggaagaaccugguugguauuccuuuggcuucgaaauaaaagauaagaaaugugauguccccuguauugggauagaaaugguacaugauggugggaaaacgacuuggcacucagcagcaacagccauuuacuguuuaaugggcucaggacaacugcugugggacacugucacagguguuaauaugacucuguaa

SEQ ID NO: 61899 - RNA, 1401 nt, Artificial Sequence
  derived and/or modified CDS sequence (wt) from neuraminidase__InfluenzaB__AGX24902
augcuaccuucaacuauacaaacguuaaccuuauuucucacaucagggggaguguuauuaucacuauaugugucagcuuuauugucauacuuacuauauucggauauauugcuaaaauuuucacgaacagaaauaacugcaccaauaaugccauuggauugugcaaacgcaucaaauguucaggcugugaaccguucugcaacaaaaggggugacacuucuucucccagaaccggaguggacguacccccguuuaucuugcccgggcucaaccuuucagaaagcacuccuaauuagcccccauagauucggagaaaacaaaggaaacucagcucccuugauaauaagggaaccuuuuauugcuuguggaccaaaggaaugcaaacauuuugcucuaacccauuaugcagcucaaccagggggauacuacaauggaacaagagaagacagaaacaagcugaggcaucuaauuucagucaaauugggcaaaaucccaacaguagaaaacucuauuuuccacauggcagcuuggagcggguccgcaugccaugaugguagagaauggacuuauaucggaguugauggccccgacaguaaugcauugcucaaaauaaaauauggagaagcauauacugacacauaccauuccuaugcaaaaaacauccuaaggacacaagaaagugccugcaauugcaucgggggagauuguuaucuuaugauaacugauggcccagcgucagggauuagugagugcagauuccuuaagauucgagagggccgaauaauaaaagaaauauuuccaacaggaagaguaaaacauacugaggaaugcacaugcggauuugccagcaacaaaaccauagaaugugccuguagagauaacaauuacacagcaaaaagacccuuugucaaauuaaauguggagacugauacagcggaaauaagauugaugugcacagagacuuauuuggacacccccagaccaaaugauggaagcauaacagggccuugcgaaucuaauggggacaaagggaguggaggcaucaagggaggauuuguucaccaaagaauggcauccaagauuggaaggugguacucucgaacgaugucuaaaacuaaaagaauggggaugggacuguauguaaaguaugauggagacccauggacugacagugaagcccuugcucuuaguggagugaugguuucaauggaagaaccugguugguauuccuuuggcuucgaaauaaaagauaagaaaugugauguccccuguauugggauagaaaugguacaugauggugggaaaacgacuuggcacucagcagcaacagccauuuacuguuuaaugggcucaggacaacugcugugggacacugucacagguguuaauaugacucuguaa

SEQ ID NO: 61900 - RNA, 1401 nt, Artificial Sequence
  derived and/or modified CDS sequence (wt) from neuraminidase__InfluenzaB__AGX84846
augcuaccuucaacuauacaaacguuaacccuauuucucacaucagggggaguauuauuaucacuauaugugucagcuucauuaucauacuuacuauauucggauauauugcuaaaauucucaccaacagaaauaacugcaccaacaaugucauuggauugugcaaacgcaucaaauguucaggcugugaaccguucugcaacaaaaggggugacauuucuucucccagaaccggaguggacauacccgcguuuaucuugcccgggcucaaccuuucagaaagcacuccuaauuagcccucauagauucggagaaaccaaaggaaacucagcucccuugauaauaagggaaccuuuuauugcuuguggaccaaaugaaugcaaacacuuugcucuaacccauuaugcagcccaaccagggggauacuacaauggaacaagaggagacagaaacaagcugaggcaucuaauuucagucaaauugggcaaaaucccaacaguagaaaacuccauuuuccacauggcagcauggagcgggucugcuugccaugaugguaaggaauggacauauaucggaguugauggcccugacaaugaugcauugcucaaaguaaaauauggagaagcauauacugacacauaccauuccuaugcaaacaaaauccuaagaacacaagaaagugccugcaauugcaucgggggaaauuguuaucuuaugauaacugauggcucagcuucagguguuagugaaugcagauuucuuaagauucgagagggccgaauaauaaaagaaauauuuccaacaggaagaguaaaacacacugaggaaugcacaugcggauuugccagcaauaaaaccauagaaugugccuguagagauaacaguuacacagcaaaaagaccuuuugucaaauuaaacguggagacugauacagcagaaauaagauugaugugcacagauacuuauuuggacacccccagaccagaugauggaagcauaacaggcccuugugaaucuaauggggacaaagggaguggaggcaucaagggaggauuuguucaucaaagaauggaauccaagauuggaaggugguacucucgaacgaugucuaagacugaaaggauggggaugggacuguaugucaaguaugauggagacccaugggcugacagugaugcccuagcuuuuaguggaguaaugguuucaaugaaagaaccugguugguacuccuuuggcuucgaaauaaaagauaagaaaugcgauguccccuguauugggauagagaugguacaugaugguggaaaagagacuuggcacucagcagcaacagccauuuacuguuuaaugggcucaggacagcugcugugggacacugucacagguguugacauggcucuguaa

SEQ ID NO: 61901 - RNA, 1401 nt, Artificial Sequence
  derived and/or modified CDS sequence (wt) from neuraminidase__InfluenzaB__AGX84858
augcuaccuucaacuauacaaauguuaacccuauuucucacaucagggggaguacuauuaucacuauaugugucagcuucauuaucauacuuacuauauucggauauauugcuaaaauucucaccaacagaaauaacugcaccaacaaugccauuggauugugcaaacgcaucaaauguucaugcugugaaccguucugcaacaaaaggggugacauuucuucucccagaaccggaguggacauacccgcguuuaucuugcccgggcucaaccuuucagaaagcacuccuaauuagcccucauagauucggagaaaccaaaggaaacucagcucccuugauaauaagggaaccuuuuauugcuuguggaccaaaugaaugcaaacacuuugcucuaacccauuaugcagcccaaccagggggauacuacaauggaacaagaggagacagaaacaagcugaggcaucuaauuucagucaaauugggcaaaaucccaacaguagaaaacuccauuuuccacauggcagcauggagcggguccgcaugccaugaugguaaggaauggacauauaucggaguugaugguccugacaauaaugcauugcucaaaauaaaauauggagaagcauauacugacacauaucauuccuaugcaaacaacauccuaagaacacaagaaagugccugcaauugcaucgggggaaauuguuaucuuaugauaacugauggcucagcuucagguguuagugaaugcagauuucuuaagauucgagagggccgaauaauaaaagaaauauuuccaacaggaagaguaaaacauacugaggagugcacaugcggauuugccagcaauaaaaccauagaaugugccuguagagauaacaguuacacagcaaaaagacccuuugucaaauuaaacguggaaacugauacagcagaaauaagauugaugugcacagauacuuauuuggacacccccagaccagaugauggaagcauaacaggcccuugugaaucuaauggggacaaagggaguggaggcaucaagggaggauuuguucaucagagaauggcauccaagauugggaggugguacucucgaacgaugucuaaaacugaaaggaaggggaugggacuguaugucaaguaugauggagacccauggacugacagugaugcccuugcuuuuaggggaguaaugguuucaaugaaagaaccugguugguacuccuuuggcuucgaaauaaaagauaagaaaugcgauguccccuguauugggauagagaugguacaugaugguggaaaagagacuuggcacucagcagcaacagccauuuacuguuuaaugggcucaggacagcugcugugggacacagucacaggugucgacauggcucuauaa

SEQ ID NO: 61902 - RNA, 1401 nt, Artificial Sequence; identical to SEQ ID NO: 61900
  derived and/or modified CDS sequence (wt) from neuraminidase__InfluenzaB__AGX84869

SEQ ID NO: 61903 - RNA, 1401 nt, Artificial Sequence
  derived and/or modified CDS sequence (wt) from neuraminidase__InfluenzaB__AGX84880
augcuaccuucaacuauacaaacguuaacccuauuucucacaucagggggaguauuauuaucacuauaugugucagcuucauuaucauacuuacuauauucggauauauugcuaaaauucucaccaacagaaauaacugcaccaacaaugucauuggauugugcaaacgcaucaaauguucaggcugugaaccguucugcaacaaaaggggugauauuucuucucccagaaccggaguggacauacccgcguuuaucuugcccgggcucaaccuuucagaaagcacuccuaauuagcccucauagauucggagaaaccaaaggaaacucagcucccuugauaauaagggaaccuuuuauugcuuguggaccaaaugaaugcaaacacuuugcucuaacccauuaugcagcccaaccagggggauacuacaauggaacaagaggagacagaaacaagcugaggcaucuaauuucagucaaauugggcaaaaucccaacaguagaaaacuccauuuuccacauggcagcauggagcgggucugcuugccaugaugguaaggaauggacauauaucggaguugauggcccugacaaugaugcauugcucaaaguaaaauauggagaagcauauacugacacauaccauuccuaugcaaacaaaauccuaagaacacaagaaagugccugcaauugcaucgggggaaauuguuaucuuaugauaacugauggcucagcuucagguguuagugaaugcagauuucuuaagauucgagagggccgaauaauaaaagaaauauuuccaacaggaagaguaaaacacacugaggaaugcacaugcggauuugccagcaauaaaaccauagaaugugccuguagagauaacaguuacacagcaaaaagaccuuuugucaaauuaaacguggagacugauacagcagaaauaagauugaugugcacagauacuuauuuggacacccccagaccagaugauggaagcauaacaggcccuugugaaucuaauggggacaaagggaguggaggcaucaagggaggauuuguucaucaaagaauggaauccaagauuggaaggugguacucucgaacgaugucuaagacugaaaggauggggaugggacuguaugucaaguaugauggagacccaugggcugacagugaugcccuagcuuuuaguggaguaaugguuucaaugaaagaaccugguugguacuccuuuggcuucgaaauaaaagauaagaaaugcgauguccccuguauugggauagagaugguacaugaugguggaaaagagacuuggcacucagcagcaacagccauuuacuguuuaaugggcucaggacagcugcugugggacacugucacagguguugacauggcucuguaa

SEQ ID NO: 61904 - RNA, 1401 nt, Artificial Sequence; identical to SEQ ID NO: 61900
  derived and/or modified CDS sequence (wt) from neuraminidase__InfluenzaB__AGX84891

SEQ ID NO: 61905 - RNA, 1401 nt, Artificial Sequence; identical to SEQ ID NO: 61901
  derived and/or modified CDS sequence (wt) from neuraminidase__InfluenzaB__AGX84902

SEQ ID NO: 61906 - RNA, 1401 nt, Artificial Sequence
  derived and/or modified CDS sequence (wt) from neuraminidase__InfluenzaB__AGX84924
augcuaccuucaacuauacaaacguuaacccuauuucucacaucagggggaguauuauuaucacuauaugugucagcuuuauuaucauacuuacuauauucggauauauugcuaaaauucucaccaacagaaauaacugcaccaacaaugucauuggauuaugcaaacgcaucaaauguucaggcugugaaccguucugcaacaaaaggggugacauuucuucucccagaaccggaguggacauacccgcguuuaucuugcccgggcucaaccuuucagaaagcacuccuaauuagcccucauagauucggagaaaccaaaggaaacucagcucccuugauaauaagggaaccuuuuauugcuuguggaccaaaugaaugcaaacacuuugcucuaacccauuaugcagcccaaccagggggauacuacaauggaacaagaggagacagaaacaagcugaggcaucuaauuucagucaaauugggcaaaaucccaacaguagaaaacuccauuuuccacauggcagcauggagcggguccgcgugccaugaugguaaggaauggacauauaucggaguugauggcccugacaaugaugcauugcucaaaguaaaauauggagaagcauauacugacacauaccauuccuaugcaaacaaaauccuaagaacacaagaaagugccugcaauugcaucgggggaaauuguuaucuuaugauaacugauggcucagcuucagguguuagugaaugcagauuucuuaagauucgagagggccgaauaauaaaagaaauauuuccaacaggaagaguaaaacacacugaggaaugcacaugcggauuugccagcaauaaaaccauagaaugugccuguagagauaacaguuacacagcaaaaagaccuuuugucaaauuaaacguggagacugauacagcagaaauaagauugaugugcacagauacuuauuuggacacccccagaccagaugauggaagcauaacaggcccuugugaaucuaauggggacaaagggaguggaggcaucaagggaggauuuguucaucaaagaauggaauccaagauuggaaggugguacucucgaacgaugucuaagacugaaaggauggggaugggacuguaugucaaguaugauggagacccaugggcugacagugaugcccuagcuuuuaguggaguaaugguuucaaugaaagaaccugguugguacuccuuuggcuucgaaauaaaagauaagaaaugcgauguccccuguauugggauagagaugguacaugauggcggaaaagagacuuggcacucagcagcaacagccauuuacuguuuaaugggcucaggacagcugcugugggacacugucacaggcguugacauggcucuguaa

SEQ ID NO: 61907 - RNA, 1401 nt, Artificial Sequence
  derived and/or modified CDS sequence (wt) from neuraminidase__InfluenzaB__AGY46393
augcuaccuucaacuauacaaacguuaacccuauuucucacaucagggggaguauuauuaucacuauaugugucagcuucauugucauacuuacuauauucggauauauugcuaaaauucccaucaacagaaauuacugcaccaacaaugccauuggauugugcaaacgcaacaaauguucaggcugugaaccguucugcaacaaaaggggugacacuucuucucccagaaccggaauggacauacccgcguuuaucuugcccgggcucaaccuuucagaaagcacuccuaauuagcccucauagauucggagaaaucaaaggaaacucagcucccuugauaauaagggaaccuuuuauugcuuguggaccaaaugaaugcaaacacuuugcucuaacccauuaugcagcucaaccagggggauacuacaauggaacaagagaagacagaaacaagcugaggcaucuaauuucagucaaauugggcaaaaucccaacaguagaaaacucuauuuuccacauggcagcuuggagcggguccgcaugccaugaugguagagaauggacuuauaucggaguugauggccccgacaguaaugcauugcucaaaauaaaauauggagaagcauauacugacacauaccauuccuaugcaaaaaacauccuaaggacacaagaaagugccugcaauugcaucgggggagauuguuaucuuaugauaacugauggcccagcuucagggauuagugaaugcagauuccuuaagauccgagagggccgaauaauaaaagaaauauuuccaacaggaagaguaaaacauacugaggaaugcacauguggauuugccagcaacaaaaccauagaaugugccuguagagauaacaguuacacagcaaaaaggcccuuugucaaauuaaauguggagacugauacagcggaaauaagauugaugugcacagagacuuauuuggacacccccagaccaaaugauggaagcauaacagggccgugcgaaucuaauggggacaaagggaguggaggcaucaagggaggauuuguccaucaaagaauggcauccaagauuggaaggugguacucucgaacgaugucuaaaacugaaagaauggggauggggcuguaugucaaguaugauggagacccaugggcugacagugaugcccuugcuuuuaguggaguaaugguuucaauggaagaaccugguugguacuccuuuggcuucgaaauaaaagacaagaaaugcgauguccccuguauugggauagagaugguacaugauggugggaaagagacuuggcacucagcagcuacagccauuuacuguuuaaugggcucaggacagcugcugugggacacugucacagguguuaauauggcucuguaa

SEQ ID NO: 61908 - RNA, 1401 nt, Artificial Sequence
  derived and/or modified CDS sequence (wt) from neuraminidase__InfluenzaB__AGY46397
augcuaccuucaacuauacaaacguuaaccuuauuucucacaucagggggaguguuauuaucacuauaugugucagcuucauugucauacuuacuauauucggauauauugcuaaaauuuucacgaacagaaauaacugcaccaauaaugccauuggauugugcaaacgcaucaaauguucaggcugugaaccguucugcaacaaaaggggugacacuucuucucccagaaccggaguggacguacccucguuuaucuugcccgggcucaaccuuucagaaagcacuccuaauuagcccccauagauucggagaaaccaaaggaaacucagcucccuugauaauaagggaaccuuuuauugcuuguggaccaaaugaaugcaaacacuuugcucuaacccauuaugcagcccaaccaggaggauacuacaauggaacaagaggagacagaaacaagcugaggcaucuaauuucagucaaauugggcaaaaucccaacaguagaaaacuccauuuuccacauggcagcauggagcggguccgcgugccaugaugguaaggaauggacauauaucggaguugauggcccugacaauaaugcauugcucaaaguaaaauauggagaagcauauacugacacauaccauuccuaugcaaacaaaauccuaagaacacaagaaagugccugcaauugcaucgggggaaauuguuaucuuaugauaacugauggcucagcuucagguguuagcgagugcagauuucuuaagauucgagagggccgaauaauaaaagaaauauucccaacaggaagaguaaaacacacugaggaaugcacaugcggauuugccagcaauaaaaccauagaaugugccuguagagauaacaguuacacagcaaaaagaccuuuugucaaauuaaauguggagacugauacagcagaaauaagauugaugugcacagacacuuauuuggacacccccagaccaaaugauggaagcauaacaggcccuugugaaucugauggggacaaagggaguggaggcaucaagggaggauuuguucaucaaagaauggaauccaagauuggaaggugguacucucgaacgaugucuaaaacugaaaggauggggaugggacuguaugucaaguaugauggagacccaugggcugacagugaugcccuagcuuuuaguggaguaaugguuucaaugaaagaaccugguugguacuccuuuggcuucgaaauaaaagauaagaaaugcgauguccccuguauugggauagaaaugguacaugauggugggaaaacgacuuggcacucagcagcaacagccauuuacuguuuaaugggcucaggacaacugcugugggacacugucacagguguuaauaugacucuguaa

SEQ ID NO: 61909 - RNA, 1401 nt, Artificial Sequence
  derived and/or modified CDS sequence (wt) from neuraminidase__InfluenzaB__AGY46399
augcuaccuucaacuauacaaacguuaacccuauuucucacaucagggggaguauuauuaucacuauaugugucagcuucauuaucauacuuacuauauucggauauauugcuaaaauucucaccaacagaaauaauugcaccaacaacgccauuggauugugcaaacgcaucaaauguucaggcugugaaccguucugcaacaaaaggggugacacuucuucucccagaaccggaguggacauacccgcguuuaucuugcccgggcucaaccuuucagaaagcacuccuaauuagcccucauagauucggagaaaccaaaggaaacucagcucccuugauaauaagggaaccuuuuauugcuuguggaccaaaggaaugcaaacauuuugcucuaacccauuaugcagcucaaccagggggauacuacaauggaacaagagaagacagaaacaagcugaggcaucuaauuucagucaaauugggcaaaaucccaacaguagaaaacucuauuuuccacauggcagcuuggagcggguccgcaugccaugaugguagagaauggacuuauaucggaguugauggccccgacaguaaugcauugcucaaaauaaaauauggagaagcauauacugacacauaccauuccuaugcaaaaaacauccuaaggacacaagaaagugccugcaauugcaucgggggugauuguuaucuuaugauaacugauggcccagcuucagggauuagugaaugcagauuccuuaagauucgagagggccgaauaauaaaagaaauauuuccaacaggaagaguaaaacauacugaggaaugcacaugcggauuugccagcaacaaaaccauagaaugugccuguagagauaacaguuacacagcaaaaagacccuuugucaaauuaaauguggagacugauacagcggaaauaagauugaugugcacagagacuuauuuggacacccccagaccaaaugauggaagcauaacagggccuugcgaaucuaauggggacaaagggaguggaggcaucaagggaggauuuguucaccaaagaauggcauccaagauuggaaggugguacucucgaacgaugucuaaaacuaaaagaauggggaugggacuguauguaaaguaugauggagacccaugggcugacagugaagcccuugcucuuaguggaguaaugguuucaauggaagaaccugguugguauuccuuuggcuucgaaauaaaagacaagaaaugcgauguccccuguauugggauagagaugguacaugaugguggaaaagagacuuggcacucagcagcaacagccauuuacuguuuaaugggcucaggacagcugcugugggacacugucacagguguugacauggcucuguaa

SEQ ID NO: 61910 - RNA, 1401 nt, Artificial Sequence
  derived and/or modified CDS sequence (wt) from neuraminidase__InfluenzaB__AGY46401
augcuaccuucaacuauacaaacguuaacccuauuucucacaucagggggaguauuauuaucacuauaugugucagcuucauuaucauacuuacuauauucggacauauugcuaaaauucucaccaacagaaauaacugcaccaacaaugccauuggauugugcaaacgcaucaaauguucaggcugugaaccguucugcaacaaaaggggugacacuucuucucccagaaccggaguggacauacccgcguuuaucuugcccgggcucaaccuuucagaaagcacuccuaauuagcccucauagauucggagaaaccaaaggaaacucagcucccuugauaauaagggaaccuuuuauugcuuguggaccaaaggaaugcaaacauuuugcucuaacccauuaugcagcucaaccagggggauacuacaauggaacaagagaagacagaaacaagcugaggcaucuaauuucagucaaauugggcaaaaucccaacaguagaaaacucuauuuuccacauggcagcuuggagcggguccgcaugccaugaugguagagaauggacuuauaucggaguugauggccccgacaguaaugcauugcucaaaauaaaauauggagaagcauauacugacacauaccauuccuaugcaaaaaacauccuaaggacacaagaaagugccugcaauugcaucgggggugauuguuaucuuaugauaacugauggcccagcuucagggauuagugaaugcagauuccuuaagauucgagagggccgaauaauaaaagaaauauuuccaacaggaagaguaaaacauacugaggaaugcacaugcggauuugccagcaacaaaaccauagaaugugccuguagagauaacaguuacacagcaaaaagacccuuugucaaauuaaauguggagacugauacagcggaaauaagauugaugugcacagagacuuauuuggacacccccagaccaaaugauggaagcauaacagggccuugcgaaucuaauggggacaaagggaguggaggcaucaagggaggauuuguucaccaaagaauggcauccaagauuggaaggugguacucucgaacgaugucuaaaacuaaaaggauggggaugggacuguaugucaaguaugauggagacccaugggcugacagugaugcccuagcuuuuaguggaguaaugguuucaaugaaagaaccugguugguacuccuuuggcuucgaaauaaaagauaagaaaugcgauguccccuguauugggauagagaugguacaugaugguggaaaagagacuuggcacucagcagcaacagccauuuacuguuuaaugggcucaggacagcugcugugggacacugucacagguguugacauggcucuguaa

SEQ ID NO: 61911 - RNA, 1401 nt, Artificial Sequence; identical to SEQ ID NO: 61176
  derived and/or modified CDS sequence (wt) from neuraminidase__InfluenzaB__AGZ59825

SEQ ID NO: 61912 - RNA, 1401 nt, Artificial Sequence
  derived and/or modified CDS sequence (wt) from neuraminidase__InfluenzaB__AGZ59836
augcuaccuucaacuauacaaacguuaacccuauuucucacaucagggggaguauuauuaucacuauaugugucagcuucauugucauacuuacuauauucggauauauugcuaaaauucucaccaacagaaauaacugcaccaacaaugccauuggauugugcaaacgcaucaaauguucaggcugugaaccguucugcaacaaaaggggugacacuucuucucccagaaccggaguggacauacccgcguuuaucuugcccgggcucaaccuuucagaaagcacuccuaauuagcccucauagauucggagaaaccaaaggaaacucagcucccuugauaauaagggaaccuuuuauugcuuguggaccaaaggaaugcaaacacuuugcucuaacccauuaugcagcccaaccagggggauacuacaauggaacaagaggagacagaaacaagcugaggcaucuaauuucagucaaauugggcaaaaucccaacaguagaaaacuccauuuuccacauggcagcauggagcggguccgcaugccaugaugguaaggaauggacauauaucggaguugauggcccugacaauaaugcauugcucaaaauaaaauauggagaagcauauacugacacauaccauuccuaugcaaacaacauccuaagaacacaagaaagugccugcaauugcaucgggggaaauuguuaucuuaugauaacugauggcucagcuucagguguuagugaaugcagauuucuuaagauucgagagggccgaauaauaaaagaaauauuuccaacaggaagaguaaaacauacugaagaaugcacaugcggauuugccagcaauaaaaccauagaaugugccuguagagauaacaguuacacagcaaaaagacccuuugucaaauuaaacguggagacugauacagcagaaauaagauuaaugugcacagagacuuauuuggacacccccagaccagaugauggaagcauaacagggccuugugaaucuaauggggacaaagggaguggaggcaucaagggaggauuuguucaucaaagaauggcauccaagauuggaaggugguacucucgaacgaugucuaaaacuaaaaggauggggaugggacuauaugucaaguaugauggagacccaugggcugacagugaugcccuugcucuuaguggaguaaugguuucaauggaagaaccugguugguacuccuuuggcuucgaaauaaaagauaagaaaugugauguccccuguauugggauagagaugguacaugaugguggaaaagagacuuggcacucagcagcaacagccauuuacuguuuaaugggcucaggacagcugcugugggacacugucacagguguugauauggcucuguaa

SEQ ID NO: 61913 - RNA, 1401 nt, Artificial Sequence; identical to SEQ ID NO: 61383
  derived and/or modified CDS sequence (wt) from neuraminidase__InfluenzaB__AGZ59847

SEQ ID NO: 61914 - RNA, 1401 nt, Artificial Sequence
  derived and/or modified CDS sequence (wt) from neuraminidase__InfluenzaB__AGZ59858
augcuaccuucaacuauacaaacguuaacccuauuucucacaucagggggaguauuauuaucacuauaugugucagcuucauuaucauacuuacuauauucggauauauugcuaaaauucucaccaacagaaauaacugcaccaacaaugccauuggauugugcaaacgcaucaaauguucaugcugugaaccguucugcaacaaaaggggugacacuucuucucccagaaccggaguggacauacccgcguuuaucuugcccgggcucaaccuuucagaaagcacuccuaauuagcccucauagauucggagaaaccaaaggaaacucagcucccuugauaauaagggaaccuuuuauugcuuguggaccaaaugaaugcaaacacuuugcucuaacccauuaugcagcccaaccagggggauacuacaauggaaaaagaggagacagaaacaagcugaggcaucuaauuucagucaaauugggcaaaaucccaacaguagaaaacuccauuuuccacauggcagcauggagcggguccgcaugccaugaugguaaggaauggacauauauaggaguugauggcccugacaauaaugcauugcucaaaauaaaauauggagaagcauauacugacacauaccauuccuaugcaaacaacauccuaagaacacaagaaagugccugcaauugcaucgggggaaauuguuaucuuaugauaacugauggcucagcuucagguguuagugaaugcagauuucuuaagauucgagagggccgaauaauaaaagaaauauuuccaacaggaagaguaaaacauacugaggaaugcacaugcggauuugccagcaauaaaaccauagaaugugccuguagagauaacaguuacacagcaaaaagacccuuugucaaauuaaacguggaaacugauacagcagaaauaagauugaugugcacagauacuuauuuggacacccccagaccagaugauggaagcauaacaggcccuugugaaucuaauggggacaaagggaguggaggcaucaagggaggauuuguucaucaaagaauggcauccaagauuggaaggugguacucucgaacgaugucuaaaacugaaaggauggggaugggacuguaugucaaguaugauggagacccaugggcugacagugaugcccuugcuuuuaguggaguaaugguuucaaugaaagaaccugguugguacuccuuuggcuucgaaauaaaagauaagaaaugcgauguccccuguauugggauagagaugguacaugaugguggaaaagagacuuggcacucagcagcaacagccauuuacuguuuaaugggcucaggacagcugcugugggacacugucacagguguugacauggcucuguaa

SEQ ID NO: 61915 - RNA, 1401 nt, Artificial Sequence
  derived and/or modified CDS sequence (wt) from neuraminidase__InfluenzaB__AGZ59869
augcuaccuucaacuauacaaacguuaacccuauuucucacaucagggggaguauuauuaucacuauaugugucagcuucauuaucauacuuacuauauucggauauauugcuaaaauucucaccaacagaaauaacugcaccaacaaugccauuggauugugcaaacgcaucaaauguucaggcugugaaccguucugcaacaaaaggggugacacuucuucucccagaaccggaguggacauacccgcguuuaucuugcccgggcucaaccuuucagaaagcaguccuaauuagcccucauagauucggagaaaccaaaggaaacucagcucccuugauaauaagggaaccuuuuauugcuuguggaccaaaugaaugcaaacacuuugcucuaacccauuaugcagcccaaccagggggauacuacaauggaacaagaggagacagaaacaagcugaggcaucuaauuucagucaaacugggcaaaaucccaacaguagaaaacuccauuuuccacauggcagcauggagcggguccgcaugccaugaugguaaggaauggacauauaucggaguugauggcccugacaauaaugcauugcucaaaauaaaauauggagaagcauauacugacacauaccauuccuaugcaaacaaaauccuaagaacacaagaaagugccugcaauugcaucgggggaaauuguuaucuuaugauaacugauggcucagcuucagguguuagugaaugcagauuucuuaagauucgagagggccgaauaauaaaagaaauauuuccaacaggaagaguaaaacacacugaggaaugcacaugcggauuugccagcaauaaaaccauagaaugugccuguagagauaacaguuacacagcaaaaagaccuuuugucaaauuaaacguggagacugauacagcagaaauaagauugaugugcacagauacuuauuuggacacccccagaccagaugauggaagcauaacaggcccuugugaaucuaauggggacaaagggaguggaggcaucaagggaggauuuguucaucaaagaauggcauccaagauuggaaggugguacucucgaacgaugucuaaaacugaaaggauggggaugggacuguaugucaaguaugauggagacccaugggcugauagugaugcccuagcuuuuaguggaguaaugguuucaaugaaagaaccugguugguacuccuuuggcuucgaaauaaaagauaagaaaugcgauguccccuguauugggauagagaugguacaugaugguggaaaagagacuuggcacucagcagcaacagccauuuacuguuuaaugggcucaggacagcugcugugggacacugucacagguguugacauggcucuguaa

SEQ ID NO: 61916 - RNA, 1401 nt, Artificial Sequence
  derived and/or modified CDS sequence (wt) from neuraminidase__InfluenzaB__AGZ59880
augcuaccuucaacuauacaaacguuaacccuauuucucacaucagggggaguauuauuaucacuauaugugucagcuucauuaucauacuuacuauauucggauauauugcuaaaauucucaccaacagaaauaauugcaccaacaaugccauuggauugugcaaacgcaucaaauguucaugcugugaaccguucugcaacaaaaggggugacacuucuucucccagaaccggaguggacauacccgcguuuaucuugcccgggcucaaccuuucagaaagcacuccuaauuagcccucauagauucggagaaaccaaaggaaacucagcucccuugauaauaagggaaccuuuuauugcuuguggaccaaaugaaugcaaacacuuugcucuaacccauuaugcagcccaaccagggggauacuacaauggaacaagaggagacagaaacaagcugaggcaucuaauuucagucaaauugggcaaaaucccaacaguagaaaacuccauuuuccacauggcagcauggagcggguccgcaugccaugaugguaaggaauggacauauauaggaguugauggcccugacaauaaugcauugcucaaaauaaaauauggagaagcauauacugacacauaccauuccuaugcaaacaacauccuaagaacacaagaaagugcuugcaauugcaucgggggaaauuguuaucuuaugauaacugauggcucagcuucagguguuagugaaugcagauuucuuaagauucgagagggccgaauaauaaaagaaauauuuccaacaggaagaguaaaacauacugaggaaugcacaugcggauuugccagcaauaaaaccauagaaugugccuguagagauaacaguuacacagcaaaaagacccuuugucaaauuaaacguggaaacugauacagcagaaauaagauuaaugugcacagauacuuauuuggacacccccagaccagaugauggaagcauaacaggcccuugugaaucuaauggggacaaagggaguggaggcaucaagggaggauuuguucaucaaagaauggcauccaagauuggaaggugguacucucgaacgaugucuaaaacugaaaggauggggaugggacuguaugucaaguaugauggagacccaugggcugacagugaugcccuugcuuuuaguggaguaaugguuucaaugaaagaaccugguugguacuccuuuggcuucgaaauaaaagauaagaaaugcgauguccccuguauugggauagagaugguacaugaugguggaaaagagacuuggcacucagcagcaacagccauuuacuguuuaaugggcucaggacagcugcugugggacacugucacagguguugacauggcucuguaa

SEQ ID NO: 61917 - RNA, 1401 nt, Artificial Sequence
  derived and/or modified CDS sequence (wt) from neuraminidase__InfluenzaB__AGZ59891
augcuaccuucaacuauacaaacguuaacccuauuucucacaucagggggaguguuauuaucacuauaugugucagcuucauugucauacuuacuauauucggauauauugcuaaaauuuucacaaacagaaauaacugcaccaauaaugccauuggauugugcaaacgcaucaaauguucaggcugugaaccguucugcagcaaaaggggugacacuucuucucccagaaccggaguggacauacccucguuuaucuugcccgggcucaaccuuucagaaagcacuccuaauuagcccccauagauucggagaaaccaaaggaaacucagcucccuugauaauaagggaaccuuuuauugcuuguggaccaacggaaugcaaacacuuugcucuaacccauuaugcagcucaaccagggggauacuacaauggaacaagagaagacagaaacaagcugaggcaucuaauuucagucaaauugggaaaaaucccaacaguagaaaacuccauuuuccauauggcagcuuggagcggguccgcaugccaugaugguaaagaauggacauauaucggaguugauggccccgacaguaaugcauuacucaaaauaaaauauggagaagcauauacugacacauaccauuccuaugcaaaaaacauccuaaggacacaagaaagugccugcaauugcaucgggggagauuguuaucuuaugauaacugauggcccagcuucagggauuagugaaugcagauuccuuaagauucgagagggccgaauaauaaaagaaauauuuccaacaggaagaguaaaacauacugaggaaugcacauguggauuugccagcaacaaaaccauagaaugugcuuguagagauaacagguacacagcaaaaagacccuuugucaaauuaaauguggagacugauacagcggaaauaagauugaugugcacagagacuuauuuggacacccccagaccaaaugauggaagcauaacagggccuugcgaaucugauggggacaaagggaguggaggcaucaagggaggauuuguucaucaaagaauggcauccaagauuggaaggugguacucucgaacgaugucuaaaacuaaaagaauggggaugggacuguauguaaaguaugauggagacccauggacugacaguggagcccuugcucuuaguggaguaaugguuucgauagaagaaccugguugguauuccuuuggcuucgaaauaaaagauaagaaaugugaugucccuuguauugggauagaaaugguacaugauggugggaaaacgacuuggcacucagcagcaacagccauuuacuguuuaaugggcucaggacaacugcugugggacacugucacagguguugauauggcucuguaa

SEQ ID NO: 61918 - RNA, 1401 nt, Artificial Sequence
  derived and/or modified CDS sequence (wt) from neuraminidase__InfluenzaB__AGZ59902
augcuaccuucaacuauacaaacguuaacccuauuucucacaucagggggaguauuauuaucacuauaugugucagcuucauuaucauacuuacuauauucggauauauugcuaaaauucucaccaacagaaauaacugcaccaacaaugccauuggauugugcaaacgcaucaaauguucaggcugugaaccguucugcaacaaaaggggugacacuucuucucccagaaccggaguggacauacccgcguuuaucuugcccgggcucaaccuuucagaaagcacuccuaauuagcccucauagauucggagaaaccaaaggaaacucagcucccuugauaauaagggaaccuuuuauugcuuguggaccaaaugaaugcaaacacuuugcucuaacccauuaugcagcccaaccagggggauacuacaauggaacaagaggagacagaaacaagcugaggcaucuaauuucagucaaauugggcaaaaucccaacaguagaaaacuccauuuuccacauggcagcauggagcggguccgcgugccaugaugguaaggaauggacauauaucggaguugauggcccugacaauaaugcauugcucaaaguaaaauauggagaagcauauacugacacauaccauuccuaugcaaacaaaauccuaagaacacaagaaagugccugcaauugcaucgggggaaauuguuaucuuaugauaacugauggcucagcuucagguguuagugaaugcagauuucuuaagauucgagagggccgaauaauaaaagaaauauuuccaacaggaagaguaaaacacacugaggaaugcacaugcggauuugccagcaauaaaaccauagaaugugccuguagagauaacaguuacacagcaaaaagaccuuuugucaaauuaaacguggagacugauacagcagaaauaagauugaugugcacagauacuuauuuggacacccccagaccaaaugauggaagcauaacaggcccuugugaaucuaauggggacaaagggaguggaggcaucaagggaggauuuguucaucaaagaauggaauccaagauuggaaggugguacucucgaacgaugucuaaaacugaaaggauggggaugggacuguaugucaaguaugauggagacccaugggcugacagugaugcccuagcuuuuaguggaguaaugguuucaaugaaagaaccugguugguauuccuuuggcuucgaaauaaaagauaagaaaugcgauguccccuguauugggauagagaugguacaugaugguggaaaagagacuuggcacucagcagcaacagccauuuacuguuuaaugggcucaggacagcugcugugggacacugucacagguguugacauggcucuguaa

SEQ ID NO: 61919 - RNA, 1401 nt, Artificial Sequence
  derived and/or modified CDS sequence (wt) from neuraminidase__InfluenzaB__AGZ59913
augcuaccuucaacuauacaaacguuaacccuauuucucacaucagggggaguauuauuaucacuauaugugucagcuucauuaucauacuuacuauauucggauauauugcuaaaauucucaccaacagaaauaacugcaccaacaaugccauuggauugugcaaacgcaucaaauguucaggcugugaaccguucugcaacaaaaggggugacacuucuucucccagaaccggaguggacauacccgcguuuaucuugcccgggcucaaccuuucagaaagcacuccuaauuagcccucauagauucggagaaaccaaaggaaacucagcucccuugauaauaagggaaccuuuuauugcuuguggaccaaaugaaugcaaacacuuugcucuaacccauuaugcagcccaaccagggggauacuacaauggaacaagaggagacagaaacaagcugaggcaucuaauuucagucaaauugggcaaaaucccaacaguagaaaacuccauuuuccacauggcagcauggagcggguccgcgugccaugaugguaaggaauggacauauaucggaguugauggcccugacaauaaugcauugcucaaaguaaaauauggagaagcauauacugacacauaccauuccuaugcaaacaaaauccuaagaacacaagaaagugccugcaauugcaucgggggaaauuguuaucuuaugauaacugauggcucagcuucagguguuagugaaugcagauuucuuaagauucgagagggccgaauaauaaaagaaauauuuccaacaggaagaguaaaacacacugaggaaugcacaugcggauuugccagcaauaaaaccauagaaugugccuguagagauaacaguuacacagcaaaaagaccuuuugucaaauuaaacguggagacugauacagcagaaauaagauugaugugcacagauacuuauuuggacacccccagaccaaaugauggaagcauaacaggcccuugugaaucuaauggggacaaagggaguggaggcaucaagggaggauuuguucaucaaagaauggaauccaagauuggaaggugguacucucgaacgaugucuaaaacugaaaggauggggaugggacuguaugucaaguaugauggagacccaugggcugacagugaugcccuagcuuuuaguggaguaaugguuucaaugaaagaaccugguugguacuccuuuggcuucgaaauaaaagacaagaaaugcgauguccccuguauugggauagagaugguacaugaugguggaaaagagacuuggcacucagcagcaacagccauuuacuguuuaaugggcucaggacagcugcugugggacacugucacagguguugacauggcucuguaa

SEQ ID NO: 61920 - RNA, 1401 nt, Artificial Sequence; identical to SEQ ID NO: 60973
  derived and/or modified CDS sequence (wt) from neuraminidase__InfluenzaB__AGZ59924

SEQ ID NO: 61921 - RNA, 1401 nt, Artificial Sequence; identical to SEQ ID NO: 61114
  derived and/or modified CDS sequence (wt) from neuraminidase__InfluenzaB__AGZ59935

SEQ ID NO: 61922 - RNA, 1401 nt, Artificial Sequence; identical to SEQ ID NO: 61111
  derived and/or modified CDS sequence (wt) from neuraminidase__InfluenzaB__AGZ59946

SEQ ID NO: 61923 - RNA, 1401 nt, Artificial Sequence
  derived and/or modified CDS sequence (wt) from neuraminidase__InfluenzaB__AGZ59957
augcuaccuucaacuauacaaacguuaacccuauuucucacaucagggggaguauuauuaucacuauaugugucagcuucauuaucauacuuacuauauucggauauauugcuaaaauucucaccaacagaaauaacugcaccaacaaugccauuggauugugcaaacgcaucaaauguucaggcugugaaccguucugcaacaaaaggggugacacuucuucucccagaaccggaguggacauacccgcguuuaucuugcccgggcucaaccuuucagaaagcacuccuaauuagcccucauagauucggagaaaccaaaggaaacucagcucccuugauaauaagggaaccuuuuauugcuuguggaccaaaugaaugcaaacacuuugcucuaacccauuaugcagcccaaccagggggauacuacaauggaacaagaggagacagaaacaagcugaggcaucuaauuucagucaaauugggcaaaaucccaacaguagaaaacuccauuuuccacauggcagcauggagcggguccgcgugccaugaugguaaagaauggacauauaucggaguugauggcccugacaauaaugcauugcucaaaguaaaauauggagaagcauauacugacacauaccauuccuaugcaaacaaaauccuaagaacacaagaaagugccugcaauugcaucgggggaaauuguuaucuuaugauaacugauggcucagcuucagguguuagugaaugcagauuucuuaagauucgagagggccgaauaauaaaagaaauauuuccaacaggaagaguaaaacacacugaggaaugcacaugcggauuugccagcaauaaaaccauagaaugugccuguagagauaacaguuacacagcaaaaagaccuuuugucaaauuaaacguggagacugauacagcagaaauaagauugaugugcacagauacuuauuuggacacccccagaccaaaugauggaagcauaacaggcccuugugaaucuaauggggacaaagggaguggaggcaucaagggaggauuuguucaucaaagaauggaauccaagauuggaaggugguacucucgaacgaugucuaaaacugaaaggauggggaugggacuguaugucaaguaugauggagacccaugggcugacagugaugcccuagcuuuuaguggaguaaugguuucaaugaaagaaccugguugguacuccuuuggcuucgaaauaaaagauaagaaaugcgauguccccuguauugggauagagaugguacaugaugguggaaaggggacuuggcacucagcagcaacagccauuuacuguuuaaugggcucaggacagcugcugugggacacugucacagguguugacauggcucuguaa

SEQ ID NO: 61924 - RNA, 1401 nt, Artificial Sequence; identical to SEQ ID NO: 61114
  derived and/or modified CDS sequence (wt) from neuraminidase__InfluenzaB__AGZ59969

SEQ ID NO: 61925 - RNA, 1401 nt, Artificial Sequence; identical to SEQ ID NO: 61114
  derived and/or modified CDS sequence (wt) from neuraminidase__InfluenzaB__AGZ59980

SEQ ID NO: 61926 - RNA, 1401 nt, Artificial Sequence
  derived and/or modified CDS sequence (wt) from neuraminidase__InfluenzaB__AGZ59991
augcuaccuucaacuauacaaacguuaacccuauuucucacaucagggggaguauuauuaucacuauaugugucagcuucauuaucauacuuacuauauucggauauauugcuaaaauucucaccaacagaaauaacugcaccaacaaugccauuggauugugcaaacgcaucaaauguucaggcugugaaccguucugcaacaaaaggggugacacuucuucucccagaaccggaguggacauacccgcguuuaucuugcccgggcucaaccuuucagaaagcacuccuaauuagcccucauagauucggagaaaccaaaggaaacucagcucccuugauaauaagggaaccuuuuauugcuuguggaccaaaugaaugcaaacacuuugcucuaacccauuaugcagcccaaccagggggauacuacaauggaacaagaggagacagaaacaagcugaggcaucuaauuucagucaaauugggcaaaaucccaacaguagaaaacuccauuuuccacauggcagcauggagcggguccgcgugccaugaugguaaagaauggacauauaucggaguugauggcccugacaauaaugcauugcucaaaguaaaauauggagaagcauauacugacacauaccauuccuaugcaaacaaaauccuaagaacacaagaaagugccugcaauugcaucgggggaaauuguuaucuuaugauaacugauggcucagcuucagguguuagugaaugcagauuucucaagauucgagagggccgaauaauaaaagaaauauuuccaacaggaagaguaaaacacacugaggaaugcacaugcggauuugccagcaauaaaaccauagaaugugccuguagagauaacaguuacacagcaaaaagaccuuuugucaaauuaaacguggagacugauacagcagaaauaagauugaugugcacagauacuuauuuggacacccccagaccaaaugauggaagcauaacaggcccuugugaaucuaauggggacaaagggaguggaggcaucaagggaggauuuguucaucaaagaauggaauccaagauuggaaggugguacucucgaacgaugucuaaaacugaaaggauggggaugggacuguaugucaaguaugauggagacccaugggcugacagugaugcccuagcuuuuaguggaguaaugguuucaaugaaagaaccugguugguacuccuuuggcuucgaaauaaaagauaagaaaugcgauguccccuguauugggauagagaugguacaugaugguggaaaagagacuuggcacucagcagcaacagccauuuacuguuuaaugggcucaggacagcugcugugggacacugucacagguguugacauggcucuguaa

SEQ ID NO: 61927 - RNA, 1401 nt, Artificial Sequence; identical to SEQ ID NO: 61451
  derived and/or modified CDS sequence (wt) from neuraminidase__InfluenzaB__AGZ60003

SEQ ID NO: 61928 - RNA, 1401 nt, Artificial Sequence
  derived and/or modified CDS sequence (wt) from neuraminidase__InfluenzaB__AGZ60014
augcuaccuucaacuauacaaacguuaacccuauuucucacaucagggggaguauuauuaucacuauaugugucagcuuuauuaucauacuuacuauauucggauauauugcuaaaauucucaccaacagaaauaacugcaccaacaaugucauuggauugugcaaacgcaucaaauguucaggcugugaaccguucugcaacaaaaggggugacauuucuucucccagaaccggaguggacauacccgcguuuaucuugcccgggcucaaccuuucagagagcacuccuaauuagcccucauagauucggagaagccaaaggaaacucagcucccuugauaauaagggaaccuuuuauugcuuguggaccaaaugaaugcaaacacuuugcucuaacccauuaugcagcccaaccagggggauacuacaauggaacaagaggagacagaaacaagcugaggcaucuaauuucagucaaauugggcaaaaucccaacaguagaaaacuccauuuuccacauggcagcauggagcggguccgcuugccaugaugguaaggaauggacauauaucggaguugauggcccugacaaugaugcauugcucaaaguaaaauauggagaagcauauacugacacauaccauuccuaugcaaacaaaauccuaagaacacaagaaagugccugcaauugcaucgggggaaauuguuaucuuaugauaacugauggcucagcuucagguguuagugaaugcagauuucuuaagauucgagagggccaaauaauaaaagaaauauuuccaacaggaagaguaaaacacacugaggaaugcacaugcggauuugccagcaauaaaaccauagaaugugccuguagagauaacaguuacacagcuaaaagaccuuuugucaaauuaaacguggagacugauacagcagaaauaagauugaugugcacagauacuuauuuggacacccccagaccagaugauggaagcauaacaggcccuugugaaucuaauggggacaaagggaguggaggcaucaagggaggauuuguucaucaaagaauggaauccaagauuggaaggugguacucucgaacgaugucuaagacugaaaggauggggaugggacuguaugucaaguaugauggagacccaugggcugacagugaugcccuagcuuuuaguggaguaaugguuucaaugaaagaaccugguugguacucuuuuggcuucgaaauaaaagauaagaaaugcgauguccccuguauugggauagagaugguacaugaugguggaaaagagacuuggcacucagcagcaacagccauuuacuguuuaaugggcucaggacagcugcugugggacacugucacaggcguugacauggcucuguaa

SEQ ID NO: 61929 - RNA, 1401 nt, Artificial Sequence
  derived and/or modified CDS sequence (wt) from neuraminidase__InfluenzaB__AGZ60025
augcuaccuucaacuauacaaacguuaacccuauuucucacaucagggggaguauuauuaucacuauaugugucagcuuuauuaucauacuuacuauacucggauauauugcuaaaauucucaccaacagaaauaacugcaccaacaaugucauuggauugugcaaacgcaucaaauguucaggcugugaaccguucugcaacaaaaggggugacauuucuucucccagaaccggaguggacauacccgcguuuaucuuguccgggcucaaccuuucagaaagcacuccuaauuagcccucauagauucggagaaaccaaaggaaacucagcucccuugauaauaagggaaccuuuuauugcuuguggaccaaaugaaugcaaacacuuugcucuaacccauuaugcagcccaaccagggggauacuacaauggaacaagaggagacagaaacaagcugaggcaucuaauuucagucaaauugggcaaaaucccaacaguagaaaacuccauuuuccacauggcagcauggagcggguccgcgugccaugaugguaaggaauggacauauaucggaguugauggcccugacaaugaugcauugcucaaaguaaaauauggagaagcauauacugacacauaccauuccuaugcaaacaaaauccuaagaacacaagaaagugccugcaauugcaucgggggaaauuguuaucuuaugauaacugauggcucagcuucagguguuagugaaugcagauuucuuaagauucgagagggccgaauaauaaaagaaauauuuccaacaggaagaguaaaacacacugaggaaugcacaugcggauuugccagcaauaaaaccauagaaugugccuguagagauaacaguuacacagcaaaaagaccuuuugucaaauuaaacguggagacugauacagcagaaauaagauugaugugcacagauacuuauuuggacacccccagaccagaugauggaagcauaacaggcccuugugaaucuaauggggacaaagggaguggaggcaucaagggaggauuuguucaucaaagaauggaauccaagauuggaaggugguacucucgaacgaugucuaagacugaaaggauggggaugggacuguaugucaaguaugauggagacccaugggcugacagugaugcccuagcuuuuaguggaguaaugguuucaaugaaagaaccugguugguacuccuuuggcuucgaaauaaaagauaagaaaugcgauguccccuguauugggauagagaugguacaugaugguggaaaagagacuuggcacucagcagcaacagccauuuacuguuugaugggcucaggacagcugcugugggacacugucacaggcguugacauggcucuguaa

SEQ ID NO: 61930 - RNA, 1401 nt, Artificial Sequence
  derived and/or modified CDS sequence (wt) from neuraminidase__InfluenzaB__AGZ60037
augcuaccuucaacuauacaaacguuaacccuauuucucacaucagggggaguauuauuaucacuauaugugucagcuuuauuaucauacuuacuauauucggauauauugcuaaaauucucaccaacagaaauaacugcaccaacaaugucauuggauugugcaaacgcaucaaauguucaggcugugaaccguucugcaacaaaaggggugacauuucuucucccagaaccggaguggacauacccgcguuuaucuugcccgggcucaaccuuucagaaagcacuccuaauuagcccucacagauucggagaaaccaaaggaaacucagcucccuugauaauaagggaaccuuuuauugcuuguggaccaaaugaaugcaaacacuuugcucuaacccauuaugcagcccaaccagggggauacuacaauggaacaagaggagacagaaacaagcugaggcaucuaauuucagucaaauugggcaaaaucccaacaguagaaaacuccauuuuccacauggcagcauggagcggguccgcgugccaugaugguaaggaauggacauauaucggaguugauggcccugacaaugaugcauugcucaaaguaaaauauggagaagcauauacugacacauaccauuccuaugcaaacaaaauccuaagaacacaagaaagugccugcaauugcaucgggggaaauuguuaucuuaugauaacugauggcucagcuucagguguuagugaaugcagauuucuuaagauucgagaggggcgaauaauaaaagaaauauuuccaacaggaagaguaaaacacacugaggaaugcacaugcggauuugccagcaauaaaaccauagaaugugccuguagagauaacaguuacacagcaaaaagaccuuuugucaaauuaaacguggagacugauacggcagaaauaagauugaugugcacagauacuuauuuggacacccccagaccagaugauggaagcauaacaggcccuugugaaucuaauggggacaaagggaguggaggcaucaagggaggauuuguucaucaaagaauggaauccaagauuggaaggugguacucucgaacgaugucuaagacugaaaggauggggaugggacuguaugucaaguaugauggagacccaugggcugaaagugaugcccuagcuuuuaguggaguaaugguuucaaugaaagaaccugguugguacuccuuuggcuucgaaauaaaagauaagaaaugcgauguccccuguauugggauagagaugguacaugaugguggaaaagagacuuggcacucagcagcaacagccauuuacuguuugaugggcucaggacagcugcugugggacacugucacaggcguugacauagcucuguaa

SEQ ID NO: 61931 - RNA, 1401 nt, Artificial Sequence
  derived and/or modified CDS sequence (wt) from neuraminidase__InfluenzaB__AGZ60048
augcuacccucaacuauacaaacguuaacccuauuccucacaucagggggaguguuauuaucacuauaugugucagcuucacugucauacuuacuauauucggauauauugcuaaaguuuucaacaacagaaauaacugcaccaacaaugccauuggauugugcaaacgcaucaaauguucaggcugugaaccguucugcaacaaaaggggugacauuucuucucccagaaccggaguggacauacccgcguuuaucuugcccgggcucaaccuuucagaaagcacuccuaauuagcccucauagauucggagaaaccaaaggaaacucagcucccuugauaauaagggaaccuuuuauugcuuguggaccaaaggaaugcaaacacuuugcucuaacccauuaugcagcccaaccagggggauacuacaauggaacaagagaagacagaaacaagcugaggcaucuaauuucagucaaauugggcaaaaucccaacaguagaaaacuccauuuuccacauggcagcauggagcggguccgcaugccaugaugguaaagaauggacauauaucggaguugauggcccugacaguaaugcauugcucaaaauaaaauauggagaagcauauacugacacauaccauuccuaugcaaacaacauccuaagaacacaagaaagugccugcaauugcaucgggggaaauuguuaucuuaugauaacugauggcucagcuucagguauuagugagugcagauuucuuaagauucgagagggccgaauaauaaaagaaauauuuccaacaggaagaguaaaacauacugaagaaugcacaugcggauuugccagcaauaaaaccauagaaugugccuguagagauaauaguuacacagcaaaaagacccuuugucaaacuaaauguggagacugauacagcagaaauaagauugaugugcacagagacuuauuuggacacccccagaccagaugauggaagcauaacagggccuugugaaucuaaugggaacaaagggaguggaggcaucaagggaggauuuguucaucaaagaauggcauccaaaauuggaaggugguacucucgaacaaugucuaaaaccaaaaggaugggaaugggacuguaugucaaguaugauggagacccauggacugacagugaugcccuugcucuuaguggaguaaugguuucaauggaagaaccugguugguacucauuuggcuucgaaauaaaagauaagaaaugugauguccccuguauugggauagagaugguacaugaugguggaaaggagacuuggcacucagcagcaacagccauuuacuguuuaaugggcucaggacaacuguugugggacacugucacagguguugauauggcucuguaa

SEQ ID NO: 61932 - RNA, 1401 nt, Artificial Sequence; identical to SEQ ID NO: 61647
  derived and/or modified CDS sequence (wt) from neuraminidase__InfluenzaB__AGZ60059

SEQ ID NO: 61933 - RNA, 1401 nt, Artificial Sequence
  derived and/or modified CDS sequence (wt) from neuraminidase__InfluenzaB__AGZ60070
augcuacccucaacuauacaaacguuaacccuauuccucacaucagggggaguguuauuaucacuauaugugucagccucacugucauacuuacuauauucggauauauugcuaaaauuuucaacaacagaaauaacugcaccaacaaugccauuggauugugcaaacgcaucaaauguucaggcugugaaccauucugcagcaaaaggggugacacuucuucucccagaaccggaguggacauacccgcguuuaucuugcccgggcucaaccuuucagaaagcacuccuaauuagcccucauagauucggagaaaccaaaggaaacucagcucccuugauaauaagggaaccuuuuauugcuuguggaccaaaggaaugcaaacacuuugcucuaacccauuaugcagcccaaccagggggauacuacaauggaacaagagaagacagaaacaagcugaggcaucuaauuucagucaaauugggcaaaaucccaacaguagaaaacuccauuuuccacauggcagcauggagcggguccgcaugccaugaugguaaagaauggacauauaucggaguugauggcccugacaguaaugcauugcucaaaauaaaauauggagaagcauauacugacacauaccauuccuaugcacacaacauccuaagaacacaagaaagugccugcaauugcaucgggggaaauuguuaucuuaugauaacugauggcucagcuucagguauuagugagugcagauuucuuaaaauucgagagggccgaauaauaaaagaaauauuuccaacaggaagaguaaaacauacugaagaaugcacaugcggauuugccaacaauaaaaccauagaaugugccuguagagauaacaguuacacagcaaaaagacccuuugucaaauuaaauguggagacugauacagcagaaauaagauugaugugcacagagacuuauuuggacacccccagaccagaugauggaagcauaacagggccuugugaaucuaaugggaauaaagggaguggaggcaucaagggaggauuuguucaucaaagaauggcauccaaaauuggaaggugguacucucgaacaaugucuaaaaccaaaaggaugggaaugggacuguaugucaaguaugauggagacccauggacugacagugaugcccuuguuuuuaguggaguaaugauuucaguggaagaaccugguugguacucauuuggcuucgaaauaaaagauaagaaaugugauguccccuguauugggauagagaugguacaugaugguggaaaggagacuuggcacucagcagcaacagccauuuacuguuuaaugggcucaggacaacugcuaugggacacugucacagguguuaauaugacucuguaa

SEQ ID NO: 61934 - RNA, 1401 nt, Artificial Sequence
  derived and/or modified CDS sequence (wt) from neuraminidase__InfluenzaB__AGZ60081
augcuaccuucaacuauacaaacguuaacccuauuucucacaucagggggaguguuauuaucacuauaugugucagcuucauugucauacuuacuauauucggauauauugcuaaaauuuucacaaacagaaauaacugcaccaauaaugccauuggauugugcaaacgcaucaaauguucaggcugugaaccguucugcaacaaaaggggugacacuucuucucccagaaccggaguggacauacccucguuuaucuugcccgggcucaaccuuucagaaagcacuccuaauuagcccccauagauucggagaaaccaaaggaaacucagcucccuugauaauaagggaaccuuuuauugcuuguggaccaacggaaugcaaacacuuugcucuaacucauuaugcagcucaaccagggggauacuacaauggaacaagagaagacagaaacaagcugaggcaucuaauuucagucaaauugggcaaaaucccaacaguagaaaacuccauuuuccacauggcagcuuggagcggguccgcaugccaugaugguaaagaauggacauauaucggaguugauggccccgacagcaaugcauuacucaaaauaaaauauggagaagcauauacugacacauaccauuccuaugcaaaaaacauccuaaggacacaagaaagugccugcaauugcaucgggggagauuguuaucuuaugauaacugauggcccagcuucagggauuagugaaugcagauuccuuaagauucgagagggccgaauaauaaaagaaauauuuccaacaggaagaguaaaacauacugaggaaugcacaugcggauuugccagcaacaaaaccauagaaugugcuuguagagauaacaguuacacagcaaaaagacccuuugucaaauuaaauguggagacugauacagcggaaauaagauugaugugcacagagacuuauuuggacacccccagaccaaaugauggaagcauaacagggccuugcgaaucugauggagacaaagggaguggaggcaucaagggaggauuuguucaucaaagaauggcauccaagauuggaaggugguacucucgaacgaugucuaaaacuaaaagaauggggaugggacuguauguaaaguaugauggagacccauggacugacagugaagcccuugcucuuaguggaguaaugguuucaauggaagaaccugguugguauuccuuuggcuucgaaauaaaagauaagaaaugugauguccccuguauugggauagaaaugguacaugauggugggaaaacgacuuggcacucagcagcaacagccauuuacuguuuaaugggcucaggacaacugcugugggacacugucacagguguugauauggcucuguaa

SEQ ID NO: 61935 - RNA, 1401 nt, Artificial Sequence; identical to SEQ ID NO: 61159
  derived and/or modified CDS sequence (wt) from neuraminidase__InfluenzaB__AGZ60092

SEQ ID NO: 61936 - RNA, 1401 nt, Artificial Sequence; identical to SEQ ID NO: 61790
  derived and/or modified CDS sequence (wt) from neuraminidase__InfluenzaB__AGZ60103

SEQ ID NO: 61937 - RNA, 1401 nt, Artificial Sequence
  derived and/or modified CDS sequence (wt) from neuraminidase__InfluenzaB__AGZ60135
augcuaccuucaacuauacaaacguuaacccuauuucucacaucagggggaguguuauuaucacuauaugugucagcuucauugucauacuuacuauauucggauauauugcuaaaauuuucacaaacagaaauaacugcaccaauaaugccauuggauugugcaaacgcaucaaauguucaggcugugaaccguucugcagcaaaaggggugacacuucuucucccagaaccggaguggacauacccucguuuaucuugcccgggcucaaccuuucagaaagcacuccuaauuagcccccauagauucggagaaaccaaaggaaacucagcucccuugauaauaagggaaccuuuuauugcuuguggaccaacggaaugcaaacacuuugcucuaacccauuaugcagcucaaccagggggauacuacaauggaacaagagaagacagaaacaagcugaggcaucuaauuucagucaaauugggcaaaaucccaacaguagaaaacuccauuuuccauauggcagcuuggagcggguccgcaugccaugaugguaaagaauggacauauaucggaguugauggccccgacaguaaugcauuacucaaaauaaaauauggagaagcauauacugacacauaccauuccuaugcaaaaaacauccuaaggacacaagaaagugccugcaauugcaucgggggagauuguuaucucaugauaacugauggcccagcuucagggauuagugaaugcagauuccuuaagauucgagagggccgaauaauaaaagaaauauuuccaacaggaagaguaaaacauacugaggaaugcacauguggauuugccagcaacaaaaccauagaaugugcuuguagagauaacaguuacacagcaaaaagacccuuugucaaauuaaauguggagacugauacagcggaaauaagauugaugugcacagagacuuauuuggacacccccagaccaaaugauggaagcauaacagggccuugcgaaucugauggggacaaagggaguggaggcaucaagggaggauuuguucaucaaagaauggcauccaagauuggaaggugguacucucgaacgaugucuaaaacuaaaagaauggggaugggacuguauguaaaguaugauggagacccauggacugacagugaagcccuugcucuuaguggaguaaugguuucgauggaagaaccugguugguauuccuuuggcuucgaaauaaaagauaagaaaugugauguccccuguauugggauagaaaugguacaugauggugggaaaacgaccuggcacucagcagcaacagccauuuacuguuuaaugggcucaggacaacugcugugggacacugucacagguguugauauggcucuguaa

SEQ ID NO: 61938 - RNA, 1401 nt, Artificial Sequence; identical to SEQ ID NO: 60972
  derived and/or modified CDS sequence (wt) from neuraminidase__InfluenzaB__AGZ60154

SEQ ID NO: 61939 - RNA, 1401 nt, Artificial Sequence
  derived and/or modified CDS sequence (wt) from neuraminidase__InfluenzaB__AGZ60164
augcuaccuucaacuacacaaacguuaacccuauuucucacaucagggggaguguuauuaucacuauaugugucagcuucauugucauacuuacuauauucggauauauugcuaaaauuuucacaaacagaaauaacugcaccaauaaugccauuggauugugcaaacgcaucaaauguucaggcugugaaccguucugcagcaaaaggggugacacuucuucucccagaaccggaguggacauacccucguuuaucuugcccgggcucaaccuuucagaaagcacuccuaauuaacccccauagauucggagaaaccaaaggaaacucagcucccuugauaauaagggaaccuuuuauugcuuguggaccaacggaaugcaaacacuuugcucuaacccauuaugcagcucaaccagggggauacuacaauggaacaagagaagacagaaacaagcugaggcaucuaauuucagucaaauugggcaaaaucccaacaguagaaaacuccauuuuccacauggcagcuuggagcggguccgcaugccaugaugguaaagaauggacauauaucggaguugauggccccgacaguaaugcauugcucaaaauaaaauauggagaagcauauacugacacauaccauuccuaugcaaaaaacauccuaaggacacaagaaagugccugcaauugcaucgggggagauuguuaucuuaugauaacugauggcccagcuucagggauuagugaaugcagauuccuuaagauucgagagggcagaauaauaaaagaaauauuuccaacaggaagaguaaaacauacugaggaaugcacaugcggauuugccagcaacaaaaccauagaaugugcuuguagagauaacaguuacacagcaaaaagacccuuuguuaaauuaaauguggagacugauacagcggaaauaagauuaaugugcacagagacuuauuuggacacccccagaccaaaugauggaagcauaacagggccuugcgaaucugauggggacaaagggaguggaggcaucaagggaggauuuguucaucaaagaauggcauccaagauuggaaggugguacucucgaacaaugucuaaaacuaaaagaauggggaugggacuguauguaaaguaugauggagacccauggacugacagugaagcccuugcucuuaguggaguaaugguuucaauggaagaaccugguugguauuccuuuggcuucgaaauaaaagauaagaaaugugauguccccuguauugggauagaaaugguacaugauggugggaaaacgacuuggcacucagcagcaacagccauuuacuguuuaaugggcucaggacaacugcugugggacacugucacagguguugauauggcucuguaa

SEQ ID NO: 61940 - RNA, 1401 nt, Artificial Sequence
  derived and/or modified CDS sequence (wt) from neuraminidase__InfluenzaB__AGZ60176
augcuaccuucaacuauacaaacguuaaccuuauuucucacaucagggggaguguuauuaucacuauaugugucagcuucauugucauacuuacuauauucggauauauugcuaaaauuuucacgaacagaaauaacugcaccaauaaugccauuggauugugcaaacgcaucaaauguucaggcugugaaccguucugcaacaaaaggggugacacuucuucucccagaaccggaguggacguacccucguuuaucuugcccgggcucaaccuuucagaaagcacuccuaauuagcccccauagauucggagaaaccaaaggaaacucagcucccuugauaauaagggaaccuuuuauugcuuguggaccaaaggaaugcaaacauuuugcucuaacccauuaugcagcucaaccagggggauacuacaauggaacaagagaagacagaaacaagcugaggcaucuaauuucagucaaauugggcaaaaucccaacaguagaaaacucuauuuuccacauggcagcuuggagcggguccgcaugccaugaugguagagaauggacuuauaucggaguugauggccccgacaauaaugcauugcucaaaauaaaauauggagaagcauauacugacacauaccauuccuaugcaaaaaacauccuaaggacacaagaaagugccugcaauugcaucgggggagauuguuaucuuaugauaacugauggcccagcuucagggauuagugaaugcagauuccuuaagauucgagagggccgaauaauaaaagaaauauuuccaacaggaagaguaaaacauacugaggaaugcacaugcggauuugccagcaacaaaaccauagaaugugccuguagagauaacaguuacacagcaaaaagacccuuugucaaauuaaauguggagacugauacagcggaaauaagauugaugugcacagagacuuauuuggacacccccagaccaaaugauggaagcauaacagggccuugcgaaucuaauggggacaaagggaguggaggcaucaagggaggauuuguucaccaaagaauggcauccaagauuggaaggugguacucucgaacgaugucuaaaacuaaaagaauggggaugggacuguauguaaaguaugauggagacccauggacugacagugaagcccuugcucuuaguggaguaaugguuucaauggaagaaccugguugguauuccuuuggcuucgaaauaaaagauaagaaaugugauguccccuguauugggauagaaaugguacaugauggugggaaaacgacuuggcacucagcagcaacagccauuuacuguuuaaugggcucaggacaacugcugugggacacugucacagguguuaauaugacucuguaa

SEQ ID NO: 61941 - RNA, 1401 nt, Artificial Sequence; identical to SEQ ID NO: 60829
  derived and/or modified CDS sequence (wt) from neuraminidase__InfluenzaB__AGZ60187

SEQ ID NO: 61942 - RNA, 1401 nt, Artificial Sequence
  derived and/or modified CDS sequence (wt) from neuraminidase__InfluenzaB__AGZ60198
augcuaccuucaacuauacaaacguuaaccuuauuucucacaucagggggaguguuauuaucacuauaugugucagcuucauugucauauuuacuauauucggauauauugcuaaaauuuucacgaacagaaauaacugcaccaauaaugccauuggauugugcaaacgcaucaaauguucaggcugugaaccguucugcaacaaaaggggugacacuucuucucccagaaccggaguggacguacccucguuuaucuugcccgggcucaaccuuucagaaagcacuccuaauuagcccccauagauucggagaaaccaaaggaaacucagcucccuugauaauaagggaaccuuuuauugcuuguggaccaaaggaaugcaaacauuuugcucuaacccauuaugcagcucaaccagggggauacuacaauggaacaagagaagacagaaacaagcugaggcaucuaauuucagucaaauugggcaaaaucccaacaguagaaaacucuauuuuccacauggcagcuuggagcggguccgcaugccaugaugguagagaauggacuuauaucggaguugauggccccgacaguaaugcauugcucaaaauaaaauauggagaagcauauacugacacauaccauuccuaugcaaaaaacauccuaaggacacaagaaagugccugcaauugcaucgggggagauuguuaucuuaugauaacugauggcccagcuucagggauuagugaaugcagauuccuuaagauucgagagggccgaauaauaaaagaaauauuuccaacaggaagaguaaaacauacugaggaaugcacaugcggauuugccagcaacaaaaccauagaaugugccuguagagauaacaguuacacagcaaaaagacccuuugucaaauuaaauguggagacugauacagcggaaauaagauugaugugcacagagacuuauuuggacacccccagaccaaaugauggaagcauaacagggccuugcgaaucuaauggggacaaagggaguggaggcaucaagggaggauuuguucaccaaagaauggcauccaagauuggaaggugguacucucgaacgaugucuaaaacuaaaagaauggggaugggacuguauguaaaguaugauggagacccauggacugacagugaagcccuugcucuuaguggaguaaugguuucaauggaagaaccugguugguauuccuuuggcuucgaaauaaaagauaagaaaugugauguccccuguauugggauagaaaugguacaugauggugggaaaacgacuuggcacucagcagcaacagccauuuacuguuuaaugggcucaggacaacugcugugggacacugucacagguguuaauaugacucuguaa

SEQ ID NO: 61943 - RNA, 1401 nt, Artificial Sequence; identical to SEQ ID NO: 60829
  derived and/or modified CDS sequence (wt) from neuraminidase__InfluenzaB__AGZ60210

SEQ ID NO: 61944 - RNA, 1401 nt, Artificial Sequence
  derived and/or modified CDS sequence (wt) from neuraminidase__InfluenzaB__AGZ60221
augcuaccuacaacuauacaaacguuaaccuuauuucucacaucagggggaguguuauuaucacuauaugugucagcuucauugucauacuuacuauauucggauauauugcuaaaauuuucacgaacagaaauaacugcaccaauaaugccauuggauugugcaaacgcaucaaauguucaggcugugaaccguucugcaacaaaaggggugacacuucuucucccagaaccggaguggacguacccucguuuaucuugcccgggcucaaccuuucagaaagcacuccuaauuagcccccauagauucggagaaaccaaaggaaacucagcucccuugauaauaagggaaccuuuuauugcuuguggaccaaaggaaugcaaacauuuugcucuaacccauuaugcagcucaaccagggggauacuacaauggaacaagagaagacagaaacaagcugaggcaucuaauuucagucaaauugggcaaaaucccaacaguagaaaacucuauuuuccacauggcagcuuggagcggguccgcaugccaugaugguagagaauggacuuauaucggaguugauggccccgacaguaaugcauuacucaaaauaaaauauggagaagcauauacugacacauaccauuccuaugcaaaaaacauccuaaggacacaagaaagugccugcaauugcaucgggggagauuguuaucuuaugauaacugauggcccagcuucagggauuagugaaugcagauuccuuaagauucgagagggccgaauaauaaaagaaauauuuccaacaggaagaguaaaacauacugaggaaugcacaugcggauuugccagcaacaaaaccauagaaugugccuguagagauaacaguuacacagcaaaaagacccuuugucaaauuaaauguggagacugauacagcggaaauaagauugaugugcacagagacuuauuuggacacccccagaccaaaugauggaagcauaacagggccuugcgaaucuaauggggacaaagggaguggaggcaucaagggaggauuuguucaccaaagaauggcauccaagauuggaaggugguacucucgaacgaugucuaaaacuaaaagaauggggaugggacuguauguaaaguaugauggagacccauggacugacagugaagcccuugcucuuaguggaguaaugguuucaauggaagaaccugguugguauuccuuuggcuucgaaauaaaagauaagaaaugugauguccccuguauugggauagaaaugguacaugauggugggaaaacgacuuggcacucagcagcaacagccauuuacuguuuaaugggcucaggacaacugcugugggacacugucacagguguuaauaugacucuguaa

SEQ ID NO: 61945 - RNA, 1401 nt, Artificial Sequence
  derived and/or modified CDS sequence (wt) from neuraminidase__InfluenzaB__AGZ60272
augcuaccuucaacuauacaaacguuaacccuauuucucacaucagggggaguguuauuaucacuauaugugucagcuucauugucauacuuacuauauucggauauauugcuaaaauuuucacaaacagaaauaacugcaccaauaaugccauuggauugugcaaacgcaucaaauguucaagcugugaaccguucugcagcaaaaggggugacacuucuucucccaaaaccagaguggacauacccucguuuaucuugcccgggcucaaccuuucagaaagcacuccuaauuagcccccauagauucggagaaaccaaaggaaacucagcucccuugauaauaagggaaccuuuuauugcuuguggaccaacggaaugcaaacacuuugcucuaacccauuaugcagcucaaccagggggauacuacaauggaacaagagaagacagaaacaagcugaggcaucuaauuucagucaaauugggcaaaaucccaacaguagaaaacuccauuuuccauauggcagcuuggagcggguccgcaugccaugaugguaaagaauggacauauaucggaguugauggccccgacaguaaugcauugcucaaaauaaaauauggagaagcauauacugacacauaccauuccuaugcaaaaaacauccuaaggacacaagaaagugccugcaauugcauugggggagauuguuaucuuaugauaacugauggcccagcuucagggauuagugaaugcagauuccuuaagauucgagagggccgaauaauaaaagaaauauuuccaacaggaagaguaaaacauacugaggaaugcacaugcggauuugccagcaacaaaaccauagaaugugcuugcagagauaacaguuacacagcaaaaagacccuuugucaaauuaaauguggagacugauacagcggaaauaagauugaugugcacagagacuuauuuggacacccccagaccaaaugauggaagcauaacagggccuugcgaaucugauggggacaaagggaguggaggcaucaagggaggauuuguucaucaaagaauggcauccaagauuggaaggugguacucucgaacgaugucuaaaacuaaaagaauggggaugggacuguauguaaaguaugauggagauccauggacugacagugaagcccuugcucuuaguggaguaaugguuucaauggaagaaccugguugguauuccuuuggcuucgaaauaaaagauaagaaaugugauguccccuguauugggauagaaaugguacaugauggugggaaaacgacuuggcacucagcagcaacagcuauuuacuguuuaaugggcucaggacaacugcugugggacacugucacagguguugauauggcucuguaa

SEQ ID NO: 61946 - RNA, 1398 nt, Artificial Sequence
  derived and/or modified CDS sequence (wt) from neuraminidase__InfluenzaB__AHL91182
augcuaccuucaacuauacaaacguuaacccuauuucucacaucagggggaguguuauuaucacuauaugugucagccuuacugucauacuuacuguauucggauauauugcuaaaauuuucaccaaaaauaauugcaccaacaaugucguuggacugcgcgaacgcaucaaauguucaggcugugaaccauucugcaacaaaagagaugaaauuucuucccccagaaccggaguggacauacccccguuuaucuugccaggguucaaccuuccagaaagcacuccuaauuagcccucauagauuuggagaagccaaaggaaacucagcucccuugauaauaagggaaccuuuuauugcuuguggaccaaaggagugcaaacacuuugcucuaacccauuaugcagcucaaccagggggauacuacaauggaacaagagaggacagaaacaagcugaggcaucugauuucagucaacuuaggcaaaaucccaacuguagaaaacuccauuuuccacauggcagcuuggaguggaucugcaugccaugaugguagagaauggacauauaucggaguugauggcccugacaguaaugcauugaucaaaauaaaauauggagaagcauacacugacacauaccauuccuaugcaaacaacauccuaagaacacaagaaagugccugcaauugcaucgggggagauuguuaucuuaugauaacugauggcucagcuucaggaauuaguaaaugcagauuccuuaagauccgagagggucgaauaauaaaagaaauauuuccaacaggaagaguagagcacacugaagaaugcacaugcggauuugccagcaacaaaaccauagaaugugccuguagagauaacaguuacacagcaaaaagacccuuugucaaauuaaauguggagacugauacagcugaaauaagauugaugugcacagagacuuauuuggacacccccagaccagaugauggaagcauaacagggccuugcgaaucuaauggggacaaagggcguggaggugucaagggaggauuuguucaucaaagaauggcaucaaagauuggaagaugguacucccgaacgaugucuaaaacuaaaagaauggggauggaacuguaugucaaguaugauggagacccauggacugacagugacgcccuugcuccuaguggaguaauggucucaauggaagaaccugguugguacucuuucggcuucgaaauaaaagauaagaaaugugauguccccuguauugggauagagaugguacaugaugguggaaaaaggacuuggcacucagcagcaacagccauuuacuguuuaaugggcucaggacaguugcuaugggacacugucacagguguugauauggcucuguaa

SEQ ID NO: 61947 - RNA, 1398 nt, Artificial Sequence
  derived and/or modified CDS sequence (wt) from neuraminidase__InfluenzaB__AHL91193
augcuaccuucaacuauacaaacguuaacccuauuucucacaucagggggaguguuauuaucacuauaugugucagccuuacugucauacuuacuguauucggauauauugcuaaaauuuucaccaaaaauaauugcaccaacaaugucguuggacugcgcgaacgcaucaaauguucaggcugugaaccauucugcaacaaaagagaugaaauuucuucccucagaaccggaguggacauacccccguuuaucuugccaggguucaaccuuccagaaagcacuccuaauuagcccucauagauuuggagaagccaaaggaaacucagcucccuugauaauaagggaaccuuuuauugcuuguggaccaaaggagugcaaacacuuugcucuaacccauuaugcagcucaaccagggggauacuacaauggaacaagagaggacagaaacaagcugaggcaucugauuucagucaacuuaggcaaaaucccaacuguagaaaacuccauuuuccacauggcagcuuggaguggauccgcaugccaugaugguagagaauggacauauaucggaguugauggcccugacaguaaugcauugaucaaaauaaaauauggagaagcauacacugacacauaccauuccuaugcaaacaacauccuaagaacacaagaaagugccugcaauugcaucgggggagauuguuaucuuaugauaacugauggcucagcuucaggaauuaguaaaugcagauuccuuaagauccgagagggucgaauaauaaaagaaauauuuccaacaggaagaguagagcacacugaagaaugcacaugcggauuugccagcaacaaaaccauagaaugugccuguagagauaacaguuacacagcaaaaagacccuuugucaaauuaaauguggagacugauacagcugaaauaagauugaugugcacagagacuuauuuggacacccccagaccagaugauggaagcauaacagggccuugcgaaucuaauggggacaaagggcguggaggugucaagggaggauuuguucaucaaagaauggcauccaaaauuggaagaugguacucccgaacgaugucuaaaacuaaaagaauggggauggaacuguaugucaaguaugauggagacccauggacugacagugacgcccuugcuccuaguggaguaauggucucaauggaagaaccugguugguacucuuucggcuucgaaauaaaagauaagaaaugugauguccccuguauugggauagagaugguacaugaugguggaaaaaggacuuggcacucagcagcaacagccauuuacuguuuaaugggcucaggacaguugcuaugggacacugucacagguguugauauggcucuguaa

SEQ ID NO: 61948 - RNA, 1398 nt, Artificial Sequence
  derived and/or modified CDS sequence (wt) from neuraminidase__InfluenzaB__AHL91204
augcuaccuucaacuauacaaacguuaacccuauuucucacaucagggggaguguuauuaucacuauaugugucagccuuacugucauacuuacuguauucggauguauugcuaaaauuuucaccaaaaauaauugcaccaacaaugucguuggacugcgcgaacgcaucaaauguucaggcugugaaccauucugcaacagaagagaugacauuucuucucccagagccggaguggacauacccucguuuaucuugccagggcucaaccuuucagaaagcacuccuaauuagcccucauagauucggagaagccaaaggaaacucagcucccuugauaauaagggaaccuuuuauugcuuguggaccaaaggagugcaaacacuuugcucuaacccauuaugcagcucaaccagggggauacuacaauggaacaagagaggacagaaacaagcugaggcaucugauuucagucaacuuaggcaaaaucccaacuguagaaaacuccauuuuccacauggcagcuuggaguggauccgcaugccaugaugguagagaauggacauauaucggaguugauggcccugacaguaaugcauugaucaaaauaaaauauggagaagcauacacugacaccuaccauuccuaugcaaacaacauccuaagaacacaagaaagugccugcaauugcaucgggggagauuguuaucuuaugauaacugauggcucagcuucaggaauuaguaaaugcagauuccuuaaaauucgagagggucgaauaauaaaagaaauauuuccaacaggaagaguagagcauacugaagaaugcacaugcggauuugccagcaauaaaaccauagaaugugccuguagagauaacauuuacacagcaaaaagacccuuugucaaauuaaauguugagacugauacagcugaaauaagauugaugugcacagagacuuauuuggacacccccagaccagaugauggaagcauaacagggccuugcgaaucuaauggggacaaagggcauggagguaucaaaggaggauuuguccaucaaagaauggcauccaagauuggaagaugguacucccgaacgaugucuaaaacuaaaagaauggggauggaacuguaugucaaguaugauggagacccauggacugacagugacgcccuugcuccuaguggaguaauggucucaauggaagaaccugguugguauucuuucggcuucgaaauaaaagauaagaaaugugauguccccuguauugggauagagaugguacaugaugguggaaaaaagacuuggcacucagcagcaacagccauuuacuguuuaaugggcucaggacaguugcuaugggacacugucacagguguugauauggcucuguaa

SEQ ID NO: 61949 - RNA, 1398 nt, Artificial Sequence
  derived and/or modified CDS sequence (wt) from neuraminidase__InfluenzaB__AHL91215
augcuaccuucaacuauacaaacguuaacccuauuucucacaucagggggaguguuauuaucacuauaugugucaaccuuacugucauacuuacuguauucggauauauugcuaaaauuuucaccaaaaauaauugcaccaacaacgucguuggacugcgcgaacgcaucaaauguucaggcugugaaccauucugcaacaaaagagaugaaauuucuucccacagaaccggaguggacauacccccguuuaucuugccaggguucaaccuuccagaaagcacuccuaauuagcccucauagauuuggagaagccaaaggaaacucagcucccuugauaauaagggaaccuuuuauugcuuguggaccaaaggagugcaaacacuuugcucuaacccauuaugcagcucaaccagggggauacuacaauggaacaagagaggacagaaacaagcugaggcaucugauuucagucaacuuaggcaaaaucccaacuguagaaaacuccauuuuccacauggcagcuuggaguggauccgcaugccaugaugguagagaauggacauauaucggaguugauggcccugacaguaaugcauugaucaaaauaaaauauggagaagcauacacugacacauaccauuccuaugcaaacaacauccuaagaacacaagaaagugccugcaauugcaucgggggagauuguuaucuuaugauaacugauggcucagcuucaggaauuaguaaaugcagauuccuuaagauccgagagggucgaauaauaaaagaaauauuuccaacaggaaggguagagcacacugaagaaugcacaugcggauuugccagcaacaaaaccauagaaugugccuguagagauaacaguuacacagcaaaaagacccuuugucaaauuaaauguggagacugauacagcugaaauaagauugaugugcacagagacuuauuuggacacccccagaccagaugauggaagcauaacagggccuugcgaaucuaauggggacaaagggaguggaggugucaagggaggauuuguucaucaaagaaugacauccaagauuggaagaugguacucccgaacgaugucuaaaacuaaaagaauggggauggaacuguaugucaaguaugauggagacccauggacugacagugacgcccuugcuccuaguggaguaauggucucaauggaagaaccugguugguacucuuucggcuucgaaauaaaagauaagaaaugugauguccccuguauugggauagagaugguacaugaugguggaaaaaggacuuggcacucagcagcaacagccauuuacuguuuaaugggcucaggacaguugcuaugggacacugucacagguguugauauggcucuguaa

SEQ ID NO: 61950 - RNA, 1401 nt, Artificial Sequence
  derived and/or modified CDS sequence (wt) from neuraminidase__InfluenzaB__AHL91226
augcuaccuucaacuauacaaacguuaacccuauuucucacaucagggggaguguuauuaucacuauaugugucagcuucacugucauacuuacuguauucggguauauugcuaaaauuuucaccaacagaaauaacugcaccaacaaugccauuggauugugcaaacgcaucaaauguucaggcugugaaccguucugcaacaaaaggggugacacuucuucucccagaaccggaguggacauacccucguuuaucuugcccgggcucaaccuuucagaaagcacuccuaauuagcccucauagauucggagaaaccagaggaaacucagcucccuugauaauaagggaaccuuuuauugcuuguggaccaaaggaaugcaaacacuuugcucuaacccauuaugcagcucaaccagggggauacuacaauggaacaagagaagacagaaacaagcugaggcaucuaauuucagucaaauugggcaaaaucccaacaguagaaaacuccauuuuccacauggcagcuuggagcggguccgcaugccaugaugguagagaauggacauauaucggaguugauggcccugacaguaaugcauugcucaaaauaaaauauggagaagcauauacugacacauaccauuccuaugcaaacaacauccuaagaacacaagaaagugccugcaauugcaucgggggagauuguuaucuuaugauaacugauggcucagcuucagggauuaguaaaugcagauuucuuaagauucgagagggccgaauaauaaaagaaauauuuccaacaggaagaguagaacauacugaagaaugcacaugcggauuugccagcaauaaaaccauagaaugugccuguagagauaacaguuacacagcaaaaagacccuuugucaaauuaaauguggagacugauacagcggaaauaagauugaugugcacagagacuuauuuggacacccccagaccagaugauggaagcauaacagggccuugcgaaucuaauggggauaaagggaguggaggcaucaagggaggauuuguucaucaaagaauggcauccaagauuggaaggugguacucucgaacgaugucuaaaacuaaaaggauggggaugggacuguaugucaaguaugauggagacccauggacugacagugacgcccuugcucuuaguggaguaaugguuucaauggaagaaccugguugguauuccuuuggcuucgaaauaaaagauaagaaaugugauguccccuguauugggauagagaugguacaugaugguggaaaaaagacuuggcacucagcagcaacagccauuuacuguuuaaugggcucaggacaacugcuaugggacacugucacagguguugauauggcucuguaa

SEQ ID NO: 61951 - RNA, 1401 nt, Artificial Sequence
  derived and/or modified CDS sequence (wt) from neuraminidase__InfluenzaB__AHL91237
augcuaccuucaacuauacaaacguuaacccuauuucucacaucagggggaguguuauuaucacuauaugugucagcuucacugucauacuuacuauauucggauauauugcuaaaauuuucaccaacagaaauaacugcaccaacaaugccauuggauugugcaaacgcaucaaauguucaggcugugaaccguucugcaacaaaaggggugacacuucuucucccagaaccggaguggacauacccucguuuaucuugcccgggcucaaccuuucagaaagcacuccuaauuagcccucauagauucggagaaaccaaaggaaacucagcucccuugauaauaagggaaccuuuuauugcuuguggaccaaaagaaugcaaacacuuugcucuaacccauuaugcagcucaaccagggggauacuacaauggaacaagagaagacagaaacaagcugaggcaucuaauuucagucaaauugggcaaaaucccaacaguagaaaacuccauuuuccacauggcagcuuggagcggguccgcaugccaugaugguagagaauggacauauaucggaguugauggcccugacaguaaugcauugcucaaaauaaaauauggagaagcauauacugacacauaccauuccuaugcaaacaacauccuaagaacacaagaaagugccugcaauugcaucgggggagauuguuaucuuaugauaacugauggcucagcuucagggauuagugaaugcagauuucuuaagauucgagagggccgaauaauaaaagaaauauuuccaacaggaagaguagaacauacugaagaaugcacaugcggauuugccagcaauaaaaccauagaaugugccuguagagauaacaguuacacagcaaaaagacccuuugucaaauuaaauguggagacugauacagcggaaauaagauugaugugcacagagacuuauuuggacacccccagaccagaugauggaagcauaacagggccaugcgaaucuaauggggauaaagggaguggaggcaucaagggaggauuuguucaucaaagaauggcauccaagauuggaaggugguacucucgaacgaugucuaaaacuaaaaggauggggaugggacuguaugucaaguaugauggagacccauggacugacagugaugcccuugcucuuaguggaguaaugguuucaauggaagaaccugguugguauuccuuuggcuucgaaauaaaagauaagaaaugugauguccccuguauugggauagagaugguacaugaugguggaaaaaagacuuggcacucagcagcaacagccauuuacuguuuaaugggcucaggacaacugcuaugggacacugucacagguguugauauggcucuguaa

SEQ ID NO: 61952 - RNA, 1401 nt, Artificial Sequence; identical to SEQ ID NO: 60730
  derived and/or modified CDS sequence (wt) from neuraminidase__InfluenzaB__AHL91248

SEQ ID NO: 61953 - RNA, 1401 nt, Artificial Sequence; identical to SEQ ID NO: 61950
  derived and/or modified CDS sequence (wt) from neuraminidase__InfluenzaB__AHL91259

SEQ ID NO: 61954 - RNA, 1401 nt, Artificial Sequence; identical to SEQ ID NO: 61950
  derived and/or modified CDS sequence (wt) from neuraminidase__InfluenzaB__AHL91270

SEQ ID NO: 61955 - RNA, 1398 nt, Artificial Sequence; identical to SEQ ID NO: 60693
  derived and/or modified CDS sequence (wt) from neuraminidase__InfluenzaB__AHL91281

SEQ ID NO: 61956 - RNA, 1401 nt, Artificial Sequence
  derived and/or modified CDS sequence (wt) from neuraminidase__InfluenzaB__AHL91303
augcuaccuucaacuauacaaacguuaacccuauuucucacaucagggggaguguuauuaucacuauaugugucagcuucacugucauacuuacuauauucggauauauugcuaaaauuuucaccaacagaaauaacugcaccaacaaugccauuagauugugcaaacgcaucaaauguucaggcugugaaccguucugcaacaaaaggggugacacuucuucucccagaaccggaguggacauacccucguuuaucuugcccgggcucaaccuuucagaaagcacuccuaauuagcccucauagauucggagaaaccaaaggaaacucagcucccuugauaauaagggaaccuuuuauugcuuguggaccaaaggaaugcaaacacuuugcucuaacccauuaugcagcucaaccagggggauacuacaauggaacaagagaagacagaaacaagcugaggcaucuaauuucagucaaauugggcaaaaucccaacaguagaaaacuccauuuuccacauggcagcuuggagcggguccgcaugccaugaugguagagaauggacauauaucggaguugauggcccugacaguaaugcauugcucaaaauaaaauauggagaagcauauacugacacauaccauuccuaugcaaacaacauccuaagaacacaagaaagugccugcaauugcaucgggggagauuguuaucuuaugauaacugauggcucagcuucagggauuaaugaaugcagauuucuuaagauucgagagggccgaauaauaaaagaaauauuuccaacaggaagaguagaacauacugaagaaugcacaugcggauuugccagcaauaaaaccauagaaugugccuguagagauaacaguuacacagcaaaaagacccuuugucaaauuaaauguggagacugauacagcagaaauaagauugaugugcacagagacuuauuuggacacccccagaccagaugauggaagcauaacagggccuugugaaucuaauggggauaaagggaguggaggcaucaagggaggauuuguucaucaaagaauggcauccaagauuggaaggugguacucucgaacgaugucuaaaacuagaaggauggggaugggacuguaugucaaguaugauggagacccauggacugacagugaugcccuugcucuuaguggaguaaugguuucaauggaagaaccugguugguauuccuuuggcuucgaaauaaaagauaagaaaugugauguccccuguauugggauagagaugguacaugaugguggaaaaaagacuuggcacucagcagcaacagccauuuacuguuuaaugggcucaggacaacugcuaugggacacugucacagguguugauauggcucuguaa

SEQ ID NO: 61957 - RNA, 1401 nt, Artificial Sequence; identical to SEQ ID NO: 60722
  derived and/or modified CDS sequence (wt) from neuraminidase__InfluenzaB__AHL91314

SEQ ID NO: 61958 - RNA, 1401 nt, Artificial Sequence
  derived and/or modified CDS sequence (wt) from neuraminidase__InfluenzaB__AHL91325
augcuaccuucaacuauacaaacguuaacccuauuucucacaucagggggaguguuauuaucacuauaugugucagcuucacugucauacuuacuauauucggauauauugcuaaaauuuucaccaacagaaauaacugcaccaacaaugccauuggauugugcaaacgcaucaaauguucaggcugugaaccguucugcaacaaaaggggugacacuucuucucccagaaccggaguggacauacccucguuuaucuugcccgggcucaaccuuucagaaagcacuccuaauuagcccucauagauucggagaaaccaaaggaaacucagcucccuugauaauaagggaaccuuuuauugcuuguggaccaaaggaaugcaaacacuuugcucuaacccauuaugcagcucaaccagggggauacuacaauggaacaagagaagacagaaacaagcugaggcaucuaauuucagucaaauugggcaaaaucccaacaguagaaaacuccauuuuccacauggcagcuuggagcggguccgcaugccaugaugguagagaauggacauauaucggaguugauggcccugacaguaaugcauugcucaaaauaaaauauggagaagcauauacugacacauaccauuccuaugcaaacaacauccuaagaacacaagaaagugccugcaauugcaucgggggagauuguuaucuuaugauaacugauggcucagcuucagggauuagugaaugcagauuucuuaagauucgagagggccgaauaauaaaagaaauauuuccaacaggaagaguagaacauacugaagaaugcacaugcggauuugccagcaauaaaaccauagaaugugccuguagagauaacaguuacacagcaaaaagacccuuugucaaauuaaauguggagacugauacagcggaaauaagauugaugugcacagagacuuauuuggacacccccagaccagaugauggaagcauaacagggccuugcgaaucuaacggggauaaagggaguggaggcaucaagggaggauuuguucaucaaagaauggcauccaagauuggaaggugguacucucgaacgaugucuaaaacuaaaaggauggggaugggacuguaugucaaguaugauggagacccauggacugacagugaugcccuugcucuuaguggaguaaugguuucaauggaagaaccugguugguauuccuuuggcuucgaaauaaaagauaagaaaugugauguccccuguauugggauagagaugguacaugaugguggaaaaaagacuuggcacucagcagcaacagcuauuuacuguuuaaugggcucaggacaacugcuaugggacacugucacagguguugauauggcucuguaa

SEQ ID NO: 61959 - RNA, 1401 nt, Artificial Sequence
  derived and/or modified CDS sequence (wt) from neuraminidase__InfluenzaB__AHL91347
augcuaccuucaacuauacaaacguuaacccuauuucucacaucagggggaguguuauuaucacuauaugugucagcuucacugucauacuuacuauauucggauguauugcuaaaauuuucaccaacagaaauaacugcaccaacaaugccauuggauugugcaaacgcaucaaauguucaggcugugaaccguucugcaacaaaaggggugacacuucuucucccagaaccggaguggacauacccucguuuaucuugcccgggcucaaccuuucagaaagcacuccuaauuagcccucauagauucggagaaaccaaaggaaacucagcucccuugauaauaagggaaccuuuuauugcuuguggaccaaaggaaugcaaacacuuugcucuaacccauuaugcagcucaaccagggggauacuacaauggaacaagagaagacagaaacaagcugaggcaucuaauuucagucaaauugggcaaaaucccaacaguagaaaacuccauuuuccacauggcagcuuggagcggguccgcaugccaugaugguagagaauggacauauaucggaguugauggcccugacaguaaugcauugcucaaaauaaaauauggagaagcauauacugacacauaccauuccuaugcaaacaacauccuaagaacacaagaaagugccugcaauugcaucgggggagauuguuaucuuaugauaacugauggcucagcuucagggauuagugaaugcagauuucuuaagauucgagagggccgaauaguaaaagaaauauuuccaacaggaagaguagaacauacugaagaaugcacaugcggauuugccagcaauaaaaccauagaaugugccuguagagauaacaguuacacagcaaaaagacccuuugucaaauuaaauguggagacugauacagcagaaauaagauugaugugcacagagacuuauuuggacacccccagaccagaggauggaagcauaacagggccuugugaaucuaauggggauaaagggaguggaggcaucaagggaggauuuguucaucaaagaauggcauccaagauuggaaggugguauucucgaacgaugucuaaaacuaaaaggauggggaugggacuguaugucaaguaugauggagacccauggacugacagugaugcccuugcucuuaguggaguaaugguuucaauggaagaaccugguugguauuccuuuggcuucgaaauaaaagauaagaaaugugauguccccuguauugggauagagaugguacaugaugguggaaaagagacuuggcacucagcagcaacggccauuuacuguuuaaugggcucaggacagcugcuaugggacacugucacagguguugauauggcucuguaa

SEQ ID NO: 61960 - RNA, 1401 nt, Artificial Sequence; identical to SEQ ID NO: 61959
  derived and/or modified CDS sequence (wt) from neuraminidase__InfluenzaB__AHL91358

SEQ ID NO: 61961 - RNA, 1401 nt, Artificial Sequence; identical to SEQ ID NO: 60697
  derived and/or modified CDS sequence (wt) from neuraminidase__InfluenzaB__AHL91369

SEQ ID NO: 61962 - RNA, 1401 nt, Artificial Sequence; identical to SEQ ID NO: 60697
  derived and/or modified CDS sequence (wt) from neuraminidase__InfluenzaB__AHL91380

SEQ ID NO: 61963 - RNA, 1401 nt, Artificial Sequence
  derived and/or modified CDS sequence (wt) from neuraminidase__InfluenzaB__AHL91391
augcuaccuucaacuauacaaacguuaacccuauuucucacaucagggggaguguuauuaucacuauaugugucagcuucacugucauacuuacuauauucggauauauugcuaaaauuuucaccaaaagaaauaacugcaccaacaaugccauugaauugugcaaacgcaucaaauguucaggcugugaaccguucugcaacaaaaggggugacacuuccucucccagaaccggaguggacauacccucguuuaucuugcccgggcucaaccuuucagaaagcacuccuaauuagcccucauagauucggagaaaccaaaggaaacucagcucccuugauaauaagggaaccuuuuauugcuuguggaccaaaggaaugcaaacacuuugcucuaacccauuaugcagcccaaccagggggauacuacaauggaacaagagaagacagaaacaagcugaggcaucuaauuucagucaaauugggcaaaaucccaacaguagaaaacuccauuuuccacauggcagcuuggagcggguccgcaugccaugaugguagagaauggacauauaucggaguugauggcccugacaauaaugcauugcucaaaauaaaauauggagaagcauauacugacacauaccauuccuaugcaaacaacauccuaagaacacaagaaagugccugcaauugcaucgggggagauuguuaucuuaugauaacugauggcucagcuucagggauuagugaaugcagauuucuuaagauucgagagggccgaauaauaaaagaaauauuuccaacaggaagaguagaacauacugaagaaugcacaugcggauuugccagcaauaaaaccauagaaugugccuguagagauaacaguuacacagcaaaaagacccuuugucaaauuaaauguggagacugauacagcagaaauaagauugaugugcacagagacuuacuuggacacccccagaccagaugauggaagcauaacagggccuugugaaucuaauggggauaaagggaguggaggcaucaagggaggauuuguucaucaaagaauggcauccaagauuggaaggugguacucucgaacgaugucuaaaacuaaaaggauggggaugggacuguaugucaaguaugauggagacccauggauugacagugaugcccuuacucuuagcggaguaaugguuucaauggaagaaccugguugguauuccuuuggcuucgaaauaaaggauaagaaaugugauguccccuguauugggauagagaugguacaugaugguggaaagacgacuuggcacucagcagcaacagccauuuacuguuuaaugggcucaggacaacuacuaugggacacugucacaggcguugauauggcucuguaa

SEQ ID NO: 61964 - RNA, 1401 nt, Artificial Sequence
  derived and/or modified CDS sequence (wt) from neuraminidase__InfluenzaB__AHL91413
augcuaccuucaacuauacaaacguuaacccuauuucucacaucagggggaguguuauuaucacuauaugugucagcuucacugucauacuuacuauauucggauauauugcuaaaauuuacaccaacagaaauaacugcaccaacaaugccauuggauugugcaaacgcaucaaauguucaggcugugaaccuuucugcaacaaaaggggugacacuucuucucccagaaccggaguggacauacccgcguuuaucuugcccgggcucaaccuuucagaaagcacuccuaauuagcccucauagauucggagaaaccaaaggaaacucagcucccuugauaauaagggaaccuuuuauugcuuguggaccaaaggaaugcaaacacuuugcucuaacccauuaugcagcccaaccagggggauacuacaauggaacaagagaagacagaaacaagcugaggcaucuaauuucagucaaauugggcaaaaucccaacaguagaaaacuccauuuuccacauggcagcauggagcggguccgcaugccaugaugguaaagaauggacauauaucggaguugauggcccugacaguaaugcauugcucaaaauaaaauauggagaagcauauacugacacauaccauuccuaugcaaacaacauccuaagaacacaagaaagugccugcaauugcaucgggggaaauuguuaucuuaugauaacugauggcucagcuucagguauuagugaaugcagauuucuuaagauucgagagggccgaauaauaaaagaaauauuuccaacaggaagaguaaaacauacugaagaaugcacaugcggauuugccagcaauaaaaccauagaaugugcuuguagagauaacaguuacacagcaaaaagacccuuugucaaauuaaauguggagacugauacagcagaaauaagauugaugugcacagagacuuauuuggacacccccagaccagaugauggaagcauaacagggccuugugaaucuaaugggaauaaagggaguggaggcaucaagggaggauuuguucaucaaagaauggcauccaagauuggaaggugguacucucgaacgaugucuaaaacuaaaaggauggggaugggacuguaugucaaguaugauggagacccauggacugacagugaugcccuugcucuuaguggaguaaugguuucaauggaagaaccugguugguacuccuuuggcuucgaaauaaaagauaagaaaugugauguccccuguauugggauagagaugguacaugaugguggaaaggagacuuggcacucagcagcaacagccauuuacuguuuaaugggcucaggacaacugcuaugggacacugucacagguguugauauggcucuguaa

SEQ ID NO: 61965 - RNA, 1401 nt, Artificial Sequence
  derived and/or modified CDS sequence (wt) from neuraminidase__InfluenzaB__AHL91446
augcuaccuucaacuauacaaacguuaacccuauuccucacaucagggggaguguuauuaucacuauaugugucagcuucacugucauacuuauuauauucggauauauugcuaaaauuuucaccaacagaaauaacugcaccaacaaugccauuggauugugcaaacgcaucaaauguucaggcugugaaccguucugcaacaaaagggaugacacuucuucucccagaaccggaguggacauacccgcguuuaucuugcccgggcucaaccuuucagaaagcacuccuaauuagcccucauagauucggagaaaccaaaggaaacucagcucccuugauaauaagggaaccuuuuauugcuuguggaccaaaggaaugcaaacacuuugcucuaacccauuaugcagcccaaccagggggauacuacaaugggacaagagaagacagaaacaagcugaggcaucuaauuucagucaaauugggcaaaaucccaacaguagaaaacuccauuuuccacauggcagcauggagcggguccgcaugccaugaugguaaagaauggacauauaucggaguugauggcccugacaguaaugcauugcucaaaauaaaauauggagaagcauauacugacacauaccauuccuaugcaaacaacauccuaagaacacaagaaagugccugcaauugcaucgggggaaauuguuaucuuaugauaacugauggcucagcuucagguauuagugaaugcagauuucuuaagauucgagagggccgaauaauaaaagaaauauuuccaacaggaagaguagaacauacugaagaaugcacaugcggauuugccagcaauaaaaccauagaaugugccuguagagauaacaguuacacagcaaaaagacccuuugucaaauuaaauguggagacugauacagcagaaauaagauugaugugcacagagacuuauuuggacacccccagaccagaugauggaagcauaacagggccuugugaaucuaaugggggaaaagggaguggaggcaucaagggaggauuuguucaucaaagaauggaauccaagauuggaaggugguacucucgaacaaugucuaaaacuaaaaggauggggaugggacuguaugucaaguaugauggagacccauggacugacagugaugcccuugcucuuaguggaguaaugguuucaauggaagaaccugguugguacuccuuuggcuucgaaauaaaagauaaggaaugugauguccccuguauugggauagagaugguacaugaugguggaaaggagacuuggcacucagcagcaacagccauuuacuguuuaaugggcucaggacaacugcuaugggacacugucacagguguuaauauggcucuguaa

SEQ ID NO: 61966 - RNA, 1401 nt, Artificial Sequence
  derived and/or modified CDS sequence (wt) from neuraminidase__InfluenzaB__AHL91457
augcuaccuucaacuauacaaacguuaacccuauuucucacaucagggggaguguuauuaucacuauaugugucagcuucauugucauacuuacuauauucggauauauugcuaaaauuuucaccaacagaaauaacugcaccaauaaugccauuggauugugcaaacgcaucaaauguucaggcugugaaccguucugcaacaaaaggggugacacuucuucucccagaaccggaguggacauacccgcguuuaucuugcccgggcucaaccuuucagaaagcacuccuaauuagcccucauagauucggagaaaccaaaggaaacucagcucccuugauaauaagggaaccuuuuauugcuuguggaccaaaggaaugcaaacacuuugcucuaacccauuaugcagcccaaccagggggauacuacaauggaacaagaggagacagaaacaagcugaggcaucuaauuucagucaaauugggcaaaaucccaacaguagaaaacuccauuuuccacauggcagcauggagcggguccgcaugccaugaugguaaagaauggacauauaucggaguugauggcccugacaauaaugcauugcucaaaauaaaauauggagaagcauauacugacacauaccauuccuaugcaaacaacacccuaagaacacaagaaagugccugcaauugcaucgggggaaauuguuaucuuaugauaacugauggcucagcuucagguauuagugaaugcagauuucuuaagauucgagagggccgaauaauaaaagaaauauuuccaacaggaagaguaaaacauacugaagaaugcacaugcggauuugccagcaauaaaaccauagaaugugccuguagagauaacaguuacacagcaaaaagacccuuugucaaauuaaacguggagacugauacagcagaaauaagauugaugugcacagagacuuauuuggacacccccagaccagaugauggaagcauaacagggccuugugaaucuaacgggaacaaagggaguggaggcaucaagggaggauuuguucaucaaagaauggcauccaagauuggaaggugguacucucgaacgaugucuaaaacuaaaaggauggggaugggacuguaugucaaguaugauggagacccauggacugacagugaugcccuugcucuuaguggaguaaugguuucaauggaagaaccugguugguacuccuuuggcuucgaaauaaaagauaagaaaugugauguccccuguauugggauagagaugguacaugaugguggaaaagagacuuggcacucagcagcaacagccauuuacuguuuaaugggcucaggacaacugcuaugggacacugucacagguguugauauggcucuguaa

SEQ ID NO: 61967 - RNA, 1401 nt, Artificial Sequence
  derived and/or modified CDS sequence (wt) from neuraminidase__InfluenzaB__AHL91468
augcuacccucaacuauacaaacguuaacccuauuccucacaucagggggaguguuauuaucacuauaugugucagcuucacugucauacuuacuauauucggauauauugcuaaaauuuucgccaacagaaauaacugcaccaacaaugccauuggauugugcaaacgcaucaaauguucaggcugugaaccguucugcaacaaaaggggugacacuucuucucccagaaccggaguggacauacccgcguuuaucuugcccgggcucaaccuuucagaaagcacuccuaauuagcccucauagauucggagaaaccaaaggaaacucagcucccuugauaauaagggaaccuuuuauugcuuguggaccaaaggaaugcaaacacuuugcucuaacccauuaugcagcccaaccagggggauacuacaauggaacaagagaagacagaaacaagcugaggcaucuaauuucagucaaauugggcaaaaucccaacaguagaaaacuccauuuuccacauggcagcauggagcggguccgcaugccaugaugguaaagaauggacauauauaggaguugauggcccugacaguaaugcauugcucaaaauaaaauauggagaagcauauacugacacauaccauuccuaugcaaacaacauccuaagaacacaagaaagugcuugcaauugcaucgggggaaauuguuaucuuaugauaacugauggcucagcuucagguauuagugagugcagauuucuuaagauucgagagggccgaauaauaaaagaaauauucccaacaggaagaguaaaacauacugaagaaugcacaugcggauuugccagcaauaaaaccauagaaugugccuguagagauaacaguuacacagcaaaaagacccuuugucaaauuaaacguggagacugauacagcagaaauaagauugaugugcacagagacuuauuuggacacccccagaccagaugauggaagcauaacagggccuugugaaucuaauggggauaaagggaguggaggcaucaagggaggauuuguucaucaaagaauggccuccaagauuggaaggugguacucucgaacaaugucuaaaacuaaaaggauggggaugggacuguaugucaaguaugauggagacccauggacugacagugaugcccuugcucuuagugggguaaugguuucagugggagaaccugguugguacuccuuuggcuucgaaauaaaagauaagaaaugugauguccccuguauugggauagagaugguacaugaugguggaaaggagacuuggcacucagcagcaacagccauuuacuguuuaaugggcucaggacaacugcuaugggacacugucacagguguugauauggcucuguaa

SEQ ID NO: 61968 - RNA, 1401 nt, Artificial Sequence
  derived and/or modified CDS sequence (wt) from neuraminidase__InfluenzaB__AHL91479
augcuaccuucaacuauacaaacguuaacccuauuucucacaucagggggaguguuauuaucacuauaugugucagcuucacugucauacuuacuauauucggauauauugcuaaaauuuucaccaacagaaauaacugcaccaacaaugccaucggauugugcaaacgcaucaaauguucaggcugugaaccguucugcaacaaaaggggugacacuucuucucccagaaccggaguggacauacccgcguuuaucuugcccgggcucaaccuuucagaaagcacuccuaauuagcccucauagauucggagaaaccaaaggaaacucagcucccuugauaauaagggaaccuuuuauugcuuguggaccaaaggaaugcaaacacuuugcucuaacccauuaugcagcccaaccagggggauacuacaauggaacaagaggagacagaaacaagcugaggcaucuaauuucagucaaauugggcaaaaucccaacaguagaaaacuccauuuuccacauggcagcauggagcggguccgcaugccaugaugguaaagaauggacauauaucggaguugauggcccugacaguaaugcauugcucaaaauaaaauauggagaagcauauacugacacauaccauuccuaugcaaacaacauccuaagaacacaagaaagugccugcaauugcaucgggggaaauuguuaucuuaugauaacugauggcucagcuucagguauuagugaaugcagauuucuuaagauucgagagggccgaauaauaaaagaaauauuuccaacaggaagaguaaaacauacugaagaaugcacaugcggauuugccagcaauaaaaccauagaaugugccuguagagauaacaguuacacagcaaaaagacccuuugucaaauuaaauguggagacugauacagcagaaauaagauugaugugcacagagacuuauuuggacacccccagaccagaugauggaagcauaacagggccuugugaaucuaauggggacaaagggaguggaggcaucaagggaggauuuguucaucaaagaauggcauccaagauuggaaggugguacucucgaacgaugucuaaaacuaaaaggauggggaugggacuguaugucaaguaugauggagacccauggacugacagugaugcccuugcucuuaguggaguaaugguuucaauggaagaaccugguugguacuccuuuggcuucgaaauaaaagauaagaaaugugauguccccuguauugggauagagaugguacaugaugguggaaaggagacuuggcacucagcagcaacagccauuuacuguuuaaugggcucaggacaauugcuaugggacacugucacagguguugauauggcucuguaa

SEQ ID NO: 61969 - RNA, 1401 nt, Artificial Sequence
  derived and/or modified CDS sequence (wt) from neuraminidase__InfluenzaB__AHL91501
augcuaccuucaacuauacaaacguuaacccuauuccucacaucagggggaguguuauuaucacuauaugugucagcuucacugucauacuuauuauauucggauauauugcuaaaauuuucaccaacagaaauaacugcaccaacaaugccauuggauugugcaaacgcaucaaauguucaggcugugaaccguucugcaacaaaagggaugacacuucuucucccagaaccggaguggacauacccgcguuuaucuugcccgggcucaaccuuucagaaagcacuccuaauuagcccucauagauucggagaaaccaaaggaaacucagcucccuugauaauaagggaaccuuuuauugcuuguggaccaaaggaaugcaaacacuuugcucuaacccauuaugcagcccaaccagggggauacuacaaugggacaagagaagacagaaacaagcugaggcaucuaauuucagucaaauugggcaaaaucccaacaguagaaaacuccauuuuccacauggcagcauggagcggguccgcaugccaugaugguaaagaauggacauauaucggaguugauggcccugacaguaaugcauugcucaaaauaaaauauggagaagcauauacugacacauaccauuccuaugcaaacaacauccuaagaacacaagaaagugccugcaauugcaucgggggaaauuguuaucuuaugauaacugauggcucagcuucagguauuagugaaugcagauuucuuaagauucgagagggccgaauaauaaaagaaauauuuccaacaggaagaguagaacauacugaagaaugcacaugcggauuugccagcaauaaaaccauagaaugugccuguagagauaacaguuacacagcaaaaagacccuuugucaaauuaaauguggagacugauacagcagaaauaagauugaugugcacagagacuuauuuggacacccccagaccagaugauggaagcauaacagggccuugugaaucuaaugggggaaaagggaguggaggcaucaagggaggauuuguucaucaaagaauggaauccaagauuggaaggugguacucucgaacaaugucuaaaacuaaaaggauggggaugggacuguaugucaaguaugauggagacccauggacugacagugaugcccuugcucuuaguggaguaaugguuucaauggaagaaccugguugguacuccuuuggcuucgaaauaaaagauaagaaaugugauguccccuguauugggauagagaugguacaugaugguggaaaggagacuuggcacucagcagcaacagccauuuacuguuuaaugggcucaggacaacugcuaugggacacugucacagguguuaauauggcucuguaa

SEQ ID NO: 61970 - RNA, 1401 nt, Artificial Sequence
  derived and/or modified CDS sequence (wt) from neuraminidase__InfluenzaB__AHL91512
augcuaccuucaacuauacaaacguuaacccuauuucucacaucagggggaguguuauuaucacuauaugugucagcuucacugucauacuuacuauauucggauauauugcuaaaauuuucaccaacagaaauaacugcaccaacaaugccauuggauugugcaaacgcaucaaauguucaggcugugaaccguucugcaacaaaaggggugacacuucuucucccagaaccggaguggacauacccgcguuuaucuugcccgggcucaaucuuucagaaagcacuccuaauuagcccucauagauucggagaaaccaaaggaaacucagcucccuugauaauaagggaaccuuuuauugcuuguggaccaaaggaaugcaaacacuuugcucuaacccauuaugcagcccaaccagggggauacuacaauggaacaagaggagacagaaacaagcugaggcaucuaauuucagucaaauugggcaaaaucccaacaguagaaaacuccauuuuccacauggcagcauggagcggguccgcaugccaugaugguaaagaauggacauauaucggaguugauggcccugacaguaaugcauugcucaaaauaaaauauggagaagcauauacugacacauaccauuccuaugcaaacaacauccuaagaacacaagaaagugccugcaauugcaucgggggaaauuguuaucuuaugauaacugauggcucagcuucagguauuagugaaugcagauuucuuaagauucgagagggccgaauaauaaaagaaauauuuccaacaggaagaguaaaacauacugaagaaugcacaugcggauuugccaguaauaaaaccauagaaugugccuguagagauaacaguuacacagcaaaaagacccuuugucaaauuaaauguggagacugauacagcagaaauaagauugaugugcacagagacuuauuuggacacccccagaccagaugauggaagcauaacagggccuugugaaucuaauggggacaaagggaguggaggcaucaagggaggauuuguucaucaaagaauggcauccaagauuggaaggugguacucucgaacgaugucuaaaacuaaaaggauggggaugggacuguaugucaaguaugauggagacccauggacugacagugaugcccuugcucuuaguggaguaaugguuucaauggaagaaccugguugguacuccuuuggcuucgaaauaaaagauaagaaaugugauguccccuguauugggauagagaugguacaugaugguggaaaggagacuuggcacucagcagcaacagccauuuacuguuuaaugggcucaggacaauugcuaugggacacugucacagguguugauauggcucuguaa

SEQ ID NO: 61971 - RNA, 1401 nt, Artificial Sequence
  derived and/or modified CDS sequence (wt) from neuraminidase__InfluenzaB__AHL91523
augcuaccuucaacuauacaaacguuaacccuauuucucacaucagggggaguguuauuaucacuauaugugucagcuucauugucauacuuacuauauucggauauauugcuaaaauuuucaccaacagaaauaacugcaccaacaaugccauuggauugugcaaacgcaucaaauguucaggcugugaaccguucugcaacaaaaggggugacacuucuucucccagaaccggaguggacauacccgcguuuaucuugcccgggcucaaccuuucagaaagcacuccuaauuagcccucauagauucggagaaaccaaaggaaacucagcucccuugauaauaagggaaccuuuuauugcuuguggaccaaaggaaugcaaacacuuugcucuaacccauuaugcagcccaaccagggggauacuacaauggaacaagaggagacagaaacaagcugaggcaucuaauuucagucaaauugggcaaaaucccaacaguagaaaacuccauuuuccacauggcagcauggagcggguccgcaugccaugaugguaaagaauggacauauaucggaguugauggcccugacaauaaugcauugcucaaaauaaaauauggagaagcauauacugacacauaccauuccuaugcaaacaacauccuaagaacacaagaaagugccugcaauugcaucgggggaaauuguuaucuuaugauaacugauggcucagcuucagguauuagugaaugcagauuucuuaagauucgagagggccgaauaauaaaagaaauauuuccaacaggaagaguaaaacauacugaagaaugcacaugcggauuugccagcaauaaaaccauagaaugugccuguagagauaacaguuacacagcaaaaagacccuuugucaaauuaaacguggagacugauacagcagaaauaagauugaugugcacagagacuuauuuggacacccccagaccagaugauggaagcauaacagggccuugugaaucuaauggggacaaagggaguggaggcaucaagggaggauuuguucaucaaagaauggcauccaagauuggaaggugguacucucgaacgaugucuaaaacuaaaaggauggggaugggauuguaugucaaguaugauggagacccauggacugacagugaugcccuugcucuuaguggaguaaugguuucaauggaagaaccugguugguacuccuuuggcuucgaaauaaaagauaagaaaugugauguccccuguauugggauagagaugguacaugaugguggaaaggagacuuggcacucagcagcaacagccauuuacuguuuaaugggcucaggacaacugcuaugggacacugucacagguguugauauggcucuguaa

SEQ ID NO: 61972 - RNA, 1401 nt, Artificial Sequence; identical to SEQ ID NO: 61969
  derived and/or modified CDS sequence (wt) from neuraminidase__InfluenzaB__AHL91534

SEQ ID NO: 61973 - RNA, 1401 nt, Artificial Sequence
  derived and/or modified CDS sequence (wt) from neuraminidase__InfluenzaB__AHL91545
augcuaccuucaacuauacaaacguuaacccuauuucucacaucagggggaguguuauuaucacuauaugugucagcuucacugucauacuuacuauauucggauauauugcuaaaauuuucaccaacagaaauaacugcaccaacaaugccauuggauugugcaaacgcaucaaauguucaggcugugaaccguucugcaacaaaaggggugacacuucuucucccagaaccggaguggacauacccgcguuuaucuugcccgggcucaaccuuucagaaagcacuccuaauuagcccucauagauucggagaaaccaaaggaaacucagcucccuugauaauaagggaaccuuuuauugcuuguggaccaaaggaaugcaaacacuuugcucuaacccauuaugcagcccaaccagggggauacuacaauggaacaagaggagacagaaacaagcugaggcaucuaauuucagucaaauugggcaaaaucccaacaguagaaaacuccauuuuccacauggcagcauggagcggguccgcaugccaugaugguaaagaauggacauauaucggaguugauggcccugacaguaaugcauugcucaaaauaaaauauggagaagcauauacugacacauaccauuccuaugcaaacaacauccuaagaacacaagaaagugccugcaauugcaucgggggaaauuguuaucuuaugauaacugauggcucagcuucagguauuagugaaugcagauuucuuaagauucgagagggccgaauaauaaaagaaauauuuccaacaggaagaguaaaacauacugaagaaugcacaugcggauuugccagcaauaaaaccauagaaugugccuguagagauaacaguuacacagcaaaaagacccuuugucaaauuaaauguggagacugauacagcagaaauaagauugaugugcacagagacuuauuuggacacccccagaccagaugauggaagcauaacagggccuugugaaucuaauggagacaaagggaguggaggcaucaagggaggauuuguucaucaaagaaugacauccaagauuggaaggugguacucucgaacgaugucuaaaacuaaaaggauggggaugggacuguaugucaaguaugauggagacccauggacugacagugaugcccuugcucuuaguggaguaaugguuucaauggaagaaccugguugguacuccuuuggcuucgaaauaaaagauaagaaaugugauguccccuguauugggauagagaugguacaugaugguggaaaggggacuuggcacucagcagcaacagccauuuacuguuuaaugggcucaggacaauugcuaugggacacugucacagguguugauauggcucuguaa

SEQ ID NO: 61974 - RNA, 1401 nt, Artificial Sequence; identical to SEQ ID NO: 61969
  derived and/or modified CDS sequence (wt) from neuraminidase__InfluenzaB__AHL91556

SEQ ID NO: 61975 - RNA, 1401 nt, Artificial Sequence; identical to SEQ ID NO: 61969
  derived and/or modified CDS sequence (wt) from neuraminidase__InfluenzaB__AHL91578

SEQ ID NO: 61976 - RNA, 1401 nt, Artificial Sequence; identical to SEQ ID NO: 60897
  derived and/or modified CDS sequence (wt) from neuraminidase__InfluenzaB__AHL91589

SEQ ID NO: 61977 - RNA, 1401 nt, Artificial Sequence
  derived and/or modified CDS sequence (wt) from neuraminidase__InfluenzaB__AHL91600
augcuaccuucaacuauacaaacguuaacccuauuucucacaacagggggaguguuauuaucacuauaugugucagcuucacugucauacuuacuauauucggauauauugcuaaaauuuucaccaacagaaauaacugcaccaacaaugccauuggauugugcaaacgcaucaaauguucaggcugugaaccguucugcaacaaaaggggugacauuucuucucccagaaccggaguggacauacccgcguuuaucuugcccgggcucaaccuuucagaaagcacuccuaauuagcccucauagauucggagaaaccaaaggaaacucagcucccuugauaauaagggaaccuuuuauugcuuguggaccaaaggaaugcaaacacuuugcucuaacccauuaugcagcccaaccagggggauacuacaauggaacaagaggagacagaaacaagcuaaggcaucuaauuucagucaaauugggcaaaaucccaacaguagaaaacuccauuuuccacauggcagcauggagcggguccgcaugccaugaugguaaagaauggacauauauaggaguugauggcccugacaguaaugcauugcucaaaauaaaauauggagaggcauauacugacacauaccauuccuaugcaaacaacauccuaagaacacaagaaagugccugcaauugcaucgggggaaauuguuaucuuaugauaacugauggcucagcuucagguauuagugaaugcagauuucuuaagauucgagagggccgaauaauaaaagaaauauuuccaacaggaagagugaaacauacugaagaaugcacaugcggauuugccagcaauaaaaccauagaaugugccuguagagauaacaguuacacagcaaaaagacccuuugucaaauuaaauguggagacugauacagcagaaauaagauugaugugcacagagacuuauuuggacacccccagaccagaugauggaagcauaacagggccuugugaaucuaauggggacaaagggaguggaggcaucaagggaggauuuguucaucaaagaauggcauccaagauuggaaggugguacucucgaacgaugucuaaaacuaaaaggaugggaaugggacuguaugucaaguaugauggagacccauggacugacagugaugcccuugcucuuaguggaguaaugguuucaauggaagaaccugguugguacuccuuuggcuucgaaauaaaagauaagaaaugugauguccccuguauugggauagagaugguacaugaugguggaaaggagacuuggcacucagcagcaacagccauuuacuguuuaaugggcucaggacaacugcuaugggacacugucacagguguugauauggcucuguaa

SEQ ID NO: 61978 - RNA, 1401 nt, Artificial Sequence
  derived and/or modified CDS sequence (wt) from neuraminidase__InfluenzaB__AHL91611
augcuaccuucaacuauacaaacguuaacccuauuucucacaacagggggaguguuauuaucacuauaugugucagcuucacugucauacuuacuauauucggauauauugcuaaaauuuucaccaacagaaauaacugcaccaacaaugccauuggauugugcaaacgcaucaaauguucaagcugugaaccguucugcaacaaaaggggugacauuucuucucccagaaccggaguggacauacccgcguuuaucuugcccgggcucaaccuuucagaaagcacuccuaauuagcccucauagauucggagaaaccaaaggaaacucagcucccuugauaauaagggaaccuuuuauugcuuguggaccaaaggaaugcaaacacuuugcucuaacccauuaugcagcccaaccagggggauacuacaauggaacaagaggagacagaaacaagcuaaggcaucuaauuucagucaaauugggcaaaaucccaacaguagaaaacuccauuuuccacauggcagcauggagcggguccgcaugccaugaugguaaagaauggacauauauaggaguugauggcccugacaguaaugcauugcucaaaauaaaauauggagaggcauauacugacacauaccauuccuaugcaaacaacauccuaagaacacaagaaagugccugcaauugcaucgggggaaauuguuaucuuaugauaacugauggcucagcuucagguauuagugaaugcagauuucuuaagauucgagagggccgaauaauaaaagaaauauuuccaacaggaagagugaaacauacugaagaaugcacaugcggauuugccagcaauaaaaccauagaaugugccuguagagauaacaguuacacagcaaaaagacccuuugucaaauuaaauguggagacugauacagcagaaauaagauugaugugcacagagacuuauuuggacacccccagaccagaugauggaagcauaacagggccuugugaaucuaauggggacaaagggaguggaggcaucaagggaggauuuguucaucaaagaauggcauccaagauuggaaggugguacucucgaacgaugucuaaaacuaaaaggaugggaaugggacuguaugucaaguaugauggagacccauggacugacagugaugcccuugcucuuaguggaguaaugguuucaauggaagaaccugguugguacuccuuuggcuucgaaauaaaagauaagaaaugugauguccccuguauugggauagagaugguacaugaugguggaaaggagacuuggcacucagcagcaacagccauuuacuguuuaaugggcucaggacaacugcuaugggacacugucacagguguugauauggcucuguaa

SEQ ID NO: 61979 - RNA, 1401 nt, Artificial Sequence; identical to SEQ ID NO: 61969
  derived and/or modified CDS sequence (wt) from neuraminidase__InfluenzaB__AHL91622

SEQ ID NO: 61980 - RNA, 1401 nt, Artificial Sequence
  derived and/or modified CDS sequence (wt) from neuraminidase__InfluenzaB__AHL91633
augcuaccuucaacuauacaaacguuaacccuauuucucacaucagggggaguguuauuaucacuauaugugucagcuucacugucauacuuacuguauucggauauauugcuaaaauuuucaccaacagaaauaacugcaccaacaaugccauuggauugugcaaacgcaucaaauguucaggcugugaaccguucugcaacaaaaggggugacacuucuucucccagaaccggaguggacauacccgcguuuaucuugcccgggcucaaucuuucagaaagcacuccuaauuagcccucauagauucggagaaaccaaaggaaacucagcucccuugauaauaagggaaccuuuuauugcuuguggaccaaaggaaugcaaacacuuugcucuaacccauuaugcagcccaaccagggggauacuacaauggaacaagaggagacagaaacaagcugaggcaucuaauuucagucaaauugggcaaaaucccaacaguagaaaacuccauuuuccacauggcagcauggagcggguccgcaugccaugaugguaaagaauggacauauaucggaguugauggcccugacaguaaugcauugcucaaaauaaaauauggagaagcauauacugacacauaccauuccuaugcaaacaacauccuaagaacacaagaaagugccugcaauugcaucgggggaaauuguuaucuuaugauaacugauggcucagcuucagguauuagugaaugcagauuucuuaagauucgagagggccgaauaauaaaagaaauauuuccaacaggaagaguaaaacauacugaagaaugcacaugcggauuugccaguaauaaaaccauagaaugugccuguagagauaacaguuacacagcaaaaagacccuuugucaaauuaaauguggagacugauacagcagaaauaagauugaugugcacagagacuuauuuggacacccccagaccagaugauggaagcauaacagggccuugugaaucuaauggggacaaagggaguggaggcaucaagggaggauuuguucaucaaagaauggcauccaagauuggaaggugguacucucgaacgaugucuaaaacuaaaaggauggggaugggacuguaugucaaguaugauggagacccauggacugacagugaugcccuugcucuuaguggaguaaugguuucaauggaagaaccugguugguacuccuuuggcuucgaaauaaaagauaagaaaugugauguccccuguauugggauagagaugguacaugaugguggaaaggagacuuggcacucagcagcaacagccauuuacuguuuaaugggcucaggacaauugcuaugggacacugucacagguguugauauggcucuguaa

SEQ ID NO: 61981 - RNA, 1401 nt, Artificial Sequence; identical to SEQ ID NO: 61970
  derived and/or modified CDS sequence (wt) from neuraminidase__InfluenzaB__AHL91644

SEQ ID NO: 61982 - RNA, 1401 nt, Artificial Sequence
  derived and/or modified CDS sequence (wt) from neuraminidase__InfluenzaB__AHL91655
augcuaccuucaacuauacaaacguuaacccuauuucucacaucagggggaguguuauuaucacuauaugugucagcuucacugucauacuuacuauauucggauauauugcuaaaauuuucaccaacagaaauaacugcaccaacaaugccauuggauugugcaaacgcaucaaauguucaggcugugaaccguucugcaacaaaagaggugacacuucuucucccagaaccggaguggacauacccgcguuuaucuugcccgggcucaaccuuucagaaagcacuccuaauuagcccucauagauucggagaaaccaaaggaaacucagcucccuugauaauaagggaaccuuuuauugcuuguggaccaaaggaaugcaaacacuuugcucuaacccauuaugcagcccaaccagggggauacuacaauggaacaagaggagacagaaacaagcugaggcaucuaauuucagucaaauugggcaaaaucccaacaguagaaaacuccauuuuccacauggcagcauggagcggguccgcaugccaugaugguaaagaauggacauauaucggaguugauggcccugacaguaaugcauugcucaaaauaaaauauggagaagcauauacugacacauaccauuccuaugcaaacaacauccuaagaacacaagaaagugccugcaauugcaucgggggaaauuguuaucuuaugauaacugauggcucagcuucagguauuagugaaugcagauuucuuaagauucgagagggccgaauaauaaaagaaauauuuccaacaggaagaguaaaacauacugaagaaugcacaugcggauuugccagcaauaaaaccauagaaugugccuguagagauaacaguuacacagcaaaaagacccuuugucaaauuaaauguggagacugauacagcagaaauaagacugaugugcacagagacuuauuuggacacccccagaccagaugauggaagcauaacagggccuugugaaucuaauggggacaaagggaguggaggcaucaagggaggauuuguucaucaaagaauggcauccaagauuggaaggugguacucucgaacgaugucuaaaacuaaaaggauggggaugggacuguaugucaaguaugauggagacccauggacugacagugaugcccuugcucuuaguggaguaaugguuucaauggaagaaccugguugguacuccuuuggcuucgaaauaaaagauaagaaaugugauguccccuguauugggauagagaugguacaugaugguggaaaggagacuuggcacucagcagcaacagccauuuacuguuuaaugggcucaggacaauugcuaugggacacugucacagguguugauauggcucuguaa

SEQ ID NO: 61983 - RNA, 1401 nt, Artificial Sequence; identical to SEQ ID NO: 61969
  derived and/or modified CDS sequence (wt) from neuraminidase__InfluenzaB__AHL91666

SEQ ID NO: 61984 - RNA, 1401 nt, Artificial Sequence
  derived and/or modified CDS sequence (wt) from neuraminidase__InfluenzaB__AHL91677
augcuaccuucaacuauacaaacguuaacccuauuucucacaucagggggaguguuauuaucacuauaugugucagcuucacugucauacuuacuauauucggauauauugcuaaaauuuucaccaacagaaauaacugcaccaacaaugccauuggauugugcaaacgcaucaaauguucaggcugugaaccguucugcaacaaaaggggugacacuucuucucccagaaccggaguggacauacccgcguuuaucuugcccgggcucaaucuuucagaaagcacuucuaauuagcccucauagauucggagaaaccaaaggaaacucagcucccuugauaauaagggaaccuuuuauugcuuguggaccaaaggaaugcaaacacuuugcucuaacccauuaugcagcccaaccagggggauacuacaauggaacaagaggagacagaaacaagcugaggcaucuaauuucagucaaauugggcaaaaucccaacaguagaaaacuccauuuuccacauggcagcauggagcggguccgcaugccaugaugguaaagaauggacauauaucggaguugauggcccugacaguaaugcauugcucaaaauaaaauauggagaagcauauacugacacauaccauuccuaugcaaacaacauccuaagaacacaagaaagugccugcaauugcaucgggggaaauuguuaucuuaugauaacugauggcucagcuucagguauuagugaaugcagauuucuuaagauucgagagggccgaauaauaaaagaaauauuuccaacaggaagaguaaaacauacugaagaaugcacaugcggauuugccaguaauaaaaccauagaaugugccuguagagauaacaguuacacagcaaaaagacccuuugucaaauuaaauguggagacugauacagcagaaauaagauugaugugcacagagacuuauuuggacacccccagaccagaugauggaagcauaacagggccuugugaaucuaauggggacaaagggaguggaggcaucaagggaggauuuguucaucaaagaauggcauccaagauuggaaggugguacucucgaacgaugucuaaaacuaaaaggauggggaugggacuguaugucaaguaugauggagacccauggacugacagugaugcccuugcucuuaguggaguaaugguuucaauggaagaaccugguugguacuccuuuggcuucgaaauaaaagauaagaaaugugauguccccuguauugggauagagaugguacaugaugguggaaaggagacuuggcacucagcagcaacagccauuuacuguuuaaugggcucaggacaauugcuaugggacacugucacagguguugauauggcucuguaa

SEQ ID NO: 61985 - RNA, 1401 nt, Artificial Sequence; identical to SEQ ID NO: 61971
  derived and/or modified CDS sequence (wt) from neuraminidase__InfluenzaB__AHL91688

SEQ ID NO: 61986 - RNA, 1401 nt, Artificial Sequence
  derived and/or modified CDS sequence (wt) from neuraminidase__InfluenzaB__AHL91699
augcuaccuucaacuauacaaacguuaacccuauuucucacaucagggggaguguuauuaucacuauaugugucagcuucacugucauacuuacuauauucggauauauugcuaaaauuuucaccaacagaaauaacugcaccaacaaugccauuggauugugcaaacgcaucaaauguucaggcugugaaccguucugcaacaaaaggggugacacuucuucucccagaaccggaguggacauacccgcguuuaucuugcccgggcucaaccuuucagaaagcacuccuaauuagcccucauagauucggagaaaccaagggaaacucagcucccuugauaauaagggaaccuuuuauugcuuguggaccaaaggaaugcaaacacuuugcucuaacccauuaugcagcccaaccagggggauacuacaauggaacaagaggagacagaaacaagcugaggcaucuaauuucagucaaauugggcaaaaucccaacaguagaaaacuccauuuuccacauggcagcauggagcggguccgcaugccaugaugguaaagaauggacauauaucggaguugauggcccugacaguaaugcauugcucaaaauaaaauauggagaagcauauacugacacauaccauuccuaugcaaacaacauccuaagaacacaagaaagugccugcaauugcaucgggggaaauuguuaucuuaugauaacugauggcucagcuucagguauuagugaaugcagauuucuuaagauucgagagggccgaauaauaaaagaaauauuuccaacaggaagaguaaaacauacugaagaaugcacaugcggauuugccagcaauaaaaccauagagugugccuguagagauaacaguuacacagcaaaaagacccuuugucaaauuaaauguggagacugauacagcggaaauaagacugaugugcacagagacuuauuuggacacccccagaccagaugauggaagcauaacagggccuugugaaucuaauggggacaaagggaguggaggcaucaagggaggauuuguucaucaaagaauggcauccaagauuggaaggugguacucucgaacgaugucuaaaacuaaaaggauggggaugggacuguaugucaaguaugauggagacccauggacugacagugaugcccuugcucuuaguggaguaaugguuucaauggaagaaccugguugguacuccuuuggcuucgaaauaaaagauaagaaaugugauguccccuguauugggauagagaugguacaugaugguggaaaggagacuuggcacucagcagcaacagccauuuacuguuuaaugggcucaggacaauugcuaugggacacugucacagguguugauauggcucuguaa

SEQ ID NO: 61987 - RNA, 1401 nt, Artificial Sequence
  derived and/or modified CDS sequence (wt) from neuraminidase__InfluenzaB__AHL91710
augcuaccuucaacuauacaaacguuaacccuauuucucacaucagggggaguguuauuaucacuauaugugucagcuucacugucauacuuacuauauucggauauauugcuaaaauuuucaccaacagaaauaacugcaccaacaaugccauuggauugugcaaacgcaucaaauguucaggcugugaaccauucugcaacaaaaggggugacacuucuucucccagaaccggaguggacauacccgcguuuaucuugcccgggcucaaccuuucagaaagcacuccuaauuagcccucauagauucggagaaaccaaaggaaacucagcucccuugauaauaagggaaccuuucauugcuuguggaccaaaggaaugcaaacacuuugcucuaacccauuaugcagcccaaccagggggauacuacaauggaacaagaggagacagaaacaagcugaggcaucuaauuucagucaaauugggcaaaaucccaacaguagaaaacuccauuuuccacauggcagcauggagcggguccgcaugucaugaugguaaagaauggacauauaucggaguugauggcccugacaguaaugcauugcucaaaauaaaauauggagaagcauauacugacacauaccauuccuaugcaaacaacauccuaagaacacaagaaagugccugcaauugcaucgggggaaauuguuaucuuaugauaacugauggcucagcuucagguauuagugaaugcagauuucuuaagauucgagagggccgaauaauaaaagaaauauuuccaacaggaagaguaaaacauacugaagaaugcacaugcggauuugccagcaacaaaaccauagaaugugccuguagagauaacaguuacacagcaaaaagacccuuugucaaauuaaauguggagacugauacagcagaaauaagauugaugugcacagagacuuauuuggacacccccagaccagaugauggaagcauaacagggccuugugaaucuaauggggacaaagggaguggaggcaucaagggaggauuuguucaucaaagaauggcauccaagauuggaaggugguacucucgaacgaugucuaaaacuaaaaggauggggaugggacuguaugucaaguaugauggagacccauggacugacagugaugcccuugcucuuaguggaguaaugguuucaauggaagaaccugguugguacuccuuuggcuucgaaauaaaagauaagaaaugugauguccccuguauugggauagagaugguacaugaugguggaaaggagacuuggcacucagcagcaacagccauuuacuguuuaaugggcucaggacaauugcuaugggacacugucacagguguugauauggcucuguaa

SEQ ID NO: 61988 - RNA, 1401 nt, Artificial Sequence; identical to SEQ ID NO: 60626
  derived and/or modified CDS sequence (wt) from neuraminidase__InfluenzaB__AHL91721

SEQ ID NO: 61989 - RNA, 1401 nt, Artificial Sequence; identical to SEQ ID NO: 60694
  derived and/or modified CDS sequence (wt) from neuraminidase__InfluenzaB__AHL91732

SEQ ID NO: 61990 - RNA, 1401 nt, Artificial Sequence; identical to SEQ ID NO: 60626
  derived and/or modified CDS sequence (wt) from neuraminidase__InfluenzaB__AHL91743

SEQ ID NO: 61991 - RNA, 1401 nt, Artificial Sequence
  derived and/or modified CDS sequence (wt) from neuraminidase__InfluenzaB__AHL91754
augcuaccuucaacuauacaaacguuaacccuacuucucacaucagggggaguguuauuaucacuauaugugucagcuucacugucauacuuacuguauucggauauauugcuaaaauuuucaccaacagaaauaacugcaccaacaaugccauuggauugugcaaacgcaucaaauguucaggcugugaaccguucugcaacaaaaggggugacacuucuucucccagaaccggaguggacauacccgcguuuaucuugcccgggcucaaccuuucagaaagcacuccuaauuagcccucauagauucggagaaaccaaaggaaacucagcucccuugauaauaagggaaccuuuuauugcuuguggaccaaaggaaugcaaacacuuugcucuaacccauuaugcagcccaaccagggggauacuacaauggaacaagaggagacagaaacaagcugaggcaucuaauuucagucaaauugggcaaaaucccaacaguagaaaacuccauuuuccacauggcagcauggagcggguccgcaugccaugaugguaaagaauggacauauaucggaguugauggcccugacaguaaugcauugcucaaaauaaaauauggagaagcauauacugacacauaccauuccuaugcaaacaacauccuaagaacacaagaaagugccugcaauugcaucgggggaaauuguuaucuuaugauaacugauggcucagcuucagguauuagugaaugcagauuucuuaagauucgagagggccgaauaauaaaagaaauauuuccaacaggaagaguaaaacauacugaagaaugcacaugcggauuugccagcaauaaaaccauagaaugugccuguagagauaacaguuacacagcaaaaagaccuuuugucaaauuaaauguggagacugauacagcagaaauaagauugaugugcacagagacuuauuuggacacccccagaccagaugauggaagcauaacagggccuugugaaucuaauggggacaaagggaguggaggcaucaagggaggauuuguucaucaaagaauggcauccaagauuggaaggugguacucucgaacgaugucuaaaacuaaaaggauggggaugggacuguaugucaaguaugauggggacccauggacugacagugaugcccuugcucuuaguggaguaaugguuucaauggaagaaccugguugguacuccuuuggcuucgaaauaaaagauaagaaaugugauguccccuguauugggauagagaugguacaugaugguggaaaggagacuuggcacucagcagcaacagccauuuacuguuuaaugggcucaggacaauugcuaugggacacugucacagguguugauauggcucuguaa

SEQ ID NO: 61992 - RNA, 1401 nt, Artificial Sequence; identical to SEQ ID NO: 60626
  derived and/or modified CDS sequence (wt) from neuraminidase__InfluenzaB__AHL91765

SEQ ID NO: 61993 - RNA, 1401 nt, Artificial Sequence
  derived and/or modified CDS sequence (wt) from neuraminidase__InfluenzaB__AHL91776
augcuaccuucaacuauacaaacguuaacccuauuucucacaucagggggaguauuauuaucacuauaugugucagcuucauugucauacuuacuauauucggauauauugcuaaaauucucaccaacagaaauaacugcaccaacaaugccauuggauugugcaaacgcaucaaauguucaggcugugaaccguucugcaacaaaaggggugacacuucuucucccagaaccggaauggacauacccgcguuuaucuugcccgggcucaaccuuucagaaagcacuccuaauuagcccucauagauucggagaaaccaaaggaaacucagcucccuugauaauaagggaaccuuuuauugcuuguggaccaaaggaaugcaaacacuuugcucuaacccauuaugcagcccaaccagggggauacuauaauggaacaagaggagacagaaacaagcugaggcaucuaauuucagucaaauugggcaaaaucccaacaguagaaaccuccauuuuccacauggcagcauggagcggguccgcaugccaugaugguaaggaauggacauauaucggaguugauggcccugacaauaaugcauugcucaaaauaaaauauggagaagcauauacugacacauaccauuccuaugcaaacaacauccuaagaacacaagaaagugccugcaauugcaucgggggaaauuguuaucuuaugauaacugauggcucagcuucagguguuagugaaugcagauuucuuaagauucgagagggccgaauaauaaaagaaauauuuccaacaggaagaguaaaacauacugaagaaugcacaugcggauuugccagcaauaaaaccauagaaugugccuguagagauaacaguuacacagcaaaaagacccuuugucaaauuaaacguggagacugauacagcagaaauaagauugaugugcacagagacuuauuuggacacccccagaccagaugauggaagcauaacagggcccugugaauccaauggggacaaagggaguggaggcaucaagggaggauuuguucaucaaagaauggcauccaagauuggaaggugguacucucgaacgaugucuaaaacugaaaggauggggaugggacuguaugucaaguaugauggagacccaugggcugacagugaugcccuugcucuuaguggaguaaugguuucaauggaagaaccugguugguacuccuuuggcuucgaaauaaaagauaagaaaugugauguccccuguauugggauagagaugguacaugaugguggaaaagagacuuggcacucagcagcaacagccauuuacuguuuaaugggcucaggacagcugcugugggacacugucacagguguugauauggcucuguaa

SEQ ID NO: 61994 - RNA, 1401 nt, Artificial Sequence; identical to SEQ ID NO: 61993
  derived and/or modified CDS sequence (wt) from neuraminidase__InfluenzaB__AHL91787

SEQ ID NO: 61995 - RNA, 1401 nt, Artificial Sequence; identical to SEQ ID NO: 61993
  derived and/or modified CDS sequence (wt) from neuraminidase__InfluenzaB__AHL91798

SEQ ID NO: 61996 - RNA, 1401 nt, Artificial Sequence
  derived and/or modified CDS sequence (wt) from neuraminidase__InfluenzaB__AHL91809
augcuaccuucaacuauacaaacguuaacccuauuucucacaucagggggaguauuauuaucacuauaugugucagcuucauugucauacuuacuauauucggauauauugcuaaaauucucaccaacagaaauaacugcaccaacaaugccauuggauugugcaaacgcaucaaauguucaggcugugaaccguucugcaacaaaaggggugacacuucuucucccagaaccggaguggacauacccgcguuuaucuugcccgggcucaaccuuucagaaagcacuccuaauuagcccucauagauucggagaaaccaaaggaaacucagcucccuugauaauaagggaaccuuuuauugcuuguggaccaaaugaaugcaaacacuuugcucuaacccauuaugcagcccaaccagggggauacuacaauggaacaagaggagacagaaacaagcugaggcaucuaauuucagucaaauugggcaaaaucccaacaguagaaaacuccauuuuccacauggcagcauggagcggguccgcaugccaugaugguaaggaauggacauauaucggaguugauggcccugacaauaaugcauugcucaaaauaaaauauggagaagcauauacugacacauaccauuccuaugcaaacaacauccuaagaacacaagaaagugccugcaauugcaucgggggaaauuguuaucuuaugauaacugauggcucagcuucagguguuagugaaugcagauuucuuaagauucgagagggccgaauaauaaaagaaauauuuccaacaggaagaguaaaacauacugaagaaugcacaugcggauuugccagcaauaaaaccauagaaugugccuguagagauaacaguuacacagcaaaaagacccuuugucaaauuaaacguggagacugauacagcagaaauaagauugaugugcacagagacuuauuuggacacccccagaccagaugauggaagcauaacagggccuugugaaucuaauggggacaaagggaguggaggcaucaagggaggauuuguucaucaaagaauggcauccaagauuggaaggugguacucucgaacaaugucuaaaacugaaaggauggggaugggacuguaugucaaguaugauggagacccaugggcugacagugaugcccuugcucuuaguggaguaaugguuucaauggaagaaccugguugguacuccuuuggcuucgaaauaaaagauaagaaaugugauguccccuguauugggauagagaugguacaugaugguggaaaagagacuuggcacucagcagcaacagccauuuacuguuuaaugggcucaggacagcugcugugggacacugucacagguguugauauggcucuguaa

SEQ ID NO: 61997 - RNA, 1401 nt, Artificial Sequence
  derived and/or modified CDS sequence (wt) from neuraminidase__InfluenzaB__AHL91820
augcuaccuucaacuauacaaacguuaacccuauuucucacaucagggggaguauuauuaucacuauaugugucagcuucauugucauacuuacuauauucggauauauugcuaaaauucucaccaacagaaauaacugcaccaacaaugccauuggauugugcaaacgcaucaaauguucaggcugugaaccguucugcaacaaaaggggugacacuucuucucccagaaccggaguggacauauccgcguuuaucuugcccgggcucaaccuuucagaaagcacuccuaauuagcccucauagauucggagaaaccaaaggaaacucagcucccuugauaauaagggaaccuuuuauugcuuguggaccaaaugaaugcaaacacuuugcucuaacccauuaugcagcccaaccagggggauacuacaauggaacaagaggagacagaaacaagcugaggcaucuaauuucagucaaauugggcaaaaucccaacaguagaaaacuccauuuuccacauggcagcauggagcggguccgcaugccaugaugguaaggaauggacauauaucggaguugauggcccugacaauaaugcauugcucaaaauaaaauauggagaagcauauacugacacauaccauuccuaugcaaacaacauccuaagaacacaagaaagugccugcaauugcaucgggggaaauuguuaucuuaugguaacugauggcucagcuucagguguuagugaaugcagauuucuuaagauucgagagggccgaauaauaaaagaaauauuuccaacaggaagaguaaaacauacugaagaaugcacaugcggauuugccagcaauaaaaccauagaaugugccuguagagauaacaguuacacagcaaaaagacccuuugucaaauuaaacguggagacugauacagcagaaauaagauugaugugcacagagacuuauuuggacacccccagaccagaugauggaagcauaacagggccuugugaaucuaauggggacaaaggaaguggaggcaucaagggaggauuuguucaucaaagaauggcauccaagauuggaaggugguacucucgaacgaugucuaaaacugaaaggauggggaugggacuguaugucaaguaugauggagacccaugggcugacagugaugcccuugcucuuaguggaguaaugguuucaauggaagaaccugguugguacuccuuuggcuucgaaauaaaagauaagaaaugcgauguccccuguauugggauagagaugguacaugaugguggaaaagagacuuggcacucagcagcaacagccauuuacuguuuaaugggcucaggacagcugcugugggacacugucacagguguugauauggcucuguaa

SEQ ID NO: 61998 - RNA, 1401 nt, Artificial Sequence
  derived and/or modified CDS sequence (wt) from neuraminidase__InfluenzaB__AHL91831
augcuaccuucaacuauacaaacguuaacccuauuucucacaucagggggaguauuauuaucacuauaugugucagcuucauugucauacuuacuauauucggauauauugcuaaaauucucaccaacagaaauaacugcaccaacaaugccauuggauugugcaaacgcaucaaauguucaggcugugaaccguucugcaacaaaaggggugacacuucuucucccagaaccggaguggacauacccgcguuuaucuugcccgggcucaaccuuucagaaagcacuccuaauuagcccucauagauucggagaaaccaaaggaaacucagcucccuugauaauaagggaaccuuuuauugcuugugggccaaaugaaugcaaacacuuugcucuaacccauuaugcagcccaaccagggggauacuacaauggaacaagaggagacagaaacaagcugaggcaucuaauuucagucaaauugggcaaaaucccaacaguagaaaacuccauuuuccacauggcagcauggagcggguccgcaugccaugaugguaaggaauggacauauaucggaguugauggcccugacaauaaugcauugcucaaaauaaaauauggagaagcauauacugacacauaccauuccuaugcaaacaacauccuaagaacacaagaaagugccugcaauugcaucgggggaaauuguuaucuuaugauaacugauggcucagcuucagguguuagugaaugcagauuucuuaagauucgagagggccgaauaauaaaagaaauauuuccaacaggaagaguaaaacauacugaagaaugcacaugcggauuugccagcaauaaaaccauagaaugugccuguagagauaacaguuacacagcaaaaagacccuuugucaaauuaaacguggagacugauacagcagaaauaagauugaugugcacagagacuuauuuggacacccccagaccagaugauggaagcauaacagggccuugugaaucuaauggggacaaggggaguggaggcaucaagggaggauuuguucaucaaagaaugacauccaagauuggaaggugguacucucgaacgaugucuaaaacugaaaggauggggaugggacuguaugucaaguaugauggagacccaugggcugacagugaugcccuugcucuuaguggaguaaugguuucaauggaagaaccugguugguacuccuuuggcuucgaaauaaaagauaagaaaugcgauguccccuguauugggauagagaugguacaugaugguggaaaagagacuuggcacucagcagcaacagccauuuacuguuuaaugggcucaggacagcugcugugggacacugucacagguguugauauggcucuguaa

SEQ ID NO: 61999 - RNA, 1401 nt, Artificial Sequence; identical to SEQ ID NO: 61647
  derived and/or modified CDS sequence (wt) from neuraminidase__InfluenzaB__AHL91842

SEQ ID NO: 62000 - RNA, 1401 nt, Artificial Sequence
  derived and/or modified CDS sequence (wt) from neuraminidase__InfluenzaB__AHL91853
augcuacccucaacuauacaaacguuaacccuauuccucacaucagggggaguguuauuaucacuauaugugucagcuucacugucauacuuacuauauucggauauauugcuaaaauuuucaacaacagaaauaacugcaccaacaaugccaucggauugugcaaacgcaucaaauguucaggcugugaaccguucugcaacaaaaggggugacacuucuucucccagaaccggaguggacauacccgcguuuaucuugcccgggcucaaccuuucagaaagcacuccuaauuagcccucauagauucggagaaaccaaaggaaacucagcucccuugauaauaagggaaccuuuuauugcuuguggaccaaaggaaugcaaacacuuugcucuaacccauuaugcagcccaaccagggggauacuacaauggaacaagagaagacagaaacaagcugaggcaucuaauuucagucaaauugggcaaaaucccaacaguagaaaacuccauuuuccacauggcagcauggagcggguccgcaugccaugaugguaaagaauggacauauaucggaguugauggcccugacaguaaugcauugcucaaaauaaaauauggagaagcauauacugacacauaccauuccuaugcaaacaacauccuaagaacacaagaaagugccugcaauugcaucgggggaaauuguuaucuuaugauaacugauggcucagcuucagguauuagugagugcagauuucuuaagauucgagagggccgaauaauaaaagaaauauuuccaacaggaagaguaaaacauacugaagaaugcacaugcggauuugccagcaauaaaaccauagaaugugccuguagagauaacaguuacacagcaaaaagacccuuugucaaauuaaauguggagacugauacggcagaaauaagauugaugugcacagagacuuauuuggacacccccagaccagaugauggaagcauaacagggccuugugaaucuaaugggaauaaagggaguggaggcaucaagggaggauuuguucaucaaagaauggcauccaaaauuggaaggugguacucucgaacaauguccaaaaccaaaaggaugggaaugggacuguaugucaaguaugauggagacccauggacugacagugaugcccuugcucuuaguggaguaaugguuucaauggaagaaccugguugguacucauuuggcuucgaaauaaaagauaagaaaugugauguccccuguauugggauagagaugguacaugaugguggaaaggagacuuggcacucagcagcaacagccauuuacuguuuaaugggcucaggacaacuguugugggacacugucacagguguugauauggcucuguaa

SEQ ID NO: 62001 - RNA, 1401 nt, Artificial Sequence
  derived and/or modified CDS sequence (wt) from neuraminidase__InfluenzaB__AHL91864
augcuaccuucaacuauacaaacguuaacccuauuucucacaucagggggaguuuuauuaucacuauaugugucagcuucauugucauacuuacuauauucggauauauugcuaaaauuuucacaaacagaaauaacugcaccaauaaugccauuggauugugcaaacgcaucaaauguucaggcugugaaccguucugcaacaaaaggggugacacuucuucucccagaaccggaguggacguauccucguuuaucuugcccgggcucaaccuuucagaaagcacuccuaauuagcccccauagauucggagaaaccaaaggaaacucagcucccuugauaauaagggaaccuuuuauugcuuguggaccaaaggaaugcaaacacuuugcucuaacccauuaugcagcucagccagggggauacuacaauggaacaagagaagacagaaacaagcugaggcaucuaauuucagucaaauugggcaaaaucccaacaguagaaaacucuauuuuccacauggcagcuuggagcggguccgcaugccaugaugguagagaauggacauacaucggaguugauggccccgacaguaaugcauugcucaaaauaaaauauggagaagcauauacugacacauaccauuccuaugcaaaaaacauccuaaggacacaagaaagugccugcaauugcaucgggggagauuguuaucuuaugauaacugauggcccagcuucagggauuagugaaugcagauuccuuaagauucgagagggccgaauaauaaaagaaauauuuccaacaggaagaguaaaacauacugaggaaugcacaugcggauuugccagcaacaaaaccauagaaugugccuguagagauaacaauuacacagcaaaaagacccuuugucaaauuaaauguggagacugauacagcggaaauaagauugaugugcacagagacuuauuuggacacccccagaccaaaugauggaagcauaacagggccuugcgaaucuaauggggacaaagggaguggaggcaucaaaggaggauuuguucaucaaagaauggcauccaagauuggaaggugguacucucgaacgaugucuaaaacuaaaagaauggggaugggacuguauguaaaguaugauggagacccauggacugauagugaagcccuugcucuuaguggaguaaugguuucaauggaagaaccugguugguauuccuuuggcuucgaaauaaaagauaagaaaugugauguccccuguauugggauagaaaugguacaugauggugggaaaacgacuuggcacucagcagcaacagccauuuacuguuuaaugggcucaggacaacugcugugggacacugucacagguguugauauggcucuguaa

SEQ ID NO: 62002 - RNA, 1401 nt, Artificial Sequence; identical to SEQ ID NO: 62001
  derived and/or modified CDS sequence (wt) from neuraminidase__InfluenzaB__AHL91875

SEQ ID NO: 62003 - RNA, 1401 nt, Artificial Sequence; identical to SEQ ID NO: 60898
  derived and/or modified CDS sequence (wt) from neuraminidase__InfluenzaB__AHL91886

SEQ ID NO: 62004 - RNA, 1401 nt, Artificial Sequence
  derived and/or modified CDS sequence (wt) from neuraminidase__InfluenzaB__AHL91897
augcuaccuucaacuauacaaacguuaacccuauuucucacaucagggggaguguuauuaucacuauaugugucagcuucauugucauacuuacuauauucggauauauugcuaaaauuuucacaaacagaaauaacugcaccaauaaugccauuggauugugcaaacgcaucaaauguucaggcugugaaccguucugcaacaaaaggggugacacuucuucuuccagaaccggaguggacauacccucguuuaucuugcccgggcucaaccuuucagaaagcacuccuaauuagcccccauagguucggagaaaccaaaggaaacucagcucccuugauaauaagggaaccuuuuauugcuuguggaccaacggaaugcaaacacuuugcucuaacccauuaugcagcucaaccagggggauacuacaauggaacaagagaagacagaaacaagcugaggcaucuaauuucagucaaauugggcaaaaucccaacaguagaaaacuccauuuuccacauggcagcuuggagcggguccgcaugccaugaugguaaagaauggacauauaucggaguugauggccccgacaguaaugcauugcucaaaauaaaauauggagaagcauauacugacacauaccauuccuaugcaaaaaacauccuaaggacacaagaaagugccugcaauugcaucgggggagauuguuaucuuaugauaacugauggcccagcuucagggauuagugaaugcagauuccuuaagauucgagagggccgaauaauaaaagaaauauuuccaacaggaagaguaaaacauacugaggaaugcacaugcggauuugccagcaacaaaaccauagaaugugcuuguagagauaacaguuacacagcaaaaagacccuuugucaaauuaaauguggagacugauacagcggaaauaagauugaugugcacagagacuuauuuggacacccccagaccaaaugauggaagcauaacagggccuugcgaaucugauggggacaaagggaguggaggcaucaagggaggauuuguucaucaaagaauggcauccaagauuggaaggugguacucucgaacgaugucuaaaacuaaaagaauggggaugggacuguauguaaaguaugauggagacccauggacugacagugaagcccuugcucuuaguggaguaaugguuucaauggaagaaccugguugguauuccuuuggcuucgaaauaaaagauaagaaaugugauguccccuguauugggauagaaaugguacaugauggugggaaaacgacuuggcacucagcagcaacagccauuuacuguuuaaugggcucaggacaacugcugugggacacugucacagguguugauauggcucuguaa

SEQ ID NO: 62005 - RNA, 1401 nt, Artificial Sequence; identical to SEQ ID NO: 62004
  derived and/or modified CDS sequence (wt) from neuraminidase__InfluenzaB__AHL91908

SEQ ID NO: 62006 - RNA, 1401 nt, Artificial Sequence
  derived and/or modified CDS sequence (wt) from neuraminidase__InfluenzaB__AHL91919
augcuaccuucaacuauacaaacguuaaccuuauuucucacaucagggggaguguuauuaucacuauaugugucagcuucauugucauacuuacuauauucggauauauugcuaaaauuuucacaaacagaaauaacugcaccaauaaugccauuggauugugcaaacgcaucaaauguucaggcugugaaccguucugcaacaaaaggggugacaccucuucucccagaaccggaguggacguacccucguuuaucuugcccgggcucgaccuuucagaaagcacuccuaauuagcccccauagauucggagaaaccaaaggaaacucagcucccuugauaauaagggaaccuuuuauugcuuguggaccaaaggaaugcaaacauuuugcucuaacccauuaugcagcucaaccagggggauacuacaauggaacaagagaagacagaaacaagcugaggcaucuaauuucagucaaauugggcaaaaucccaacaguagaaaacucuauuuuccacauggcagcuuggagcggguccgcaugccaugaugguagagaauggacauauaucggaguugauggccccgacaguaaugcauugcucaaaauaaaauauggagaagcauauacugacacauaccauuccuaugcaaaaaacauccuaaggacacaagaaagugccugcaauugcaucgggggagauuguuaucuuaugauaacugauggcccagcuucagggauuagugaaugcagauuccuuaagauucgagagggccgaauaauaaaagaaauauuuccaacaggaagaguaaaacauacugaggaaugcacaugcggauuugccagcaacaaaaccauagaaugugccuguagagauaacaguuacacagcaaaaagacccuuugucaaauuaaauguggagacugauacagcggaaauaagauugaugugcacagagacuuauuuggacacccccagaccaaaugauggaagcauaacagggccuugcgaaucuaauggggacaaagggaguggaggcaucaagggaggauuuguucaucaaagaauggcauccaagauuggaaggugguacucucgaacgaugucuaaaacuaaaagaauggggaugggacuguauguaaaguaugauggagacccauggacugacagugaagcccuugcucuuaguggaguaaugguuucaauggaagaaccugguugguauuccuuuggcuucgaaauaaaagauaagaaaugugauguccccuguauugggauagaaaugguacaugauggugggaaaacgaccuggcacucagcagcaacagccauuuacuguuuaaugggcucaggacaacugcugugggacacugucacagguguugauauggcucuguaa

SEQ ID NO: 62007 - RNA, 1401 nt, Artificial Sequence
  derived and/or modified CDS sequence (wt) from neuraminidase__InfluenzaB__AHL91930
augcuaccuucaacuauacaaacguuaacccuauuucucacaucagggggaguguuauuaucacuauaugugucagcuucauugucauacuuacuauauucggauauauugcuaaaauuuucacaaacagaaauaacugcaccaauaaugccauuggauugugcaaacgcaucaaauguucaggcugugaaccguucugcaacaaaaggggugacacuucuucucccagaaccggaguggacguauccucguuuaucuugcccgggcucaaccuuucagaaagcacuccuaauuaguccccauagauucggagaaaccaaaggaaacucagcucccuugauaauaagggaaccuuuuauugcuuguggaccaaaggaaugcaaacacuuugcucuaacccauuaugcagcucagccagggggauacuacaauggaacaagagaagacagaaacaagcugaggcaucuaauuucagucaaauugggcaaaaucccaacaguagaaaacucuauuuuccacauggcagcuuggagcggguccgcaugccaugaugguagagaauggacauacaucggaguugauggccccgacaauaaugcauugcucaaaauaaaauauggagaagcauauacugacacauaccauuccuaugcaaaaaacauccuaaggacacaagaaagugccugcaauugcaucgggggagauuguuaucuuaugauaacugauggcccagcuucagggauuagugaaugcagauuccuuaagauucgagagggccgaauaauaaaagaaauauuuccaacaggaagaguaaaacauacugaggaaugcacaugcggauuugccagcaacaaaaccauagaaugugccuguagagauaacaauuacacagcaaaaagacccuuugucaaauuaaauguggagacugauacagcggaaauaagauugaugugcacagagacuuauuuggacacccccagaccaaaugauggaagcauaacagggccuugcgaaucuaauggggacaaagggaguggaggcaucaaaggaggauuuguucaucaaagaauggcauccaagauuggaaggugguacucucgaacgaugucuaaaacuaaaagaauggggaugggacuguauguaaaguaugauggagacccauggacugauagugaagcccuugcucuuaguggaguaaugguuucaauggaagaaccugguugguauuccuuuggcuucgaaauaaaagauaagaaaugugauguccccuguauugggauagaaaugguacaugauggugggaaaacgacuuggcacucagcagcaacagccauuuacuguuuaaugggcucaggacaacugcugugggacacugucacagguguugauauggcucuguaa

SEQ ID NO: 62008 - RNA, 1401 nt, Artificial Sequence
  derived and/or modified CDS sequence (wt) from neuraminidase__InfluenzaB__AHL91941
augcuaccuucaacuauacaaacguuaacccuauuucucacaucagggggaguguuauuaucacuauaugugucagcuucauugucauacuuacuauauucggauauauugcuaaaauuuucacaaacagaaauaacugcaccaauaaugccauuggauugugcaaacgcaucaaauguucaggcugugaaccguucugcaacaaaaggggugacacuucuucucccagaaccggaguggacauacccucguuuaucuugcccgggcucaaccuuucagaaagcacuccuaauuagcccccauagauucggagaaaccaaaggaaacucagcucccuugauaauaagggaaccuuuuauugcuuguggaccaacggaaugcaaacacuuugcucuaacccauuaugcagcucaaccagggggauacuacaauggaacaagagaagacagaaacaagcugaggcaucuaauuucagucaaauugggcaaaaucccaacaguagaaaacuccauuuuccacauggcagcuuggagcggguccgcaugccaugaugguaaagaauggacauauaucggaguugauggccccgacaguaaugcauugcucaaaauaaaauauggagaagcauauacugacacauaccauuccuaugcaaaaaacauccuaaggacacaagaaagugccugcaauugcaucgggggagauuguuaucuuaugauaacugauggcccagcuucagggauuagugaaugcagauuccuuaagauucgagaaggccgaauaauaaaagaaauauuuccaacaggaagaguaaaacauacugaggaaugcacaugcggauuugccagcaacaaaaccauagaaugugcuuguagagauaacaguuacacagcaaaaagacccuuugucaaauuaaauguggagacugauacagcggaaauaagauugaugugcacagagacuuauuuggacacccccagaccaaaugauggaagcauaacagggccuugcgaaucugauggggacaaagggaguggaggcaucaagggaggauuuguucaucaaagaauggcauccaagauuggaaggugguacucucgaacgaugucuaaaacuaaaagaauggggaugggacuguauguaaaguaugauggagacccauggacugacagugaagcccuugcucuuaguggaguaaugguuucaauggaagaaccugguugguauuccuuuggcuucgaaauaaaagauaagaaaugugauguccccuguauugggauagaaaugguacaugauggugggaaaacgacuuggcacucagcagcaacagccauuuacuguuuaaugggcucaggacaacugcugugggacacugucacagguguugauauggcucuguaa

SEQ ID NO: 62009 - RNA, 1401 nt, Artificial Sequence; identical to SEQ ID NO: 60639
  derived and/or modified CDS sequence (wt) from neuraminidase__InfluenzaB__AHL91952

SEQ ID NO: 62010 - RNA, 1401 nt, Artificial Sequence
  derived and/or modified CDS sequence (wt) from neuraminidase__InfluenzaB__AHL91963
augcuaccuucaacuauacaaacauuaacccuauuucucacaucagggggaguauuauuaucacuauaugugucagcuucauuaucauacuuacuauauucggauauauugcuaaaauucucaccaacagaaauaacugcaccaacaaugccauuggauugugcaaacgcaucaaauguucaggcugugaaccguucugcaacaaaaggggugacacuucuucucccagaaccggaguggacauacccgcguuuaucuugcccgggcucaaccuuucagaaagcacuccuaauuagcccucauagauucggagaaaccaaaggaaacucagcucccuugauaauaagggaaccuuuuauugcuuguggaccaaaugaaugcaaacacuuugcucuaacccauuaugcagcccaaccagggggauacuacaauggaacaagaggagacagaaacaagcugaggcaucuaauuucagucaaauugggcaaaaucccaacaguagaaaacuccauuuuccacauggcagcauggagcggguccgcaugccaugaugguaaggaauggacauauaucggaguugauggcccugacaauaaugcauugcucaaaauaaaauauggagaagcauauacugacacauaccauuccuaugcaaacaacauccuaagaacacaagaaagugccugcaauugcaucgggggaaauuguuaucuuaugauaacugauggcucagcuucagguguuagugaaugcagauuucuuaagauucgagagggccgaauaauaaaagaaauauuuccaacaggaagaguaaaacauacugaggaaugcacaugcggauuugccagcaauaaaaccauagaaugugccuguagagauaacaguuacacagcaaaaagacccuuugucaaauuaaacguggagacugauacagcagaaauaagauugaugugcacagauacuuauuuggacacccccagaccagaugauggaagcauaacaggcccuugugaaucuaauggggacaaagggaguggaggcaucaagggaggauuuguucaucaaagaauggcauccaagauuggaaggugguacucucgaacgaugucuaaaacugaaaggauggggaugggacuguaugucaaguaugauggagacccaugggcugacagugaugcccuugcuuuuaguggaguaaugguuucaaugaaagaaccugguugguacuccuuuggcuucgaaauaaaagauaagaaaugcgauguccccuguauugggauagagaugguacaugaugguggaaaagagacuuggcacucagcagcaacagccauuuacuguuuaaugggcucaggacagcugcugugggacacugucacagguguugacauggcucuguaa

SEQ ID NO: 62011 - RNA, 1401 nt, Artificial Sequence
  derived and/or modified CDS sequence (wt) from neuraminidase__InfluenzaB__AHL91974
augcuaccuucaacuauacaaacguuaacccuauuucucacaucagggggaguauuauuaucacuauaugugucagcuucauuaucauacuuacuauauucggauauauugcuaaaauucucaccaacagaaauaacuacaccaacaaugccauuggauugugcaaacgcaucaaauguucaggcugugaaccguucugcaacaaaaggggugacacuucuucucccagagccggaguggacauacccgcguuuaucuugcccgggcucaaccuuucagaaagcacuccuaauuagcccucauagauucggagaaaccaaaggaaacucagcucccuugauaauaagggaaccuuuuauugcuuguggaccaaaugaaugcaaacacuuugcucuaacccauuaugcagcccaaccagggggauacuacaauggaacaagaggagacagaaacaagcugaggcaucuaauuucagucaaauugggcaaaaucccaacaguagaaaacuccauuuuccacauggcagcauggagcggguccgcaugccaugaugguaaggaauggacauauaucggaguugauggcccugacaauaaugcauugcucaaaauaaaauauggagaagcauauacugacacauaccauuccuaugcaaacaacauccuaagaacacaagaaagugccugcaauugcaucgggggaaauuguuaucuuaugauaacugauggcucagcuucagguguuagugaaugcagauuucuuaagauucgagagggccgaauaauaaaagaaauauuuccaacaggaagaguaaaacauacugaggaaugcacaugcggauuugccagcaauaaaaccauagaaugugccuguagagauaacaguuacacagcaaaaagacccuuugucaaauuaaacguggagacugauacagcagaaauaagauugaugugcacagauacuuauuuggacacccccagaccagaugauggaagcauaacaggcccuugugaaucuaauggggacaaagggaguggaggcaucaagggaggauuuguucaucaaagaauggcauccaagauuggaaggugguacucucgaacgaugucuaaaacugaaaggauggggaugggacuguaugucaaguaugauggagacccaugggcugacagugaugcccuugcuuuuaguggaguaaugguuucaaugaaagaaccugguugguacuccuuuggcuucgaaauaaaagauaagaaaugcgauguccccuguauugggauagagaugguacaugaugguggaaaagagacuuggcacucagcagcaacagccauuuacuguuuaaugggcucaggacagcugcugugggacacugucacagguguugacauggcucuguaa

SEQ ID NO: 62012 - RNA, 1401 nt, Artificial Sequence
  derived and/or modified CDS sequence (wt) from neuraminidase__InfluenzaB__AHL91985
augcuaccuucaacuauacaaacguuaacccuauuucucacaucagggggaguauuauuaucacuauaugugucagcuucauuaucauacuuacuauauucggauauauugcuaaaauucucaccaacagaaauaacugcaccaacaaugccauuggauugugcaaacgcaucaaauguucaggcugugaaccguucugcaacaaaaggggugacacuucuucucccagaaccggaguggacauacccgcguuuaucuugcccgggcucaaccuuucagaaagcacuccuaauuagcccucauagauucggagaaaccaaaggaaacucagcucccuugauaauaagggaaccuuuuauugcuuguggaccaaaugaaugcaaacacuuugcucuaacccauuaugcagcccaaccagggggauacuacaauggaacaagaggagacagaaacaagcugaggcaucuaauuucagucaaauugggcaaaaucccaacaguagaaaacuccauuuuccacauggcagcauggagcggguccgcaugccaugaugguaaggaauggacauauaucggaguugauggcccugacaauaaugcauugcucaaaauaaaauauggagaagcauauacugacacauaccauuccuaugcaaacaacauccuaagaacacaagaaagugccugcaauugcaucgggggaaauuguuaucuuaugauaacugauggcucagcuucagguguuagugaaugcagauuucuuaagauucgagagggccgaauaauaaaagaaauauuuccaacaggaagaguaaaacauacugaggaaugcacaugcggauuugccagcaauaaaaccauagaaugugccuguagagauaacaguuacacagcaaaaagacccuuugucaaauuaaacguggagacugauacagcagaaauaagauugaugugcacagauacuuauuuggacacccccagaccagaugauggaagcauaacaggcccuugugaaucuaauggggacaaagggaguggaggcaucaagggaggauuuguucaucaaagaauggcauccaagauuggaaggugguacucucgaacgaugucuaaaacugaaaggauggggaugggacuguaugucaaguaugauggagacccaugggcugacagugaugcccuugcuuuuaguggaguaaugguuucaaugaaagaaccugguugguacuccuuuggcuucgaaauaaaagauaagaaaugcgauguccccuguauugggauagagaugguacaugaugguggaaaagagaccuggcacucagcagcaacagccauuuacuguuuaaugggcucaggacagcugcugugggacacugucacagguguugacauggcucuguaa

SEQ ID NO: 62013 - RNA, 1401 nt, Artificial Sequence; identical to SEQ ID NO: 60639
  derived and/or modified CDS sequence (wt) from neuraminidase__InfluenzaB__AHL91995

SEQ ID NO: 62014 - RNA, 1401 nt, Artificial Sequence
  derived and/or modified CDS sequence (wt) from neuraminidase__InfluenzaB__AHL92006
augcuaccuucaacuauacaaacguuaacccuauuucucacaucagggggaguauuauuaucacuauaugugucagcuucauuaucauacuuacuauauucggauauauugcuaaaauucucaccaacagaaauaacugcaccaacaaugccauuggauugugcaaacgcaucaaauguucaggcugugaaccguucugcaacaaaaggggugacacuucuucucccagaaccggaguggacauacccgcguuuaucuugcccgggcucaaccuuucagaaagcacuccuaauuagcccucauagauucggagaaaccaaaggaaacucagcucccuugauaauaagggaaccuuuuauugcuuguggaccaaaugaaugcaaacacuuugcucuaacccauuaugcagcccaaccagggggauacuacaauggaacaagaggagacagaaacaagcugaggcaucuaauuucagucaaauugggcaaaaucccaacaguagaaaacuccauuuuccacauggcagcauggagcggguccgcaugccaugaugguaaggaauggacauauaucggaguugauggcccugacaauaaugcauugcucaaaauaaaauauggagaagcauauacugacacauaccauuccuaugcaaacaaaauccuaagaacacaagaaagugccugcaauugcaucgggggaaauuguuaucuuaugauaacugauggcucagcuucagguguuagugaaugcagauuucuuaagauucgagagggccgaauaauaaaagaaauauuuccaacaggaagaguaaaacacacugaggaaugcacaugcggauuugccagcaauaaaaccauagaaugugccuguagagauaacaguuacacagcaaaaagacccuuugucaaauuaaacguggagacugauacagcagaaauaagauugaugugcacagauacuuauuuggacacccccagaccagaugauggaagcauaacaggcccuugugaaucuaauggggacaaagggaguggaggcaucaagggaggauuuguucaucaaagaauggcauccaagauuggaaggugguacucucgaacgaugucuaaaacugaaaggauggggaugggacuguaugucaaguaugauggagacccaugggcugacagugaugcccuagcuuuuaguggaguaaugguuucaaugaaagaaccugguugguacuccuuuggcuucgaaauaaaagauaagaaaugcgauguccccuguauugggguagagaugguacaugaugguggaaaagagacuuggcacucagcagcaacagccauuuacuguuuaaugggcucaggacagcugcugugggacacugucacagguguugacauggcucuguaa

SEQ ID NO: 62015 - RNA, 1401 nt, Artificial Sequence; identical to SEQ ID NO: 60748
  derived and/or modified CDS sequence (wt) from neuraminidase__InfluenzaB__AHL92017

SEQ ID NO: 62016 - RNA, 1401 nt, Artificial Sequence
  derived and/or modified CDS sequence (wt) from neuraminidase__InfluenzaB__AHL92028
augcuaccuucaacuauacaaacguuaacccuauuucucacaucagggggaguauuauuaucacuauaugugucagcuucauuaucauacuuacuauauucggauauauugcuaaaauucucaccaacagaaauaacugcaccaacaaugccauuggauugugcaaacgcaucaaauguucaggcugugaaccguucugcaacaaaaggggugacacuucuucucccagaaccagaguggacauacccgcguuuaucuugcccgggcucaaccuuucagaaagcacuccuaauuagcccucauagauucggagaaaccaaaggaaacucagcucccuugauaauaagggaaccuuuuauugcuuguggaccaaaugaaugcaaacacuuugcucuaacccauuaugcagcccaaccagggggauacuacaauggaacaagaggagacagaaacaagcugaggcaucuaauuucagucaaauugggcaaaaucccaacaguagaaaacuccauuuuccacauggcagcauggagcggguccgcaugccaugaugguaaggaauggacauauaucggaguugauggcccugacaauaaugcauugcucaaaauaaaauauggagaagcauauacugacacauaccauuccuaugcaaacaaaauccuaagaacacaagaaagugccugcaauugcaucgggggaaauuguuaucuuaugauaacugauggcucagcuucagguguuagugaaugcagauuucuuaagauucgagagggccgaauaauaaaagaaauauuuccaacaggaagaguaaaacacacugaggaaugcacaugcggauuugccagcaauaaaaccauagaaugugccuguagagauaacaguuacacagcaaaaagacccuuugucaaauuaaacguggagacugauacagcagaaauaagauugaugugcacagauacuuauuuggacacccccagaccagaugauggaagcauaacaggcccuugugaaucuaauggggacaaagggaguggaggcaucaagggaggauuuguucaucaaagaauggcauccaagauuggaaggugguacucucgaacgaugucuaaaacugaaaggauggggaugggacuguaugucaaguaugauggagacccaugggcugacagugaugcccuagcuuuuaguggaguaaugguuucaaugaaagaaccugguugguacuccuuuggcuucgaaauaaaagauaagaaaugcgauguccccuguauugggauagagaugguacaugaugguggaaaagagacuuggcacucagcagcaacagccauuuacuguuuaaugggcucaggacagcugcugugggacacugucacagguguugacauggcucuguaa

SEQ ID NO: 62017 - RNA, 1401 nt, Artificial Sequence
  derived and/or modified CDS sequence (wt) from neuraminidase__InfluenzaB__AHL92039
augcuaccuucaacuauacaaacguuaacccuauuucucacaucagggggaguauuauuaucacuauaugugucagcuucauuaucauacuuacuauauucggauauauugcuaaaauucucaccaacagaaauaacugcaccaacaaugccauuggauugugcaaacgcaucaaauguucaugcugugaaccguucugcaacaaaaggggugacacuucuucucccagaaccggaguggauauacccgcguuuaucuugcccgggcucaaccuuucagaaagcacuccuaauuagcccucauagauucggagaaaccaaaggaaacucagcucccuugauaauaagggaaccuuuuauugcuuguggaccaaaugaaugcaaacacuuugcucuaacccauuaugcagcccaaccagggggauacuacaauggaacaagaggagacagaaacaagcugaggcaucuaauuucagucaaauugggcaaaaucccaacaguagaaaacuccauuuuccacauggcagcauggagcggguccgcaugccaugaugguaaggaauggacauauaucggaguugauggcccugacaauaaugcauugcucaaaauaaaauauggagaagcauauacugacacauaccauuccuaugcaaacaacauccuaagaacacaagaaagugccugcaauugcaucgggggaaauuguuaucuuaugauaacugauggcucagcuucagguguuagugaaugcagauuucuuaagauucgagagggccgaauaauaaaagaaauauuuccaacaggaagaguaaaacauacugaggaaugcacaugcggauuugccagcaauaaaaccauagaaugugccuguagagauaacaguuacacagcaaaaagacccuuugucaaauuaaacguggaaacugauacagcagaaauaagauugaugugcacagauacuuauuuggacacccccagaccagaugauggaagcauaacaggcccuugugaaucuaauggggacaaagggaguggaggcaucaagggaggauuuguucaucaaagaauggcauccaagauuggaaggugguacucucgaacgaugucuaaaacugaaaggauggggaugggacuguaugucaaguauaauggagacccaugggcugacagugaugcccuugcuuuuaguggaguaaugguuucaaugaaagaaccugguugguacuccuuuggcuucgaaauaaaagauaagaaaugcgauguccccuguauugggauagagaugguacaugaugguggaaaagagacuuggcacucagcagcaacagccauuuacuguuuaaugggcucaggacagcugcugugggacacugucacagguguugacauggcucuguaa

SEQ ID NO: 62018 - RNA, 1401 nt, Artificial Sequence; identical to SEQ ID NO: 60748
  derived and/or modified CDS sequence (wt) from neuraminidase__InfluenzaB__AHL92050

SEQ ID NO: 62019 - RNA, 1401 nt, Artificial Sequence
  derived and/or modified CDS sequence (wt) from neuraminidase__InfluenzaB__AHL92061
augcuaccuucaacuacacaaacguuaacccuauuucucacaucagggggaguauuauuaucacuauaugugucagcuucauuaucauacuuacuauauucggauauauugcuaaaauucucaccaacagaaauaacugcaccaacaaugccauuggauugugcaaacgcaucaaauguucaggcugugaaccguucugcaacaaaaggggugacacuucuucucccagaaccggaguggacauacccgcguuuaucuugcccgggcucaaccuuucagaaagcacuccuaauuagcccucauagauucggagaaaccaaaggaaacucagcucccuugauaauaagggaaccuuuuauugcuuguggaccaaaugaaugcaaacacuuugcucuaacccauuaugcagcccaaccagggggauacuacaauggaacaagaggagacagaaacaagcugaggcaucuaauuucagucaaauugggcaaaaucccaacaguagaaaacuccauuuuccacauggcagcauggagcggguccgcaugccaugaugguaaggaauggacauauaucggaguugauggcccugacaauaaugcauugcucaaaauaaaauauggagaagcauauacugacacauaccauuccuaugcaaacaaaauccuaagaacacaagaaagugccugcaauugcaucgggggaaauuguuaucuuaugauaacugauggcucagcuucagguguuagugaaugcagauuucuuaagauucgagagggccgaauaauaaaagaaauauuuccaacaggaagaguaaaacacacugaggaaugcacaugcggauuugccagcaauaaaaccauagaaugugccuguagagauaacaguuacacagcaaaaagacccuuugucaaauuaaacguggagacugauacagcagaaauaagauugaugugcacagauacuuauuuggacacccccagaccagaugauggaagcauaacaggcccuugugaaucuaauggggacaaagggaguggaggcaucaagggaggauuuguucaucaaagaauggcauccaagauuggaaggugguacucucgaacgaugucuaaaacugaaaggauggggaugggacuguaugucaaguaugauggagacccaugggcugacagugaugcccuagcuuuuaguggaguaaugguuucaaugaaagaaccugguugguacuccuuuggcuucgaaauaaaagauaagaaaugcgauguccccuguauugggauagagaugguacaugaugguggaaaagagacuuggcacucagcagcaacagccauuuacuguuuaaugggcucaggacagcugcugugggacacugucacagguguugacauggcucuguaa

SEQ ID NO: 62020 - RNA, 1401 nt, Artificial Sequence
  derived and/or modified CDS sequence (wt) from neuraminidase__InfluenzaB__AHL92072
augcuaccuucaacuauacaaacguuaacccuauuucucacaucagggggaguauuauuaucacuauaugugucagcuucauuaucauacuuacuauauucggauauauugcuaaaauucucaccaacagaaauaacugcaccaacaaugccauuggauugugcaaacgcaucaaauguucaggcugugaaccauucugcaacaaaaggggugacacuucuucucccagaaccggaguggacauacccgcguuuaucuugcccgggcucaaccuuucagaaagcacuccuaauuagcccucauagauucggagaaaccaaaggaaacucagcucccuugauaauaagggaaccuuuuauugcuuguggaccaaaugaaugcaaacacuuugcucuaacccauuaugcagcccaaccagggggauacuacaauggaacaagaggagacagaaacaagcugaggcaucuaauuucagucaaauugggcaaaaucccaacaguagaaaacuccauuuuccacauggcagcauggagcggguccgcaugccaugaugguaaggaauggacauauaucggaguugauggcccugacaauaaugcauugcucaaaauaaaauauggagaagcauauacugacacauaccauuccuaugcaaacaaaauccuaagaacacaagaaagugccugcaauugcaucgggggaaauuguuaucuuaugauaacugauggcucagcuucagguguuagugaaugcagauuucuuaagauucgagagggccgaauaauaaaagaaauauuuccaacaggaagaguaaaacacacugaggaaugcacaugcggauuugccagcaauaaaaccauagaaugugccuguagagauaacaguuacacagcaaaaagacccuuugucaaauugaacguggagacugauacagcagaaauaagauugaugugcacagauacuuauuuggacacucccagaccagaugauggaagcauaacagggccuugugaaucuaauggggacaaagggaguggaggcaucaagggaggauuuguucaucaaagaauggcauccaagauuggaaggugguacucucgaacgaugucuaaaacugaaaggauggggaugggacuguaugucaaguaugauggagacccaugggcugacagugaugcccuagcuuuuaguggaguaaugguuucaaugaaagaaccugguugguacuccuuuggcuucgaaauaaaagauaagaaaugcgauguccccuguauugggauagagaugguacaugaugguggaaaagagacuuggcacucagcagcaacagccauuuacuguuuaaugggcucaggacagcugcugugggacacugucacagguguugacauggcucuguaa

SEQ ID NO: 62021 - RNA, 1401 nt, Artificial Sequence
  derived and/or modified CDS sequence (wt) from neuraminidase__InfluenzaB__AHL92083
augcuaccuucaacuauacaaacguuaacccuauuucucacaucagggggaguauuauuaucacuauaugugucagcuucauuaucauacuuacuauauucggauauauugcuaaaauucucaccaacagaaauaacugcaccaacaaugccauuggauugugcaaacgcaucaaauguucaggcugugaaccauucugcaacaaaaggggugacacuucuucucccagaaccggaguggacauacccgcguuuaucuugcccgggcucaaccuuucagaaagcacuccuaauuagcccucauagauucggagaaaccaaaggaaacucagcucccuugauaauaagggaaccuuuuauugcuuguggaccaaaugaaugcaaacacuuugcucuaacccauuaugcagcccaaccagggggauacuacaauggaacaagaggagacagaaacaagcugaggcaucuaauuucagucaaauugggcaaaaucccaacaguagaaaacuccauuuuccacauggcagcauggagcggguccgcaugccaugaugguaaggaauggacauauaucggaguugauggcccugacaauaaugcauugcucaaaauaaaauauggagaagcauauacugacacauaccauuccuaugcaaacaaaauccuaagaacacaagaaagugccugcaauugcaucgggggaaauuguuaucuuaugauaacugauggcucagcuucagguguuagugaaugcagauuucuuaagauucgagagggccgaauaauaaaagaaauauuuccaacaggaagaguaaaacacacugaggaaugcacaugcggauuugccagcaauaaaaccauagaaugugccuguagagauaacaguuacacagcaaaaagacccuuugucaaauugaacguggagacugauacagcagaaauaagauugaugugcacagauacuuauuuggacacucccagaccagaugauggaagcauaacaggcccuugugaaucuaauggggacaaagggaguggagguaucaagggaggauuuguucaucaaagaauggcauccaagauuggaaggugguacucucgaacgaugucuaaaacugaaaggauggggaugggacuguaugucaaguaugauggagacccaugggcugacagugaugcccuagcuuuuaguggaguaaugguuucaaugaaagaaccugguugguacuccuuuggcuucgaaauaaaagauaagaaaugcgauguccccuguauugggauagagaugguacaugaugguggaaaagagacuuggcacucagcagcaacagccauuuacuguuuaaugggcucaggacagcugcugugggacacugucacagguguugacauggcucuguaa

SEQ ID NO: 62022 - RNA, 1401 nt, Artificial Sequence
  derived and/or modified CDS sequence (wt) from neuraminidase__InfluenzaB__AHL92094
augcuaccuucaacuauacaaacguuaacccuauuucucacaucagggggaguauuauuaucacuauaugugucagcuucauuaucauacuuacuauauucggauauauugcuaaaauucucaccaacagaaauaacugcaccaacaaugccauuggauugugcaaacgcaucaaauguucaggcugugaaccauucugcaacaaaaggggugacacuucuucucccagaaccggaguggacauacccgcguuuaucuugcccgggcucaaccuuucagaaagcacuccuaauuagcccucauagauucggagaaaccaaaggaaacucagcucccuugauaauaagggaaccuuuuauugcuuguggaccaaaugaaugcaaacacuuugcucuaacccauuaugcagcccaaccagggggauacuacaauggaacaagaggagacagaaacaagcugaggcaucuaauuucagucaaauugggcaaaaucccaacaguagaaaacuccauuuuccacauggcagcauggagcggguccgcaugccaugaugguaaggaauggacauauaucggaguugauggcccugacaauaaugcauugcucaaaauaaaauauggagaagcauauacugacacauaccauuccuaugcaaacaaaauccuaagaacacaagaaagugccugcaauugcaucgggggaaauuguuaucuuaugauaacugauggcucagcuucagguguuagugaaugcagauuucuuaagauucgagagggccgaauaauaaaagaaauauuuccaacaggaagaguaaaacacacugaggaaugcacaugcggauuugccagcaauaaaaccauagaaugugccuguagagauaacaguuacacagcaaaaagacccuuugucaaauugaacguggagacugauacagcagaaauaagauugaugugcacagauacuuauuuggacacucccagaccagaugauggaagcauaacaggcccuugugaaucuaauggggacaaagggaguggaggcaucaagggaggauuuguucaucaaagaauggcauccaagauuggaaggugguacucucgaacgaugucuaaaacugaaaggauggggaugggacuguaugucaaguaugauggagacccaugggcugacagugaugcccuagcuuuuaguggaguaaugguuucaaugaaagaaccugguugguacuccuuuggcuucgaaauaaaagauaagaaaugcgauguccccuguauugggauagagaugguacaugaugguggaaaagagacuuggcacucagcagcaacagccauuuacuguuuaaugggcucaggacagcugcugugggacacugucacagguguugacauggcucuguaa

SEQ ID NO: 62023 - RNA, 1401 nt, Artificial Sequence
  derived and/or modified CDS sequence (wt) from neuraminidase__InfluenzaB__AHL92105
augcuaccuucaacuauacaaacguuaacccuauuucucacaucagggggaguauuauuaucacuauaugugucagcuucauuaucauacuuacuauauucggauauauugcuaaaauucucaccaacagaaauaacugcaccaacaaugccauuggauugugcaaacgcaucaaauguucaugcugugaaccguucugcaacaaaaggggugacacuucuucucccagaaccggaguggacauacccgcguuuaucuugcccgggcucaaccuuucagaaagcacuccuaauuagcccucauagauucggagaaaccaaaggaaacucagcucccuugauaauaagggaaccuuuuauugcuuguggaccaaaugaaugcaaacacuuugcucuaacccauuaugcagcccaaccagggggauacuacaauggaacaagaggagacagaaacaagcugaggcaucuaauuucagucaaauugggcaaaaucccaacaguagaaaacuccauuuuccacauggcagcauggagcggguccgcaugccaugaugguaaggaauggacauauaucggaguugauggcccugacaauaaugcauugcucaaaauaaaauauggagaagcauauacugacacauaccauuccuaugcaaacaacauccuaagaacacaagaaagugccugcaauugcaucgggggaaauuguuaucuuaugauaacugauggcucagcuucagguguuagugaaugcagauuucuuaagauucgagagggccgaauaauaaaagaaauauuuccaacaggaagaguaaaacauacugaggaaugcacaugcggauuugccagcaauaaaaccauagaaugugccuguagagauaacaguuacacagcaaaaagacccuuugucaaauuaaacguggaaacugauacagcagaaauaagauugaugugcacagauacuuauuuggacacccccagaccagaugauggaagcauaacaggcccuugugaaucuaauggggacaaaggggguggaggcaucaagggaggauuuguucaucaaagaauggcauccaagauuggaaggugguacucucgaacgaugucuaaaacugaaaggauggggaugggacuguaugucaaguaugauggagacccaugggcugacagugaugcccuugcuuuuaguggaguaaugguuucacugaaagaaccugguugguacuccuuuggcuucgaaauaaaagauaagaaaugcgauguccccuguauugggauagagaugguacaugaugguggaaaagagacuuggcacucagcagcaacagccauuuacuguuuaaugggcucaggacagcugcugugggacacugucacagguguugacauggcucuguaa

SEQ ID NO: 62024 - RNA, 1401 nt, Artificial Sequence; identical to SEQ ID NO: 60823
  derived and/or modified CDS sequence (wt) from neuraminidase__InfluenzaB__AHL92116

SEQ ID NO: 62025 - RNA, 1401 nt, Artificial Sequence
  derived and/or modified CDS sequence (wt) from neuraminidase__InfluenzaB__AHL92127
augcuaccuucaacuauacaaacguuaacccuauuucucacaucagggggaguauuauuaucacuauaugugucagcuucauuaucauacuuacuauauucggauauauugcuaaaauucucaccaacagaaauaacugcaccaacaaugccauuggauugugcaaacgcaucaaauguucaggcugugaaccauucugcaacaaaaggggugacacuucuucucccagaaccggaguggacauacccgcguuuaucuugcccgggcucaaccuuucagaaagcacuccuaauuagcccucauagauucggagaaaccaaaggaaacucagcucccuugauaauaagggaaccuuuuauugcuuguggaccaaaugaaugcaaacacuuugcucuaacccauuaugcagcccaaccagggggauacuacaauggaacaagaggagacagaaacaagcugaggcaucuaauuucagucaaauugggcaaaaucccaacaguagaaaacuccauuuuccacauggcagcauggagcggguccgcaugccaugaugguaaggaauggacauauaucggaguugauggcccugacaauaaugcauugcucaaaauaaaauauggagaagcauauacugacacauaccauuccuaugcaaacaaaauccuaagaacacaagaaagugccugcaauugcaucgggggaaauuguuaucuuaugauaacugauggcucagcuucagguguuagugaaugcagauuucuuaagauucgagagggccgaauaauaaaagaaauauuuccaacaggaagaguaaaacacacugaggaaugcacaugcggauuugccagcaauaaaaccauagaaugugccuguagagauaacaguuacacagcaaaaagacccuuugucaaauugaacguggagacugauacagcagaaauaagacugaugugcacagauacuuauuuggacacucccagaccagaugauggaagcauaacaggcccuugugaaucuaauggggacaaagggaguggaggcaucaagggaggauuuguucaucaaagaauggcauccaagauuggaaggugguacucucgaacgaugucuaaaacugaaaggauggggaugggacuguaugucaaguaugauggagacccaugggcugacagugaugcccuagcuuuuaguggaguaaugguuucaaugaaagaaccugguugguacuccuuuggcuucgaaauaaaagauaagaaaugcgauguccccuguauugggauagagaugguacaugaugguggaaaagagacuuggcacucagcagcaacagccauuuacuguuuaaugggcucaggacagcugcugugggacacugucacagguguugacauggcucuguaa

SEQ ID NO: 62026 - RNA, 1401 nt, Artificial Sequence; identical to SEQ ID NO: 62022
  derived and/or modified CDS sequence (wt) from neuraminidase__InfluenzaB__AHL92138

SEQ ID NO: 62027 - RNA, 1401 nt, Artificial Sequence; identical to SEQ ID NO: 62022
  derived and/or modified CDS sequence (wt) from neuraminidase__InfluenzaB__AHL92149

SEQ ID NO: 62028 - RNA, 1401 nt, Artificial Sequence
  derived and/or modified CDS sequence (wt) from neuraminidase__InfluenzaB__AHL92171
augcuaccuucaacuauacaaacguuaacccuauuucucacaucagggggaguauuauuaucacuauaugugucagcuucauuaucauacuuacuauauucggauauauugcuaaaauucucaccaacagaaauaacugcaccaacaaugccauuggauugugcaaacgcaucaaauguucaggcugugaaccauucugcaacaaaaggggugacacuucuucucccagaaccggaguggacauacccgcguuuaucuugcccgggcucaaccuuucagaaagcacuccuaguuagcccucauagauucggagaaaccaaaggaaacucagcucccuugauaauaagggaaccuuuuauugcuuguggaccaaaugaaugcaaacacuuugcucuaacccauuaugcagcccaaccagggggauacuacaauggaacaagaggagacagaaacaagcugaggcaucuaauuucagucaaauugggcaaaaucccaacaguagaaaacuccauuuuccacauggcagcauggagcggguccgcaugccaugaugguaaggaauggacauauaucggaguugauggcccugacaauaaugcauugcucaaaauaaaauauggagaagcauauacugacacauaccauuccuaugcaaacaaaauccuaagaacacaagaaagugccugcaauugcaucgggggaaauuguuaucuuaugauaacugauggcucagcuucagguguuagugaaugcagauuucuuaagauucgagagggccgaauaauaaaagaaauauuuccaacaggaagaguaaaacacacugaggaaugcacaugcggauuugccagcaauaaaaccauagaaugugccuguagagauaacaguuacacagcaaaaagacccuuugucaaauugaacguggagacugauacagcagaaauaagauugaugugcacagauacuuauuuggacacucccagaccagaugauggaagcauaacaggcccuugugaaucuaauggggacaaagggaguggaggcaucaagggaggauuuguucaucaaagaauggcauccaagauuggaaggugguacucucgaacgaugucuaaaacugaaaggauggggaugggacuguaugucaaguaugauggagacccaugggcugacagugaugcccuagcuuuuaguggaguaaugguuucaaugaaagaaccugguugguacuccuuuggcuucgaaauaaaagauaagaaaugcgauguccccuguauugggauagagaugguacaugaugguggaaaagagacuuggcacucggcagcaacagccauuuacuguuuaaugggcucaggacagcugcugugggacacugucacagguguugacauggcucuguaa

SEQ ID NO: 62029 - RNA, 1401 nt, Artificial Sequence
  derived and/or modified CDS sequence (wt) from neuraminidase__InfluenzaB__AHL92182
augcuaccuucaacuauacaaacguuaacccuauuucucacaucagggggaguauuauuaucacuauaugugucagcuucauuaucauacuuacuauauucggauauauugcuaaaauucucaccaacagaaauaacugcaccaacaaugccauuggauugugcaaacgcaucaaauguucaugcugugaaccguucugcaacaaaaggggugacacuucuucucccagaaccggagugggcauacccgcguuuaucuugcccgggcucaaccuuucagaaagcacuccuaauuagcccucauagauucggagaaaccaaaggaaacucagcucccuugauaauaagggaaccuuuuauugcuuguggaccaaaugaaugcaaacacuuugcucuaacccauuaugcagcccaaccagggggauacuacaguggaacaagaggagacagaaacaagcugaggcaucuaauuucagucaaauugggcaaaaucccaacaguagaaaacuccauuuuccacauggcagcauggagcggguccgcaugccaugaugguaaggaauggacauauaucggaguugauggcccugacaauaaugcauugcucaaaauaaaauauggagaagcauauacugacacauaccauuccuaugcaaacaacauccuaagaacacaagaaagugccugcaauugcaucgggggaaauuguuaucuuaugauaacugauggcucagcuucagguguuagugaaugcagauuucuuaagauucgagagggccgaauaauaaaagaaauauuuccaacaggaagaguaaaacauacugaggaauguacaugcggauuugccagcaauaaaaccauagaaugugccuguagagauaacaguuacacagcaaaaagacccuuugucaaauuaaacguggaaacugauacagcagaaauaagauugaugugcacagauacuuauuuggacacccccagaccagaugauggaagcauaacaggcccuugugaaucuaauggggacaaagggaguggaggcaucaagggaggauuuguucaucaaagaauggcauccaagauuggaaggugguacucucgaacgaugucuaaaacugaaaggauggggaugggacuguaugucaaguaugauggagacccaugggcugacagugaugcccuugcuuuuaguggaguaaugguuucaaugaaagaaccugguugguacuccuuuggcuucgaaauaaaagauaagaaaugcgauguccccuguauugggauagagaugguacaugaugguggaaaagagacuuggcacucagcagcaacagccauuuacuguuuaaugggcucaggacagcugcugugggacacugucacagguguugacauggcucuguaa

SEQ ID NO: 62030 - RNA, 1401 nt, Artificial Sequence; identical to SEQ ID NO: 62029
  derived and/or modified CDS sequence (wt) from neuraminidase__InfluenzaB__AHL92193

SEQ ID NO: 62031 - RNA, 1401 nt, Artificial Sequence; identical to SEQ ID NO: 60823
  derived and/or modified CDS sequence (wt) from neuraminidase__InfluenzaB__AHL92204

SEQ ID NO: 62032 - RNA, 1401 nt, Artificial Sequence
  derived and/or modified CDS sequence (wt) from neuraminidase__InfluenzaB__AHL92215
augcuaccuucaacuauacaaacguuaacccuauuucucacaucagggggaguauuauuaucacuauaugugucagcuucauuaucauacuuacuauauucggauauauugcuaaaauucucaccaacagaaauaacugcaccaacaaugccauuggauugugcaaacgcaucaaauguucaggcugugaaccauucugcaacaaaaggggugacacuucuucucccagaaccggaguggacauacccgcguuuaucuugcccgggcucaaccuuucagaaagcacuccuaauuagcccucauagauucggagaaaccaaaggaaacucagcucccuugauaauaagggaaccuuuuauugcuuguggaccaaaugaaugcaaacacuuugcucuaacccauuaugcagcccaaccagggggauacuacaauggaacaagaggagacagaaacaagcugaggcaucuaauuucagucaaauugggcaaaaucccaacaguagaaaacuccauuuuccacauggcagcauggagcggguccgcaugccaugaugguaaggaauggacauauaucggaguugauggcccugacaauaaugcauugcucaaaauaaaauauggagaagcauauacugacacauaccauuccuaugcaaacaaaauccuaagaacacaagaaagugccugcaauugcaucgggggaaauuguuaucuuaugauaacugauggcucagcuucagguguuagugaaugcagauuucuuaagauucgagagggccgaauaauaaaagaaauauuuccaaaaggaagaguaaaacacacugaggaaugcacaugcggauuugccagcaauaaaaccauagaaugugccuguagagauaacaguuacacagcaaaaagacccuuugucaaauugaacguggagacugauacagcagaaauaagacugaugugcacagauacuuauuuggacacucccagaccagaugauggaagcauaacaggcccuugugaaucuaauggggacaaagggaguggaggcaucaagggaggauuuguucaucaaagaauggcauccaagauuggaaggugguacucucgaacgaugucuaaaacugaaaggauggggaugggacuguaugucaaguaugauggagacccaugggcugacagugaugcccuagcuuuuaguggaguaaugguuucaaugaaagaaccugguugguacuccuuuggcuucgaaauaaaagauaagaaaugcgauguccccuguauugggauagagaugguacaugaugguggaaaagagacuuggcacucagcagcaacagccauuuacuguuuaaugggcucaggacagcugcugugggacacugucacagguguugacauggcucuguaa

SEQ ID NO: 62033 - RNA, 1401 nt, Artificial Sequence
  derived and/or modified CDS sequence (wt) from neuraminidase__InfluenzaB__AHL92226
augcuaccuucaacuauacaaacguuaacccuauuucucacaucagggggaguauuauuaucacuauaugugucagcuucauuaucauacuuacuauauucggauauauugcuaaaauucucaccaacagaaauaacugcaccaacaaugccauuggauugugcaaaugcaucaaauguucaggcugugaaccauucugcaacaaaaggggugacacuucuucucccagaaccggaguggacauacccgcguuuaucuugcccgggcucaaccuuucagaaagcacuccuaauuagcccucauagauucggagaaaccaaaggaaacucagcucccuugauaauaagggaaccuuuuauugcuuguggaccaaaugaaugcaaacacuuugcucuaacccauuaugcagcccaaccagggggauacuacaauggaacaagaggagacagaaacaagcugaggcaucuaauuucagucaaauugggcaaaaucccaacaguagaaaacuccauuuuccacauggcagcauggagcggguccgcaugccaugaugguaaggaauggacauauaucggaguugauggcccugacaauaaugcauugcucaaaauaaaauauggagaagcauauacugacacauaccauuccuaugcaaacaaaauccuaagaacacaagaaagugccugcaauugcaucgggggaaauuguuaucuuaugauaacugauggcucagcuucagguguuagugaaugcagauuucuuaagauucgagagggccgaauaauaaaagaaauauuuccaacaggaagaguaaaacacacugaggaaugcacaugcggauuugccagcaauaaaaccauagaaugugccuguagagauaacaguuacacagcaaaaagacccuuugucaaauuaaacguggagacugauacagcagaaauaagauugaugugcacagauacuuauuuggacacccccagaccagaugauggaagcauaacaggcccuugugaaucuaauggggacaaagggaguggaggcaucaagggaggauuuguucaucaaagaauggcauccaagauuggaaggugguacucucgaacgaugucuaaaacugaaaggauggggaugggacuguaugucaaguaugauggagacccaugggcugacagugaugcccuagcuuuuaguggaguaaugguuucaaugaaagaaccugguugguacuccuuuggcuucgaaauaaaagauaagaaaugcgauguccccuguauugggauagagaugguacaugaugguggaaaagagacuuggcacucagcagcaacagccauuuacuguuuaaugggcucaggacagcugcugugggacacugucacagguguugacauggcucuguaa

SEQ ID NO: 62034 - RNA, 1401 nt, Artificial Sequence
  derived and/or modified CDS sequence (wt) from neuraminidase__InfluenzaB__AHL92237
augcuaccuucaacuauacaaacguuaacccuauuucucacaucagggggaguguuauuaucacuauaugugucagcuucauugucauacuuacuauauucggauauauugcuaaaauuuucacaaacagaaauaacugcaccaauaaugccauuggauugugcaaacgcaucaaauguucaggcugugaaccguucugcagcaaaaggggugacacuucuucucccagaaccggaguggacauacccucguuuaucuugcccgggcucaaccuuucagaaagcacuccuaauuagcccccauagauucggagaaaccaaaggaaacucagcucccuugauaauaagggaaccuuucauugcuuguggaccaacggaaugcaaacacuuugcucuaacccauuaugcagcucaaccagggggauacuacaauggaacaagagaagacagaaacaagcugaggcaucuaauuucagucaaauugggcaaaaucccaacaguagaaaacuccauuuuccauauggcagcuuggagcggguccgcaugccaugaugguaaagaauggacauauaucggaguugauggcccugacaguaaugcauuacucaaaauaaaauauggagaagcauauacugacacauaccauuccuaugcaaaaaacauccuaaggacacaagaaagugccugcaauugcaucgggggagauuguuaucuuaugauaacugauggcccagcuucagggauuagugaaugcagauuccuuaagauucgagagggccgaauaauaaaagaaauauuuccaacaggaagaguaaaacauacugaggaaugcacauguggauuugccagcaacaaaaccauagaaugugcuuguagagauaacaguuacacagcaaaaagacccuuugucaaauuaaauguggagacugauacagcggaaauaagauugaugugcacagagacuuauuuggacacccccagaccaaaugauggaagcauaacagggccuugcgaaucugauggggacaaagggaguggaggcaucaagggaggauuuguucaucaaagaauggcauccaagauuggaaggugguacucucgaacgaugucuaaaacuaaaagaauggggaugggacuguauguaaaguaugauggagacccauggacugacagugaagcccuugcucuuaguggaguaaugguuucgauggaagaaccugguugguauuccuuuggcuucgaaauaaaagauaagaaaugugauguccccuguauugggauagaaaugguacaugauggugggaaaacgacuuggcacucagcagcaacagccauuuacuguuuaaugggcucaggacaacugcugugggacacugucacagguguugauauggcucuguaa

SEQ ID NO: 62035 - RNA, 1401 nt, Artificial Sequence
  derived and/or modified CDS sequence (wt) from neuraminidase__InfluenzaB__AHL92248
augcuaccuucaacuauacaaacguuaacccuauuucucacaucagggggaguauuauuaucacuauaugugucagcuucauuaucauacuuacuauauucggauauauugcuaaaauucucaccaacagaaauaacugcaccaacaaugccauuggauugugcaaacgcaucaaauguucaggcugugaaccauucugcaacaaaaggagugacacuucuucucccagaaccggaguggacauacccgcguuuaucuugcccgggcucaaccuuucagaaagcacuccuaauuagcccccauagauucggagaaaccaaaggaaacucagcucccuugauaauaagggaaccuuuuauugcuuguggaccaaaugaaugcaaacacuuugcucuaacccauuaugcagcccaaccagggggauacuacaauggaacaagaggagacagaaacaagcugaggcaucuaauuucagucaaauugggcaaaaucccaacaguagaaaacuccauuuuccacauggcagcauggagcggguccgcaugccaugaugguaaggaauggacauauaucggaguugauggcccugacaauaaugcauugcucaaaauaaaauauggagaagcauauacugacacauaccauuccuaugcaaacaaaauccuaagaacacaagaaagugccugcaauugcaucgggggaaauuguuaucuuaugauaacugauggcucagcuucagguguuagugaaugcagauuucuuaagauucgagagggccgaauaauaaaagaaauauuuccaacaggaagaguaaaacacacugaggaaugcacaugcggauuugccagcaauaaaaccauagaaugugccuguagagauaacaguuacacagcaaaaagacccuuugucaaauugaacguggagacugauacagcagaaauaagauugaugugcacagauacuuauuuggacacucccagaccagaugauggaagcauaacaggcccuugcgaaucuaauggggacaaagggaguggaggcaucaagggaggauuuguucaucaaagaauggcauccaagauuggaaggugguacucucgaacaaugucuaaaacugaaaggauggggaugggacuguaugucaaguaugauggagacccaugggcugacagugaugcccuagcuuuuaguggaguaaugguuucaaugaaagaaccugguugguacuccuuuggcuucgaaauaaaagauaagaaaugcgauguccccuguauugggauagagaugguacaugaugguggaaaagagacuuggcacucagcagcaacagccauuuacuguuuaaugggcucaggacagcugcugugggacacugucacagguguugacauggcucuguaa

SEQ ID NO: 62036 - RNA, 1401 nt, Artificial Sequence
  derived and/or modified CDS sequence (wt) from neuraminidase__InfluenzaB__AHL92259
augcuaccuucaacuauacaaacguuaacccuauuucucacaucagggggaguauuauuaucacuauaugugucagcuucauuaucauacuuacuauauucggauauauugcuaaaauucucaccaacagaaauaacugcaucaacaaugccauuggauugugcaaacgcaucaaauguucaggcugugaaccguucugcaacaaaaggggugacacuucuucucccagaaccggaguggacauacccgcguuuaucuugcccgggcucaaccuuucagaaagcacuccuaauuagcccucauagauucggagaaaccaaaggaaacucagcucccuugauaauaagggaaccuuuuauugcuuguggaccaaaugaaugcaaacacuuugcucuaacccauuaugcagcccaaccagggggauacuacaauggaacaagaggagacagaaacaagcugaggcaucuaauuucagucaaauugggcaaaaucccaacaguagaaaacuccauuuuccacauggcagcauggagcggguccgcaugccaugaugguaaggaauggacauauaucggaguugauggcccugacaaugaugcauugcucaaaauaaaauauggagaagcauauacugacacauaccauuccuaugcaaacaaaauccuaagaacacaagaaagugccugcaauugcaucgggggaaauuguuaucuuaugauaacugauggcucagcuucagguguuagugaaugcagauuucuuaagauucgagagggccgaauaauaaaagaaauauuuccaacaggaagaguaaaacacacugaggaaugcacaugcggauuugccagcaauaaaaccauagaaugugccugcagagauaacaguuacacagcaaaaagacccuuugucaaauuaaacguggagacugauacagcagaaauaagauugaugugcacagauacuuauuuggacacccccagaccagaugauggaagcauaacaggcccuugugaaucuaauggggacaaagggaguggaggcauuaagggaggauuuguucaucaaagaaugacauccaagauuggaaggugguacucucgaacgaugucuaaaacugaaaggauggggaugggacuguaugucaaguaugauggagacccaugggcugacagugaugcccuagcuuuuaguggaguaaugguuucaaugaaagaaccugguugguacuccuuuggcuucgaaauaaaagauaagaaaugcgauguccccuguauugggauagagaugguacaugaugguggaaaagagacuuggcacucagcagcaacagccauuuacuguuuaaugggcucaggacagcugcugugggacacugucacagguguugacauggcucuguaa

SEQ ID NO: 62037 - RNA, 1401 nt, Artificial Sequence
  derived and/or modified CDS sequence (wt) from neuraminidase__InfluenzaB__AHL92270
augcuaccuucaacuauacaaacguuaacccuauuucucacaucagggggaguauuauuaucacuauaugugucagcuucauuaucauacuuacuauauucggauauauugcuaaaauucucaccaacagaaauaacugcaccaacaaugccauuggauugugcaaacgcaucaaauguucaggcugugaaccauucugcaacaaaaggggugacacuucuucucccagaaccggaguggacauacccgcguuuaucuugcccgggcucaaccuuucagaaagcacuccuaauuagcccucauagauucggagaaaccaaaggaaacucagcucccuugauaauaagggaaccuuuuauugcuuguggaccaaaugaaugcaaacacuuugcucuaacccauuaugcagcccaaccagggggauacuacaauggaacaagaggagacagaaacaagcugaggcaucuaauuucagucaaauugggcaaaaucccaacaguagaaaacuccauuuuccacauggcagcauggagcggguccgcaugccaugaugguaaggaauggacauauaucggaguugauggcccugacaauaaugcauugcucaaaauaaaauauggagaagcauauacugacacauaccauuccuaugcaaacaaaauccuaagaacacaagaaagugccugcaauugcaucgggggaaauuguuaucuuaugauaacugauggcucagcuucagguguuagugaaugcagauuucuuaagauucgagagggccgaauaauaaaagaaauauuuccaacaggaagaguaaaacacacugaggaaugcacaugcggauuugccagcaauaaaaccauagaaugugccuguagagauaacaguuacacagcaaaaagacccuuugucaaauuaaacguggagacugauacagcagaaauaagacugaugugcacagauacuuauuuggacacucccagaccagaugauggaagcauaacaggcccuugugaaucuaauggggacaaagggaguggaggcaucaagggaggauuuguucaucaaagaauggcauccaagauuggaaggugguacucucgaacgaugucuaaaacugaaaggauggggaugggacuguaugucaaguaugauggagacccaugggcugacagugaugcccuagcuuuuaguggaguaaugguuucaaugaaagaaccugguugguacuccuuuggcuucgaaauaaaagauaagaaaugcgauguccccuguauugggauagagaugguacaugaugguggaaaagagacuuggcacucagcagcaacagccauuuacuguuuaaugggcucaggacagcugcugugggacacugucacagguguugacauggcucuguaa

SEQ ID NO: 62038 - RNA, 1401 nt, Artificial Sequence
  derived and/or modified CDS sequence (wt) from neuraminidase__InfluenzaB__AHL92281
augcuaccuucaacuauacaaacguuaacccuauuucucacaucagggggaguauuauuaucacuauaugugucagcuucauuaucauacuuacuauauucggauauauugcuaaaauucucaccaacagaaauaacugcaccaacaaugccauuggauugugcaaacgcaucaaauguucaggcugcgaaccauucugcaacaaaaggggugacacuucuucucccagaaccggaguggacauacccgcguuuaucuugcccgggcucaaccuuucagaaagcacuccuaauuagcccucauagauucggagaaaccaaaggaaacucagcucccuugauaauaagggaaccuuuuauugcuuguggaccaaaugaaugcaaacacuuugcucuaacccauuaugcagcccaaccagggggauacuacaauggaacaagaggagacagaaacaagcugaggcaucuaauuucagucaaauugggcaaaaucccaacaguagaaaacuccauuuuccacauggcagcauggagcggguccgcaugccaugaugguaaggaauggacauauaucggaguugauggcccugacaauaaugcauugcucaaaauaaaauauggagaagcauauacugacacauaccauuccuaugcaaacaaaauccuaagaacacaagaaagugccugcaauugcaucgggggaaauuguuaucuuaugauaacugauggcucagcuucagguguuagugaaugcagauuucuuaagauucgagaaggccgaauaauaaaagaaauauuuccaacaggaagaguaaaacacacugaggaaugcacaugcggauuugccagcaauaaaaccauagaaugugccuguagagauaacaguuacacagcaaaaagacccuuugucaaauugaacguggagacugauacagcagaaauaagauugaugugcacagauacuuauuuggacacucccagaccagaugauggaagcauaacaggcccuugugaaucuaauggggacaaagggaguggaggcaucaagggaggauuuguucaucaaagaauggcauccaagauuggaaggugguacucucgaacgaugucuaaaacugaaaggauggggaugggacuguaugucaaguaugauggagacccaugggcugacagugaugcccuagcuuuuaguggaguaaugguuucaaugaaagaaccugguugguacuccuuuggcuucgaaauaaaagauaagaaaugcgauguccccuguauugggauagagaugguacaugaugguggaaaagagacuuggcacucagcagcaacagccauuuacuguuuaaugggcucaggacagcugcugugggacacugucacagguguugacauggcucuguaa

SEQ ID NO: 62039 - RNA, 1401 nt, Artificial Sequence
  derived and/or modified CDS sequence (wt) from neuraminidase__InfluenzaB__AHL92303
augcuaccuucaacuauacaaacguuaacccuauuucucacaucagggggaguauuauuaucacuauaugugucagcuucauuaucauacuuacuauauucggauauauugcuaaaauucucaccaacagaaauaacugcaccaacaaugccauuggauugugcaaacgcaucaaauguucaugcugugaaccguucugcaacaaaaggggugacauuucuucucccagaaccggaguggacauacccgcguuuaucuugcccgggcucaaccuuucagaaagcacuccuaauuagcccucauagauucggagaaaccaaaggaaacucagcucccuugauaauaagggaaccuuuuauugcuuguggaccaaaugaaugcaaacacuuugcucuaacccauuaugcagcccaaccagggggauacuacaauggaacaagaggagacagaaacaagcugaggcaucugauuucagucaaauugggcaaaaucccaacaguagaaaacuccauuuuccacauggcagcauggagcggguccgcaugccaugaugguaaggaauggacauauaucggaguugauggcccugacaauaaugcauugcucaaaauaaaauauggagaagcauauacugacacauaccauuccuaugcaaacaacauccuaagaacacaagaaagugccugcaauugcaucgggggaaauuguuaucuuaugauaacugauggcucagcuucagguguuagugaaugcagauuucuuaagauucgagagggccgaauaauaaaagaaauauuuccaacaggaagaguaaaacauacugaggaaugcacaugcggauuugccagcaauaaaaccauagaaugugccuguagagauaacaguuacacagcaaaaagacccuuugucaaauuaaacguggaaacugauacagcagaaauaagauugaugugcacagauacuuauuuggacacccccagaccagaugauggaagcauaacaggcccuugugaaucuaaugggaacaaagggaguggaggcaucaagggaggauuuguucaccaaagaauggcauccaagauuggaaggugguacucucgaacgaugucuaaaacugaaaggauggggaugggacuguaugucaaguaugauggagacccaugggcugacagugaugcccuugcuuuuaguggaguaaugguuucaaugaaagaaccugguugguacuccuuuggcuucgaaauaaaagauaagaaaugcgauguccccuguauugggauagagaugguacaugaugguggaaaagagacuuggcacucagcagcaacagccauuuacuguuuaaugggcucaggacagcugcugugggacacugucacagguguugacauggcucuguaa

SEQ ID NO: 62040 - RNA, 1401 nt, Artificial Sequence
  derived and/or modified CDS sequence (wt) from neuraminidase__InfluenzaB__AHL92314
augcuaccuucaacuauacaaacguuaacccuauuucucacaucagggggaguguuauuaucacuauaugugucagcuucauugucauacuuacuauauucggauauauugcuaaaauuuucacaaacaaaaauaacugcaccaauaaugccacuggauugugcaaacgcaucaaauguucaggcugugaaccguucugcagcaaaaggggugacacuucuucucccagaaccggaguggacauacccucguuuaucuugcccgggcucaaccuuucagaaagcacuccuaauuagcccccauagauucggagaaaccaaaggaaacucagcucccuugauaauaagggaaccuuuuauugcuuguggaccaacggaaugcaaacacuuugcucuaacccauuaugcagcccaaccagggggauacuacaauggaacaagagaagacagaaacaagcugaggcaucuaauuucagucaaauugggaaaaaucccaacaguagaaaacuccauuuuccacauggcagcuuggagcggguccgcaugccaugaugguaaagaauggacauaugucggaguugauggccccgacaguaaugcauugcucaaaauaaaauauggagaagcauauacugacacauaccauuccuaugcaaaaaacauccuaaggacacaagaaagugccugcaauugcaucgggggagauuguuaucuuaugauaacugauggcccagcuucagggauuagugaaugcagauuccuuaagauucgagagggccgaauaauaaaagaaauauuuccaacaggaagaguaaaacauacugaggaaugcacaugcggauuugccagcaacaaaaccauagaaugugcuuguagagauaacaguuacacagcaaaaagacccuuugucaaauuaaauguggagacugauacagcggaaauaagauugaugugcacagagacuuauuuggacacccccagaccaaaugauggaagcauaacagggccuugcgaaucugauggggacaaagggaguggaggcaucaagggaggauuuguucaucaaagaauggcauccaagauuggaaggugguacucccgaacgaugucuaaaacuaaaagaauggggaugggacuguauguaaaguaugauggagacccauggacugacagugaagcccuugcucuuaguggaguaaugguuucaauggacgaaccugguugguauuccuuuggcuucgaaauaaaagauaagaaaugugauguccccuguauugggauagaaaugguacaugauggugggaaaacgacuuggcacucagcagcaacagccauuuacuguuuaaugggcucaggacaacugcugugggacacugucacagguguugauauggcucuguaa

SEQ ID NO: 62041 - RNA, 1401 nt, Artificial Sequence
  derived and/or modified CDS sequence (wt) from neuraminidase__InfluenzaB__AHL92325
augcuaccuucaacuauacaaacguuaacccuauuucucacaucagggggaguguuauuaucacuauaugugucagcuucauugucauacuuacuauauucggauauauugcuaaaauuuucacaaacagaaauaacugcaccaauaaugccauuggauugugcaaacgcaucaaauguucaggcugugaaccguucugcagcaaaaggggugacacuucuucucccagaaccggaguggacauacccucguuuaucuugcccgggcucaaccuuucagaaagcacuccuaauuagcccccauagauucggagaaaccaaaggaaacucagcucccuugauaauaagggaaccuuuuauugcuuguggaccaacggaaugcaaacacuuugcucuaacccauuaugcagcucaaccagggggauacuacaauggaacaagagaagacagaaacaagcugaggcaucuaauuucagucaaauugggcaaaaucccaacaguagagaacuccauuuuccauauggcagcuuggagcggguccgcaugccaugaugguaaagaauggacauauaucggaguugauggccccgacaguaaugcauuacucaaaauaaaauauggagaagcauauacugacacauaccauuccuaugcaaaaaacauccuaaggacacaagaaagugccugcaauugcaucgggggagauuguuaucuuaugauaacugauggcccagcuucagggauuagugaaugcagauuccuuaagauucgagagggccgaauaauaaaagaaauauuuccaacaggaagaguaaaacauacugaggaaugcacaugcggauuugccagcaacaaaaccauagaaugugcuuguagagauaacaguuacacagcaaaaagacccuuugucaaauuaaauguggagacugauacagcggaaauaagauugaugugcacagagacuuauuuggacacccccagaccaaaugauggaagcauaacagggccuugcgaaucugauggggacaaagggaguggaggcaucaagggaggauuuguucaucaaagaauggcauccaagauuggaaggugguacucucgaacgaugucuaaaacuaaaagaauggggaugggacuguauguaaaguaugauggagacccauggacugacagugaagcccuugcucuuaguggaguaaugguuucaaugggagaaccugguugguauuccuuuggcuucgaaauaaaagauaagaaaugugauguccccuguauugggauagaaaugguacaugauggugggaaaacgacuuggcacucagcagcaacagccauuuacuguuuaaugggcucaggacaacugcugugggacacugucacagguguugauauggcucuguaa

SEQ ID NO: 62042 - RNA, 1401 nt, Artificial Sequence; identical to SEQ ID NO: 60800
  derived and/or modified CDS sequence (wt) from neuraminidase__InfluenzaB__AHL92336

SEQ ID NO: 62043 - RNA, 1401 nt, Artificial Sequence
  derived and/or modified CDS sequence (wt) from neuraminidase__InfluenzaB__AHL92358
augcuaccuucaacuauacagacguuaacccuauuucucacaucagggggaguguuauuaucacuauaugugucagcuucauugucauacuuacuauauucggauauauugcuaaaauuuucacaaacagaaauaacugcaccaauaaugccauuggauugugcaaacgcaucaaauguucaggcugugaaccguucugcagcaaaaggggugacacuucuucucccagaaccggaguggacauacccucguuuaucuugcccgggcucaaccuuucagaaggcacuccuaauuagcccccauagauucggagaaaccaaaggaaacucagcucccuugauaauaagggaaccuuuuauugcuuguggaccaaaggaaugcaaacacuuugcucuaacccauuaugcagcucaaccagggggauacuacaauggaacaagagaagacagaaacaagcugaggcaucuaauuucagucaaauugggcaaaaucccaacaguagaaaacuccauuuuccacauggcagcuuggagcggguccgcaugccaugaugguaaagaauggacauaugucggaguugauggccccgacaguaaugcauugcucaaaauaaaauauggagaagcauauacugacacauaccauuccuaugcaaaaaacauccuaaggacacaagaaagugccugcaauugcaucgggggagauuguuaucuuaugauaacugauggcccagcuucagggauuagugaaugcagauuccuuaagauucgagagggccgaauaauaaaagaaauauuuccaacaggaagaguaaagcauacugaggaaugcacaugcggauuugccagcaacaaaaccauagaaugugcuuguagagauaacaguuacacagcaaaaagacccuuugucaaauuaaauguggagacugauacagcggaaauaagauugaugugcacagagacuuauuuggacacccccagaccaaaugauggaagcauaacagggccuugcgaaucugauggggacaaagggaguggaggcaucaagggaggauuuguucaucaaagaauggcauccaagauuggaaggugguacucucgaacgaugucuaaaacuaaaagaauggggaugggacuguauguaaaguaugauggagacccauggacugacagugaagcccuugcucuuaguggaguaaugguuucaauggaagaaccugguugguauuccuuuggcuucgaaauaaaagauaagaaaugugauguccccuguauugggauagaaaugguacaugauggugggaaaacgacuuggcacucagcagcaacagccauuuacuguuuaaugggcucaggacaacugcugugggacacugucacagguguugauauggcucuauaa

SEQ ID NO: 62044 - RNA, 1401 nt, Artificial Sequence; identical to SEQ ID NO: 62043
  derived and/or modified CDS sequence (wt) from neuraminidase__InfluenzaB__AHL92369

SEQ ID NO: 62045 - RNA, 1401 nt, Artificial Sequence
  derived and/or modified CDS sequence (wt) from neuraminidase__InfluenzaB__AHL92380
augcuaccuucaacuauacaaacguuaaccuuauuucucacaucagggggaguguuauuaucacuauaugugucagcuucauugucauacuuacuauauucggauauauugcuaaaauuuucacgaacagaaauaacugcaccaauaaugccauuggauugugcaaacgcaucaaauguucaggcugugaaccguucugcaacaaaaggggugaaacuucuucucccagaaccggaguggacguacccucguuuaucuugcccgggcucaaccuuucagaaagcacuccuaauuagcccccauagauucggagaaaccaaaggaaacucagcucccuugauaauaagggaaccuuuuauugcuuguggaccaaaggaaugcaaacauuuugcucuaacccauuaugcagcucaaccagggggauacuacaauggaacaagagaagacagaaacaagcugaggcaucuaauuucagucaaauugggcaaaaucccaacaguagaaaacucuauuuuccacauggcagcuuggagcggguccgcaugccaugaugguagagaauggacuuauaucggaguugauggccccgacaguaaugcauugcucaaaauaaaauauggagaagcauauacugacacauaccauuccuaugcaaaaaacauccuaaggacacaagaaagugccugcaauugcaucgggggagauuguuaucuuaugauaacugauggcccagcuucagggauuagugaaugcagauuccuuaagauucgagagggccgaauaauaaaagaaauauuuccaacaggaagaguaaaacauacugaggaaugcacaugcggauuugccagcaacaaaaccauagaaugugccuguagagauaacaguuacacagcaaaaagacccuuugucaaauuaaauguggagacugauacagcggaaauaagauugaugugcacagagacuuauuuggacacccccagaccaaaugauggaagcauaacagggccuugcgaaucuaauggggacaaagggaguggaggcaucaagggaggauuuguucaccaaagaauggcauccaagauuggaaggugguacucucgaacgaugucuaaaacuaaaagaauggggaugggacuguauguaaaguaugauggagacccauggacugacagugaagcccuugcucuuaguggaguaaugguuucaauggaagaaccugguugguauuccuuuggcuucgaaauaaaagauaagaaaugugauguccccuguauugggauagaaaugguacaugauggugggaaaacgacuuggcacucagcagcaacagccauuuacuguuuaaugggcucaggacaacugcugugggacacugucacagguguuaauaugacucuguaa

SEQ ID NO: 62046 - RNA, 1401 nt, Artificial Sequence
  derived and/or modified CDS sequence (wt) from neuraminidase__InfluenzaB__AHL92391
augcuaccuucaacuauacaaacguuaaccuuauuucucacaucagggggaguguuauuaucacuauaugugucagcuucauugucauacuuacuauauucggauauauugcuaaaauuuucacgaacagaaauaacugcaccaauaaugccauuggauugugcaaacgcaucaaauguucaggcugugaaccguucugcaacaaaaggggugacacuucuucucccagaaccggaguggacguacccucguuuaucuugcccgggcucaaccuuucagaaagcacuccuaauuagcccccauagauucggagaaaccaaaggaaacucagcucccuugauaauaagggaaccuuuuauugcuuguggaccaaaggaaugcaaacauuuugcucuaacccauuaugcagcucaaccagggggauacuacaauggaacaagagaagacagaagcaagcugaggcaucuaauuucagucaaauugggcaaaaucccaacaguagaaaacucuauuuuccacauggcagcuuggagcggguccgcaugccaugaugguagagaauggacuuauaucggaguugauggccccgacaguaaugcauugcucaaaauaaaauauggagaagcauauacugacacauaccauuccuaugcaaaaaacauccuaaggacacaagaaagugccugcaauugcaucgggggagauuguuaucuuaugauaacugauggcccagcuucagggauuagugaaugcagauuccuuaagauucgagagggccgaauaauaaaagaaauauuuccaacaggaagaguaaaacauacugaggaaugcacaugcggauuugccagcaacaaaaccauagaaugugccuguagagauaacaguuacacagcaaaaagacccuuugucaaauuaaauguggagacugauacagcggaaauaagauugaugugcacagagacuuauuuggacacccccagaccaaaugauggaagcauaacagggccuugcgaaucuaauggggacaaagggaguggaggcaucaagggaggauuuguucaccaaagaauggcauccaagauuggaaggugguacucucgaacgaugucuaaaacuaaaagaauggggaugggacuguauguaaaguaugauggagacccauggacugacagugaagcccuugcucuuaguggaguaaugguuucaauggaagaaccugguugguauuccuuuggcuucgaaauaaaagauaagaaaugugauguccccuguauugggauagaaaugguacaugauggugggaaaacgacuuggcacucagcagcaacagccauuuacuguuuaaugggcucaggacaacugcugugggacacugucacagguguuaauaugacucuguaa

SEQ ID NO: 62047 - RNA, 1401 nt, Artificial Sequence; identical to SEQ ID NO: 60829
  derived and/or modified CDS sequence (wt) from neuraminidase__InfluenzaB__AHL92402

SEQ ID NO: 62048 - RNA, 1401 nt, Artificial Sequence
  derived and/or modified CDS sequence (wt) from neuraminidase__InfluenzaB__AHL92413
augcuaccuucaacuauacaaacguuaaccuuauuucucacaucagggggaguguuauuaucacuauaugugucagcuucauugucauacuuacuauauucggauauauugcuaaaauuuucacgaacagaaauaacugcaccaauaaugccauuggauugugcaaacgcaucaaauguucaggcugugaaccguucugcaacaaaaggggugacacuucuucucccagaaccggaguggacguacccucguuuaucuugcccgggcucaaccuuucagaaagcacuccuaauuagcccccauagauucggagaaaccaaaggaaacucagcucccuuaauaauaagggaaccuuuuauugcuuguggaccaaaggaaugcaaacauuuugcucuaacccauuaugcagcucaaccagggggauacuacaauggaacaagagaagacagaaacaagcugaggcaucuaauuucagucaaauugggcaaaaucccaacaguagaaaacucuauuuuccacauggcagcuuggagcggguccgcaugccaugaugguagagaauggacuuauaucggaguugauggccccgacaguaaugcauugcucaaaauaaaauauggagaagcauauacugacacauaccauuccuaugcaaaaaacauccuaaggacacaagaaagugccugcaauugcaucgggggagauuguuaucuuaugauaacugauggcccagcuucagggauuagugaaugcagauuccuuaagauucgagagggccgaauaauaaaagaaauauuuccaacaggaagaguaaaacauacugaggaaugcacaugcggauuugccagcaacaaaaccauagaaugugccuguagagauaacaguuacacagcaaaaagacccuuugucaaauuaaauguggagacugauacagcggaaauaagauugaugugcacagagacuuauuuggacacccccagaccaaaugauggaagcauaacagggccuugcgaaucuaauggggacaaagggaguggaggcaucaagggaggauuuguucaccaaagaauggcauccaagauuggaaggugguacucucgaacgaugucuaaaacuaaaagaauggggaugggacuguauguaaaguaugauggagacccauggacugacagugaagcccuugcucuuaguggaguaaugguuucaauggaagaaccugguugguauuccuuuggcuucgaaauaaaagauaagaaaugugauguccccuguauugggauagaaaugguacaugauggugggaaaacgacuuggcacucagcagcaacagccauuuacuguuuaaugggcucaggacaacugcugugggacacugucacagguguuaauaugacucuguaa

SEQ ID NO: 62049 - RNA, 1401 nt, Artificial Sequence; identical to SEQ ID NO: 60829
  derived and/or modified CDS sequence (wt) from neuraminidase__InfluenzaB__AHL92424

SEQ ID NO: 62050 - RNA, 1401 nt, Artificial Sequence
  derived and/or modified CDS sequence (wt) from neuraminidase__InfluenzaB__AHL92435
augcuaccuucaacuauacaaacguuaacccuauuucucacaucagggggaguguuauuaucacuauaugugucagcuucauugucauacuuacuauauucggauauauugcuaaaauuuucacaaacagaaauaacugcaccaauaaugccauuggauugugcaaacgcaucaaauguucaggcugugaaccguucugcagcaaaaggggugacacuucuucucccagaaccggaguggacauacccucguuuaucuugcccgggcucaaccuuucagaaagcacuccuaauuagcccccauagauucggagaaaccaaaggaaacucagcucccuugauaauaagggaaccuuuuauugcuuguggaccaacggaaugcaaacacuuugcucuaacccauuaugcagcucaaccagggggguacuacaauggaacaagagaagacagaaacaagcugaggcaucuaauuucagucaaauugggcaaaaucccaacaguagaaaacuccauuuuccauauggcagcuuggagcggguccgcaugccaugaugguaaagaauggacauauaucggaguugauggccccgacaguaaugcauuacucaaaauaaaauauggagaagcauauacugacacauaccauuccuaugcaaaaaacauccuaaggacacaagaaagugcaugcaauugcaucgggggagauuguuaucuuaugauaacugauggcccagcuucagggauuagugaaugcagauuccuuaagauucgagagggccgaauaauaaaagaaauauuuccaacaggaagaguaaaacauacugaggaaugcacaugcggauuugccagcaacaaaaccauagaaugugcuuguagagauaacaguuacacagcaaaaagacccuuugucaaauuaaauguggagacugauacagcggaaauaagauugaugugcacagagacuuauuuggacacccccagaccaaaugauggaagcauaacagggccuugcgaaucugauggggacaaagggaguggaggcaucaagggaggauuuguucaucaaagaauggcauccaagauuggaaggugguacucucgaacgaugucuaaaacuaaaagaauggggaugggacuguauguaaaguaugauggagacccauggacugacagugaagcccuugcucuuaguggaguaaugauuucgauggaagaaccugguugguauuccuuuggcuucgaaauaaaagauaagaaaugugauguccccuguauugggauagaaaugguacaugauggugggaaaacgacuuggcacucagcagcaacagccauuuacuguuuaaugggcucaggacaacugcugugggacacugucacagguguugauauggcucuguaa

SEQ ID NO: 62051 - RNA, 1401 nt, Artificial Sequence; identical to SEQ ID NO: 60829
  derived and/or modified CDS sequence (wt) from neuraminidase__InfluenzaB__AHL92446

SEQ ID NO: 62052 - RNA, 1401 nt, Artificial Sequence; identical to SEQ ID NO: 60829
  derived and/or modified CDS sequence (wt) from neuraminidase__InfluenzaB__AHL92457

SEQ ID NO: 62053 - RNA, 1401 nt, Artificial Sequence
  derived and/or modified CDS sequence (wt) from neuraminidase__InfluenzaB__AHL92468
augcuaccuucaaccauacaaacguuaaccuuauuucucacaucagggggaguguuauuaucacuauaugugucagcuucauugucauacuuacuauauucggauauauugcuaaaauuuucacgaacagaaauaacugcaccaauaaugccauuggauugugcaaacgcaucaaauguucaggcugugaaccguucugcaacaaaaggggugacacuucuucucccagaaccggaguggacguacccucguuuaucuugcccgggcucaaccuuucagaaagcacuccuaauuagcccccauagauucggagaaaccaaaggaaacucagcucccuugauaauaagggaaccuuuuauugcuuguggaccaaaggaaugcaaacauuuugcucuaacccauuaugcagcucaaccagggggauacuacaauggaacaagagaagacagaaacaagcugaggcaucuaauuucagucaaauugggcaaaaucccaacaguagaaaacucuauuuuccacauggcagcuuggagcggguccgcaugccaugaugguagagaauggacuuauaucggaguugauggccccgacaguaaugcauugcucaaaauaaaauauggagaagcauauacugacacauaccauuccuaugcaaaaaacauccuaaggacacaagaaagugccugcaauugcaucgggggagauuguuaucuuaugauaacugauggcccagcuucagggauuagugaaugcagauuccuuaagauucgagagggccgaauaauaaaagaaauauuuccaacaggaagaguaaaacauacugaggaaugcacaugcggauuugccagcaacaaaaccauagaaugugccuguagagauaacaguuacacagcaaaaagacccuuugucaaauuaaauguggagacugauacagcggaaauaagauugaugugcacagagacuuauuuggacacccccagaccaaaugauggaagcauaacagggccuugcgaaucuaauggggacaaagggaguggaggcaucaagggaggauuuguucaccaaagaauggcauccaagauuggaaggugguacucucgaacgaugucuaaaacuaaaagaauggggaugggacuguauguaaaguaugauggagacccauggacugacagugaagcccuugcucuuaguggaguaaugguuucaauggaagaaccugguugguauuccuuuggcuucgaaauaaaagauaagaaaugugauguccccuguauugggauagaaaugguacaugauggugggaaaacgacuuggcacucagcagcaacagccauuuacuguuuaaugggcucaggacaacugcugugggacacugucacagguguuaauaugacucuguaa

SEQ ID NO: 62054 - RNA, 1401 nt, Artificial Sequence; identical to SEQ ID NO: 60829
  derived and/or modified CDS sequence (wt) from neuraminidase__InfluenzaB__AHL92479

SEQ ID NO: 62055 - RNA, 1401 nt, Artificial Sequence; identical to SEQ ID NO: 60800
  derived and/or modified CDS sequence (wt) from neuraminidase__InfluenzaB__AHL92490

SEQ ID NO: 62056 - RNA, 1401 nt, Artificial Sequence; identical to SEQ ID NO: 60829
  derived and/or modified CDS sequence (wt) from neuraminidase__InfluenzaB__AHL92501

SEQ ID NO: 62057 - RNA, 1401 nt, Artificial Sequence
  derived and/or modified CDS sequence (wt) from neuraminidase__InfluenzaB__AHL92512
augcuaccuucaacuauacaaacguuaaccuuauuucucacaucagggggaguguuauuaucacuauaugugucagcuucauugucauacuuacuauauucggauauauugcuaaaauuuucacgaacagaaauaacugcaccaauaaugccauuggauugugcaaacgcaucaaauguucaggcugugaaccguucugcaacaaaaggggugacacuucuucucccagaaccggaguggacguacccucguuuaucuugcccgggcucaaccuuucagaaagcacuccuaauuagcccccauagauucggagaaaccaaaggaaacucagcucccuugauaauaagggaaccuuuuauugcuuguggaccaaaggaaugcaaacauuuugcucuaacccauuaugcagcucaaccagggggauacuacaauggaacaagagaagacagaaacaagcugaggcaucuaauuucagucaaauugggcaaaaucccaacaguagaaaacucuauuuuccacaugguagcuuggagcggguccgcaugccaugaugguagagaauggacuuauaucggaguugauggccccgacaguaaugcauugcucaaaauaaaauauggagaagcauauacugacacauaccauuccuaugcaaaaaacauccuaaggacacaagaaagugccugcaauugcaucgggggagauuguuaucuuaugauaacugauggcccagcuucagggauuagugaaugcagauuccuuaagauucgagagggccgaauaauaaaagaaauauuuccaacaggaagaguaaaacauacugaggaaugcacaugcggauuugccagcaacaaaaccauagaaugugccuguagagauaacaguuacacagcaaaaagacccuuugucaaauuaaauguggagacugauacagcggaaauaagauugaugugcacagagacuuauuuggacacccccagaccaaaugauggaagcauaacagggccuugcgaaucuaauggggacaaagggaguggaggcaucaagggaggauuuguucaccaaagaauggcauccaagauuggaaggugguacucucgaacgaugucuaaaacuaaaagaauggggaugggacuguauguaaaguaugauggagacccauggacugacagugaagcccuugcucuuaguggaguaaugguuucaauggaagaaccugguugguauuccuuuggcuucgaaauaaaagauaagaaaugugauguccccuguauugggauagaaaugguacaugauggugggaaaacgacuuggcacucagcagcaacagccauuuacuguuuaaugggcucaggacaacugcugugggacacugucacagguguuaauaugacucuguaa

SEQ ID NO: 62058 - RNA, 1401 nt, Artificial Sequence
  derived and/or modified CDS sequence (wt) from neuraminidase__InfluenzaB__AHL92523
augcuaccuucaacuauacaaacguuaaccuuauuucucacaucagggggaguguuauuaucacuauaugugucagcuucauugucauacuuacuauauucggauauauugcuaaaauuuucacgaacagaaauaacugcaccaauaaugccauuggauugugcaaacgcaucaaauguucaggcugugaaccguucugcaacaaaaggggugacacuucuucucccagaaccggaguggacguacccucguuuaucuugcccgggcucaaccuuucagaaagcacuccuaauuagcccccauagauucggagaaaccaaaggaaacucagcucccuugauaauaagggaaccuuuuauugcuuguggaccaaaggaaugcaaacauuuugcucuaacccauuaugcagcucaaccagggggauacuacaauggaacaagagaagacagaaacaagcugaggcaucuaauuucagucaaauugggcaaaaucccaacaguagaaaacucuauuuuccacauggcagcuuggagcggguccgcaugccaugaugguagagaauggacuuauaucggaguugauggccccgacaguaaugcauugcucaaaauaaaauauggagaagcauauacugacacauaccauuccuaugcaaaaaacauccuaaggacacaagaaagugccugcaauugcaucgggggagauuguuaucuuaugauaacugauggcccagcuucagggauuagugaaugcagauuccuuaagauucgagagggccgaauaauaaaagaaauauuuccaacaggaagaguaaaacauacugaggaaugcacaugcggauuugccagcaacaaaaccauagaaugugccuguagagauaacaguuacacagcaaaaagacccuuugucaaauuaaauguggagacugauacagcggaaauaagauugaugugcacagagacuuauuuggacacccccagaccaaaugauggaagcauaacagggccuugcgaaucuaauggggacaaagggaguggaggcaucaagggaggauuuguucaccaaagaauggcauccaagauuggaaggugguacucucgaacgaugucuaaaacuaaaagaauggggaugggacuguauguaaaguaugauggagacccauggacugacagugaagcccuugcucuuaguggaguaaugguuucaauggaagaaccugguugguauuccuuuggcuucgaaauaaaagauaagaaaugcgauguccccuguauugggauagaaaugguacaugauggugggaaaacgacuuggcacucagcagcaacagccauuuacuguuuaaugggcucaggacaacugcugugggacacugucacagguguuaauaugacucuguaa

SEQ ID NO: 62059 - RNA, 1401 nt, Artificial Sequence; identical to SEQ ID NO: 62058
  derived and/or modified CDS sequence (wt) from neuraminidase__InfluenzaB__AHL92534

SEQ ID NO: 62060 - RNA, 1401 nt, Artificial Sequence; identical to SEQ ID NO: 60800
  derived and/or modified CDS sequence (wt) from neuraminidase__InfluenzaB__AHL92545

SEQ ID NO: 62061 - RNA, 1401 nt, Artificial Sequence; identical to SEQ ID NO: 60829
  derived and/or modified CDS sequence (wt) from neuraminidase__InfluenzaB__AHL92556

SEQ ID NO: 62062 - RNA, 1401 nt, Artificial Sequence; identical to SEQ ID NO: 60829
  derived and/or modified CDS sequence (wt) from neuraminidase__InfluenzaB__AHL92567

SEQ ID NO: 62063 - RNA, 1401 nt, Artificial Sequence; identical to SEQ ID NO: 60829
  derived and/or modified CDS sequence (wt) from neuraminidase__InfluenzaB__AHL92578

SEQ ID NO: 62064 - RNA, 1401 nt, Artificial Sequence; identical to SEQ ID NO: 60823
  derived and/or modified CDS sequence (wt) from neuraminidase__InfluenzaB__AHL92589

SEQ ID NO: 62065 - RNA, 1401 nt, Artificial Sequence; identical to SEQ ID NO: 60829
  derived and/or modified CDS sequence (wt) from neuraminidase__InfluenzaB__AHL92600

SEQ ID NO: 62066 - RNA, 1401 nt, Artificial Sequence
  derived and/or modified CDS sequence (wt) from neuraminidase__InfluenzaB__AHL92611
augcuaccuucaacuauacaaacguuaacccuauuucucacaucagggggaguguuauuaucacuauaugugucagcuucauugucauacuuacuauauucggauauauugcuaaaauuuucacaaacagaaauaacugcaccaauaaugccauuggauugugcaaacgcaucaaauguucaggcugugaaccguucugcagcaaaaggggugacacuucuucucccagaaccggaguggacauacccucguuuaucuugcccgggcucaaccuuucagaaagcacuccuaauuagcccccauagauucggagaaaccaaaggaaacucagcucccuugauaauaagggaaccuuuuauugcuuguggaccaacggaaugcaaacacuuugcucuaacccauuaugcagcucaaccagggggauacuacaauggaacaagagaagacagaaacaagcugaggcaucuaauuucagucaaauugggcaaaaucccaacaguagaaaacuccauuuuccauauggcagcuuggagcggguccgcaugccaugaugguaaagaauggacauauaucggaguugauggccccgacaguaaugcauuacucaaaauaaaauauggggaagcauauacugacacauaccauuccuaugcaaaaaacauccuaaggacacaagaaagugccugcaauugcaucgggggagauuguuaucuuaugauaacugauggcccagcuucagggauuagugaaugcagauuccuuaagauucgagagggucgaauaauaaaagaaauauuuccaacaggaagaguaaaacauacugaggaaugcacaugcggauuugccagcaacaaaaccauagaaugugcuuguagagauaacagguacacagcaaaaagacccuuugucaaauuaaauguggagacugauacagcggaaauaagauugaugugcacagagacuuauuuggacacccccagaccaaaugauggaagcauaacagggccuugcgaaucugauggggacaaagggaguggaggcaucaagggaggauuuguucaucaaagaauggcauccaagauuggaaggugguacucucgaacgaugucuaaaacuaaaagaauggggaugggacuguauguaaaauaugauggagacccauggacugacaguggagcccuugcucuuaguggaguaaugguuucgauagaagaaccugguugguauuccuuuggcuucgaaauaaaagauaagaaaugugauguccccuguauugggauagaaaugguacaugauggugggaaaacgacuuggcacucagcagcaacagccauuuacuguuuaaugggcucaggacaacugcugugggacacugucacagguguugauauggcucuguaa

SEQ ID NO: 62067 - RNA, 1401 nt, Artificial Sequence
  derived and/or modified CDS sequence (wt) from neuraminidase__InfluenzaB__AHL92622
augcuaccuucaacuauacaaacguuaaccuuauuucucacaucagggggaguguuauuaucacuauaugugucagcuucauugucauacuuacuauauucggauauauugcuaaaauuuucacgaacagaaauaacugcaccaauaaugccauuggauugugcaaacgcaucaaauguucaggcugugaaccguucugcaacaaaaggggugacauuucuucucccagaaccggaguggacguacccucguuuaucuugcccgggcucaaccuuucagaaagcacuccuaauuagcccccauagauucggagaaaccaaaggaaacucagcucccuugauaauaagggaaccuuuuauugcuuguggaccaaaggaaugcaaacauuuugcucuaacccauuaugcagcucaaccagggggauacuacaauggaacaagagaagacagaaacaagcugaggcaucuaauuucagucaaauugggcaaaaucccaacaguagaaaacucuauuuuccacauggcagcuuggagcggguccgcaugccaugaugguagagaauggacuuauaucggaguugauggccccgacaguaaugcauugcucaaaauaaaauauggagaagcauauacugacacauaccauuccuaugcaaaaaacauccuaaggacacaagaaagugccugcaauugcaucgggggagauuguuaucuuaugauaacugauggcccagcuucagggauuagugaaugcagauuccuuaagauucgagagggccgaauaauaaaagaaauauuuccaacaggaagaguaaaacauacugaggaaugcacaugcggauuugccagcaacaaaaccauagaaugugccuguagagauaacaguuacacagcaaaaagacccuuugucaaauuaaauguggagacugauacagcggaaauaagauugaugugcacagagacuuauuuggacacccccagaccaaaugauggaagcauaacagggccuugcgaaucuaauggggacaaagggaguggaggcaucaagggaggauuuguucaccaaagaauggcauccaagauuggaaggugguacucucgaacgaugucuaaaacuaaaagaauggggaugggacuguauguaaaguaugauggagacccauggacugacagugaagcccuugcucuuaguggaguaaugguuucaauggaagaaccugguugguauuccuuuggcuucgaaauaaaagauaagaaaugugauguccccuguauugggauagaaaugguacaugauggugggaaaacgacuuggcacucagcagcaacagccauuuacuguuuaaugggcucaggacaacugcugugggacacugucacagguguuaauaugacucuauaa

SEQ ID NO: 62068 - RNA, 1401 nt, Artificial Sequence
  derived and/or modified CDS sequence (wt) from neuraminidase__InfluenzaB__AHL92633
augcuaccuucaacuauacaaacguuaaccuuauuucucacaucagggggaguguuauuaucacuauaugugucagcuucauugucauacuuacuauauucggauauauugcuaaaauuuucacgaacagaaauaacugcaccaauaaugccauuggauugugcaaacgcaucaaauguucaggcugugaaccguucugcaacaaaaggggugacauuucuucucccagaaccggaguggacguacccucguuuaucuugcccgggcucaaccuuucagaaagcacuccuaauuagcccccauagauucggagaaaccaaaggaaacucagcucccuugauaauaagggaaccuuuuauugcuuguggaccaaaggaaugcaaacauuuugcucuaacccauuaugcagcucaaccagggggauacuacaauggaacaagagaagacagaaacaagcugaggcaucuaauuucagucaaauugggcaaaaucccaauaguagaaaacucuauuuuccacauggcagcuuggagcggguccgcaugccaugaugguagagaauggacuuauaucggaguugauggccccgacaguaaugcauugcucaaaauaaaauauggagaagcauauacugacacauaccauuccuaugcaaaaaacauccuaaggacacaagaaagugccugcaauugcaucgggggagauuguuaucuuaugauaacugauggcccagcuucagggauuagugaaugcagauuccuuaagauucgagagggccgaauaauaaaagaaauauuuccaacaggaagaguaaaacauacugaggaaugcacaugcggauuugccagcaacaaaaccauagaaugugccuguagagauaacaguuacacagcaaaaagacccuuugucaaauuaaauguggagacugauacagcggaaauaagauugaugugcacagagacuuauuuggacacccccagaccaaaugauggaagcauaacagggccuugcgaaucuaauggggacaaagggaguggaggcaucaagggaggauuuguucaccaaagaauggcauccaagauuggaaggugguacucucgaacgaugucuaaaacuaaaagaauggggaugggacuguauguaaaguaugauggagacccauggacugacagugaagcccuugcucuuaguggaguaaugguuucaauggaagaaccugguugguauuccuuuggcuucgaaauaaaagauaagaaaugugauguccccuguauugggauagaaaugguacaugauggugggaaaacgacuuggcacucagcagcaacagccauuuacuguuuaaugggcucaggacaacugcugugggacacugucacagguguuaauaugacucuguaa

SEQ ID NO: 62069 - RNA, 1401 nt, Artificial Sequence; identical to SEQ ID NO: 60800
  derived and/or modified CDS sequence (wt) from neuraminidase__InfluenzaB__AHL92644

SEQ ID NO: 62070 - RNA, 1401 nt, Artificial Sequence; identical to SEQ ID NO: 60823
  derived and/or modified CDS sequence (wt) from neuraminidase__InfluenzaB__AHL92655

SEQ ID NO: 62071 - RNA, 1401 nt, Artificial Sequence
  derived and/or modified CDS sequence (wt) from neuraminidase__InfluenzaB__AHL92666
augcuaccuucaacuauacaaacguuaaccuuauuucucacaucagggggaguguuauuaucacuauaugugucagcuucauuaucauacuuacuauauucggauauauugcuaaaauuuucacgaacagaaauaacugcaccaauaaugccauuggauugugcaaacgcaucaaauguucaggcugugaaccguucugcaacaaaaggggugacacuucuucucccagaaccggaguggacguacccucguuuaucuugcccgggcucaaccuuucagaaagcacuccuaauuagcccccauagauucggagaaaccaaaggaaacucagcucccuugauaauaagggaaccuuuuauugcuuguggaccaaaggaaugcaaacauuuugcucuaacccauuaugcagcucaaccagggggauacuacaauggaacaagagaagacagaaacaagcugaggcaucuaauuucagucaaauugggcaaaaucccaacaguagaaaacucuauuuuccacauggcagcuuggagcggguccgcaugccaugaugguagagaauggacuuauaucggaguugauggccccgacaguaaugcauugcucaaaauaaaauauggagaagcauauacugacacauaccauuccuaugcaaaaaacauccuaaggacacaagaaagugccugcaauugcaucgggggagauuguuaucuuaugauaacugauggcccagcuucagggauuagugaaugcagauuccuuaagauucgagagggccgaauaauaaaagaaauauuuccaacaggaagaguaaaacauacugaggaaugcacaugcggauuugccagcaacaaaaccauagaaugugccuguagagauaacaguuacacagcaaaaagacccuuugucaaauuaaauguggagacugauacagcggaaauaagauugaugugcacagagacuuauuuggacacccccagaccaaaugauggaagcauaacagggccuugcgaaucuaauggggacaaagggaguggaggcaucaagggaggauuuguucaccaaagaauggcauccaagauuggaaggugguacucucgaacgaugucuaaaacuaaaagaauggggaugggacuguauguaaaguaugauggagacccauggacugacagugaagcccuugcucuuaguggaguaaugguuucaauggaagaaccugguugguauuccuuuggcuucgaaauaaaagauaagaaaugugauguccccuguauugggauagaaaugguacaugauggugggaaaacgacuuggcacucagcagcaacagccauuuacuguuuaaugggcucaggacaacugcugugggacacugucacagguguuaauaugacucuguaa

SEQ ID NO: 62072 - RNA, 1401 nt, Artificial Sequence; identical to SEQ ID NO: 60829
  derived and/or modified CDS sequence (wt) from neuraminidase__InfluenzaB__AHL92677

SEQ ID NO: 62073 - RNA, 1401 nt, Artificial Sequence; identical to SEQ ID NO: 60800
  derived and/or modified CDS sequence (wt) from neuraminidase__InfluenzaB__AHL92688

SEQ ID NO: 62074 - RNA, 1401 nt, Artificial Sequence; identical to SEQ ID NO: 60829
  derived and/or modified CDS sequence (wt) from neuraminidase__InfluenzaB__AHL92699

SEQ ID NO: 62075 - RNA, 1401 nt, Artificial Sequence; identical to SEQ ID NO: 60830
  derived and/or modified CDS sequence (wt) from neuraminidase__InfluenzaB__AHL92710

SEQ ID NO: 62076 - RNA, 1401 nt, Artificial Sequence; identical to SEQ ID NO: 60829
  derived and/or modified CDS sequence (wt) from neuraminidase__InfluenzaB__AHL92721

SEQ ID NO: 62077 - RNA, 1401 nt, Artificial Sequence; identical to SEQ ID NO: 60829
  derived and/or modified CDS sequence (wt) from neuraminidase__InfluenzaB__AHL92732

SEQ ID NO: 62078 - RNA, 1401 nt, Artificial Sequence; identical to SEQ ID NO: 60829
  derived and/or modified CDS sequence (wt) from neuraminidase__InfluenzaB__AHL92743

SEQ ID NO: 62079 - RNA, 1401 nt, Artificial Sequence; identical to SEQ ID NO: 60829
  derived and/or modified CDS sequence (wt) from neuraminidase__InfluenzaB__AHL92754

SEQ ID NO: 62080 - RNA, 1401 nt, Artificial Sequence; identical to SEQ ID NO: 60829
  derived and/or modified CDS sequence (wt) from neuraminidase__InfluenzaB__AHL92765

SEQ ID NO: 62081 - RNA, 1401 nt, Artificial Sequence
  derived and/or modified CDS sequence (wt) from neuraminidase__InfluenzaB__AHL92776
augcuaccuucaacuauacaaacguuaaccuuauuucucacaucagggggaguguuauuaucacuauaugugucagcuucauugucauacuuacuauauucggauauauugcuaaaauuuucacgaacagaaauaacugcaccaauaaugccauuggauugugcaaacgcaucaaauguucaggcugugaaccguucugcaacaaaaggggugacacuucuucucccagaaccggaguggacguacccucguuuaucuugcccgggcucaaccuuucagaaagcacuccuaauuagcccccauagauucggagaaaccaaaggaaacucagcucccuugauaauaagggaaccuuuuauugcuuguggaccaaaggaaugcaaacauuuugcucuaacccauuaugcagcucaacccgggggauacuacaauggaacaagagaagacagaaacaagcugaggcaucuaauuucagucaaauugggcaaaaucccaacaguagaaaacucuauuuuccacauggcagcuuggagcggguccgcaugccaugaugguagagaauggacuuauaucggaguugauggccccgacaguaaugcauugcucaaaauaaaauauggagaagcauauacugacacauaccauuccuaugcaaaaaacauccuaaggacacaagaaagugccugcaauugcaucgggggagauuguuaucuuaugauaacugauggcccagcuucagggauuagugaaugcagauuccuuaagauucgagagggccgaauaauaaaagaaauauuuccaacaggaagaguaaaacauacugaggaaugcacaugcggauuugccagcaacaaaaccauagaaugugccuguagagauaacaguuacacagcaaaaagacccuuugucaaauuaaauguggagacugauacagcggaaauaagauugaugugcacagagacuuauuuggacacccccagaccaaaugauggaagcauaacagggccuugcgaaucuaauggggacaaagggaguggaggcaucaagggaggauuuguucaccaaagaauggcauccaagauuggaaggugguacucucgaacgaugucuaaaacuaaaagaauggggaugggacuguauguaaaguaugauggagacccauggacugacagugaagcccuugcucuuaguggaguaaugguuucaauggaagaaccugguugguauuccuuuggcuucgaaauaaaagauaagaaaugugauguccccuguauugggauagaaaugguacaugauggugggaaaacgacuuggcacucagcagcaacagccauuuacuguuuaaugggcucaggacaauugcugugggacacugucacagguguuaauaugacucuguaa

SEQ ID NO: 62082 - RNA, 1401 nt, Artificial Sequence
  derived and/or modified CDS sequence (wt) from neuraminidase__InfluenzaB__AHL92787
augcuaccuucaacuauacaaacguuaaccuuauuucucacaucagggggaguguuauuaucacuauaugugucagcuucauugucauacuuacuauauucggauauauugcuaaaauuuucacgaacagaaauaacugcaccaauaaugccauuggauugugcaaacgcaucaaauguucaagcugugaaccguucugcaacaaaaggggugacacuucuucucccagaaccggaguggacguacccucguuuaucuugcccgggcucaaccuuucagaaagcacuccuaauuagcccccauagauucggagaaaccaaaggaaacucagcucccuugauaauaagggaaccuuuuauugcuuguggaccaaaggaaugcaaacauuuugcucuaacccauuaugcagcucaaccagggggauacuacaauggaacaagagaagacagaaacaagcugaggcaucuaauuucagucaaauugggcaaaaucccaacaguagaaaacucuauuuuccacauggcagcuuggagcggguccgcaugccaugaugguagagaauggacuuauaucggaguugauggccccgacaguaaugcauugcucaaaauaaaauauggagaagcauauacugacacauaccauuccuaugcaaaaaacauccuaaggacacaagaaagugccugcaauugcaucgggggagauuguuaucuuaugauaacugauggcccagcuucagggauuagugaaugcagauuccuuaagauucgagagggccgaauaauaaaagaaauauuuccaacaggaagaguaaaacauacugaggaaugcacaugcggauuugccagcaacaaaaccauagaaugugccuguagagauaacaguuacacagcaaaaagacccuuugucaaauuaaauguggagacugauacagcggaaauaagauugaugugcacagagacuuauuuggacacccccagaccaaaugauggaagcauaacagggccuugcgaaucuaauggggacaaagggaguggaggcaucaagggaggauuuguucaccaaagaauggcauccaagauuggaaggugguacucucgaacgaugucuaaaacuaaaagaauggggaugggacuguauguaaaguaugauggagacccauggacugacagugaagcccuugcucuuaguggaguaaugguuucaauggaagaaccugguugguauuccuuuggcuucgaaauaaaagauaagaaaugugauguccccuguauugggauagaaaugguacaugauggugggaaaacgacuuggcacucagcagcaacagccauuuacuguuuaaugggcucaggacaacugcugugggacacugucacagguguuaauaugacucuguaa

SEQ ID NO: 62083 - RNA, 1401 nt, Artificial Sequence; identical to SEQ ID NO: 60829
  derived and/or modified CDS sequence (wt) from neuraminidase__InfluenzaB__AHL92798

SEQ ID NO: 62084 - RNA, 1401 nt, Artificial Sequence
  derived and/or modified CDS sequence (wt) from neuraminidase__InfluenzaB__AHL92809
augcuaccuucaacuauacaaacguuaaccuuauuucucacaucagggggaguguuauuaucacuauaugugucagcuucauugucauacuuacuauauucggauauauugcuaaaauuuucacgaacagaaauaacugcaccaauaaugccauuggauugugcaaacgcaucaaauguucaggcugugaaccguucugcaauaaaaggggugacacuucuucucccagaaccggaguggacguacccucguuuaucuugcccgggcucaaccuuucagaaagcacuccuaauuagcccccauagauucggagaaaccaaaggaaacucagcucccuugauaauaagggaaccuuuuauugcuuguggaccaaaggaaugcaaacauuuugcucuaacccauuaugcagcucaaccagggggauacuacaauggaacaagagaagacagaaacaagcugaggcaucuaauuucagucaaauugggcaaaaucccaacaguagaaaacucuauuuuccacauggcagcuuggagcggguccgcaugccaugaugguagagaauggacuuauaucggaguugauggccccgacaguaaugcauugcucaaaauaaaauauggggaagcauauacugacacauaccauuccuaugcaaaaaacauccuaaggacacaagaaagugccugcaauugcaucgggggagauuguuaucuuaugauaacugauggcccagcuucagggauuagugaaugcagauuccuuaagauucgagagggccgaauaauaaaagaaauauuuccaacaggaagaguaaaacauacugaggaaugcacaugcggauuugccagcaacaaaaccauagaaugugccuguagagauaacaguuacacagcaaaaagacccuuugucaaauuaaauguggagacugauacagcggaaauaagauugaugugcacagagacuuauuuggacacccccagaccaaaugauggaagcauaacagggccuugcgaaucuaauggggacaaagggaguggaggcaucaagggaggauuuguucaccaaagaauggcauccaagauuggaaggugguacucucgaacgaugucuaaaacuaaaagaauggggaugggacuguauguaaaguaugauggagacccauggacugacagugaagcccuugcucuuaguggaguaaugguuucaauggaagaaccugguugguauuccuuuggcuucgaaauaaaagauaagaaaugugauguccccuguauugggauagaaaugguacaugauggugggaaaacgacuuggcacucagcagcaacagccauuuacuguuuaaugggcucaggacaacugcugugggacacugucacagguguuaauaugacucuguaa

SEQ ID NO: 62085 - RNA, 1401 nt, Artificial Sequence
  derived and/or modified CDS sequence (wt) from neuraminidase__InfluenzaB__AHL92820
augcuaccuucaacuauacaaacguuaaccuuauuucucacaucagggggaguguuauuaucacuauaugugucagcuucauugucauacuuacuauauucggauauauugcuaaaauuuucacgaacagaaauaacugcaccaauaaugccauuggauugugcaaacgcaucaaauguucaggcugugaaccguucugcaacaaaaggggugacacuucuucucccagaaccggaguggacguacccucguuuaucuugcccgggcucaaccuuucagaaagcacuccuaauuagcccccauagauucggagaaaccaaaggaaacucagcucccuugauaauaagggaaccuuuuauugcuuguggaccaaaggaaugcaaacauuuugcucuaacccauuacgcagcucaaccagggggauacuacaauggaacaagagaagacagaaacaaacugaggcaucuaauuucagucaaauugggcaaaaucccaacaguagaaaacucuauuuuccacauggcagcuuggagcggguccgcaugccaugaugguagagaauggacuuauaucggaguugauggccccgacaguaaugcauugcucaaaauaaaauauggagaagcauauacugacacauaccauuccuaugcaaaaaacauccuaaggacacaagaaagugccugcaauugcaucgggggagauuguuaucuuaugauaacugauggcccagcuucagggauuagugaaugcagauuccuuaagauucgagagggccgaauaauaaaagaaauauuuccaacaggaagaguaaaacauacugaggaaugcacaugcggauuugccagcaacaaaaccauagaaugugccuguagagauaacaguuacacagcaaaaagacccuuugucaaauuaaauguggagacugauacagcggaaauaagauugaugugcacagagacuuauuuggacacccccagaccaaaugauggaagcauaacagggccuugcgaaucuaauggggacaaagggaguggaggcaucaagggaggauuuguucaccaaagaauggcauccaagauuggaaggugguacucucgaacgaugucuaaaacuaaaagaauggggaugggacuguauguaaaguaugauggagacccauggaccgacagugaagcccuugcucuuaguggaguaaugguuucaauggaagaaccugguugguauuccuuuggcuucgaaauaaaagauaagaaaugugauguccccuguauugggauagaaaugguacaugauggugggaaaaagacuuggcacucagcagcaacagccauuuacuguuuaaugggcucaggacaacugcugugggacacugucacagguguuaauaugacucuguaa

SEQ ID NO: 62086 - RNA, 1401 nt, Artificial Sequence
  derived and/or modified CDS sequence (wt) from neuraminidase__InfluenzaB__AHL92842
augcuaccuucaacuauacaaacguuaaccuuauuucucacaucagggggaguguuauuaucacuauaugugucagcuucauugucauacuuacuauauucggauauauugcuaaaauuuucacgaacagaaauaacugcaccaauaaugccauuggauugugcaaacgcaucaaauguucaggcugugaaccguucuacaacaaaaggggugacacuucuucucccagaaccggaguggacguacccucguuuaucuugcccgggcucaaccuuucagaaagcacuccuaauuagcccccauagauucggagaaaccaaaggaaacucagcucccuugauaauaagggaaccuuuuauugcuuguggaccaaaggaaugcaaacauuuugcucuaacccauuaugcagcucaaccagggggauacuacaauggaacaagagaagacagaaacaagcugaggcaucuaauuucagucaaauugggcaaaaucccaacaguagaaaacucuauuuuccacauggcagcuuggagcggguccgcaugccaugaugguagagaauggacuuauaucggaguugauggccccgacaguaaugcauugcucaaaauaaaauauggagaagcauauacugacacauaccauuccuaugcaaaaaacauccuaaggacacaagaaagugccugcaauugcaucgggggagauuguuaucuuaugauaacugauggcccagcuucagggauuagugaaugcagauuccuuaagauucgagagggccgaauaauaaaagaaauauuuccaacaggaagaguaaaacauacugaggaaugcacaugcggauuugccagcaacaaaaccauagaaugugccuguagagauaacaguuacacagcaaaaagacccuuugucaaauuaaauguggagacugauacagcggaaauaagauugaugugcacagagacuuauuuggacacccccagaccaaaugauggaagcauaacagggccuugcgaaucuaauggggacaaagggaguggaggcaucaagggaggauuuguucaccaaagaauggcauccaagauuggaaggugguacucucgaacgaugucuaaaacuaaaagaauggggaugggacuguauguaaaguaugauggagacccauggacugacagugaagcccuugcucuuaguggaguaaugguuucaauggaagaaccugguugguauuccuuuggcuucgaaauaaaagauaagaaaugugauguccccuguauugggauagaaaugguacaugauggugggaaaacgacuuggcacucagcagcaacagccauuuacuguuuaaugggcucaggacaacugcugugggacacugucacagguguuaauaugacucuguaa

SEQ ID NO: 62087 - RNA, 1401 nt, Artificial Sequence
  derived and/or modified CDS sequence (wt) from neuraminidase__InfluenzaB__AHL92853
augcuaccuucaacuauacaaacguuaaccuuauuucucacaucagggggaguguuauuaucacuauaugugucagcuucauugucauacuuacuauauucggauauauugcuaaaauuuucacgaacagaaauaacugcaccaauaaugccauuggauugugcaaacgcaucaaauguucaggcugugaaccguucugcaacaaaaggggugacacuucuucucccagaaccggaguggacguacccucguuuaucuugcccgggcucaaccuuucagaaagcacuccuaauuagcccccauagauucggagaaaccaaaggaaacucagcucccuugauaauaagggaaccuuuuauugcuuguggaccaaaggaaugcaaacauuuugcucuaacccauuaugcagcucaaccagggggauacuacaauggaacaagagaagacagaaacaagcugaggcaucuaauuucagucaaauugggcaaaaucccaacaguagaaaacucuauuuuccacauggcagcuuggagcggguccgcaugccaugaugguagagaauggacuuauaucggaguugauggccccgacaguaaugcauugcucaaaauaaaauauggggaagcauauacugacacauaccauuccuaugcaaaaaacauccuaaggacacaagaaagugccugcaauugcaucgggggagauuguuaucuuaugauaacugauggcccagcuucagggauuagugaaugcagauuccuuaagauucgagagggccgaauaauaaaagaaauauuuccaacaggaagaguaaaacauacugaggaaugcacaugcggauuugccagcaacaaaaccauagaaugugccuguagagauaacaguuacacagcaaaaagacccuuugucaaauuaaauguggagacugauacagcggaaauaagauugaugugcacagagacuuauuuggacacccccagaccaaaugauggaagcauaacagggccuugcgaaucuaauggggacaaagggaguggaggcaucaagggaggauuuguucaccaaagaauggcauccaagauuggaaggugguacucucgaacgaugucuaaaacuaaaagaauggggaugggacuguauguaaaguaugauggagacccauggacugacagugaagcccuugcucuuaguggaguaaugguuucaauggaagaaccugguugguauuccuuuggcuucgaaauaaaagauaagaaaugugauguccccuguauugggauagaaaugguacaugauggugggaaaacgacuuggcacucagcagcaacagccauuuacuguuuaaugggcucaggacaacugcugugggacacugucacagguguuaauaugacucuguaa

SEQ ID NO: 62088 - RNA, 1401 nt, Artificial Sequence
  derived and/or modified CDS sequence (wt) from neuraminidase__InfluenzaB__AHL92864
augcuaccuucaacuauacaaacguuaaccuuauuucucacaucagggggaguguuauuaucacuauaugugucagcuucauugucauacuuacuauauucggauauauugcuaaaauuuucacgaacagaaauaacugcaccaauaaugccauuggauugugcaaacgcaucaaauguucaggcugugaaccguucugcaacaaaaggggugacacuucuucucccagaaccggaguggacguacccucguuuaucuugcccgggcucaaccuuucagaaagcacuccuaauuagcccccauagauucggagaaaccaaaggaaacucagcucccuugauaauaagggaaccuuuuauugcuuguggaccaaaggaaugcaaacauuuugcucuaacccauuaugcagcucaaccagggggauacuacaauggaacaagagaagacagaaacaagcugaggcaucuaauuucagucaaauugggcaaaaucccaacaguagaaaacucuauuuuccacauggcagcuuggagcggguccgcaugccaugaugguagagaauggacuuauaucggaguugauggccccgacaguaaugcauugcucaaaauaaaauauggagaagcauauacugacacauaccauuccuaugcaaaaaacauccuaaggacacaagaaagugccugcaauugcaucgggggagauuguuaucuuaugauaacugauggcccagcuucagggauuagugaaugcagauuccuuaagauucgagagggccgaauaauaaaagaaauauuuccaacaggaagaguaaaacauacugaggaaugcacaugcggauuugccagcaacaaaaccauagaaugugccuguagagauaacaguuacacagcaaaaagacccuuugucaaauuaaauguggagacugauacagcggaaauaagauugaugugcacagagacuuauuuggacacccccagaccaaaugauggaagcauaacagggccuugugaaucuaauggggacaaagggaguggaggcaucaagggaggauuuguucaccaaagaauggcauccaagauuggaaggugguacucucgaacgaugucuaaaacuaaaagaauggggaugggacuguauguaaaguaugauggagacccauggacugacagugaagcccuugcucuuaguggaguaaugguuucaauggaagaaccugguugguauuccuuuggcuucgaaauaaaagauaagaaaugugauguccccuguauugggauagaaaugguacaugauggugggaaaacgacuuggcacucagcagcaacagccauuuacuguuuaaugggcucaggacaacugcugugggacacugucacagguguuaauaugacucuguaa

SEQ ID NO: 62089 - RNA, 1401 nt, Artificial Sequence
  derived and/or modified CDS sequence (wt) from neuraminidase__InfluenzaB__AHL92875
augcuaccuucaacuauacaaacguuaacccuauuucucacaucagggggaguauuauuaucacuauaugugucagcuucauuaucauacuuacuauauucggauauauugcuaaaauucucaccaacagaaauaacugcaccaacaaugccauuggauugugcaaacgcaucaaauguucaggcugugaaccguucugcaacaaaaggggugacacuucuucucccagaaccggaguggacauacccgcguuuaucuugcccgggcucaaccuuucagaaagcacuccuaauuagcccucauagauucggagaaaccaaaggaaacucagcucccuugauaauaagggaaccuuuuauugcuuguggaccaaaugaaugcaaacacuuugcucuaacccauuaugcagcccaaccagggggauacuacaauggaacaagaggagacagaaacaagcugaggcaucuaauuucagucaaauugggcaaaaucccaacaguagaaaacuccauuuuccacauggcagcauggagcggguccgcaugccaugaugguaaggaauggacauauaucggaguugauggcccugacaauaaugcauugcucaaaauaaaauauggagaagcauacacugacacauaccauuccuaugcaaacaacauccuaagaacacaagaaagugccugcaauugcaucgggggaaauuguuaucuuaugauaacugauggcucagcuucagguguuagugaaugcagauuucuuaagauucgagagggccgaauaauaaaagaaauauuuccaacaggaagaguaaaacauacugaggaaugcacaugcggauuugccagcaauaaaaccauagaaugugccuguagagauaacaguuacacagcaaaaagacccuuugucaaauuaaacguggagacugauacagcagaaauaagauugaugugcacagauacuuauuuggacacccccagaccagaugauggaagcauaacaggcccuugugaaucuaauggggacaaagggaguggaggcaucaagggaggauuuguucaucaaagaauggcauccaagauuggaaggugguacucucgaacgaugucuaaaacugaaaggauggggaugggacuguaugucaaguaugauggagacccaugggcugacagugaugcccuugcuuuuaguggaguaaugguuucaaugaaagaaccugguugguacuccuuuggcuucgaaauaaaagauaagaaaugcgauguccccuguauugggauagagaugguacaugaugguggaaaagagacuuggcacucagcagcaacagccauuuacuguuuaaugggcucaggacagcugcugugggacacugucacagguguugacauggcucuguaa

SEQ ID NO: 62090 - RNA, 1401 nt, Artificial Sequence; identical to SEQ ID NO: 60639
  derived and/or modified CDS sequence (wt) from neuraminidase__InfluenzaB__AHL92886

SEQ ID NO: 62091 - RNA, 1401 nt, Artificial Sequence
  derived and/or modified CDS sequence (wt) from neuraminidase__InfluenzaB__AHL92897
augcuaccuucaacuauacaaacguuaacccuauuucucacaucagggggaguauuauuaucacuauaugugucagcuucauuaucauacuuacuauauucggauauauugcuaaaauucucaccaacagaaauaacugcaccaacaauaccauuagauugugcaaacgcaucaaauguucaggcugugaaccguucugcaacaaaaggggugacacuucuucucccagaaccggaguggacauacccgcguuuaucuugcccgggcucaaccuuucagaaagcacuccuaauuagcccucauagauucggagaaaccaaaggaaacucagcucccuugauaauaagggaaccuuuuauugcuuguggaccaaaugaaugcaaacacuuugcucuaacccauuaugcagcccaaccagggggauacuacaauggaacaagaggagacagaaacaagcugaggcaucuaauuucagucaaauugggcaaaaucccaacaguagaaaacuccauuuuccacauggcagcauggagcggguccgcaugccaugaugguaaggaauggacauauaucggaguugauggcccugacaauaaugcauugcucaaaauaaaauauggagaagcauauacugacacauaccauuccuaugcaaacaacauccuaagaacacaagaaagugccugcaauugcaucgggggaaauuguuaucuuaugauaacugauggcucagcuucagguguuagugaaugcagauuucuuaagauucgagagggccgaauaauaaaagaaauauuuccaacaggaagaguaaaacauacugaggaaugcacaugcggauuugccagcaauaaaaccauagaaugugccuguagagauaacaguuacacagcaaaaagacccuuugucaaauuaaacguggagacugauacagcagaaauaagauugaugugcacagauacuuauuuggacacccccagaccagaugauggaagcauaacaggcccuugugaaucuaauggggacaaaggaaguggaggcaucaagggaggauuuguucaucaaagaauggcauccaagauuggaaggugguacucucgaacgaugucuaaaacugaaaggauggggaugggacuguaugucaaguaugauggagacccaugggcugacagugaugcccuugcuuuuaguggaguaaugguuucaaugaaagaaccugguugguacuccuuuggcuucgaaauaaaagauaagaaaugcgauguccccuguauugggauagagaugguacaugaugguggaaaagagacuuggcacucagcagcaacagccauuuacuguuuaaugggcucaggacagcugcugugggacacugucacagguguugacauggcucuguaa

SEQ ID NO: 62092 - RNA, 1401 nt, Artificial Sequence
  derived and/or modified CDS sequence (wt) from neuraminidase__InfluenzaB__AHL92908
augcuaccuucaacuauacaaacguuaacccuauuucucacauuagggggaguguuauuaucacuauaugugucagcuucauugucauacuuacuauauucggauauauugcuaaaauuuucacaaacagaaauaacugcaccaauaaugccauuggauugugcaaacgcaucaaauguucaggcugugaaccguucugcaacaaaaggggugacacuucuucucccagaaccggaguggacguacccucguuuaucuugcccgggcucaaccuuucagaaagcacuccuaauuagcccccauagauucggagaaaccaaaggaaacucagcucccuugauaauaagggaaccuuuuauugcuuguggaccaaaggaaugcaaacacuuugcucuaacccauuaugcagcucaaccagggggauacuacaauggaacaagagaagacagaaacaagcugaggcaucuaauuucagucaaauugggcaaaaucccaacaguagagaacucuauuuuccacauggcagcuuggagcggguccgcaugccaugaugguaaagaauggacauauaucggaguugauggccccgacaguaaugcauugcucaaaauaaaauauggagaagcauauacugacacauaccauuccuaugcaaaaaacauccuaaggacacaagaaagugccugcaauugcaucgggggagauuguuaucuuaugauaacugauggcccagcuucagggauuagugaaugcagauuccuuaagauucgagagggccgaauaauaaaagaaauauuuccaacgggaagaguaaaacauacugaggaaugcacaugcggauuugccagcaacaaaaccauagaaugugccuguagagauaacaguuacacagcaaaaagacccuuugucaaauuaaauguggagacugauacagcggaaauaagauugaugugcacagagacuuauuuggacacccccagaccaaaugauggaagcauaacagggccuugcgaaucuaauggggacaaagggaguggaggcaucaagggaggauuuguucaucaaagaauggcauccaagauuggaaggugguacucucgaacgaugucuaaaacuaaaagaauggggaugggacuguauguaaaguaugauggagacccauggacugacagugaagcccuugcucuuaguggaguaaugguuucaauggaagaaccugguugguauuccuuuggcuucgaaauaaaagauaagaaaugugauguccccuguauugggauagaaaugguacaugauggugggaaaacgacuuggcacucagcagcaacagccguuuacuguuuaaugggcucaggacaacugcugugggacacuaucacagguguugauauggcucuguaa

SEQ ID NO: 62093 - RNA, 1401 nt, Artificial Sequence
  derived and/or modified CDS sequence (wt) from neuraminidase__InfluenzaB__AHL92919
augcuaccuucaacuauacaaacguuaacccuauuucucacaucagggggaguauuauuaucacuauaugugucagcuucauuaucauacuuacuauauucggauauauugcuaaaauucucaccaacagaaauaacugcaccaacaaugccauuggauugugcaaacgcaucaaauguucaggcugugaaccguucugcaacaaaaggggugacacuucuucucccagaaccggaguggacauacccgcguuuaucuugcccgggcucaaccuuucagaaagcacuccuaauuagcccucauagauucggagaaaccaaaggaaacucagcucccuugauaauaagggaaccuuuuauugcuuguggaccaaaugaaugcaaacacuuugcucuaacccauuaugcagcccaaccagggggauacuacaauggaacaagaggagacagaaacaagcugaggcaucuaauuucagucaaauugggcaaaaucccaacaguagaaaacuccauuuuccacauggcagcauggagcggguccgcaugccaugaugguaaggaauggacauauaucggaauugauggcccugacaauaaugcauugcucaaaauaaaauauggagaagcauauacugacacauaccauuccuaugcaaacaacauccuaagaacacaagaaagugccugcaauugcaucgggggaaauuguuaucuuaugauaacugauggcucagcuucagguguuagugaaugcagauuucuuaagauucgagagggccgaauaauaaaagaaauauuuccaacaggaagaguaaaacauacugaggaaugcacaugcggauuugccagcaauaaaaccauagaaugugccuguagagauaacaguuacacagcaaaaagacccuuugucaaauuaaacguggagacugauacagcagaaauaagauugaugugcacagauacuuauuuggacacccccagaccagaugauggaagcauaacaggcccuugugaaucuaauggggacaaagggaguggaggcaucaagggaggauuuguucaucaaagaauggcauccaagauuggaaggugguacucucgaacgaugucuaaaacugaaaggauggggaugggacuguaugucaaguaugauggagacccaugggcugacagugaugcccuugcuuuuaguggaguaaugguuucaaugaaagaaccugguugguacuccuuuggcuucgaaauaaaagauaagaaaugcgauguccccuguauugggauagagaugguacaugaugguggaaaagagacuuggcacucagcagcaacagccauuuacuguuuaaugggcucaggacagcugcugugggacacugucacagguguugacauggcucuguaa

SEQ ID NO: 62094 - RNA, 1401 nt, Artificial Sequence
  derived and/or modified CDS sequence (wt) from neuraminidase__InfluenzaB__AHL92930
augcuaccuucaacuauacaaacguuaacccuauuucucacaucagggggaguauuauuaucacuauaugugucagcuucauuaucauacuuacuauauucggauauauugcuaaaauucucaccaacagaaauaacugcaccaacaaugccauuggauugugcaaacgcaucaaauguucaggcugugaaccguucugcaacaaaaggggugacacuucuucucccagaaccggaguggacauacccgcguuuaucuugcccgggcucaaccuuucagaaagcacuccuaauuagcccucauagauucggagaaaccaaaggaaacucagcucccuugauaauaagggaaccuuuuauugcuuguggaccaaaugaaugcaaacacuuugcucuaacccauuaugcagcccaaccagggggauacuacaauggaacaagaggagacagaaacaagcugaggcaucuaauuucagucaaauugggcaaaaucccaacaguagaaaacuccauuuuccacauggcagcauggagcggguccgcaugccaugaugguaaggaauggacauauaucggaguugauggcccugacaaugaugcauugcucaaaauaaaauauggagaagcauauacugacacauaccauuccuaugcaaacaacauccuaagaacacaagaaagugccugcaauugcaucgggggaaauuguuaucuuaugauaacugauggcucagcuucagguguuagugaaugcagauuucuuaagauucgagagggccgaauaauaaaagaaauauuuccaacaggaagaguaaaacauacugaggaaugcacaugcggauuugccagcaauaaaaccauagaaugugccuguagagauaacaguuacacagcaaaaagacccuuugucaaauuagacguggagacugauacagcagaaauaagauugaugugcacagauacuuauuuggacacccccagaccagaugauggaagcauaacaggcccuugugaaucuaauggggacaaagggaguggaggcaucaagggaggauuuguucaucaaagaauggcauccaagauuggaaggugguacucucgaacgaugucuaaaacugaaaggauggggaugggacuguaugucaaguaugauggagacccaugggcugacagugaugcccuugcuuuuaguggaguaaugguuucaaugaaagaaccugguugguacuccuuuggcuucgaaauaaaagauaagaaaugcgauguccccuguauugggauagagaugguacaugaugguggaaaagagacuuggcacucagcagcaacagccauuuacuguuuaaugggcucaggacagcugcugugggacacugucacagguguugacauggcucuguaa

SEQ ID NO: 62095 - RNA, 1401 nt, Artificial Sequence; identical to SEQ ID NO: 60639
  derived and/or modified CDS sequence (wt) from neuraminidase__InfluenzaB__AHL92941

SEQ ID NO: 62096 - RNA, 1401 nt, Artificial Sequence; identical to SEQ ID NO: 60748
  derived and/or modified CDS sequence (wt) from neuraminidase__InfluenzaB__AHL92952

SEQ ID NO: 62097 - RNA, 1401 nt, Artificial Sequence; identical to SEQ ID NO: 60748
  derived and/or modified CDS sequence (wt) from neuraminidase__InfluenzaB__AHL92963

SEQ ID NO: 62098 - RNA, 1401 nt, Artificial Sequence
  derived and/or modified CDS sequence (wt) from neuraminidase__InfluenzaB__AHL92974
augcuaccuucaacuauacaaacguuaacccuauuucucacaucagggggaguauuauuaucacuauaugugucagcuucauuaucauacuuacuauauucggauauauugcuaaaauucucaccaacagaaauaacugcaccaacaaugccauuggauugugcaaacgcaucaaauguucaugcugugaaccguucugcaacaaaaggggugacacuucuucucccagaaccggaguggacauacccgcguuuaucuugcccgggcucaaccuuucagaaagcacuccuaauuagcccucauagauucggagaaaccaaaggaaacucagcucccuugauaauaagggaaccuuuuauugcuuguggaccaaaugaaugcaaacacuuugcucuaacccauuaugcagcccaaccagggggauacuacaauggaacaagaggagacagaaacaagcugaggcaucuaauuucagucaaauugggcaaaaucccaacaguagaaaacuccauuuuccacauggcagcauggagcggguccgcaugccaugaugguaaggaauggacauauaucggaguugauggcccugacaauaaugcauugcucaaaauaaaauauggagaagcauauacugacacauaccauuccuaugcaaacaacauccuaagaacacaagaaagugccugcaauugcaucgggggaaauuguuaucuuaugauaacugauggcucagcuucagguguuagugaaugcagauuucuuaagauucgagagggccgaauaauaaaagaaauauuuccaacaggaagaguaaaacauacugaggaaugcacaugcggauuugccagcaauaaaaccauagaaugugccuguagagauaacaguuacacagcaaaaagacccuuugucaaauuaaacguggaaacugauacagcagaaauaagauugaugugcacagauacuuauuuggacacccccagaccagaugauggaagcauaacaggcccuugugaaucuaauggggacaaagggaguggaggcaucaagggaggauuuguucaucaaagaauggcauccaagauuggaaggugguacucucgaacgaugucuaaaacugaaaggauggggaugggacuguaugucaaguauaauggagacccaugggcugacagugaugcccuugcuuuuaguggaguaaugguuucaaugaaagaaccugguugguacuccuuuggcuucgaaauaaaagauaagaaaugcgauguccccuguauugggauagagaugguacaugaugguggaaaagagacuuggcacucagcagcaacagccauuuacuguuuaaugggcucaggacagcugcugugggacacugucacagguguugacauggcucuguaa

SEQ ID NO: 62099 - RNA, 1401 nt, Artificial Sequence
  derived and/or modified CDS sequence (wt) from neuraminidase__InfluenzaB__AHL92985
augcuaccuucaacuauacaaacguuaacccuauuucucacaucagggggaguauuauuaucacuauaugugucagcuucauuaucauacuuacuauauucggauauauugcuaaaauucucaccaacagaaauaacugcaccaacaaugccauuggauugugcaaacgcaucaaauguucaggcugugaaccguucugcaacaaaaggggugacacuucuucucccagaaccggaguggacauacccgcguuuaucuugcccgggcucaaccuuucagaaagcacuccuaauuagcccucauagauucggagaaaccaaaggaaacucagcucccuugauaauaagggaaccuuuuauugcuuguggaccaaaugaaugcaaacacuuugcucuaacccauuaugcagcccaaccagggggauacuacaauggaacaagaggagacagaaacaagcugaggcaucuaauuucagucaaauugggcaaaaucccaacaguagaaaacuccauuuuccacauggcagcauggagcggguccgcaugucaugaugguaaggaauggacauauaucggaguugauggcccugacaauaaugcauugcucaaaauaaaauauggagaagcauauacugacacauaccauuccuaugcaaacaaaauccuaagaacacaagaaagugccugcaauugcaucgggggaaauuguuaucuuaugauaacugauggcucagcuucagguguuagugaaugcagauuucuuaagauucgagagggccgaauaauaaaagaaauauuuccaacaggaagaguaaaacacacugaggaaugcacaugcggauuugccagcaauaaaaccauagaaugugccuguagagauaacaguuacacagcaaaaagacccuuugucaaauuaaacguggagacugauacagcagaaauaagauugaugugcacagauacuuauuuggacacccccagaccagaugauggaagcauaacaggcccuugugaaucuaauggggacaaagggaguggaggcaucaagggaggauuuguucaucaaagaauggcauccaagauuggaaggugguacucucgaacgaugucuaaaacugaaaggauggggaugggacuguaugucaaguaugauggagacccaugggcugacagugaugcccuagcuuuuaguggaguaaugguuucaaugaaagaaccugguugguacuccuuuggcuucgaaauaaaagauaagaaaugcgauguccccuguauugggauagagaugguacaugaugguggaaaagagacuuggcacucagcagcaacagccauuuacuguuuaaugggcucaggacagcugcugugggacacugucacagguguugacauggcucuguaa

SEQ ID NO: 62100 - RNA, 1401 nt, Artificial Sequence; identical to SEQ ID NO: 62099
  derived and/or modified CDS sequence (wt) from neuraminidase__InfluenzaB__AHL92996

SEQ ID NO: 62101 - RNA, 1401 nt, Artificial Sequence; identical to SEQ ID NO: 62035
  derived and/or modified CDS sequence (wt) from neuraminidase__InfluenzaB__AHL93008

SEQ ID NO: 62102 - RNA, 1401 nt, Artificial Sequence; identical to SEQ ID NO: 62029
  derived and/or modified CDS sequence (wt) from neuraminidase__InfluenzaB__AHL93019

SEQ ID NO: 62103 - RNA, 1401 nt, Artificial Sequence; identical to SEQ ID NO: 62029
  derived and/or modified CDS sequence (wt) from neuraminidase__InfluenzaB__AHL93030

SEQ ID NO: 62104 - RNA, 1401 nt, Artificial Sequence; identical to SEQ ID NO: 62043
  derived and/or modified CDS sequence (wt) from neuraminidase__InfluenzaB__AHL93041

SEQ ID NO: 62105 - RNA, 1401 nt, Artificial Sequence; identical to SEQ ID NO: 62043
  derived and/or modified CDS sequence (wt) from neuraminidase__InfluenzaB__AHL93052

SEQ ID NO: 62106 - RNA, 1401 nt, Artificial Sequence; identical to SEQ ID NO: 60829
  derived and/or modified CDS sequence (wt) from neuraminidase__InfluenzaB__AHL93063

SEQ ID NO: 62107 - RNA, 1401 nt, Artificial Sequence; identical to SEQ ID NO: 60830
  derived and/or modified CDS sequence (wt) from neuraminidase__InfluenzaB__AHL93074

SEQ ID NO: 62108 - RNA, 1401 nt, Artificial Sequence
  derived and/or modified CDS sequence (wt) from neuraminidase__InfluenzaB__AHL93085
augcuaccuucaacuauacaaacguuaaccuuauuucucacaucagggggaguguuauuaucacuauaugugucagcuucauugucauacuuacuauauucggauauauugcuaaaauuuucacgaacagaaauaacugcaccaauaaugccauuggauugugcaaacgcaucaaauguucaggcugugaaccguucugcaacaaaaggggugacacuucuucucccagaaccggaguggacguacccucguuuaucuugcccgggcucaaccuuucagaaagcacuccuaauuagcccccauagauucggagaaaccaaaggaaacucagcucccuugauaauaagggaaccuuuuauugcuuguggaccaaaggaaugcaaacauuuugcucuaacccauuaugcagcucaaccagggggauacuacaauggaacaagagaagacagaaacaagcugaggcaucuaauuucagucaaauugggcaaaaucccaacaguagaaaacucuauuuuccacauggcagcuuggagcggguccgcaugccaugaugguagagaauggacuuauaucggaguugauggccccgacaguaaugcauugcucaaaauaaaauauggagaagcauauacugacacauaccauuccuaugcaaaaaacauccuaaggacacaagaaagugccugcaauugcaucgggggagauuguuaucuuaugauaacugauggcccagcuucagggauuagugaaugcagauuccuuaagauucgagagggccgaauaauaaaagaaauauuuccaacaggaagaguaaaacauacugaggaaugcacaugcggguuugccagcaacaaaaccauagaaugugccuguagagauaacaguuacacagcaaaaagacccuuugucaaauuaaauguggagacugauacagcggaaauaagauugaugugcacagagacuuauuuggacacccccagaccaaaugauggaagcauaacagggccuugcgaaucuaauggggacaaagggaguggaggcaucaagggaggauuuguucaccaaagaauggcauccaagauuggaaggugguacucucgaacgaugucuaaaacuaaaagaauggggaugggacuguauguaaaguaugauggagacccauggacugacagugaagcccuugcucuuaguggaguaaugguuucaauggaagaaccugguugguauuccuuuggcuucgaaauaaaagauaagaaaugugauguccccuguauugggauagaaaugguacaugauggugggaaaacgacuuggcacucagcagcaacagccauuuacuguuuaaugggcucaggacaauugcugugggacacugucacagguguuaauaugacucuguaa

SEQ ID NO: 62109 - RNA, 1401 nt, Artificial Sequence; identical to SEQ ID NO: 62086
  derived and/or modified CDS sequence (wt) from neuraminidase__InfluenzaB__AHL93096

SEQ ID NO: 62110 - RNA, 1401 nt, Artificial Sequence
  derived and/or modified CDS sequence (wt) from neuraminidase__InfluenzaB__AHL93107
augcuaccuucaacuauacaaacguuaaccuuauuucucacaucagggggaguguuauuaucacuauaugugucagcuucauugucauacuuacuauauucggauauauugcuaaaauuuucacgaacagaaauaacugcaccaauaaugccauuggauugugcaaacgcaucaaauguucaggcugugaaccguucugcaacaaaaggggugacacuucuucucccagaaccggaguggacguacccucguuuaucuugcccgggcucaaccuuucagaaagcacuccuaauuagcccccauagauucggagaaaccaaaggaaacucagcucccuugauaauaagggaaccuuuuauugcuuguggaccaaaggaaugcaaacauuuugcucuaacccauuaugcagcucaaccagggggauacuacaauggaacaagagaagacagaaacaagcugaggcaucuaauuucagucaaauugggcaaaaucccaacaguagaaaacucuauuuuccacauggcagcuuggagcggguccgcaugccaugaugguagagaauggacuuauaucggaguugauggccccgacaguaaugcauugcucaaaauaaaauacggagaagcauauacugacacauaccauuccuaugcaaaaaacauccuaaggacacaagaaagugccugcaauugcaucgggggagauuguuaucuuaugauaacugauggcccagcuucagggauuagugaaugcagauuccuuaagauucgagagggccgaauaauaaaagaaauauuuccaacaggaagaguaaaacauacugaggaaugcacaugcggauuugccagcaacaaaaccauagaaugugccuguagagauaacaguuacacagcaaaaagacccuuugucaaauuaaauguggagacugauacagcggaaauaagauugaugugcacagagacuuauuuggacacccccagaccaaaugauggaagcauaacagggccuugcgaaucuaauggggacaaagggaguggaggcaucaagggaggauuuguucaccaaagaauggcauccaagauuggaaggugguacucucgaacgaugucuaaaacuaaaagaauggggaugggacuguauguaaaguaugauggagacccauggacugacagugaagcccuugcucuuaguggaguaaugguuucaauggaagaaccugguugguauuccuuuggcuucgaaauaaaagauaagaaaugugauguccccuguauugggauagaaaugguacaugauggugggaaaacgacuuggcacucagcagcaacagccauuuacuguuuaaugggcucaggacaacugcugugggacacugucacagguguuaauaugacucuguaa

SEQ ID NO: 62111 - RNA, 1401 nt, Artificial Sequence; identical to SEQ ID NO: 62088
  derived and/or modified CDS sequence (wt) from neuraminidase__InfluenzaB__AHL93118

SEQ ID NO: 62112 - RNA, 1401 nt, Artificial Sequence; identical to SEQ ID NO: 60800
  derived and/or modified CDS sequence (wt) from neuraminidase__InfluenzaB__AHL93129

SEQ ID NO: 62113 - RNA, 1401 nt, Artificial Sequence; identical to SEQ ID NO: 60829
  derived and/or modified CDS sequence (wt) from neuraminidase__InfluenzaB__AHL93140

SEQ ID NO: 62114 - RNA, 1401 nt, Artificial Sequence; identical to SEQ ID NO: 60800
  derived and/or modified CDS sequence (wt) from neuraminidase__InfluenzaB__AHL93151

SEQ ID NO: 62115 - RNA, 1401 nt, Artificial Sequence; identical to SEQ ID NO: 60829
  derived and/or modified CDS sequence (wt) from neuraminidase__InfluenzaB__AHL93162

SEQ ID NO: 62116 - RNA, 1401 nt, Artificial Sequence; identical to SEQ ID NO: 62071
  derived and/or modified CDS sequence (wt) from neuraminidase__InfluenzaB__AHL93173

SEQ ID NO: 62117 - RNA, 1401 nt, Artificial Sequence
  derived and/or modified CDS sequence (wt) from neuraminidase__InfluenzaB__AHL93184
augcuaccuucaacuauacaaacauuaacccuauuucucacaucagggggaguguuauuaucacuauaugugucagcuucauugucauacuuacuauauucggauauauugcuaaaauuuucacaaacagaaauaacugcaccaauaaugccauuggauugugcaaacgcaucaaauguucaggcugugaaccgcucugcagcaaaaggggugacacuccuucucccagaaccggaguggacauacccucguuuaucuugcccgggcucaaccuuucagaaagcacuccuaauuagcccccauagauucggagaaaccaaaggaaacucagcucccuugauaauaagggaaccuuuuauugcuuguggaccaacggaaugcaaacacuuugcucuaacccauuaugcagcucaaccagggggauacuacaauggaacaagagaagacagaaacaagcugaggcaucuaauuucagucaaacugggcaaaaucccaacaguagaaaacuccauuuuccauauggcagcuuggagcggguccgcaugucaugaugguaaagaauggacauauaucggaguugauggccccgacaguaaugcauugcucaaaauaaaauauggagaagcauauacugacacauaccauuccuaugcaaaaaacauccuaaggacacaagaaagugccugcaauugcaucgggggagauuguuaucuuaugauaacugauggcccagcuucagggauuagugaaugcagauuccuuaagauucgagagggccgaauaauaaaagaaauauuuccaacaggaagaguaaaacauacugaggaaugcacaugcggauuugccagcaacaaaaccauagaaugugcuuguagagauaacaguuacacagcaaaaagacccuuugucaaauuaaauguggagacugauacagcggaaauaagauugaugugcacagagacuuauuuggacacccccagaccaaaugauggaagcauaacagggccuugcgaaucugauggggacaaagggaguggaggcaucaagggaggauuuguucaucaaagaauggcauccaagauuggaaggugguacucucgaacgaugucuaaaacuaaaagaauggggaugggacuguauguaaaguaugauggagacccauggacugacagugaagcccuugcucuuaguggaguaaugguuucgauggaagaaccugguugguauuccuuuggcuucgaaauaaaagauaagaaaugugauguccccuguauugggauagaaaugguacaugauggugggaaaacgacuuggcacucagcagcaacagccauuuacuguuuaaugggcucaggacaacugcugugggacacugucacagguguugauauggcucuguaa

SEQ ID NO: 62118 - RNA, 1401 nt, Artificial Sequence; identical to SEQ ID NO: 60829
  derived and/or modified CDS sequence (wt) from neuraminidase__InfluenzaB__AHL93195

SEQ ID NO: 62119 - RNA, 1401 nt, Artificial Sequence
  derived and/or modified CDS sequence (wt) from neuraminidase__InfluenzaB__AHL93206
augcuaccuucaacuauacaaacguuaaccuuauuucucacaucagggggaguguuauuaucacuauaugugucagcuucauugucauacuuacuauauucggauauauugcuaaaauuuucacgaacagaaauaacugcaccaauaaugccauuggauugugcaaacgcaucaaauguucaggcugugaaccguucugcaacaaaaggggugacacuucuucucccagaaccggaguggacguacccucguuuaucuugcccgggcucaaccuuucagaaagcacuccuaauuagcccccauagauucggagaaaccaaaggaaacucagcucccuugauaauaagggaaccuuuuauugcuuguggaccaaaggaaugcaaacauuuugcucuaacccauuaugcagcucaaccagggggauacuacaauggaacaagagaagacagaaacaagcugaggcaucuaauuucagucaaauugggcaaaaucccaacaguagaaaacucuauuuuccacauggcagcuuggagcggguccgcaugccaugaugguagagaauggacuuauaucggaguugauggccccgacaguaaugcauugcucaaaauaaaauauggagaagcauauacugacacauaucauuccuaugcaaaaaacauccuaaggacacaagaaagugccugcaauugcaucgggggagauuguuaucuuaugauaacugauggcccagcuucagggauuagugaaugccgauuccuuaagauucgagagggccgaauaauaaaagaaauauuuccaacaggaagaguaaaacauacugaggaaugcacaugcggauuugccagcaacaaaaccauagaaugugccuguagagauaacaguuacacagcaaaaagacccuuugucaaauuaaauguggagacugauacagcggaaauaagauugaugugcacagagacuuauuuggacacccccagaccaaaugauggaagcauaacagggccuugcgaaucuaauggggacaaagggaguggaggcaucaagggaggauuuguucaccaaagaauggcauccaagauuggaaggugguacucucgaacgaugucuaaaacuaaaagaauggggaugggacuauauguaaaguaugauggagacccauggacugacagugaagcccuugcucuuaguggaguaaugguuucaauggaagaaccugguugguauuccuuuggcuucgaaauaaaagauaagaaaugugauguccccuguauugggauagaaaugguacaugauggugggaaaacgacuuggcacucagcagcaacagccauuuacuguuuaaugggcucaggacaacugcugugggacacugucacagguguuaauaugacucuguaa

SEQ ID NO: 62120 - RNA, 1401 nt, Artificial Sequence; identical to SEQ ID NO: 61111
  derived and/or modified CDS sequence (wt) from neuraminidase__InfluenzaB__AHL93217

SEQ ID NO: 62121 - RNA, 1401 nt, Artificial Sequence; identical to SEQ ID NO: 61111
  derived and/or modified CDS sequence (wt) from neuraminidase__InfluenzaB__AHL93228

SEQ ID NO: 62122 - RNA, 1401 nt, Artificial Sequence
  derived and/or modified CDS sequence (wt) from neuraminidase__InfluenzaB__AHL93239
augcuaccuucaacuauacaaacguuaacccuauuucucacaucagggggaguauuauuaucacuauaugugucagcuucauuaucauacuuacuauauucggauauauugcuaaaauucucaccaacagaaauaacugcaccaacaaugccauuggauugugcaaacgcaucaaauguucaggcugugaaccguucugcaacaaaaggggugacauuucuucucccagaaccggaguggacauacccgcguuuaucuugcccgggcucaaccuuucagaaagcacuccuaauuagcccucauagauucggagaaaccaaaggaaacucagcucccuugauaauaagggaaccuuuuauugcuuguggaccaaaugaaugcaaacacuuugcucuaacccauuaugcagcccaaccagggggauacuacaauggaacaagaggagacagaaacaagcugaggcaucuaauuucagucaaauugggcaaaaucccaacaguagaaaacuccauuuuccacauggcagcauggagcggguccgcgugccaugaugguaaggaauggacauauaucggaguugauggcccugacaauaaugcauugcucaaaguaaaauauggagaagcauauacugacacauaccauuccuaugcaaacaaaauccuaagaacacaagaaagugccugcaauugcaucgggggaaauuguuaucuuaugauaacugauggcucagcuucagguguuagugaaugcagauuucuuaagauucgagagggccgaauaauaaaagaaauauuuccaacaggaagaguaaaacacacugaggaaugcacaugcggauuugccagcaauaaaaccauagaaugugccuguagagauaacaguuacacagcaaaaagaccuuuugucaaauuaaacguggagacugauacagcagaaauaagauugaugugcacagauacuuauuuggacacccccagaccagaugauggaagcauaacaggcccuugugaaucuaauggggacaaagggaguggaggcaucaagggaggauuuguucaucaaagaauggaauccaagauuggaaggugguacucucgaacgaugucuaagacugaaaggauggggaugggacuguaugucaaguaugauggagacccaugggcugacagugaugcccuagcuuuuaguggaguaaugguuucaaugaaagaaccugguugguacuccuuuggcuucgaaauaaaagauaagaaaugcgauguccccuguauugggauagagaugguacaugaugguggaaaagagacuuggcacucagcagcaacagccauuuacuguuuaaugggcucaggacagcugcugugggacacugucacagguguugacauggcucuguaa

SEQ ID NO: 62123 - RNA, 1401 nt, Artificial Sequence
  derived and/or modified CDS sequence (wt) from neuraminidase__InfluenzaB__AHL93250
augcuaccuucaacuauacaaauguuaacccuauuucucacaucagggggaguacuauuaucacuauaugugucagcuucauuaucauacuuacuauauucggauauauugcuaaaauucucaccaacagaaauaacugcaccaacaaugccauuggauugugcaaacgcaucaaauguucaugcugugaaccguucugcaacaaaaggggugacauuucuucucccagaaccggaguggacauacccgcguuuaucuugcccgggcucaaccuuucagaaagcacuccuaauuagcccucauagauucggagaaaccaaaggaaacucagcucccuugauaauaagggaaccuuuuauugcuuguggaccaaaugaaugcaaacacuuugcucuaacccauuaugcagcccaaccagggggauacuacaauggaacaagaggagacagaaacaagcugaggcaucuaauuucagucaaauugggcaaaaucccaacaguagaaaacuccauuuuccacauggcagcauggagcggguccgcaugccaugaugguaaggaauggacauauaucggaguugaugguccugacaauaaugcauugcucaaaauaaaauauggagaagcauauacugacacauaucauuccuaugcaaacaacauccuaagaacacaagaaagugccugcaauugcaucgggggaaauuguuaucuuaugauaacugauggcucagcuucagguguuagugaaugcagauuucuuaagauucgagagggccgaauaauaaaagaaauauuuccaacaggaagaguaaaacauacugaggagugcacaugcggauuugccagcaauaaaaccauagaaugugccuguagagauaacaguuacacagcaaaaagacccuuugucaaauuaaacguggaaacugauacagcagaaauaagauugaugugcacagauacuuauuuggacacccccagaccagaugauggaagcauaacaggcccuugugaaucuaauggggacaaagggaguggaggcaucaagggaggauuuguucaucaaagaauggcauccaagauuggaaggugguacucucgaacgaugucuaaaacugaaaggauggggaugggacuguaugucaaguaugauggagacccauggacugacagugaugcccuugcuuuuaggggaguaaugguuucaaugaaagaaccugguugguacuccuuuggcuucgaaauaaaagauaagaaaugcgauguccccuguauugggauagagaugguacaugaugguggaaaagagacuuggcacucagcagcaacagccauuuacuguuuaaugggcucaggacagcugcugugggacacagucacaggugucgacauggcucuguaa

SEQ ID NO: 62124 - RNA, 1401 nt, Artificial Sequence; identical to SEQ ID NO: 61111
  derived and/or modified CDS sequence (wt) from neuraminidase__InfluenzaB__AHL93261

SEQ ID NO: 62125 - RNA, 1401 nt, Artificial Sequence; identical to SEQ ID NO: 61114
  derived and/or modified CDS sequence (wt) from neuraminidase__InfluenzaB__AHL93272

SEQ ID NO: 62126 - RNA, 1401 nt, Artificial Sequence
  derived and/or modified CDS sequence (wt) from neuraminidase__InfluenzaB__AHL93283
augcuaccuucaacuauacaaacguuaacccuauuucucacaucagggggaguauuauuaucacuauaugugucagcuucauuaucauacuuacuauauucggauauauugcuaaaauucucaccaacagaaauaacugcaccaacaaugccauuggauugugcaaacgcaucaaauguucaggcugugaaccguucugcaacaaaaggggugacacuucuucucccagaaccggaguggacauacccgcguuuaucuugcccgggcucaaccuuucagaaagcacuccuaauuagcccucauagauucggagaaaccaaaggaaacucagcucccuugauaauaagggaaccuuuuauugcuuguggaccaaaugaaugcaaacacuuugcucuaacccauuaugcagcccaaccagggggauacuacaauggaacaagaggagacagaaacaagcugaggcaucuaauuucagucaaauugggcaaaaucccaacaguagaaaacuccauuuuccacauggcagcauggagcggguccgcgugccaugaugguaaggaauggacauauaucggaguugauggcccugacaauaaugcauugcucaaaguaaaauauggagaagcauauacugacacauaccauuccuaugcaaacaaaauccuaagaacacaagaaagugccugcaauugcaucgggggaaauuguuaucuuaugauaacugauggcucagcuucagguguuagugaaugcagauuucuuaagauucgagagggccgaauaauaaaagaaauauuuccaacaggaagaguaaaacacacugaggaaugcacaugcggauuugccagcaauaaaaccauagaaugugccuguagagauaacaguuacacagcaaaaagaccuuuugucaaauuaaacguggagacugauacagcagaaauaagauugaugugcacagauacuuauuuggacacccccagaccaaacgauggaagcauaacaggcccuugugaaucuaauggggacaaagggaguggaggcaucaagggaggauuuguucaucaaagaauggaauccaagauuggaagaugguacucucgaacgaugucuaaaacugaaaggauggggaugggacuguaugucaaguaugauggagacccaugggcugacagugaugcucuagcuuuuaguggaguaaugguuucaaugaaagaaccugguugguacuccuuuggcuucgaaauaaaagauaagaaaugcgauguccccuguauugggauagagaugguacaugaugguggaaaagagacuuggcacucagcagcaacagccauuuacuguuuaaugggcucaggacagcugcugugggacacugucacagguguugacauggcucuguaa

SEQ ID NO: 62127 - RNA, 1401 nt, Artificial Sequence; identical to SEQ ID NO: 61111
  derived and/or modified CDS sequence (wt) from neuraminidase__InfluenzaB__AHL93294

SEQ ID NO: 62128 - RNA, 1401 nt, Artificial Sequence
  derived and/or modified CDS sequence (wt) from neuraminidase__InfluenzaB__AHL93305
augcuaccuucaacuauacaaacguuaacccuauuucucacaucagggggaguauuauuaucacuauaugugucagcuucauuaucauacuuacuauauucggauauauugcuaaaauucucaccaacagaaauaacugcaccaacaaugccauuggauugugcaaacgcaucaaauguucaggcugugaaccguucugcaacaaaaggggugacacuucuucucccagaaccggaguggacauacccgcguuuaucuugcccgggcucaaccuuucagaaagcacuccuaauuagcccucauagauucggagaaaccaaaggaaacucagcucccuugauaauaagggaaccuuuuguugcuuguggaccaaaugaaugcaaacacuuugcucuaacccauuaugcagcccaaccagggggauacuacaauggaacaagaggagacagaaacaagcugaggcaucuaauuucagucaaauugggcaaaaucccaacaguagaaaacuccauuuuccacauggcagcauggagcggguccgcgugccaugaugguaaagaauggacauauaucggaguugauggcccugacaauaaugcauugcucaaaguaaaauauggagaagcauauacugacacauaccauuccuaugcaaacaaaauccuaagaacacaagaaagugccugcaauugcaucgggggaaauuguuaucuuaugauaacugauggcucagcuucagguguuagugaaugcagauuucuuaagauucgagagggccgaauaauaaaagaaauauuuccaacaggaagaguaaaacacacugaggaaugcacaugcggauuugccagcaauaaaaccauagaaugugccuguagagauaacaguuacacagcaaaaagaccuuuugucaaauuaaacguggagacugauacagcagaaauaagauugaugugcacagauacuuauuuggacacccccagaccaaaugauggaagcauaacaggcccuugugaaucuaauggggacaaagggaguggaggcaucaagggaggauuuguucaucaaagaauggaauccaagauuggaaggugguacucucgaacgaugucuaaaacugaaaggauggggaugggacuguaugucaaguaugauggagacccaugggcugacagugaugcccuagcuuuuaguggaguaaugguuucaaugaaagaaccugguugguacuccuuuggcuucgaaauaaaagauaagaaaugcgauguccccuguauugggauagagaugguacaugaugguggaaaagagacuuggcacucagcagcaacagccauuuacuguuuaaugggcucaggacagcugcugugggacacugucacagguguugacauggcucuguaa

SEQ ID NO: 62129 - RNA, 1401 nt, Artificial Sequence; identical to SEQ ID NO: 60973
  derived and/or modified CDS sequence (wt) from neuraminidase__InfluenzaB__AHL93316

SEQ ID NO: 62130 - RNA, 1401 nt, Artificial Sequence
  derived and/or modified CDS sequence (wt) from neuraminidase__InfluenzaB__AHL93338
augcuaccuucaacuauacaaacguuaacccuauuucucacaucagggggaguauuauuaucacuauaugugucagcuucauuaucauacuuacuauauucggacauauugcuaaaauucucaccaacagaaauaacugcaccaacaaugccauuggauugugcaaacgcaucaaauguucaggcugugaaccguucugcaacaaaaggggugacacuucuucucccagaaccggaguggacauacccgcguuuaucuugcccgggcucaaccuuucagaaagcacuccuaauuagcccucauagauucggagaaaccaaaggaaacucagcucccuugauaauaagggaaccuuuuauugcuuguggaccaaaugaaugcaaacacuuugcucuaacccauuaugcagcccaaccagggggauacuacaauggaacaagaggagacagaaacaagcugaggcaucuaauuucagucaaauugggcaaaaucccaacaguagaaaacuccauuuuccacauggcagcauggagcgguuccgcgugccaugaugguaaggaauggacauauaucggaguugauggcccugacaauaaugcauugcucaaaguaaaauauggagaagcauauacugacacauaccauuccuaugcaaacaaaauccuaagaacacaagaaagugccugcaauugcaucgggggaaauuguuaucuuaugauaacugauggcucagcuucagguguuagugaaugcagauuucuuaagauucgagagggccgaauaauaaaagaaauauuuccaacaggaagaguaaaacacacugaggaaugcacaugcggauuugccagcaauaaaaccauagaaugugccuguagagauaacaguuacacagcaaaaagaccuuuugucaaauuaaacguggagacugaugcagcagaaauaagauugaugugcacagauacuuauuuggacacccccagaccaaaugauggaagcauaacaggcccuugugaaucuaauggggacaaagggaguggaggcaucaagggaggauuuguucaucaaagaauggaauccaagauuggaaggugguacucucgaacgaugucuaaaacugaaaggauggggaugggacuguaugucaaguaugauggagacccaugggcugacagugaugcccuagcuuuuaguggaguaaugguuucaaugaaagaaccugguugguacuccuuuggcuucgaaauaaaagauaagaaaugcgauguccccuguauugggauagagaugguacaugaugguggaaaagagacuuggcacucagcagcaacagccauuuacuguuuaaugggcucaggacagcugcugugggacacugucacagguguugacauggcucuguaa

SEQ ID NO: 62131 - RNA, 1401 nt, Artificial Sequence
  derived and/or modified CDS sequence (wt) from neuraminidase__InfluenzaB__AHL93349
augcuaccuucaacuauacaaacguuaacccuauuucucacaucagggggaguauuauuaucacuauaugugucagcuucauuaucauacuuacuauauucggauauauugcuaaaauuuucaccaacagaaauaacugcaccaacaaugccauuggauugugcaaacgcaucaaauguucaggcugugaaccguucugcaacaaaaggggugacacuucuucucccagaaccggaguggacauacccgcguuuaucuugccagggcucaaccuuucagaaagcacuccuaauuagcccucauagauucggagaaaccaaaggaaacucagcucccuugauaauaagggaaccuuuuauugcuuguggaccaaaugaaugcaaacacuuugcucuaacccauuaugcagcccaaccagggggauacuacaauggaacaagaggagacagaaacaagcugaggcaucuaauuucagucaaauugggcaaaaucccaacaguagaaaacuccaucuuccacauggcagcauggagcggguccgcgugccaugaugguaaagaauggacauauaucggaguugauggcccugacaauaaugcauugcucaaaguaaaauauggagaagcauauacugacacauaccauuccuaugcaaacaaaauccuaagaacacaagaaagugccugcaauugcaucgggggaaauuguuaucuuaugauaacugauggcucagcuucagguguuagugaaugcagauuucuuaagauucgagagggccgaauaauaaaagaaauauuuccaacaggaagaguaaaacacacugaggaaugcacaugcggauuugccagcaauaaaaccauagaaugugccuguagagauaacaguuacacagcaaaaagaccuuuugucaaauuaaacguggagacugauacagcagaaauaagauugaugugcacagauacuuauuuggacacccccagaccaaaugauggaagcauaacaggcccuugugaaucuaauggggacaaagggaguggaggcaucaagggaggauuuguucaucaaagaauggaauccaagauuggaaggugguacucucgaacgaugucuaaaacugaaaggauggggauggaacuguaugucaaguaugauggagacccaugggcugacagugaugcccuagcuuuuaguggaguaaugguuucaaugaaagaaccugguugguacuccuuuggcuucgaaauaaaagauaagaaaugcgauguccccuguauugggauagagaugguacaugaugguggaaaagagacuuggcacucagcagcaacagccauuuacuguuuaaugggcucaggacagcugcugugggacacugucacagguguuaacauggcucuguaa

SEQ ID NO: 62132 - RNA, 1401 nt, Artificial Sequence; identical to SEQ ID NO: 61111
  derived and/or modified CDS sequence (wt) from neuraminidase__InfluenzaB__AHL93371

SEQ ID NO: 62133 - RNA, 1401 nt, Artificial Sequence
  derived and/or modified CDS sequence (wt) from neuraminidase__InfluenzaB__AHL93382
augcuaccuucaacuauacaaacguuaacccuauuucucacaucagggggaguauuauuaucacuauaugugucagcuucauuaucauacuuacuauauucggauauauugcuaaaauucucaccaacagaaauaacugcaccaacaaugccauuggauugugcaaacgcaucaaauguucaggcugugaaccguucugcaacaaaaggggugacacuucuucucccagaaccggaguggacauacccgcguuuaucuugcccgggcucaaccuuucagaaagcacuccuaauuagcccucauagauucggagaaaccaaaggaaacucagcucccuugauaauaagggaaccuuuuauugcuuguggaccaaaugaaugcaaacacuuugcucuaacccauuaugcagcccaaccagggggauacuacaauggaacaagaggagacagaaacaagcugaggcaucuaauuucagucaaauugggcaaaaucccaacaguagaaaacuccauuuuccacauggcagcauggagcggguccgcgugccaugaugguaaagaauggacauauaucggaguugauggcccugacaauaaugcauugcucaaaguaaaauauggagaagcauauacugacacauaccauuccuaugcaaacaaaauccuaagaacacaagaaagugccugcaauugcaucgggggaaauuguuaucuuaugauaacugauggcucagcuucagguguuagugaaugcagauuucuuaagauucgagagggccgaauaauaaaagaaauauuuccaacaggaagaguaaaacacacugaggaaugcacaugcggauuugccagcaauaaaaccauagaaugugccuguagagauaacaguuacacagcaaaaagaccuuuugucaaauuaaacguggagacugauacagcagaaauaagauugaugugcacagauacuuauuuggacacccccagaccaaaugauggaagcauaacaggcccuugugaaucuaauggggacaaagggaguggaggcaucaagggaggauuuguucaucaaagaauggaauccaagauuggaaggugguacucucgaacgaugucuaaaacugaaaggauggggauggaacuguaugucaaguaugauggagacccaugggcugacagugaugcccuagcuuuuaguggaguaaugguuucaaugaaagaaccugguugguacuccuuuggcuucgaaauaaaagauaagaaaugcgauguccccuguauugggauagagaugguacaugaugguggaaaagagacuuggcacucagcagcaacagccauuuacuguuuaaugggcucaggacagcugcugugggacacugucacagguguuaacauggcucuguaa

SEQ ID NO: 62134 - RNA, 1401 nt, Artificial Sequence; identical to SEQ ID NO: 60973
  derived and/or modified CDS sequence (wt) from neuraminidase__InfluenzaB__AHL93393

SEQ ID NO: 62135 - RNA, 1401 nt, Artificial Sequence; identical to SEQ ID NO: 61111
  derived and/or modified CDS sequence (wt) from neuraminidase__InfluenzaB__AHL93404

SEQ ID NO: 62136 - RNA, 1401 nt, Artificial Sequence
  derived and/or modified CDS sequence (wt) from neuraminidase__InfluenzaB__AHL93415
augcuaccuucaacuauacaaacguuaacccuauuucucacaucagggggaguauuauuaucacuauaugugucagcuucauuaucauacuuacuauauucggauauauugcuaaaauucucaccaacagaaauaacugcaccaacaaugccauuggauugugcaaacgcaucaaauguucaggcugugaaccguucugcaacaaaaggggugacacuucuucucccagaaccggaguggacauacccgcguuuaucuugcccgggcucaaccuuucagaaagcacuccuaauuagcccucauagauucggagaaaccaaaggaaacucagcucccuugauaauaagggaaccuuuuauugcuuguggaccaaaugaaugcaaacacuuugcucuaacccauuaugcagcccaaccagggggauacuacaauggaacaagaggagacagaaacaagcugaggcaucuaauuucagucaaauugggcaaaaucccaacaguagaaaacuccauuuuccacauggcagcauggagcggguccgcgugccaugaugguaaggaauggacauauaucggcguugauggcccugacaauaaugcauugcucaaaguaaaauauggagaagcauauacugacacauaccauuccuaugcaaacaaaauccuaagaacacaagaaagugccugcaauugcaucgggggaaauuguuaucuuaugauaacugauggcucagcuucagguguuagugaaugcagauuucuuaagauucgagagggccgaauaauaaaagaaauauuuccaacaggaagaguaaaacacacugaggaaugcacaugcggauuugccagcaauaaaaccauagaaugugccuguagagauaacaguuacacagcaaaaagaccuuuugucaaauuaaacguggagacugauacagcagaaauaagauugaugugcacagauacuuauuuggacacccccagaccaaaugauggaagcauaacaggcccuugugaaucuaauggggacaaagggaguggaggcaucaagggaggauuuguucaucaaagaauggaauccaagauuggaaggugguacucucgaacgaugucuaaaacugaaaggauggggaugggacuguaugucaaguaugauggagacccaugggcugacagugaugcccuagcuuuuaguggaguaaugguuucaaugaaagaaccugguugguacuccuuuggcuucgaaauaaaagauaagaaaugcgauguccccuguauugggauagagaugguacaugaugguggaaaagagacuuggcacucagcagcaacagccauuuacuguuuaaugggcucaggacagcuguugugggacacugucacagguguugacauggcucuguaa

SEQ ID NO: 62137 - RNA, 1401 nt, Artificial Sequence
  derived and/or modified CDS sequence (wt) from neuraminidase__InfluenzaB__AHL93426
augcuaccuucaacuauacaaacguuaacccuauuucucacaucagggggaguauuauuaucacuauaugugucagcuucauuaucauacuuacuauauucggauauauugcuaaaauucucaccaacagaaauaacugcaccaacaaugccauuggauugugcaaacgcaucaaauguucaggcugugaaccguucugcaacaaaaggggugacacuucuucucccagaaccggaguggacauacccgcguuuaucuugcccgggcucaacauuucagaaagcacuccuaauuagcccucauagauucggagaaaccaaaggaaacucagcucccuugauaauaagggaaccuuuuauugcuuguggaccaaaugaaugcaaacacuuugcucuaacccauuaugcagcccaaccagggggauacuacaauggaacaagaggagacagaaacaagcugaggcaucuaauuucagucaaauugggcaaaaucccaacaguagaaaacuccauuuuccacauggcagcauggagcggguccgcgugccaugaugguaaggaauggacauauaucggcguugauggcccugacaauaaugcauugcucaaaguaaaauauggagaagcauauacugacacauaccauuccuaugcaaacaaaauccuaagaacacaagaaagugccugcaauugcaucgggggaaauuguuaucuuaugauaacugauggcucagcuucagguguuagugaaugcagauuucuuaagauucgagagggccgaauaauaaaagaaauauuuccaacaggaagaguaaaacacacugaggaaugcacaugcggauuugccagcaauaaaaccauagaaugugccuguagagauaacaguuacacagcaaaaagaccuuuugucaaauuaaacguggagacugauacagcagaaauaagauugaugugcacagauacuuauuuggacacccccagaccaaaugauggaagcauaacaggcccuugugaaucuaauggggacaaagggaguggaggcaucaagggaggauuuguucaucaaagaauggaauccaagauuggaaggugguacucucgaacgaugucuaaaacugaaaggauggggaugggacuguaugucaaguaugauggagacccaugggcugacagugaugcccuagcuuuuaguggaguaaugguuucaaugaaagaaccugguugguacuccuuuggcuucgaaauaaaagauaagaaaugcgauguccccuguauugggauagagaugguacaugaugguggaaaagagacuuggcacucagcagcaacagccauuuacuguuuaaugggcucaggacagcuguugugggacacugucacagguguugacauggcucuguaa

SEQ ID NO: 62138 - RNA, 1401 nt, Artificial Sequence; identical to SEQ ID NO: 62137
  derived and/or modified CDS sequence (wt) from neuraminidase__InfluenzaB__AHL93437

SEQ ID NO: 62139 - RNA, 1401 nt, Artificial Sequence
  derived and/or modified CDS sequence (wt) from neuraminidase__InfluenzaB__AHL93448
augcuaccuucaacuauacaaacguuaacccuauuucucacaucagggggaguauuauuaucacuauaugugucagcuucauuaucauacuuacuauauucggauauauugcuaaaauuuucaccaacagaaauaacugcaccaacaaugccauuggauugugcaaacgcaucaaauguucaggcugugaaccguucugcaacaaaaggggugacacuucuucucccagaaccggaguggacauacccgcguuuaucuugcccgggcucaaccuuucagaaagcacuccuaauuagcccucauagauucggagaaaccaaaggaaacucagcucccuugauaauaagggaaccuuuuauugcuuguggaccaaaugaaugcaaacacuuugcucuaacccauuaugcagcccaaccagggggauacuacaauggaacaagaggagacagaaacaagcugaggcaucuaauuucagucaaauugggcaaaaucccaacaguagaaaacuccaucuuccacauggcagcauggagcggguccgcgugccaugaugguaaagaauggacauauaucggaguugauggcccugacaauaaugcauugcucaaaguaaaauauggagaagcauauacugacacauaccauuccuaugcaaacaaaauccuaagaacacaagaaagugccugcaauugcaucgggggaaauuguuaucuuaugauaacugauggcucagcuucagguguuagugaaugcagauuucuuaagauucgagagggccgaauaauaaaagaaauauuuccaacaggaagaguaaaacacacugaggaaugcacaugcggauuugccagcaauaaaaccauagaaugugccuguagagauaacaguuacacagcaaaaagaccuuuugucaaauuaaacguggagacugauacagcagaaauaagauugaugugcacagauacuuauuuggacacccccagaccaaaugauggaagcauaacaggcccuugugaaucuaauggggacaaagggaguggaggcaucaagggaggauuuguucaucaaagaauggaauccaagauuggaaggugguacucucgaacgaugucuaaaacugaaaggauggggauggaacuguaugucaaguaugauggagacccaugggcugacagugaugcccuagcuuuuaguggaguaaugguuucaaugaaagaaccugguugguacuccuuuggcuucgaaauaaaagauaagaaaugcgauguccccuguauugggauagagaugguacaugaugguggaaaagagacuuggcacucagcagcaacagccauuuacuguuuaaugggcucaggacagcugcugugggacacugucacagguguuaacauggcucuguaa

SEQ ID NO: 62140 - RNA, 1404 nt, Artificial Sequence
  derived and/or modified CDS sequence (wt) from neuraminidase__InfluenzaB__AHL93459
augcuaccuucaacuauacaaacguuaacccuauuucucacaucagggggaguauuacuaucacuauaugugucagcuucauuaucauacuuacuauauucggauauauugcuaaaauucucaccaacagaaauaacugcaccaacaaugccauuggauugugcaaacgcaucaaauguucaggcugugaaccguucugcaacaaaaggggugacacuucuucuucucccagaaccggaguggacauacccgcguuuaucuugcccgggcucaaccuuucagaaagcacuccuaauuagcccucauagauucggagaaaccaaaggaaacucagcucccuugauaauaagggaaccuuuuauugcuuguggaccaaaugaaugcaaacacuuugcucuaacccauuaugcagcccaaccagggggauacuacaauggaacaagaggagacagaaacaagcugaggcaucuaauuucagucaaauugggcaaaaucccaacaguagaaaacuccauuuuccacauggcagcauggagcggguccgcgugccaugaugguaaggaauggacauauaucggaguugauggcccugacaauaaugcauugcucaaaguaaaauauggagaagcauauacugacacauaccauuccuaugcaaacaaaauccuaagaacacaagaaagugccugcaauugcaucgggggaaauuguuaucuuaugauaacugauggcucagcuucagguguuagugaaugcagauuucuuaagauucgagagggccgaauaauaaaagaaauauuuccaacaggaagaguaaaacacacugaggaaugcacaugcggauuugccagcaauaaaaccauagaaugugccuguagagauaacaguuacacagcaaaaagaccuuuugucaaauuaaacguggagacugauacagcagaaauaagauugaugugcacagauacuuauuuggacacccccagaccaaacgauggaagcauaacaggcccuugugaaucuaauggggacaaagggaguggaggcaucaagggaggauuuguucaucaaagaauggaauccaagauuggaaggugguacucucgaacgaugucuaaaacugaaaggauggggaugggacuguaugucaaguaugauggagacccaugggcugacagugaugcccuagcuuuuaguggaguaaugguuucaaugaaagaaccugguugguacuccuuuggcuucgaaauaaaagauaagaaaugcgauguccccuguauugggauagagaugguacaugaugguggaaaagagacuuggcacucagcagcaacagccauuuacuguuuaaugggcucaggacagcugcugugggacacugucacagguguugacauggcucuguaa

SEQ ID NO: 62141 - RNA, 1401 nt, Artificial Sequence
  derived and/or modified CDS sequence (wt) from neuraminidase__InfluenzaB__AHL93470
augcuaccuucaacuauacaaacguuaacccuauuucucacaucagggggaguauuauuaucacuauaugugucagcuucauuaucauacuuacuauauucggauauauugcuaaaauucucaccaacagaaauaacugcaccaacaaugccauuggauugugcaaacgcaucaaauguucaggcugugaaccguucugcaacaaaaggggugacacuucuucucccagaaccggaguggacauacccgcguuuaucuugcccgggcucaaccuuucagaaagcacuccuaauuagcccucauagauucggagaaaccaaaggaaacucagcucccuugauaauaagggaaccuuuuauugcuuguggaccaaaugaaugcaaacacuuugcucuaacccauuaugcagcccaaccagggggauacuacaauggaacaagaggagacagaaacaagcugaggcaucuaauuucagucaaauugggcaaaaucccaacaguagaaaacuccauuuuccacauggcagcauggagcggguccgcgugccaugaugguaaagaauggacauauaucggaguugauggcccugacaauaaugcauugcucaaaguaaaauauggagaagcauauacugacacauaccauuccuaugcaaacaaaauccuaagaacacaagaaagugccugcaauugcaucgggggaaauuguuaucuuaugauaacugauggcucagcuucagguguuagugaaugcagauuucuuaagauucgagagggccgaauaauaaaagaaauauuuccaacaggaagaguaaaacacacugaggaaugcacaugcggauuugccagcaauaaaaccauagaaugugccuguagagauaacaguuacacagcaaaaagaccuuuugucaaauuaaacguggagacugauacagcagaaauaagauugaugugcacagauacuuauuuggacacccccagaccaaaugauggaagcauaacaggcccuugugaaucuaauggggacaaagggaguggaggcaucaagggaggauuuguucaucaaagaauggaauccaagauuggaaggugguacucucgaacaaugucuaaaacugaaaggauggggaugggacuguaugucaaguaugauggagacccaugggcugacagugaugcccuaacuuuuaguggaguaaugguuucaaugaaagaaccugguugguacuccuuuggcuucgaaauaaaagauaagaaaugcgauguccccuguauugggauagagaugguacaugaugguggaaaagagacuuggcacucagcagcaacagccauuuacuguuuaaugggcucaggacagcugcugugggacacugucacagguguugacauggcucuguaa

SEQ ID NO: 62142 - RNA, 1401 nt, Artificial Sequence
  derived and/or modified CDS sequence (wt) from neuraminidase__InfluenzaB__AHL93481
augcuaccuucaacuauacaaacguuaacccuauuucucacaucagggggaguauuauuaucacuauaugugucagcuucauuaucauacuuacuauauucggauauauugcuaaaauucucaccaacagaaacaacugcaccaacaaugucauuggauugugcaaacgcaucaaauguucaggcugugaaccguucugcaacaaaaggggugacauuucuucucccagaaccggaguggacauacccgcguuuaucuugcccgggcucaaccuuucagaaagcacuccuaauuagcccucauagauucggagaaaccaaaggaaacucagcucccuugauaauaagggaaccuuuuauugcuuguggaccaaaugaaugcaaacacuuugcucuaacccauuaugcagcccaaccagggggauacuacaauggaacaagaggagacagaaacaagcugaggcaucuaauuucagucaaauugggcaaaaucccaacaguagaaaacuccauuuuccacauggcagcauggagcggguccgcgugccaugaugguaaagaauggacauauaucggaguugauggcccugacaaugaugcauugcucaaaguaaaauauggagaagcauauacugacacauaccauuccuaugcaaacaaaauccuaagaacacaagaaagugccugcaauugcaucgggggaaauuguuaucuuaugauaacugauggcucagcuucagguguuagugaaugcagauuucuuaagauucgagagggccgaauaauaaaagaaauauuuccaacaggaagaguaaaacacacugaggaaugcacaugcggauuugccagcaauaaaaccauagaaugugccuguagagauaacaguuacacagcaaaaagaccuuuugucaaauuaaacguggagacugauacagcagaaauaagauugaugugcacagauacuuauuuggacacccccagaccagaugauggaagcauaacaggcccuugugaaucuaauggggacaaagggaguggaggcaucaagggaggauuuguucaucaaagaauggaauccaagauuggaaggugguacucucgaacgaugucuaagacugaaaggauggggaugggacuguaugucaaguaugauggagacccaugggcugacagugaugcccuagcuuuuaguggaguaaugguuucaaugaaagaaccugguugguacuccuuuggcuucgaaauaaaagauaagaaaugcgauguccccuguauugggauagagaugguacaugaugguggaaaagagacuuggcacucagcagcaacagccauuuacuguuuaaugggcucaggacagcugcugugggacacugucacagguguugacauggcucuguaa

SEQ ID NO: 62143 - RNA, 1401 nt, Artificial Sequence
  derived and/or modified CDS sequence (wt) from neuraminidase__InfluenzaB__AHL93492
augcuaccuucaacuauacaaauguuaacccuauuucucacaucagggggaguacuauuaucacuauaugugucagcuucauuaucauacuuacuauauucggauauauugcuaaaauucucaccaacagaaauaacugcaccaacaaugccauuggauugugcaaacgcaucaaauguucaugcugugaaccguucugcaacaaaaggggugacauuucuucucccagaaccggaguggacauacccgcguuuaucuugcccgggcucaaccuuucagaaagcacuccuaauuagcccucauagauucggagaaaccaaaggaaacucagcucccuugauaauaagggaaccuuuuauugcuuguggaccaaaugaaugcaaacacuuugcucuaacccauuaugcagcccaaccagggggauacuacaauggaacaagaggagacagaaacaagcugaggcaucuaauuucagucaaauugggcaaaaucccaacaguagaaaacuccauuuuccacauggcagcauggagcggguccgcaugccaugaugguaaggaauggacauauaucggaguugaugguccugacaauaaugcauugcucaaaauaaaauauggagaagcauauacugacacauaucauuccuaugcaaacaacauccuaagaacacaagaaagugccugcaauugcaucgggggaaauuguuaucuuaugauaacugauggcucagcuucagguguuagugaaugcagauuucuuaagauucgagagggccgaauaauaaaagaaauauuuccaacaggaagaguaaaacauacugaggagugcacaugcgguuuugccagcaauaaaaccauagaaugugccuguagagauaacaguuacacagcaaaaagacccuuugucaaauuaaacguggaaacugauacagcagaaauaagauugaugugcacagauacuuauuuggacacccccagaccagaugauggaagcauaacaggcccuugugaaucuaauggggacaaagggaguggaggcaucaagggaggauuuguucaucaaagaauggcauccaagauugggaggugguacucucgaacgaugucuaaaacugaaaggaaggggaugggacuguaugucaaguaugauggagacccauggacugacagugaugcccuugcuuuuaggggaguaaugguuucaaugaaagaaccugguugguacuccuuuggcuucgaaauaaaagauaagaaaugcgauguccccuguauugggauagagaugguacaugaugguggaaaagagacuuggcacucagcagcaacagccauuuacuguuuaaugggcucaggacagcugcugugggacacagucacaggugucgacauggcucuauaa

SEQ ID NO: 62144 - RNA, 1401 nt, Artificial Sequence
  derived and/or modified CDS sequence (wt) from neuraminidase__InfluenzaB__AHL93503
augcuaccuucaacuauacaaacguuaaccuuauuucucacaucagggggaguguuauuaucacuauaugugucagcuucauugucauacuuacuauauucggauauauugcuaaaauuuucacgaacagaaauaacugcaccaauaaugccauuggauugugcaaacgcaucaaauguucaggcugugaaccguucugcaacaaaaggggugacacuucuucucccagaaccggaguggacguacccucguuuaucuugcccgggcucaaccuuucagaaagcacuccuaauuagcccccauagauucggagaaaccaaaggaaacucagcucccuugauaauaagggaaccuuuuauugcuuguggaccaaaggaaugcaaacauuuugcucuaacccauuacgcagcucaaccagggggauacuacaauggaacaagagaagacagaaacaagcugaggcaucuaauuucagucaaauugggcaaaaucccaacaguagaaaacucuauuuuccacauggcagcuuggagcggguccgcaugccaugaugguagagaauggacuuauauuggaguugauggccccgacaguaaugcauugcucaaaauaaaauauggagaagcauauacugacacauaccauuccuaugcaaaaaacauccuaaggacacaagaaagugcaugcaauugcaucgggggugauuguuaucuuaugauaacugauggcccagcuucagggauuagugaaugcagauuccuuaagauucgagagggccgaauaauaaaagaaauauuuccaacaggaagaguaaaacauacugaggaaugcacaugcggauuugccagcaacaaaaccauagaaugugccuguagagauaacaguuacacagcaaaaagacccuuugucaaauuaaauguggagacugauacagcggaaauaagacugaugugcacagagacuuauuuggacacccccagaccaaaugauggaagcauaacagggccuugcgaaucuaauggggacaaagggaguggaggcaucaagggaggauuuguucaucaaagaauggcguccaagauuggaaggugguacucucgaacgaugucuaaaacuaaaagaaugggaaugggacuguauguaaaguaugauggagacccauggacugacagugaagcccuugcucuuaguggaguaaugguuucaauggaagaaccugguugguauuccuuuggcuucgaaauaaaagauaagaaaugugauguccccuguauugggauagaaaugguacaugauggugggaaaacgacuuggcacucagcagcaacagccauuuacuguuuaaugggcucaggacaacugcugugggacacugucacagguguuaauaugacucuguaa

SEQ ID NO: 62145 - RNA, 1401 nt, Artificial Sequence
  derived and/or modified CDS sequence (wt) from neuraminidase__InfluenzaB__AHL93514
augcuaccuucaacuauacaaacguuaacccuauuucucacaucagggggaguauuauuaucacuauaugugucagcuucauuaucauacuuacuauauucggauauauugcuaaaauucucaccaacagaaauaacugcaccaacaaugccauuggauugugcaaacgcaucaaauguccaggcugugaaccguucugcaacaaaaggggugacacuucuucucccagaaccggaguggacauacccgcguuuaucuugcccgggcucaaccuuucagaaagcacuccuaauuagcccucauagauucggagaaaccaaaggaaacucagcucccuugauaauaagggaaccuuuuauugcuuguggaccaaaugaaugcaaacacuuugcucuaacccauuaugcagcccaaccagggggauacuacaaugggacaagaggagacagaaacaagcugaggcaucuaauuucaaucaaauugggaaaaaucccaacaguagaaaacuccauuuuccacauggcagcauggagcggguccgcgugccaugaugguaaggaauggacauauaucggaguugauggcccugacaauaaugcauugcucaaaguaaaauauggagaagcauauacugacacauaccauuccuaugcaaacaaaauccuaagaacacaagaaagugccugcaauugcaucgggggaaauuguuaucuuaugauaacugauggcucagcuucagguguuagugaaugcagauuucuuaagauucgagagggccgaauaauaaaagaaauauuuccaacaggaagaguaaaacacacugaggaaugcacaugcggauuugccagcaauaaaaccauagaaugugccuguagagauaacaguuacacagcaaaaagaccuuuugucaaauugaacguggagacugauacagcagaaauaagauugaugugcacagauacuuauuuggacacccccagaccagaugauggaagcauaacagguucuugugaaucuaauggggacaaagggaguggaggcaucaagggaggauuuguucaucaaagaauggaauccaagaucggaaggugguacucucgaacgaugucuaaaacugaaaggaugggaaugggacuguaugucaaguaugauggggacccaugggcugacagugaugcccuaacuuuuaguggaguaaugguuucaaugaaagaaccugguugguacuccuuuggcuucgaaauaaaagauaagaaaugcgauguccccuguauugggauagagaugguacaugaugguggaaaagagacuuggcacucagcagcaacagccauuuacuguuuaaugggcucaggacagcugcugugggacacugucacagguguugacauggcucuguaa

SEQ ID NO: 62146 - RNA, 1401 nt, Artificial Sequence
  derived and/or modified CDS sequence (wt) from neuraminidase__InfluenzaB__AHL93525
augcuaccuucaacuauacaaacguuaaccuuauuucucacaucagggggaguguuauuaucacuauaugugucagcuucauugucauacuuacuauauucggauauauugcuaaaauuuucacgaacagaaauaacugcaccaauaaugccauuggauugugcaaacgcaucaaauguucaggcugugaaccguucugcaacaaaaggggugacacuucuucucccagaaccggaguggacguacccucguuuaucuugcccgggcucaaccuuucagaaagcacuccuaauuagcccccauagauucggagaaaccaaaggaaacucagcucccuugauaauaagggaaccuuuuauugcuuguggaccaaaggaaugcaaacauuuugcucuaacccauuaugcagcucaaccagggggauacuacaauggaacaagagaagacagaaacaagcugaggcaucuaauuucagucaaauugggcaaaaucccaacaguagaaaacucuauuuuccacauggcagcuuggagcggguccgcaugccaugaugguagagaauggacuuauaucggaguugauggcccagacaguaaugcauugcucaaaauaaaauauggagaagcauauacugacacauaccauuccuaugcaaaaaacauccuaaggacacaagaaagugccugcaauugcaucgggggagauuguuaucuuaugauaacugauggcccagcuucagggauuagugaaugcagauuccuuaagauucgagagggccgaauaauaaaagaaauauuuccaacaggaagaguaaaacauacugaggaaugcacaugcggauuugccagcaacaaaaccauagaaugugccuguagagauaacaguuacacagcaaaaagacccuuugucaaauuaaauguggagacugauacagcggaaauaagauugaugugcacagagacuuauuuggacacccccagaccaaaugauggaagcauaacagggccuugcgaaucuaauggggauaaagggaguggaggcaucaagggaggauuuguucaccaaagaauggcauccaagauuggaaggugguacucucggacgaugucuaaaacuaaaagaauggggaugggacuguauguaaaguaugauggagacccauggacugacagugaagcccuugcucuuaguggaguaaugguuucaauggaagaaccugguugguauuccuuuggcuucgaaauaaaagauaagaaaugugauguccccuguauugggauagaaaugguacaugauggugggaaaacgacuuggcacucagcagcaacagccauuuacuguuuaaugggcucaggacaacugcugugggacacugucacagguguuaauaugacucuguaa

SEQ ID NO: 62147 - RNA, 1401 nt, Artificial Sequence
  derived and/or modified CDS sequence (wt) from neuraminidase__InfluenzaB__AHL93536
augcuaccuucaacuauacaaauguuaacccuauuucucacaucagggggaguacuauuaucacuauaugugucagcuucauuaucauacuuacuauauucggauauauugcuaaaauucucaccaacagaaauaacugcaccaacaaugccauuggauugugcaaacgcaucaaauguucaugcugugaaccguucugcaacaaaaggggugacauuucuucucccagaaccggaguggacauacccgcguuuaucuugcccgggcucaaccuuucagaaagcacuccuaauuagcccucauagauucggagaaaccaaaggaaacucagcucccuugauaauaagggaaccuuuuauugcuuguggaccaaaugaaugcaaacacuuugcucuaacccauuaugcagcccaaccagggggauacuacaauggaacaagaggagacagaaacaagcugaggcaucuaauuucagucaaauugggcaaaaucccaacaguagaaaacuccauuuuccacauggcagcauggagcggauccgcaugccaugaugguaaggaauggacauauaucggaguugaugguccugacaauaaugcauugcucaaaauaaaauauggagaagcauauacugacacauaucauuccuaugcaaacaacauccuaagaacacaagaaagugccugcaauugcaucgggggaaauuguuaucuuaugauaacugauggcucagcuucagguguuagugaaugcagauuucuuaagauucgagagggccgaauaauaaaagaaauauuuccaacaggaagaguaaaacauacugaggagugcacaugcggauuugccagcaauaaaaccauagaaugugccuguagagauaacaguuacacagcaaaaagacccuuugucaaauuaaacguggaaacugauacagcagaaauaagauugaugugcacagauacuuauuuggacacccccagaccagaugauggaagcauaacaggcccuugugaaucuaauggggacaaagggaguggaggcaucaagggaggauuuguucaucaaagaauggcauccaagauugggaggugguacucucgaacgaugucuaaaacugaaaggaaggggaugggacuguaugucaaguaugauggagacccauggacugacagugaugcccuugcuuuuaggggaguaaugguuucaaugaaagaaccugguugguacuccuuuggcuucgaaauaaaagauaagaaaugcgauguccccuguauugggauagagaugguacaugaugguggaaaagagacuuggcacucagcagcaacagccauuuacuguuuaaugggcucaggacagcugcugugggacacagucacaggugucgacauggcucuauaa

SEQ ID NO: 62148 - RNA, 1401 nt, Artificial Sequence
  derived and/or modified CDS sequence (wt) from neuraminidase__InfluenzaB__AHL93558
augcuaccuucaacuauacaaacguuaacccuauuucucacaucagggggaguauuauuaucacuauaugugucagcuucauuaucauacuuacuauauucggauauauugcuaaaauucucaccaacagaaauaacugcaccagcaaugccauuggauugugcaaacgcaucaaauguucaggcugugaaccguucugcaacaaaaggggugacacuucuucucccagaaccggaguggacauacccgcguuuaucuugcccaggcucaaccuuucagaaagcacuccuaauuagcccucauagauucggagaaaccaaaggaaacucagcucccuugauaauaagggaaccuuuuauugcuuguggaccaaaugaaugcaaacacuuugcucuaacccauuaugcagcccaaccagggggauacuacaauggaacaagaggagacagaaacaagcugaggcaucuaauuucagucaaauugggcaaaaucccaacaguagaaaacuccauuuuccacauggcagcauggagcggguccgcgugccaugaugguaaggaauggacauauaucggaguugaugguccugacaauaaugcauugcucaaagugaaauauggagaagcauauacugacacauaccauuccuaugcaaacaaaauccuaagaacacaagaaagugccugcaauugcaucgggggaaauuguuaucuuaugauaacugauggcucagcuucagguguuagugaaugcagauuucuuaagauucgagagggccgaauaauaaaagaaauauuuccaacaggaagaguaaaacacacugaggaaugcacaugcggauuugccagcaauaaaaccauagaaugugccuguagagauaacaguuacacagcaaaaagaccuuuugucaaauuaaacguggagacugauacagcagaaauaagauugaugugcacagauacuuauuuggacacccccagaccaaaugauggaagcauaacaggcccuugugaaucugauggggacaaagggaguggaggcaucaagggaggauuuauucaucaaagaauggaauccaagauuggaaggugguacucucgaacgaugucuaaaacugaaaggauggggaugggacuguaugucaaguaugauggagacccaugggcugacagugaugcccuagcuuuuaguggaguaaugguuucaaugaaagaaccugguugguacuccuuuggcuucgaaauaaaagauaagaaaugcgauguccccuguauugggauagagaugguacaugaugguggaaaagagacuuggcacucagcagcaacagccauuuacuguuuaaugggcucaggacagcugcugugggacacugucacagguguugacauggcucuguaa

SEQ ID NO: 62149 - RNA, 1401 nt, Artificial Sequence
  derived and/or modified CDS sequence (wt) from neuraminidase__InfluenzaB__AHL93569
augcuaccuucaacuauacaaacguuaacccuauuucucacaucagggggaguauuauuaucacuauaugugucagcuucauuaucauacuuacuauauucggauauauugcuaaaauucucaccaacagaaauaacugcaccaacaaugccauuggauugugcaaacgcaucaaauguucaggcugugaaccguucugcaacaaaaggggugacacuucuucucccagaaccggaguggacauacccgcguuuaucuugcccgggcucaaccuuucagaaagcacuccuaauuagcccucauagauucggagaaaccaaaggaaacucagcucccuugauaauaagggaaccuuuuauugcuuguggaccaaaugaaugcaaacacuuugcucuaacccauuaugcagcccaaccagggggauacuacaauggaacaagaggagacagaaacaagcugaggcaucuaauuucagucaaauugggcaaaaucccaacaguagaaaacuccauuuuccacauggcagcauggagcggguccgcgugccaugaugguaaggaauggacauauaucggaguugauggcccugacaauaaugcauugcucaaaguaaaauauggagaagcauauacugacacauaccauuccuaugcaaacaaaauccuaagaacacaagaaagugccugcaauugcaucgggggaaauuguuaucuuaugauaacugauggcucagcuucagguguuagugaaugcagauuucuuaagauucgagagggccgaauaauaaaagaaauauuuccaacaggaagaguaaaacacacugaggaaugcacaugcggauuugccagcaauaaaaccauagaaugugccuguagagauaacaguuacacagcaaaaagaccuuuugucaaauuaaacguggagacugauacagcagaaauaagauugaugugcacagauacuuauuuggacacccccagaccaaaugauggaagcauaacaggcccuugugaaucugauggggacaaggggaguggaggcaucaagggaggauuuguucaucaaagaauggaauccaagauuggaaggugguacucucgaacgaugucuaaaacugaaaggauggggaugggacuguaugucaaguaugauggagacccaugggcugacagugaugcccuaacuuuuaguggaguaaugguuucaaugaaagaaccagguugguacuccuuuggcuucgaaauaaaagauaagaaaugcgauguccccuguauugggauagagaugguacaugaugguggaaaagagacuuggcacucagcagcaacagccauuuacuguuuaaugggcucaggacagcugcugugggacacugucacagguguugacauggcucuguaa

SEQ ID NO: 62150 - RNA, 1401 nt, Artificial Sequence
  derived and/or modified CDS sequence (wt) from neuraminidase__InfluenzaB__AHL93580
augcuaccuucaacuauacaaauguuaacccuauuucucacaucagggggaguacuauuaucacuauaugugucagcuucauuaucauacuuacuauauucggauauauugcuaaaauucucaccaacagaaauaacugcaccaacaaugccauuggauugugcaaacgcaucaaauguucaugcugugaaccguucugcaacaaaaggggugacauuucuucucccagaaccggaguggacauacccgcguuuaucuugcccgggcucaaccuuucagaaagcacuccuaauuagcccucauagauucggagaaaccaaaggaaacucagcucccuugauaauaagggaaccuuuuauugcuuguggaccaaaugaaugcaaacacuuugcucuaacccauuaugcagcccaaccagggggauacuacaauggaacaagaggagacagaaacaagcugaggcaucuaauuucagucaaauugggcaaaaucccaacaguagaaaacuccauuuuccacauggcagcauggagcggguccgcaugccaugaugguaaggaauggacauauaucggaguugaugguccugacaauaaugcauugcucaaaauaaaauauggagaagcauauacugacacauaucauuccuaugcaaacaacauccuaagaacacaagaaagugccugcaauugcaucgggggaaauuguuaucuuaugauaacugauggcucagcuucagguguuagugaaugcagauuucuuaagauucgagagggccgaauaauaaaagaaauauuuccaacaggaagaguaaaacauacugaggagugcacaugcggauuugccagcaauaaaaccauagaaugugccuguagagauaacaguuacacagcaaaaagacccuuugucaaauuaaacguggaaacugauacagcagaaauaagauugaugugcacagauacuuauuuggacacccccagaccagaugauggaagcauaacaggcccuugugaaucuaauggggacaaagggaguggaggcaucaagggaggauuuguucaucaaagaauggcauccaagauugggaggugguauucucgaacgaugucuaaaacugaaaggaaggggaugggacuguaugucaaguaugauggagacccauggacugacagugaugcccuugcuuuuaggggaguaaugguuucaaugaaagaaccugguugguacuccuuuggcuucgaaauaaaagauaagaaaugcgauguccccuguauugggauagagaugguacaugaugguggaaaagagacuuggcacucagcagcaacagccauuuacuguuuaaugggcucaggacagcugcugugggacacagucacaggugucgacauggcucuauaa

SEQ ID NO: 62151 - RNA, 1401 nt, Artificial Sequence
  derived and/or modified CDS sequence (wt) from neuraminidase__InfluenzaB__AHL93591
augcuaccuucaacuauacaaauguuaacccuauuucucacaucagggggaguacuauuaucacuauaugugucagcuucauuaucauacuuacuauauucggauauauugcuaaaauucucaccaacagaaauaacugcaccaacaaugccauuggauugugcaaacgcaucaaauguucaugcugugaaccguucugcaacaaaaggggugacauuucuucucccagaaccggaguggacauacccgcguuuaucuugcccgggcucaaccuuucagaaagcacuccuaauuagcccucauagauucggagaaaccaaaggaaacucagcucccuugauaauaagggaaccuuuuauugcuuguggaccaaaugaaugcaaacacuuugcucuaacccauuaugcagcccaaccagggggauacuacaauggaacaagaggagacagaaacaagcugaggcaucuaauuucagucaaauugggcaaaaucccaacaguagaaaacuccauuuuccacauggcagcauggagcggguccgcaugccaugaugguaaggaauggacauauaucggaguugaugguccugacaauaaugcauugcucaaaauaaaauauggagaagcauauacugacacauaucauuccuaugcaaacaacauccuaagaacacaagaaagugccugcaauugcaucgggggaaauuguuaucuuaugauaacugauggcucagcuucagguguuagugaaugcagauuucuuaagauucgagagggccgaauaauaaaagaaauauuuccaacaggaagaguaaaacauacugaggagugcacaugcggauuugccagcaauaaaaccauagaaugugccuguagagauaacaguuacacagcaaaaagacccuuugucaaauuaaacguggaaacugauacagcagaaauaagauugaugugcacagauacuuauuuggacacccccagaccagaugauggaagcauaacaggcccuugugaaucuaauggggacaaagggaguggaggcaucaagggaggauuuguucaucaaagaauggcauccaagauugggaggugguacucucgaacgaugucuaaaacugaaaggaaggggaugggacuguaugucaaguaugauggagacccauggacugacagugaugcccuugcuuuuaggggaguaaugguuucaaugaaagaaccugguugguacuccuuuggcuucgaaauaaaagauaagaaaugcgauguccccuguauugggauagagaugguacaugaugguggaaaagagacuuggcacucagcagcaacagccauuuacuguuuaaugggcucaggacagcugcugugggacacagucacaggugucgacauggcucuauaa
